United States Patent Application Publication US 2011/0183924 A1 - sequence listing, part 203

SEQ ID NO: 481333 - DNA, 420 bp, Homo sapiens
  misc_feature (6)..(6): n is a, c, g, or t
  misc_feature (32)..(32): n is a, c, g, or t
  misc_feature (170)..(170): n is a, c, g, or t
ccattngttttttaaaactcctgccgggaccntaaaaggataattgtgaggtaaatttaggtgttaggaacccaatgcaaatattgccaatgaaggaaggtttttccttcaaaaaatccttaatttgaagttaacttatttgaaaattttattttgggcccatgtgcggntgtcacgcctgtaatcccaggcactttgggagtccgagtggggcggatcacgaggtcaggagttcgagaccagcctggccaacatggtgaaacccgtctctgctaagaatacaaaaattacccaggcgtggtggcgcgtgcctgtaatcccagctacttgggaggcggaggcaggagaatttcttgaacccaggaggaggaggttgcagtgagccgagattgcgccactgcactctcacctgggggacag

SEQ ID NO: 481334 - DNA, 1092 bp, Homo sapiens
  misc_feature (135)..(135): n is a, c, g, or t
  misc_feature (139)..(139): n is a, c, g, or t
  misc_feature (229)..(229): n is a, c, g, or t
  misc_feature (426)..(426): n is a, c, g, or t
  misc_feature (430)..(431): n is a, c, g, or t
  misc_feature (434)..(434): n is a, c, g, or t
  misc_feature (445)..(445): n is a, c, g, or t
  misc_feature (450)..(450): n is a, c, g, or t
  misc_feature (452)..(452): n is a, c, g, or t
  misc_feature (483)..(483): n is a, c, g, or t
  misc_feature (488)..(488): n is a, c, g, or t
  misc_feature (496)..(496): n is a, c, g, or t
  misc_feature (779)..(779): n is a, c, g, or t
  misc_feature (955)..(955): n is a, c, g, or t
  misc_feature (980)..(980): n is a, c, g, or t
  misc_feature (1017)..(1017): n is a, c, g, or t
gtagctgttcagagtacttagtgccgggaatccgtgttcatgtatatagctattcatcgagtagcactggtttaccgggtccttcatcgccatgatccctcatgcgtctgtggccgttctgcagacttctcaganggcngagtggcagccgggcaccctacagaaactcagagggcagagtggcagccaggcccacatgtctctcaagtacctgtcccctcgctctggngattatttcttgcagaatcaccacacgagaccatcccggcagtcatggttttgctttagttttccaagtccgtttcagtcccttccttggtctgaagaaattctgcagtggcgagcagtttcccacttgccaaagatcccttttaaccaacactagcccttgtttttaacacacgctccagcccttcatcagcctgngcannctnaccaaaatgtntaaantnatctcagaggggcccatggattaacgccctnatccnaaggtccntcccatgacataacactccacacccgccccagccaacttcatgggtcactttttctggaaaataatgatctgtacagatcattattttccagaaaataatgatctgtacagacaggacagaatgaaactcctgcgggtctttggcctgaaagttgggaatggttgggggagagaagggcagcagcttattggtggtcttttcaccattggcagaaacagtgagagctgtgtggtgcagaaatccagaaatgaggtgtagggaattttgcctgccttcctgcanacctgagctggctttggaatgaggttaaagtgtcagggacgttgcctgagcccaaatgtgtagtgtggtctgggcaggcagacctttaggttttgctgcttagtcctgaggaagtggccactcttgtggcaggtgtagtatctggggcgagtgttgggggtaaaagcccaccctanagaaagtggaacagcccggagcctnatgtgaaaggaccacgggtgttgtaagctgggacacngaagccaaactggaatcaaacgccgactgtaaattgtatcttataacttattaaataaaacatttgctccgtaaa

SEQ ID NO: 481335 - DNA, 1057 bp, Homo sapiens
  misc_feature (135)..(135): n is a, c, g, or t
  misc_feature (139)..(139): n is a, c, g, or t
  misc_feature (229)..(229): n is a, c, g, or t
  misc_feature (426)..(426): n is a, c, g, or t
  misc_feature (430)..(431): n is a, c, g, or t
  misc_feature (434)..(434): n is a, c, g, or t
  misc_feature (445)..(445): n is a, c, g, or t
  misc_feature (450)..(450): n is a, c, g, or t
  misc_feature (452)..(452): n is a, c, g, or t
  misc_feature (483)..(483): n is a, c, g, or t
  misc_feature (488)..(488): n is a, c, g, or t
  misc_feature (496)..(496): n is a, c, g, or t
  misc_feature (744)..(744): n is a, c, g, or t
  misc_feature (920)..(920): n is a, c, g, or t
  misc_feature (945)..(945): n is a, c, g, or t
  misc_feature (982)..(982): n is a, c, g, or t
gtagctgttcagagtacttagtgccgggaatccgtgttcatgtatatagctattcatcgagtagcactggtttaccgggtccttcatcgccatgatccctcatgcgtctgtggccgttctgcagacttctcaganggcngagtggcagccgggcaccctacagaaactcagagggcagagtggcagccaggcccacatgtctctcaagtacctgtcccctcgctctggngattatttcttgcagaatcaccacacgagaccatcccggcagtcatggttttgctttagttttccaagtccgtttcagtcccttccttggtctgaagaaattctgcagtggcgagcagtttcccacttgccaaagatcccttttaaccaacactagcccttgtttttaacacacgctccagcccttcatcagcctgngcannctnaccaaaatgtntaaantnatctcagaggggcccatggattaacgccctnatccnaaggtccntcccatgacataacactccacacccgccccagccaacttcatgggtcactttttctgaaaataatgatctgtacagacaggacagaatgaaactcctgcgggtctttggcctgaaagttgggaatggttgggggagagaagggcagcagcttattggtggtcttttcaccattggcagaaacagtgagagctgtgtggtgcagaaatccagaaatgaggtgtagggaattttgcctgccttcctgcanacctgagctggctttggaatgaggttaaagtgtcagggacgttgcctgagcccaaatgtgtagtgtggtctgggcaggcagacctttaggttttgctgcttagtcctgaggaagtggccactcttgtggcaggtgtagtatctggggcgagtgttgggggtaaaagcccaccctanagaaagtggaacagcccggagcctnatgtgaaaggaccacgggtgttgtaagctgggacacngaagccaaactggaatcaaacgccgactgtaaattgtatcttataacttattaaataaaacatttgctccgtaaa

SEQ ID NO: 481336 - DNA, 260 bp, Homo sapiens
  misc_feature (159)..(159): n is a, c, g, or t
acaagtatcaaaaaggagtgtgcgtgtgtgtggaataacacccagcgcttgtacactgcccataaggtcgcaatggacttttaaaaccaacaaaagccgaaacggtggcccagaaggctgctcctattgttatccccatgctttctaagttcaagtcgnaatgactagctttggtcacactatttttagtacacagctaaacaaatcacgtggcgcccttctggcatgggatgacatagcgataatccagaaacaggtac

SEQ ID NO: 481337 - DNA, 419 bp, Homo sapiens
  misc_feature (131)..(131): n is a, c, g, or t
  misc_feature (150)..(150): n is a, c, g, or t
  misc_feature (161)..(161): n is a, c, g, or t
  misc_feature (170)..(170): n is a, c, g, or t
  misc_feature (182)..(182): n is a, c, g, or t
  misc_feature (215)..(215): n is a, c, g, or t
  misc_feature (378)..(378): n is a, c, g, or t
ccaagagcaaggaagacctggtgtcccagggcttcactgaattcacaattgaggatttccacaacacgttcatggacctgattgagcaggtggagaagcagacctctgtcgccgaccatgcctggcctccnttcaatgaccagagcaccntccgactaccnttgtggtcntaccgtgcggcntgctcaccctcgggcctacctgcagcgcgaganaatgttccttcgagcacttcatccgagggtggacggactgtcaaggaagttctgccagcaggaaggtggagccatgtgcaaggagaagcgaccacatccacatcattgcgctggcccaggcctcagcgtgtccatccaggtggagtacatggaccgcggcganggcgggcaccaccaatccgtacatcttccctgagggctccg

SEQ ID NO: 481338 - DNA, 759 bp, Homo sapiens
aatgaaagtagggtctcaagtaacccaagggtggccgggtacggtggctcacgcctgtgatcctagcagtttgggaggcagaggtgggcagattgcctgagctcaggagtttgagaccagcctgggcaacatggtgaaaccctgtctctactaaaatacaaaagaaattagccaggtgtggcggcatacccctgtggtcacggctacttgggaggcagaggcaggagaattgcttgaactcgggaggtggaggttgcagtgagctgggattgcaccactgtactccagcactctagcctgggcgacagagtgagactctgtctctacaaaaaaaaaaaaaaaaaaagttaccccaggggaggggagctacccctctagttgcgggccagccgggaatacctggctcccttggacgttggattaccatggggcgcgaggaggagcgttccattaggaacttaccgaaaatgtggattagccaagcattaaaccaacaagtggactcgggtcgcggggcatactcctatcaaacctctacaccattctggctatattgtggccagcagcgagctgccggcctatttctactaccagtgctccctcccactgtccccaccggcctccaaggattacccttatttctctccctggtgctcgggcatccccagtggttcttgtcgcccatgcgcagctggttttcacacacgctgttggcccaccggcaccccaccgttcccccgcaacccaggcgggggcgcg

SEQ ID NO: 481339 - DNA, 242 bp, Homo sapiens
ctatggatggccagatgggagaatcacttgagaggcacctgggcacataaggagactccatctctacaaaaaatttaaaacttagctggacatggtggcacatggcctgtacgtccaatgccactccaggaggtagcaggtggttgggaggatcccattgaagccaaagaagctccaaggttgcatgtgcagcttgtgactcacacacacttgcactaccatgcctggtgtgacagcagacc

SEQ ID NO: 481340 - DNA, 334 bp, Homo sapiens
gtggtgttggggcctccagccagggccctctaggggaaccaagcctctgctctcacctgtgggttcttgcccatcaggtaaattgtattggggaactcaaatatacgggcacttacatgtgtgggtccgaactcaagggatcttttatccaagctgcaaagcctggctttgatttgaaattttgtaaaaatttcagggcacccagggttctgattctgacccagcagggggccaagggagcttatgggaggttttagggaatttgagtttaatgagggggagaaaacccttgacccccacaagcgttccacggggagttatctaacactttgtg

SEQ ID NO: 481341 - DNA, 417 bp, Homo sapiens
tgcgacggagtctcgctctgtcacccaggctggagtgcagtagtgtgatctcagctcactgcagcctccatctcctgggttcaagcaattctcctgtctcagcctccagcatagccgggactataggcatgcaccaccgtggccggctaacttttatatttttagtagagagggggtttcgccatgttggccaggctggtctggaactcctgacctcaagtgatctgcccgccttgacctcccagagtgctgggattacaggtgtgagccaccgcgcccagccttccttcatctttactaccaggcacttttctaagtgccttcactttcacaactgccctatggagcaggttaattagtcgacgcggccgcgaatttagtggttgttgtcaacccgggaattccggaccgtgacct

SEQ ID NO: 481342 - DNA, 701 bp, Homo sapiens
taattttttgtatctttagcatagacggggttttgctatgctggccaggctggtcttgaactcccgacttcgtccgatctgcccgcctcaacctcccaaagtgctgccaccacaggtgtgagccaccgcgctcagtctgtaaggtgcattttaccaaatgttcagagaactgaagatcaacctacaactgcctcacaacttttcacccaaacgtcacatattcagcgctagcttacttaccctaaccacgaacggactatttacccttcccacccaacgatacacccctgctatgcttctagacaccgatcgctcaattaggacctcattctactagctcagccctccgacccctgtgacaccccccgcccctcatcgtagcgccagtcacgcatcacatacacctacaccccccgctgccctcctaccacgcctacaccgcctcactatcacccccccattctcttccccttcctccttaccttcccaccacctccctctcctcctctccttctcccactacttccgcactcctacctcctcctcatcactctagattcctctcttcctcccttccccctacccccgcccaccactttcctccctaccagtctcatctctcctctccctccccctcctctctcccccgcaccctatctctctctcctctccctctcttaccactctacctcccttccctc

SEQ ID NO: 481343 - DNA, 148 bp, Homo sapiens
gactctagagatccggtcagcatgaagctaagcagtcctttctctatctctcccagtctagctgtggatcatatactataacagacggaactcaacacacttcttcgacccgggaggaggagacccattctataacaacaactattct

SEQ ID NO: 481344 - DNA, 370 bp, Homo sapiens
agccttcctttttttgccccccccttttatttggatttaaatggtttgggccccccaagacccaatgttaaagtaaagacgccgggaaaatgaattgcttgggattcctttcttcatgtatatccagccccgccgtaaacccaaaacccctggatttaacttttttttagggtttttgcctttgggattttttttttttgaaccctgcccccccggcctgggctgtaaaaatagtttcccggggaataactttggatgagggccagctttgtttaatgttttttgaaattttcctggcccatcccagcctaattgtttagaacccgggtttttaattcctgtaagggggataaaagttttttggatggga

SEQ ID NO: 481345 - DNA, 127 bp, Homo sapiens
acgccgttgtcggcgttcacatccaggcgcagggccatttcccggcgcagcacttggccacccagggtggcgccttccagcacatacagggcgccgagacacgcagccggcgtgtctaatacgggga

SEQ ID NO: 481346 - DNA, 647 bp, Homo sapiens
gatatgagatattcatccgattataagctatcctcaaaaactatagatgcaatgaacacagtaataacccccaattgaagacgtcatagcttttctccggcagccagtatgtgtcacgccgcacaattatatctcgggcataagttatttcgaatgtaatactttgtaggctaatgatattattaacctcgtaataaatagcatcaccgtctaataacaacaacgtacatagagaacagctcctagaggtgctggatctcaatatcatttcctctggctctgaacagtacatcgtacattgtcagtcacattcccagcacaagttagaccatgtccctctcaggtttcctagcccaggtcatacatatattctgctgctttgtgacatccctgaaatgtctttaaagaatgaacggctgtcaattttaaggaatgacgaaagttatccccaaggaatgtcaggagtgttgagcatcagagaatccaatgttcccattaacagaataaagaagagaagctatatgttcattagatttttttaaaaatcgctgattcaacatttattcattataaaaactccattaatgtcaacatgtattccgtttgggcgggcacagtggctcatgcttgtaacccaatatttgtgg

SEQ ID NO: 481347 - DNA, 1655 bp, Homo sapiens
  misc_feature (852)..(852): n is a, c, g, or t
gctgtgatgtgggtgcactccgggagccagtcagcaggtgtgtggggaggaatggtgatggattcaatgctggggcatgtagaactttgaaggctccgtgggaggcactcactcaatccacactacgtctcatgatgggtcagctctccaggatcagtctgtcttgattcacccatgggcttccaagtagcacgtccctggtcatcttaggcaggtgaaacaggcaacagcaagagctgacaagcctacggacgacggggcgtatgggtacggaccactatgataagtacatgggacgggtaaaggtcagccgttgattgctagtacaaagtggcgaacacgaccaaaatggtgctcccacagaattgatttactcactgtgagtcaagaccacacgtggacacactggagcctctcgctcattagacaagcgattgttgagacctatgagcacaggtctcagacttagacagtgccacagtgccacaggaacgccctctgatagctctgagttgatgcgcagtcaccggaacacaacgctacggtaagtgttcactttgggctgtggtataggcccgatacgattgtcgatacgtataggaaaggaccccccaatagaattgtcatcccacttgtcgaatttcgttcacgaaaaacacgtggctatacattaagacgggaaaagcgcacactgggaaagcgggagacgctctcacaaccgctaccgataggcgaagctttgaacccataggctgtgagaacagatggctatgaacccgctctttacttacccatgggcattctggggcattcgttccaccggtcgcgaaggcggaagccggaacatgtcgnacccagttacaaagccggcggagcatggggttctaactacatgcacgatgtgaaccacaaggggtcctatcatacagatgcttcgttacacataaggctaaagacgtacagttggccgtaactgtacaggcataccggtatcatactcctcaggtgaatcattcccatttaacctgtagaatggacagttttgcaagcccacagggcgttacagtccaggcaggaccccttaagtatcgacagtccctttatagatgactattgtcgcgtaaagcgatcacgcgggacaatatcccggccagccattgctacttcgcccccgagcgccttatggagtacactcagattctatctttaaccccggcaatgtgacagagtccaaactgtgctaaagccaataggacaacgtgcactttgaaagagatacagcggatgccacaccttatctctcccgcgcatcgtgatcgagcggcacacagccctttacattagagggcatacacggcgtcgacccacctctgtaaaactcgagttcggacgctacaactaaccttgggtgacgactgccagacgacgacagcccacaaggacattgaccgtcagaggacgtgtgctgacatctagacactcgatgcccatcacatggggcccacaggacactgctgtgtccgaaccacgccgcagagagaaccagaacactcatgaatgttgccccacagcgtgacacagagaccaagagacgaactgattgcagtcgacgacaaacaactgctactagagagcagtagacagtatgtggtcga

SEQ ID NO: 481348 - DNA, 270 bp, Homo sapiens
catctctatgtaagttcagtgttctgccctttgaagagatgctcattaattcatttgtgaacatcttttatgaaatccaccatcactagctaatcttattgaggaggataatcagtggtgaagagtttacagacgtggattctttagcctgctctgctgcttgctccatagggagggaatgattcatccttcctgtaatctcttattttctcttggaaaatagtgatcatcaatactgcacaggctgctttacagtagtttataatcggt

SEQ ID NO: 481349 - DNA, 83 bp, Homo sapiens
aattccatgagaaatctgggtttgaatatttgtttactttgtctcctaattgaacaccactccagcccttctgtcgtcttctc

SEQ ID NO: 481350 - DNA, 135 bp, Homo sapiens
  misc_feature (99)..(99): n is a, c, g, or t
tctagaggatacctgaggcatggggtctgtacctcagcctgtggtcgcagcacaacaccgggttctgtaaactgtcactgtaacagccctgctcgctcngctgtgctgcaagagcattgctgagcagctgtgact

SEQ ID NO: 481351 - DNA, 1798 bp, Homo sapiens
  misc_feature (1)..(1): n is a, c, g, or t
ngcgcataccgcgtgcgcggtcactggtgagtcctatgagtttagtcgtatgtggtctctgttttacagcagtgctctgcgtgcagcgtgggtcgccgggtgttaccactacgggtggggataactaaagggcgccactgagtactccagtgggggaacaaccgtcggccagcagggtagtttgtaacaatcggggggataactccgccgctcgcctaggtacctcacagctgcgtggtggtggcgtgcaccaagtgtaggatacattcatgaccactcaagtcccagtatacgcgttgtggtggattggagtttcccagccggtatgtgctctcgtgtgttgctccagaaacaggtggtgggaggaggacaacacatgttgtgcccccgggtgtcctggtggtaataactccccgggggtggtttgaggtggtggctcccccaatggtgatacctaatgtggcccccataacatcagggtgcccaaagccaagggggtataagtgctctactcacggggatgaagcgctaacctgggtgggcccaacagagaatgggtccagggtggggggtcctatatcccagagggtacgcgcgtgggcgaagaggagaacgggggggcaacaacaagggcggtgtcgtggtaaaacccgcaaggccgctgtctgggggtgttagtgaagaggtaacaagagggcggttagagataaacgcgtcacacaaagtagcgctgtgagtaatagaaagggataggtgtattcgggcctcagaagagagtgtggaaaagagaagacggtggggtgtaaaaaagtgtaagtgtaaggggtgctccccagacctctcacacagatgctcccgctggtggggtggtctcaccaggatgggcaccacaccacccagttgtagagaggcgacaggtgttccggtgtgagaggctcacagtgatcctcaccacagtccacacactgtgtgggaaaccactcactcaagaggcaaagagtgtgtaggagtgtgtacccagcgtgtgctgtgggtcacagaggggtagttgtggcggcgtgctggtggtgtgtgtcacagaagtgtgtctgtataagtgactcccagggtcctctcatagaccggtcgtctggtgtagagcccccgtgtgtgtgtgtcacaacagatgcatcatatcagtgtgtgtggtgtgagtggtgtataaacagatgtgaaaagatgtgtgtcgttaagatctccataatgacacaagagtctaaaagacgcccaccatggagagacacccacgcgcagtgtgtccccggtgtgtctcacacaagtgtgtctagatgtggccacccgtgtgagtcacagagtgtgtgtgtgtacacgtgtctcccgtgtgaacacactgtgggggggggctcccaaagacccagagaggggctaagaggtgtgtgacacgcccaccggtctaagaggtgcacacagacagtcgtagtgtgtctccaggccccaagcacagagcggtggtgctacaacaagagaggtggtgtccgtgtgaagaccacccgtcccgtgctgtcagaggtggtctcgtggagaagagcgtgcgtccgtgggagacccccgtctcagagaaaacgtgccgtctacacgtgagaacaagagtgccgtgcgtggacacgaagagggggagtgcccagagccgtggggccacacaggacacacccagccagagccaggtccagagagagttaagtagagggagaggggaggctgggtaaaagatagataaggaagagtgtgggtataggga

SEQ ID NO: 481352 - DNA, 1467 bp, Homo sapiens
acacgctggttgctggtggttgtggggaccccgcggctgccggctatatcgcgctagagtgggcccgcgccgcccagtgcagtggcgtggtgggcgcgcatggctgacgccgctaagctgagctgtccccgcctttgcgtcttccctgacctcttgcgtgtccccgagcgctgctgacacttgagacctggtgtcagcctcacagcgcaaccaaacattaccctttcatcttgtactgcctccttccacaagcacctgccccatttggccaaaacgaagattatcactcagagtattacgcgacgtgcctcgcaacatgccagcccagcaaatgagactcacacaaagccctatcactcacgctatgccaacgaagctatcacccctgcacaccaaactaaggatgactcccaaacgccaaggcagaagttctccccagctgccacgacaccctactcaggctccccgacgctgatcgaccgcctgcacccaccgcaagccacgctacccgatgccactacgccgctcttgcacccgccttcgactccctggcggccacgccgcgcatcccagccactcagcctacctgcgaccgcgcgcagcgccccacctgctcccaccccccgaagggaagccctgcttcgaccgcccaccactctctcctggcgggaggttcctccactcccctcctatccactctctggccacgactccccccaggaacccgatgcctcctgcacccccagcccccttcctccgcacattcctctcccacttgcggccacttcgcaccattccctaaccttccacacaccgttgccaccaccgcccgggcgctccaaccccccagcggcaagctttccaacccagctgcaaaccacctcaattgcgcaaccaacggattgctgcacgccgcgcttgcaatccgcgtccacagggcggcgcaaccgggagagcccacaggcccctaccctacccggtttctagccgcatttggcccacactcaccttggtcctgcaccggagactctccgagcggcacaatgtagcaccaaaaacccgcataatcaatgtaaatggcgaaccccccataaactggacagcacacagacagcaacacccaacgcagtggttttagtggaaacaacatcgatgtgcccctcgaacacagcggagcctacagccctcaaaccaccaataatctgcgccaccgtacacggtggacatagcgcccgcgcgagacgcagagagcacaacccccaaaacccgcgaaacaaagtacgccaaccaacacagaccccgagagtaatacaatcgaaggacgcaccatcaaacagagttggcacataccccgaccgacagatcaccccacactacgaaaaagacagcaagcaaaaaacagacaacaacgcagaaaaaaaaacgaacactaacacacagcagaagaaaagacacagcgaaaaaaac

SEQ ID NO: 481353 - DNA, 103 bp, Homo sapiens
agaatggttatatcgggatcgcgatttcttttcttggtggggctgtttatgaagtaggtagtctaaatgcaatcactaaatgcaatcagtctaaatgcaatca

SEQ ID NO: 481354 - DNA, 291 bp, Homo sapiens
ttctagaaacacctgtaggaatggaattgagatggggaatgctatggatggagcgaaggggggaatagaaaataaggagtttaagatcattttggatgtgaattttgagattcctattagacatccaaataaagatgtcaagtagtcagcgggatgtaccagtctggatttcaggggagaggtctggactggagatataatgggaatcatctgcaaagggacatggttgaaagtcttgagactgggccgggcgcggtggctcacgcctgtaatcccagcacttggggaggc

SEQ ID NO: 481355 - DNA, 221 bp, Homo sapiens
tttagctcggtccccccggtgtgtcttacgcgatgagcggcgccaagccggaggcgattgctgccgcggacaggcgcgctccctcctgcgaagaggatggtttcgccgttgttgtcgaggagttgctggcatctcgataatctcgcagtgtgctcatcgcaactgaccttgacggaaccctcctgactcctgacggcactatcagccctcgcactcgtgat

SEQ ID NO: 481356 - DNA, 118 bp, Homo sapiens
attccaccagcaaggcgcggccggggacatgcggtacccagcacaaccctcctcgcaaccagcagcagatcacacctcacctacagtgcctcacaagctcaccttcttccagcgaaga

SEQ ID NO: 481357 - DNA, 405 bp, Homo sapiens
actgcgatgcatgtaattaccacttcgcgcgcactgtgtgcccgacgctgaggggcgttctgcatattcaaaagcgcgcgaggcccggcgcgatggctcacgcctgtaatcccaatactttgggaggccgaggtggacggatcatctgaagtcagtagttcgagaccggcccggccatcacggtgaaaccccgtctctactaaaaatacaaaacttagctgggtgtggtagcgcatgcctgttatcctggctactcaggaggccgagatcacgccactgcactccagcctgggcaacaagagcaaaactccgtctcaaaataaataaataaataaataaataaataaataaataaataaatataaataaaagtagtgggttgatacggtccaatttatttgtcag

SEQ ID NO: 481358 - DNA, 217 bp, Homo sapiens
  misc_feature (48)..(48): n is a, c, g, or t
  misc_feature (110)..(110): n is a, c, g, or t
  misc_feature (184)..(184): n is a, c, g, or t
  misc_feature (186)..(186): n is a, c, g, or t
  misc_feature (189)..(189): n is a, c, g, or t
aaaatcaagatgtggctgaagatcagaggctcagttagcaacctgtgntgtagcagtgatgtcagtccattgattgtccttagagagttaatgttacaaaaaagaattcntaataatcagacaaacatgatctgctgaggacacatgcgcttttgtagaatttaacatctggtgtttttctggngnganatatatacatatattgctttatttgaaa

SEQ ID NO: 481359 - DNA, 417 bp, Homo sapiens
cctctctggcagactccttctggccaccctcaagaccatgtggatccagctgaatcctcagccctgggactagactaaggttgagggaaagagccgtttctcattcagtaaccagaacaggctaataggacacacacacacacacacacacacacacacacacactctctactcttcttttgctaggggaaggtcacagcacaactatgtccgggacgggacattgtgaacatgacccagccacagtctataccagaaagatgatacagatgtctgaagtggtgccccatgtgccaacaggataccctctacccccagactttgtctctggggtccatgtcccttcctgaaaagcacaatccaagactggtatggcacagaggtagagagaaaggcatggactggaacaatcatgtc

SEQ ID NO: 481360 - DNA, 112 bp, Homo sapiens
gcggccgcctactactactactgctcgaattcaagcttctaacgatgtacggggacatgattggcttaaagtgaaggaaataaaggtaaaatcacttcagatctctaaaaaa

SEQ ID NO: 481361 - DNA, 968 bp, Homo sapiens
  misc_feature (5)..(5): n is a, c, g, or t
  misc_feature (8)..(8): n is a, c, g, or t
  misc_feature (41)..(41): n is a, c, g, or t
  misc_feature (45)..(46): n is a, c, g, or t
  misc_feature (53)..(53): n is a, c, g, or t
  misc_feature (69)..(69): n is a, c, g, or t
  misc_feature (81)..(81): n is a, c, g, or t
  misc_feature (84)..(85): n is a, c, g, or t
  misc_feature (114)..(114): n is a, c, g, or t
  misc_feature (127)..(127): n is a, c, g, or t
  misc_feature (142)..(142): n is a, c, g, or t
  misc_feature (145)..(145): n is a, c, g, or t
  misc_feature (161)..(161): n is a, c, g, or t
  misc_feature (163)..(163): n is a, c, g, or t
  misc_feature (166)..(166): n is a, c, g, or t
  misc_feature (172)..(172): n is a, c, g, or t
  misc_feature (175)..(175): n is a, c, g, or t
  misc_feature (181)..(181): n is a, c, g, or t
  misc_feature (186)..(186): n is a, c, g, or t
  misc_feature (188)..(190): n is a, c, g, or t
  misc_feature (196)..(196): n is a, c, g, or t
  misc_feature (198)..(198): n is a, c, g, or t
  misc_feature (217)..(217): n is a, c, g, or t
  misc_feature (228)..(228): n is a, c, g, or t
  misc_feature (239)..(239): n is a, c, g, or t
  misc_feature (241)..(241): n is a, c, g, or t
  misc_feature (244)..(244): n is a, c, g, or t
  misc_feature (250)..(250): n is a, c, g, or t
  misc_feature (274)..(275): n is a, c, g, or t
  misc_feature (287)..(287): n is a, c, g, or t
  misc_feature (289)..(289): n is a, c, g, or t
  misc_feature (298)..(298): n is a, c, g, or t
  misc_feature (318)..(319): n is a, c, g, or t
  misc_feature (327)..(327): n is a, c, g, or t
  misc_feature (332)..(332): n is a, c, g, or t
  misc_feature (339)..(339): n is a, c, g, or t
  misc_feature (360)..(360): n is a, c, g, or t
  misc_feature (364)..(364): n is a, c, g, or t
  misc_feature (380)..(380): n is a, c, g, or t
  misc_feature (385)..(385): n is a, c, g, or t
  misc_feature (388)..(388): n is a, c, g, or t
  misc_feature (399)..(399): n is a, c, g, or t
  misc_feature (409)..(409): n is a, c, g, or t
  misc_feature (411)..(411): n is a, c, g, or t
  misc_feature (446)..(446): n is a, c, g, or t
  misc_feature (451)..(451): n is a, c, g, or t
  misc_feature (475)..(475): n is a, c, g, or t
  misc_feature (479)..(479): n is a, c, g, or t
  misc_feature (758)..(758): n is a, c, g, or t
  misc_feature (777)..(777): n is a, c, g, or t
  misc_feature (803)..(803): n is a, c, g, or t
  misc_feature (867)..(867): n is a, c, g, or t
  misc_feature (869)..(869): n is a, c, g, or t
  misc_feature (954)..(954): n is a, c, g, or t
gaaanaanaaggtgcaggatctggatttgtttcgggtgganaaannagggganccagccctcatccganaaaagcagaganaanngcttcaaggacccgggactagtggaccanctggtgaaggcanaaagcgagtggcgangangtaaatttcgaggcananaanttgaanaanctgaanaaccnannnagcaananaatcggagaaaaaataaanaaaaaaaaacnagtgggaaaanangantctgtnccaaaaaatgtgctgagtttcgannaccttactgcanangctttagcnaacctgaaaatctcacaaannaaaaaaanccgantcctcantgatgaaaccatcctgaagtntgangcggaggaataaaatnggaancanagcgatttganaacctccgananattgggaaccttctgcacccttctgtacccatcantaacnatgaggatgtggacaacaaagtanaaangatttggggtgattgtacagtcaggaagaagtactctcatgtggacctggtggtgatggtaaaaggctttgaaggcgaaaagagagggccgtggtggctgggagtcgagggtacttcttgaagggggtcctggtgttcctggaacaggctctcatccagtatgcccttcgcaccttgggaagtcggggctacattcccatttataccccctttttcatgaggaaggaggtcatgcaggaggtggcacagctcagccagtttgatgaagaactttataangtgattggcaaaggcagtnaaaagtctgatgacaactcctatgangagaagtacctgattgccacctcagagcagcccattgctgccctgcaccgggatgagtggctcngncggaggacctgcccatcaagtatgcggcctgtctactgcttcgtcagacggtgggctccatggccgtgacaccgtggcatctccnagtcatcagtttga

SEQ ID NO: 481362 - DNA, 1529 bp, Homo sapiens
  misc_feature (409)..(409): n is a, c, g, or t
  misc_feature (450)..(450): n is a, c, g, or t
  misc_feature (463)..(463): n is a, c, g, or t
  misc_feature (466)..(466): n is a, c, g, or t
  misc_feature (486)..(487): n is a, c, g, or t
  misc_feature (502)..(502): n is a, c, g, or t
  misc_feature (560)..(560): n is a, c, g, or t
  misc_feature (562)..(562): n is a, c, g, or t
  misc_feature (576)..(576): n is a, c, g, or t
  misc_feature (606)..(606): n is a, c, g, or t
ctgtgcctcctcctcgtccctcgccgcgtcgcgatgcctggagccggcgggagccccgtcgctcgccattgtcggcgacgagctcaggcaagcaggttccaacggagggaaggcgtacgagccttgctcaaatgccctggtcgggagaggaggcgtggccgagatcaagccgggagttactgtgtgaccagaacgtacagtgatcacagagaaccttccagaaaagctcacagccttcaaagacgaagtacatggagtttgacctgaacaatgaaggcgagattgacctgatgtctttaaagaggatgatggagaagctttggtgtccccaagacccacctggagcatgaagaagatgatctcagaggtgacaggaggggtcagtgacactatatcctaccgagacttngtgaacatgatgctggggaaacggtcggctgtcctcaagtnagtcatgatgttnganggaaaagccaacgagagcanncccaagccagttggnccccctccagagagagacattgctagcctgccctgaggaccccgcctggactccccancnttcccaccccatanctccctcccgatcttgctgcccttcttganacactgtgatctctctctctctcatttgtttggtcattgagggtaagtatgagatatacaatcaatgtctaagtaaagcacaaaattatctgccttaaaggggctcatgggtcaggggaatcctgagcccattgggtccccatccactctcttcttccacatccttcccacgatcccatgtgcagaagggctgatatcaaaccaaaaactagagaggggcagggccagggcaagggaggattccagaactgtgtaccccatcacttggaggaaaccaagcactctccataccatttcagaaagtctccacggccaagtctcaggctcactgacactggctctgactgaggaccccaggccactctgagaagacttggagtagaggacaaaggatgcgagagacctacataacaagggtaaccttggaaaagaagaccatggttccagttgctcctgtgtagtacacaaggaaaaaagacactccgagggcacaggaatggcacaagtaggatacacactatcatatacaaacacatcttagacacatccacagagaagcaacgttaaccgaggctggcaccaggaaaagaaacaaagcagaataggagagaccacaaaacacatagacccaagcaagagaagaagcccaccagagccacagagcaccaggagcaaaacaccgagaaaactaaagacgagaactgcgaagagattacagaataatagagccacgagaacagcgagcacagagaaagagaacaaggaagagaaagaataacgacgcacgaagtactaggagagaacagacgacagccaattgcgtacacaagaagggaaaacagaacaccagacagaacaactaagaacacgaaaccagaaaaaactcaagcgacaaaagaaaagcaggagcaccaaaacaaaca

SEQ ID NO: 481363 - DNA, 261 bp, Homo sapiens
  misc_feature (193)..(193): n is a, c, g, or t
tctaggtggtcccatcagcacatgaagcggaaactgcctgagagggctgaagtggacaagagcagcccccacctcgcctaagctgagctgtgccccctctagggatttggggcacctggcctagggttagagggagagagggagaggccgtgacgtgctgagtgcagctgactcaggaagagccagagcgggnatgcagggccaggcaccactcagcctgcccaagtggcgtgtggctgcctctgcgggccggggacccac

SEQ ID NO: 481364 - DNA, 638 bp, Homo sapiens
cggcacgaggtgctcttcctcattcagtataaggcagccagtttgcttagaaggcaacattggaatgttagagttcatcagaaacatagaattttaaactgtgagttccactgaatacattttaatgtctgtaggaagaatcaaaacacctatttaaagatggcaatatataataatcattttaaaagtatttgattcaacctaattttccagaaatgaaaaaaaaaaaatcagctctaaaaccaaagctgatttcagaaaatttgaaaatgtaaatcagccctatccataatatagtttctctaaaactttatcttagtcattttaaaataatataactattaaaaaatgtaactgctatcttaatgttctgaaataatttaaaacattttaaaatatgaatactgtagtataaaagaaagaaatggtgggaacgaaaagcagagaaagaaatgccaattccagtccaaagttttatttgccaagttttcttagaatgaattttaccagtttatgaattattgtaaacagaatgtgtcatggaaatactgaaagatttttccctagagtggccttattgactgctggtgtgatgccactgtaatgtaataaattattaaattgtttcaatgtgttaa

SEQ ID NO: 481365 - DNA, 702 bp, Homo sapiens
  misc_feature (26)..(26): n is a, c, g, or t
  misc_feature (29)..(29): n is a, c, g, or t
  misc_feature (46)..(46): n is a, c, g, or t
tttcaaactgaaagtccgtgcaaggnttncgattcccagccgcccnaagtacgtgccgtcatgctgcccagggctcttggccttgttgccaatgagctgtccattcactgagaagcctgtgttggggtcctgtaccaggctcaggataacaccaggctcctcattgatgttgaagcacagggtgtcctctttctggggcacgtggatgatgaagtgagggtctgtgtccacgccggtcactcggtctggcagccgctgggtattggagctggaatgagtaggagaaggctgcaaggctgacagcacgaacgtccttctgggtcccagcatctccaaaggcggagaatcctctgagggcttgtcgatggtgggcttcaggccgtcctggtccgccatgcccctgatgctcatggaggtcagtggggtcacaaacccatagtccagcgacatccgcagggcctgggatgacaggttggccctcacctccctgtccaccttcatccgcttggccagcagctcctggatggtgaggtaggcccagaggcgctcgacgtggttctccagcatgtggccacgctctcggagcagtttcttcatctcctcctcatccactaggcaggttatactgaattcttgtccctccccatgggcctgcacatcagccttgaagctgctctgtttgttgtcagcaatgcgcccggc

SEQ ID NO: 481366 - DNA, 307 bp, Homo sapiens
gtgctctagcggatccctatcgtaatatgtatcacagactagacactgagtatatgggactccaataaacatagtaaaacactttaacattatttacttcaatattatcttggaattattcaatggtttccggagtttatagttaactgatgtggtaaccatgaattcccgacccaattggtagcggatagatatattaggggcggttggttggtcctttcacatgatccaccgggaggagcctccctttggtaagaaacatcaaggtcacactggttacatattacggggggtaccgggctcgaat

SEQ ID NO: 481367 - DNA, 671 bp, Homo sapiens
tccgtgaaatatcctttgttaatctcgacgattgttttccataaattctggaaactttgattcgctccccacatttattagaccccgacacccgttgtgtggtcctcaataacattttgttagtgtaaatctcacctggtgaccacaccgttatctccgtagcaatgtgcccctgtgtcacctgacaagtctgttaaaacatatgctgcggaaattttaccccgattttacgccccttggtacaaaccctgcctattcagccttgtcttgaaatcgcaatctttcgagtattgcaaccgccgcggtgtaacacccgttgggtttctaaccgcgggcttcaatccgtgatgtctgttcccctcttcccccgcaagggtcatagttttaacattggcctttcaaactctgttatgcccccccccatttttggggggaaaacttttccacaaataaccctacttcttttgaacctgagacttaggaccccattaatttggcgtgctcccgcttcccctcctagtcttttcctgcttatatataacccaccacccgcttaatttgggggtgtacaattaaatgcaccggtgctttaatcaacgacccggtcccttttcctcatttcccaaaaaatttgggataaattttaaacactttaaatctagacctcgcct

SEQ ID NO: 481368 - DNA, 1116 bp, Homo sapiens
cccactggcgtctgcgctatctgcggaccagcgctggtgccgctggcccggagaccagtggtggcctcccgagatggccgcttcgctccgtcgggaatgcccacgcattgtttggatgatacccctcgcggaccgtgagcgaggaaagtaggaggttcatggcatatggaatgttcgataagctcaatatggagaaaaaggcgaattgcatgggcatctgaacgaagcgattagtgagcagctagctctaatcggcctgcggtggtgtctgagacgctcatgtatcacgtagcagcctgtcttggacacagccacagtcccctagagcaaggacaaaagcaaccctggatgcatgggtctggcgagtcgcagtcgagatgcgcgagtcgagatggctgtaggacacagtgaactctgtgcttcaatgccgttgtcatctgaaatgccttttgaacgggggcaatgttatgaggcatgcccgcaggagagggcaccaagggcccccagcttttccaggcccgatttacccgtacgggaagcaataattcatggcctggactgactggaactgcatggcaaagaaggtggcatgcgccagtgaacggattaccccccagtaagtgtacacaatcctcgtgttactggcggagtcctatgtgttgtatcatatcatatgatgaatatcgggagcttcgcaaggacactgtaacgagaacggatgcaattggccacgaaacgaaggggctaaagaaggggaggctcccaagggaggtcctgcgcgtagcacttagggatcccccccatccgtagaaagccattgtcgcactgtggtgcggcttattgtaacacgaaaaccgcccagagtggggtggccacccaatcgttacccttgcgaggtctcttacccccccttttcaccgcggcaaacaggcccaggcggacactcgtggggaacactgaccaatgaccctacttgggcgacaagaggaaaacccccgcggggaaaccaagcaaagaaccgccggcaaggaactccgcgggaacgccgggagcaagaccgaagaacccaggggacatccgcagtaaccggaggaacacggaagaagccgcggagaa

SEQ ID NO: 481369 - DNA, 342 bp, Homo sapiens
ggggaaatatctgaacgaacacttctgtatttacagaaaatgacaacgatgacgatgaagatgttcaagttgaggtggctgagaaagtgcagaaatcgtctgccccaggtaacactgaatactcaggaacaattaatggatggtaacatatgaagaatatctaggaggcacaccctctctggcatctatgatgggccaaaacccgcattcgcttggcctcagtatgtgaaatatacccagcttagacacagggtgcggcagtgtcatgtttctctatgtgtccgagtgtcatgtcttcaccgtacagggatgcatggtcttactctctcagctctatctgac

SEQ ID NO: 481370 - DNA, 139 bp, Homo sapiens
aaggagatttcacggcagcaacaatcctacctccatcgctaaccccacataaaacactcaccaagacctcaccccctgtacccccatgacctcaggatactcctcaatagaccatcgctgtagtataaccaaagacaac

SEQ ID NO: 481371 - DNA, 500 bp, Homo sapiens
  misc_feature (368)..(368): n is a, c, g, or t
  misc_feature (451)..(451): n is a, c, g, or t
  misc_feature (489)..(489): n is a, c, g, or t
ggcccaagaattcggcacgaggatgtattcatctattgaaacaaaatatgacatatactacattatagattatcactaaggatttataatcatctcttcatctaaaataaaaaattaactggagcctgttgaatgtgaaataaacaaacagtaagtaaaaaatgctcctgccttgttcaggcagcagatatacgcaccgatataactttttgaatgattaaccgcggcattatttggactctccgttttagggactggaaatcccagcctggttgaatgtagttcccgataaggatctcctgaaatctctaaaggtatgacacatactgtatagtccaatctgaagtggggagcgggccgcaagcttnattccctttagtggaggggttaattttaggcttgggcactgggccgttcgtttttacaacgtcgtggactgggggaaaacccnggggcgttaccccaacttaattcggccttgccggcacntcccccttttc

SEQ ID NO: 481372 - DNA, 380 bp, Homo sapiens
  misc_feature (10)..(10): n is a, c, g, or t
  misc_feature (43)..(43): n is a, c, g, or t
ctgattttgnaaggtgagagaacgaatgtgagatcaggtaacntggtgatagttgcagatctgggactagaaaccaatgaagttatgctcagcatggttgctcgtgcctgtaatcccagcactttgggaggccaaagtgggaggatcacttgaggtcaggagtttgtgaccagcctggccaacatggtgaaaccccgtctctactaaaaatacaaaaattagctgggcatggtggtgggggcctgtagtcccagctactcgggaggctgaggcaggagaatcgcttgaacctgagaggcggaggttgcagtgagccaaaattgcaccaactgcacactgcactccatcctgggcgacagtctgagactctgtctccaaaa

SEQ ID NO: 481373 - DNA, 355 bp, Homo sapiens
tatcggacacgttttatcgggacgcggcctgtgcaacaagtgtacgacagtggcgccataggatccacacagtcaaacagcatgtgccggcgatcgggatcctataaataaaccatgcccatttaagtaagttgttgcgccccacgcccttcatcacgggattcatcccagaatcgagtctataagtgtaactcgcaccggtcgcctgcacttggcgtaccgaccacagaaacattatatccatgtaccttacatcgcgattaagacatgcataagataatgtgccgggagaggaccataaaagagtttcggttccgaattcctcgtgcgccgaaccgtcctttttgcaggcccc

SEQ ID NO: 481374 - DNA, 320 bp, Homo sapiens
gatccatttgtccaaaatgtataatgaagatttgtgcatttacatgcctgtaatcccagcactttgggaggcaaggcaggtggatcacttgaggtcaggagttcaagaccagtctagccaacatggcgaagctctatctctacaaaaaatacaaaaattcatcaggcattgtggcttgcaactgtagtcccagctgctcgggagcctttaggcaggagaattgcttgagccctggaagcggatggttgcagtgagccgaggtcgcaccgttgcactccagcctgagtgacagagtgagaccctgtctcaaaaagaaaaga

SEQ ID NO: 481375 - DNA, 975 bp, Homo sapiens
agcggggctgtcctggcaagccgacggccgctgctggcctccgtgacgcggcctcctccgcgcctcgcgtgatggcgtcgagaggggccgcggagagcccgaaatgcgagggcatcaagttatcagcacgatgtcaaaccattgtgtccccagatttgccggggctcaggtgtggcatggttagagtcctcagaagcatgtgtcttccccagtctctgcagcaacatagtatccgttgtggacaggaaccaccatgtgacagagcagaaaatatatacgtgaagacatggccttgtgaagcttcaaggtttttccacctcagtattgatcttctgagataactcttgcatccatatgcctattctccttatacccttgagtccagcacagaatgtgaactcagtgcctggcttccaggtatctttagtaaccaacccagttgttaccgagggttgcaaacagtgaacccatcgaacctgagaaacacattgtccctctcccataagtaaatggagaagcttctgctatgaagaacgaaacgaccctatgagtgagcacaaggaaccgtaatgaatcaggcaccagcgtttgaccagttgacacggggcttgaatggcaacacctaattaggtccaatctggacgcattaacaatccgagccttacaaggttacacagttaattggtaccattttacacgcctgacaaattagtctcggaaaactccgcaatgggttaccccttacagcgaaccaggacaggaaacctcccagggaaaattccatttggcgcacgagaagatggtaattcgtaaccgttctcaaaaacctgtgaagtatctgggacattttaatacgcacacaagtgggagacattgcgcctagtaacatggccaggtgttggcgaataatatatacaaatatagtgctcagagagcaattacacgacaagacatccgccaaagtgtgggagtacc

SEQ ID NO: 481376 - DNA, 574 bp, Homo sapiens
tcgactactatgaggatccccgagtgtacttgaagatatgaagtcttaagattaaggaatacagcagcaagacttatcgacacctatatgttagcacatcaggctcatgtctgcactgacgagatgggatgagtcatgacatcaccttaccagccacaggcaggcaaataaatgtgcatagatatggtacaacgtgagagaggtattacaataaagtagatctatattagctgtacgagaaagccagccgcggacggcaccagtgtccaactttgcggtcgacagtggagactccactgccgtgccctctagttgcctcgatgacgttcagtgggggttttacacgatctaacaaaagtggtactcatagtgctatacagtggaactcacgtgtcctgttccatcgttcagcttacgtcagatcctgcttcgtgatacaggaggggaatgaaactgaccatcagaaaggacaccaggcactgagtggcgtgccctctcttggggcatcctggtcctatcgaggagtccgtcttctacagctgcttcttgtagaacactcgggtaccgtcctcga

SEQ ID NO: 481377 - DNA, 334 bp, Homo sapiens
gcccagagaggcagaacgcccatcccttaaccaattgggacccagaaagcccggcagaaagaagccttctgctttcccagaagcggtagtgagattttgggaacagggcttgatcaaggaggtggggagagaggaagacggagtagcgaggcaagtgaggccccctttccatgcatcgcttggggtgtgatgaggagagcccatcaatcattcatcctttcattagggaggtcccactgtacccattcatccatccccgcccttccaggtgcccatccatcctggtgaaagccatttgccccactcaataaaaccgggcattcctccttcggga

SEQ ID NO: 481378 - DNA, 217 bp, Homo sapiens
tggtgcatctactcttcaactcttcttcttcctcagatcatttagttctaggcgtgtccagtttgagcacgtactgatgaaagtcctccagcgagtgataaggccagtgtctgcctgggtaataaagcctgtctcatctggtttgtcttcatcactttcttcctcttcctcttcttcttgaggattcttcatcagacttggttccaagttcccaccc

SEQ ID NO: 481379 - DNA, 588 bp, Homo sapiens
  misc_feature (13)..(13): n is a, c, g, or t
tgcagcactccgnatgtgcaggagcggatgaagaatctcctgcagggtaacactcagtctgtagggctcctgctgagcgagagattcgtcaacgtcccgccgcagatcgctctgcccctgcacaaacaactgcagaaggaaatggctgaagctcaaaggaccaataaacccagcggtaaatgccagttctgtctgatgattagcaaaacatgcaagccattgaagaagaagagcatttctgcaggagaccaggctaaagacgagctgctgttcgtgaacgacgaggaggagttcttttatgagcaagcaacggtgaagttcagctactgtgttcaggatgagcgggactcgtgtgcgacagggaaatggtcgtacgatgacgagccaatgaagccgtttcgcacagtgatggtgatccccatggacagaatggacaccatcatgcagaaaatgactgattatctgaccgtctgaacacactttaacctttcaggccagtttgaccacaaatcacccaaaccagtgaaataatttattcattctgtacataatcagcccacaaaaataataataaacaacccaaacaga

SEQ ID NO: 481380 - DNA, 368 bp, Homo sapiens
tataaaaaaaaaaaaaaaaaaaaaaataattttggcccgtcctgggcctttgctcccccccctgtttttgggcccttataagccccagtagtggcttcaaagctggggaacaaaaattaaaatgaaaaacccctttcgtggagaatttgcctggggaaaaaaggaaggggttttttagggatgttcccggatttcttttaacccttttcctttcccccccaagttttgttgggaggaaaaccaattattatgaaaagcttttattggatgtttaaaagtttcatatgttcccaagctttaatttggggatcaaaatttaaaccattttttaaaaggattgttcccttaaaaaactaatttcaaaacca

SEQ ID NO: 481381 - DNA, 106 bp, Homo sapiens
attcggaacaggagcgctgcggccccgagcgctcccgctaccacctgcagcagaacgtgcagttctccgaggacacagtgaggctgtacatctgcgagatggcact

SEQ ID NO: 481382 - DNA, 426 bp, Homo sapiens
ctttctaaacttcagacaccacagacagatcttgatggattttgccatttctgcacaccattctaattttatatttaaaactactatgtgcttagtacttttaaagtcaactcactgtttgatgtaaatttattttaaaaaggaagcatatcactttggcaaatggaaaattagtatcactttctgcaactagaagactaccttaaaatgtaataaaaacagtgttattaaacactagctatgcagtatggccagtgaagagagcccaaagtctatcctttttttaattaaaaggtgtgataagtaagtaacgttaggtaagggtaaaagacacgtaaacaccaaattgagtctttctgcatgatgtgatcaaatgggttttgaggacttttcttgagtacttaccttaccatcctactctgggaa

SEQ ID NO: 481383 - DNA, 336 bp, Homo sapiens
  misc_feature (38)..(38): n is a, c, g, or t
  misc_feature (53)..(53): n is a, c, g, or t
  misc_feature (69)..(69): n is a, c, g, or t
  misc_feature (90)..(90): n is a, c, g, or t
  misc_feature (92)..(92): n is a, c, g, or t
  misc_feature (95)..(95): n is a, c, g, or t
  misc_feature (122)..(122): n is a, c, g, or t
  misc_feature (303)..(303): n is a, c, g, or t
  misc_feature (310)..(310): n is a, c, g, or t
ctggctgcaccccaacacatggccttccctgccccagnccacaccgtgcacgnaggggggcacaggggnaggtagaggggctgtgccagngnctnccccatttcccagctcctcacagaggncctggtttgctcagtcttctgaactccagggaccagccctgtgggcatggggtggggagcagggagttgcccttgccctccctcgggaagccacctaagaatgtttacatgccaaacagaatgtaacacccctccccaagcccttcccagtcactgcatggcctctgcccatcctgaactntcaaccncaccccaacaccctggaagccactgt

SEQ ID NO: 481384 - DNA, 396 bp, Homo sapiens
  misc_feature (389)..(389): n is a, c, g, or t
atccccccacgtggccgcgttttcatgtacaatcagcacggtggctgtggttggcattttttccacggtgaacctcgtgcgcgccttagcgcttgaagttcacagtaaacaggcctccaccggggtgctttacattgggcgtcaggcgcttttcttttgatgacaaccacataaacagggctttgcttttcaattgatgacacgcaggctataaaaccagtggccctgcaaaccccggctttagggacaacaataaaaaatgcctgctctcgttcgtgccgccagcttgaccaactacctggaagtgtcccgccatctgggcctcaacccccatgcactgcttgcgcaggtcggccttaacgccgccttgctcgacgaccccaaccggngtatccc

SEQ ID NO: 481385 - DNA, 80 bp, Homo sapiens
tttcttgcacaaatggcattttattatagataatctaatttacaaagctttgtaaattttaagaaaaacattcatagatc

SEQ ID NO: 481386 - DNA, 838 bp, Homo sapiens
  misc_feature (236)..(236): n is a, c, g, or t
gctccatgagcagtgctgtgctgcaggcggtacagtaggatgtgtgagctatcttgctccctcatggtcgtgactcggtgctccccgtggatggtgctgggtgtgctgtggtgctccatggcacagaacgctgatgctgtgctccttcatgctggtcgtgggatgcgcataacgcgcacgaacgatgtgtcatcagttggtgggaagcaagtgtcgtggtaccggtcagatgatcntgatggtaggattggagatatgaccgactggtcggcctgtgaactgagctattgcaagagggtgcgtaggttgttgtcaagaggattctgcttttgattgcctaaacggtgtccgcaagagatcagggtgagcgcggtaatgcccgacctgagtgaaggctgcgtgtgcctggaatggcacatgcgtcttcccatgccttgctttgagacgaacgtccatcgtatcgtgtatcatgtggtcccccatagtccacagcgactggtcttgtcccagtgagtgagacaaagcgactcttcgtctaacctggctcgtagaactcaggttccttcctgcactacagtgtgtcatcctctgtttgaccctgcgggtcctcccagccctgagcctgtggccctcgggggtcctcctgagtacctgggacaaagacacaggttggaggacgaggaggacgaagggaaagaggctgaaacggtggggggggctggccagcctttcggccgattctttggagaagtggggttctggggtcaccgttggggggacccccacgggggttcctggtttcttccgggagggagatcaccacttcttctgatgtgac

SEQ ID NO: 481387 - DNA, 1014 bp, Homo sapiens
  misc_feature (20)..(21): n is a, c, g, or t
  misc_feature (37)..(37): n is a, c, g, or t
  misc_feature (57)..(57): n is a, c, g, or t
  misc_feature (66)..(66): n is a, c, g, or t
  misc_feature (87)..(87): n is a, c, g, or t
  misc_feature (109)..(109): n is a, c, g, or t
  misc_feature (112)..(112): n is a, c, g, or t
  misc_feature (125)..(125): n is a, c, g, or t
  misc_feature (160)..(160): n is a, c, g, or t
  misc_feature (163)..(163): n is a, c, g, or t
  misc_feature (175)..(175): n is a, c, g, or t
  misc_feature (180)..(180): n is a, c, g, or t
  misc_feature (233)..(233): n is a, c, g, or t
  misc_feature (311)..(311): n is a, c, g, or t
  misc_feature (322)..(322): n is a, c, g, or t
  misc_feature (361)..(361): n is a, c, g, or t
  misc_feature (386)..(386): n is a, c, g, or t
  misc_feature (388)..(391): n is a, c, g, or t
  misc_feature (423)..(424): n is a, c, g, or t
  misc_feature (446)..(447): n is a, c, g, or t
  misc_feature (511)..(511): n is a, c, g, or t
  misc_feature (743)..(743): n is a, c, g, or t
  misc_feature (931)..(931): n is a, c, g, or t
  misc_feature (933)..(934): n is a, c, g, or t
  misc_feature (974)..(974): n is a, c, g, or t
tgtggaggtgtcgacaaacnnaaaaccatgaaacatntattattgctactagtgtgngtgtttttntagggttgagtcccaaggtgncaacgagaatgaggagggtttnttnagtgcccgtggtnatcgaccccttgagaagaagagagaagaggctccnagnctgaggcctgcnccacngcccatcagtggaggtggctagtcgggctcgtcgcagccaaagcagctgccantcaaaagaaagtagaaagaaaagcccctgatgctggaggctgtcttcacgctgacccagacctgggggtgttgtgtcntagaggatgtnagttgcaagaggctttgctacgaacaggaaaggccaatnagaaatagtgttgatgagttaaatncnnnngtggaaggtgtttcccagacctcctcttcttnntttgagtagatgtatttggtgnnagaggtgtgggaaaagaggcagaagcaagtgaaagataatgaaaatgtagtcaatgagtactcntcagaactggaaaagcaccaattatatatagatgagactgtgaatagcaatatcccaactaaccttcgtgtgcttcgttcaatcctggaaaacctgagaagcaaaatacaaaagttagaatctgatgtctcagctcaaatggaatattgtcgcaccccatgcactgtcagttgcaatattcctgtggtgtctggcaaagaatgtgaggaaattatcaggaaaggaggtgaanatctgaaatgtatctcattcaacctgacagttctgtcaaaccgtatagagtatactgtgacatgaatacagaaaatggaggatggacagtgattcagaaccgtcaagacggtagtgttgactttggcaggaaatgggatccatataaacagggatttggaaatgttgcaacaacacagatgggaagantnntgtggcctacaggtgaatattggctggaatgataaaatanccagcttacaggatgggaccacagaactttgatagaatgg

SEQ ID NO: 481388 - DNA, 399 bp, Homo sapiens
ctctagagttatcccccccgaatgtggactcagcgatggcatcttcttgcgtggtgctccagggctctttggatctctgggcttctcaagattctgctaatatctgtattaatcatcttgtgcatagtacgattgtagttctcttgagggaagcggctttacgccttgtgccgtacaattcatcttacttccggaaagcactttcagtccaaatgcagaaacgtcccacatgccctccaggagctagcttcaaaatgttcagcttgcttacattaagcagagtaattccaggcatgtttctgaaggccttattgaataccattttcctcattatctataatgcccgggcccctgcgctggatactgcgacagtatctcacgcttgcgtccacttttttg

SEQ ID NO: 481389 - DNA, 139 bp, Homo sapiens
cagcacagcgaaactgaaggtactgaccacgtacatttggtttaaacctttcacgaaagagatcggcgggcgatgcgccgtggcccaagcgcaagaggatggcggacgtaggctggcatattgtccggccgtgcgaacc

SEQ ID NO: 481390 - DNA, 391 bp, Homo sapiens
  misc_feature (73)..(73): n is a, c, g, or t
  misc_feature (312)..(312): n is a, c, g, or t
  misc_feature (361)..(361): n is a, c, g, or t
  misc_feature (366)..(366): n is a, c, g, or t
tttcttatgtttgctgattttacagttctgactaaagctgacctaaatggatcagtttatgtgtaatattctngtgctttaatgactctttttttctttggagggagggtaacattatttggacagatgcagaaggaactgttagtgagtcaagacaaacacatctgaaataaaggaactgtgtattaacatgttaacaattcataactgcactttttatgacattttgaaaatctaatttattagggtacagaacaatggggtttttgttaaacctggtatcaccatttaataccttggcaagaaaatttnattttccattggttaattaagttagggaattttaatttggggtccaatnaaaanttgggccaaaacctggaacacccaa

SEQ ID NO: 481391 - DNA, 432 bp, Homo sapiens
gatagttataacttgacctagattagagagctgcaagcgtacagtgataatatatcagatttcggtgacaagtgaccagtggaaaataacatagtagaaatacatgggcctcacagatcatccaaacatgtgaccaagaatccctctttgatcaaggaagggtaaagtcgcttgctagtgctcgccgcagagacagaagccagagagccttgggaaacagccattccctcacttatgtaatgttcctgatcttattacaatacttcatgggatttctgaaccttacgatgtcagtcctcttctgcgttacatgcttccccatctggtcgtctccatcattcatcatgtcacaggagaagacactgaaggaatggatggtcaaatctacaagagacacttagcaagctatactgacaaaaatatcactgcagc

SEQ ID NO: 481392 - DNA, 102 bp, Homo sapiens
ttttttttttttgggccacggcctcaaaataattttaatacaaaggatgcaaacatctataaatgaaaaatgtggttcttctgccccttctgtcgtcttctc

SEQ ID NO: 481393 - DNA, 1008 bp, Homo sapiens
  misc_feature (184)..(184): n is a, c, g, or t
  misc_feature (187)..(187): n is a, c, g, or t
  misc_feature (207)..(207): n is a, c, g, or t
  misc_feature (298)..(298): n is a, c, g, or t
  misc_feature (334)..(334): n is a, c, g, or t
  misc_feature (821)..(821): n is a, c, g, or t
  misc_feature (825)..(825): n is a, c, g, or t
  misc_feature (829)..(829): n is a, c, g, or t
  misc_feature (832)..(832): n is a, c, g, or t
  misc_feature (838)..(839): n is a, c, g, or t
  misc_feature (842)..(842): n is a, c, g, or t
  misc_feature (851)..(851): n is a, c, g, or t
ggttctcgccaccctaacaccgtctggcctcgccagtagacgatggggctgctgacgggccacctacagagcgcaggcgtcaaggtgcgcactgctcatgcagctgctggggacactcggaagccatgccagtgcgggccttctctgctctctctggcttgccctgcgtgacaaccatacccantcntgacatccaggtgtaaactnctttgtggtccccgcggatgaggcccaggctcgaatcccatatgcccgtgtcaaccacaacaagtacatggtgactgaacgcgccacctancatcggaacctccaactggtctggcaactacttcancggagacggcgggcacctcgctgctggtgacgcagaatgggaagggcggcctgcggagccagctggaggccattttcctgagggactgggactccccttacagccatgaccttgacacctcagctgacagcgtgggcaacgcctgccgcctgctctgaggcccgatccagtgggcaggccaaggcctgctgggcccccgcggacccaggtgctctgggtcacggtccctgtccccgcacccccgcttctgtctgccccattgtggctcctcaggctctctcccctgctctcccacctctacctccacccccaccggcctgacgctgtggccccgggacccagcagagctgggggagggatcagcccccaaagaaatgggggtgcatgctgggcctggccccctggcccacccccactttccagggcaaaaagggcccagggttataataagtaaataacttgtctgtacagccatgaaaaaaaaaanaaanaaanaanaaaacnncanagcgcactntgtatccagatgagacacaaagaccgcacagacaggacaacagtgcactaaggtgattccctgtcaccccagctagctggtacaacattgaaaatctgccggaaccccatacagctagcccatataacgcgaaagcggttacacgattaataacgaa

SEQ ID NO: 481394 - DNA, 1064 bp, Homo sapiens
  misc_feature (184)..(184): n is a, c, g, or t
  misc_feature (187)..(187): n is a, c, g, or t
  misc_feature (207)..(207): n is a, c, g, or t
  misc_feature (298)..(298): n is a, c, g, or t
  misc_feature (334)..(334): n is a, c, g, or t
  misc_feature (877)..(877): n is a, c, g, or t
  misc_feature (881)..(881): n is a, c, g, or t
  misc_feature (885)..(885): n is a, c, g, or t
  misc_feature (888)..(888): n is a, c, g, or t
  misc_feature (894)..(895): n is a, c, g, or t
  misc_feature (898)..(898): n is a, c, g, or t
  misc_feature (907)..(907): n is a, c, g, or t
ggttctcgccaccctaacaccgtctggcctcgccagtagacgatggggctgctgacgggccacctacagagcgcaggcgtcaaggtgcgcactgctcatgcagctgctggggacactcggaagccatgccagtgcgggccttctctgctctctctggcttgccctgcgtgacaaccatacccantcntgacatccaggtgtaaactnctttgtggtccccgcggatgaggcccaggctcgaatcccatatgcccgtgtcaaccacaacaagtacatggtgactgaacgcgccacctancatcggaacctccaactggtctggcaactacttcancggagacggcgggcacctcgctgctggtgacgcagaatgggaagggcggcctgcggagccagctggaggccattttcctgagggactgggactccccttacagccatgaccttgacacctcagctgacagcgtgggcaacgcctgccgcctgctctgaggcccgatccagtgggcaggccaaggcctgctgggcccccgcggacccaggtgctctgggtcacggtccctgtccccgcacccccgcttctgtctgccccagctggaggccattttcctgagggactgggactccccttacagccatgaccttgacattgtggctcctcaggctctctcccctgctctcccacctctacctccacccccaccggcctgacgctgtggccccgggacccagcagagctgggggagggatcagcccccaaagaaatgggggtgcatgctgggcctggccccctggcccacccccactttccagggcaaaaagggcccagggttataataagtaaataacttgtctgtacagccatgaaaaaaaaaanaaanaaanaanaaaacnncanagcgcactntgtatccagatgagacacaaagaccgcacagacaggacaacagtgcactaaggtgattccctgtcaccccagctagctggtacaacattgaaaatctgccggaaccccatacagctagcccatataacgcgaaagcggttacacgattaataacgaa

SEQ ID NO: 481395 - DNA, 190 bp, Homo sapiens
ccacacagtgattgctcagccagagcacacaaatctggtacacacggtctgtgattgaacacttctgtcactccactcgggacgtggctcctctcccatttcacctactgaaaataacaccactccaccatgatgctttgaccccgggaatactggagaagggcagaagaagaagcctaaaatgtctgat

SEQ ID NO: 481396 - DNA, 542 bp, Homo sapiens
  misc_feature (22)..(22): n is a, c, g, or t
  misc_feature (355)..(355): n is a, c, g, or t
  misc_feature (359)..(359): n is a, c, g, or t
  misc_feature (363)..(363): n is a, c, g, or t
  misc_feature (366)..(366): n is a, c, g, or t
  misc_feature (372)..(373): n is a, c, g, or t
  misc_feature (376)..(376): n is a, c, g, or t
  misc_feature (385)..(385): n is a, c, g, or t
accacctgcactcctgctcccnaggccacgaatttatatcgaaggccaaagacataatgggcacactaggacccaggtgctctgggtcacggtccctgtccccgcacccccgcttctgtctgccccattgtggctcctcaggctctctcccctgctctcccacctctacctccacccccaccggcctgacgctgtggccccgggacccagcagagctgggggagggatcagcccccaaagaaatgggggtgcatgctgggcctggccccctggcccacccccactttccagggcaaaaagggcccagggttataataagtaaataacttgtctgtacagccatgaaaaaaaaaanaaanaaanaanaaaacnncanagcgcactntgtatccagatgagacacaaagaccgcacagacaggacaacagtgcactaaggtgattccctgtcaccccagctagctggtacaacattgaaaatctgccggaaccccatacagctagcccatataacgcgaaagcggttacacgattaataacgaa

SEQ ID NO: 481397 - DNA, 1167 bp, Homo sapiens
tgggaacacgagaacatacacccagctgttagggattcagtgaactgggaattgtcccacctcacttcactttcactcatggccaactcgtacgagcacagcattcatgctcgcgtatatcctcagcacaacagctcaggcagccagcattgcagcaagagcaagtccagtgaaggcccatgcatgcacagtccctcaacacatcactgcgatgtggattcagtgtctgctcagacagccccttagtcagtatcgagctgcaaccatccatcacaggctggccatccatgtaccacagactgtctgaggaatcaggttggtgatgcacaccaccttcaggcaaaccaacaccgggtgctggccagatcttcattaccagcaaggccgccaaagctgtatcagctgctgcaacagcatgctccctgcgacactgcttcagagtacagctagcagcagcagtcagcacataatgctgcaatttcagcatgcaccagtccagcacatcagccaatgtaggcaacagttgccaacccactcatctggggctcttcgctatacatggttgagcaacctgcagcaggcattaccagcgttatccagaagggagcttatagaccagaattacggaccacgcctcacgaagtggtgacggccgctgcagcttgctgactgcttctcctagatctcacactcgacgaagccacgtgactgacaaactgccttccgggtatactccggcagtctcgagatggtgcataatcatctaccttccgatccatttacacctggctacatcataccagcttacaaacgacgagaccacggcattaagatcggacgattgcgacaataacaaaagaaaccaaaccaaagacaacaataaacacacaagagatgaggcagacagcatggaacaatcaaaccgcgcaccagactggcgcagacccaacggagactacagaccaccctggctggggccagataaaccgagcgaaagtgcccaaaacacgacaaggcgcgcaggggtgcaccaagcacggtccaacacagcgtgcaagacaaccaggggagggaaggacagagaggaggagagacctactccacggcccaccctgacacaaggagaggaagaccacaaagaagacaacacacgcgacacgggaacac

SEQ ID NO: 481398 - DNA, 187 bp, Homo sapiens
acagaatcataaaaaaggctgcagctatgcacctccctctgtgctctctcactctccattctctaaccatgttagatatgcctcctttctatactcatgcatcttattttagtaggttctagatgaacatctgggagatgtagtacttatctctgcatgttctaagatcttgtctaaactgcaatca

SEQ ID NO: 481399 - DNA, 854 bp, Homo sapiens
  misc_feature (768)..(768): n is a, c, g, or t
  misc_feature (854)..(854): n is a, c, g, or t
agcggaggtgtggcgggtaacccttgggggcctcagtgcggcacgcgatggcatgtcggagtgggctttgcagagctctgaacgtgggcggtgggctaggctcgttaacttgccgagatgccctccggggtttgcggatggaggacgctgaggcgccgctggggggacaggcacggcgggacgcgcgggaactgcccagcgcgagcagtgtctctaggtggcggaatgccgtgtctgtgctcgcagacttgcaagctgtggaaggcttggggccctaggaagatagtggctgagcatctcatactccatgtctacacttcgcagagaggggacgcgagaagtgttctacttatcttgacccagagtggtcagggctgtcgtcatgtgcgaggtggcgaaggatgacagtccttatttgctgtgtgtagatcaattcgtaacagagcaagggaaatttaacgattgagttaactgtgtattacccatgaggtatcttgctggcgatggtgtagaaactatagactgggggtttctggcaaaagtgacacttctggtcttttgggctagtatagaattaagcaaattcaaggcagggcgcgtttgttggcgaaggagtgtgtagagcttgtgtcctagtgcgaaaggtaagtgtatgtagagcggcaaagatttgcagcgagagtagtaatggtcgtcacaatactttggtgaagagagtaagacgttttgtagttgcattgtgggggaaaagtcaaggtaagtagtcangaaggttgttgtcgcaatatatgtccaaaatttgggttaaaagccaaggggcgattccatcttaggggagtgggctaggacggaan

SEQ ID NO: 481400 - DNA, 380 bp, Homo sapiens
caccggcaggttgtactggtttcccctctgcagtgccctggcccgtgggagggggaaggctgattctaatggtggaggaatcccagcttcagtggcttcaaggcaggccattcaacttaccgaccttggcttatacacaccgacgagacgcaacacagacgcagacactagactggcatttgggactcacactggccatgtactcaaaaaggcaggacagcccgttaggggcccaggaatcaaaggtggggagtggggaaaaggaacccacccctctgagggggaggaggagggtctaggctgcggtaggagtagagagatggctacgaggactcagtcatctctagttcctgaaattccctagtacaacctgccggtgg

SEQ ID NO: 481401 - DNA, 279 bp, Homo sapiens
caggaatttatgaaagcagttcagtaatagccaggaagctttttcaatacgtgcggctgtgcaccacgctcattactggacgtacgaagtacatctgaatgagccacgcaaatctcatgcaatgctgctaaattccagggacaggtccgttctataatgctctgtagtgtccggaagtgcaggtacattcccaagttcatctaaaaacatgatcatacgatgtttgttgctgttgatgaatggatcgacaccttccatgtagtgctccttagctccaaa

SEQ ID NO: 481402 - DNA, 489 bp, Homo sapiens
gtcttctccccgacaccagaacaagaaaaggatgccctctctcaccactctattcaacatatacagcactggaagtcctagccagagcaatcaggctagagaaagaaataaaaggcatccaaataggaagagaggaagtcaaactatctctgtttgcagatgatatgatagtatacctaggaaactccacaatatctgtccaaaagctactagctctgataaacaactccagcaatgtttcaggatacaaaatcaatgtacgaaaatcagtaccatttctacatacctacaatgtccaagctgagagtcaattcaagaacacaatctcatttacagtagccactaggaaatgcaatacctaggaatacagctcactagggaggtgaaagatctctacaatgagaattacaaaagactgcatgaagatattagatatgacacaaagaaatgaaaaaacatttcatgtcaggggagaaggggtacagagct

SEQ ID NO: 481403 - DNA, 322 bp, Homo sapiens
tgatcgagccggtacccagggacagcaagtatgagcaggcgcctgtttggttagtgttgtacagcccatgagctaggagggggttttcatttgaaagggttacatattgccgggcgcggtggctcacgcctgtaatcccagcactttgggaggtcagggtgggaggatcacttgaggctaggagttcaagaccagtatgggcaacacagcaagaccacatatttacaaagaatttttctctttacctgtctgggcctgatgttacccgcctgtagtcccagctactctagagactgaggtgcaaggatggcttgttccgctg

SEQ ID NO: 481404 - DNA, 339 bp, Homo sapiens
caaattgatcagtggttcaggcttggagtatgcatcagaattatctgtagagcttagtgaaagtgctgatgcacagagcccacccaaagcttactgcttcagaacctctggggacctgccagttctaatgtgcacgcctagtcaagaatcctttaaaggctgataaacgcattcttgaaatcactgtcaatgcaaaagtgaatgttcttgtgcctataaaacccaagtgttagccactttctacctataaaattctatccaaaaagactcgcagtcaaaaccccgagccaaaacacaaaagaggcaccaaaacagtgccgacttcaatgtgcagaggcc

SEQ ID NO: 481405 - DNA, 464 bp, Homo sapiens
  misc_feature (42)..(42): n is a, c, g, or t
cgatcgcagctgtcatatttccctaattgtgctccatgctanctggaaagccttctcttctcttccccaacctggtaggttcttacccaccctttaaagcccaaatccaaaggccacttgctgtgaagacttctacccttacctggcaacagggtaaagagttcttcgtcctctatctggtcatcatcacctagggaccacactcagcatcacacatggtggacagctggccttaagtgcctcctgccaacctcaaaggaagaggctggggccacgaaatttcatttggagcgtttacttgagtcaaagtgaggcccgctgctgagaagactcagaatccagtaacctcaggatatgagctcccatttgggcttggttacataccagccggtgtctaaacatatatatgtgtgtgtatatgtctatttcctcccaactccgcctccctagtcgctagggactac

SEQ ID NO: 481406 - DNA, 219 bp, Homo sapiens
  misc_feature (205)..(205): n is a, c, g, or t
acgtctcagactgttgttcattggcattagttagtagtaaagactggttatgatacatgcatcgtaaacttcagaaggaaggagaatgtttgtggaccactttggtttcttttttgcgtgtggcagtttaagttattagtttttaaatcagtactttttaatggaaacacttgaccaaaattgtcacagaattttgagaccattnaaaaagttaatgag

SEQ ID NO: 481407 - DNA, 280 bp, Homo sapiens
acctgacatagagcatgcgagcatgaaggaccaatagcaaacattatcagtacttggaacacagaagaccttcggaaccgagaccactatctcaagcagaagagagctaagttgatgtccatgagaaaggctatgaggactaaccagatacaaaatatggagcagaaaggacaacccactggggaggtagcggaaatgacagagcaaccagaacatgactagcagaggagcagcaaacattactaaagaggagatcgcttgcagagcaagtacggttgca

SEQ ID NO: 481408 - DNA, 187 bp, Homo sapiens
gttgggactttcacgggtttggggtgagctgaacgcttcttaactggctggctgctttcaggcctactatgggctgttaaacttttttactctctctacaaggcttctcttcctagctgtccaacagagctgcttcctcttgggcactaacagcttaaactttacaacgggcgactttagcagcggc

SEQ ID NO: 481409 - DNA, 175 bp, Homo sapiens
gtattgtgcagatcctcaagcagacctacagcaagtttgacacaaactctgcacaaccatgactgcactgatcaagaactactgtggctgctctacatgcttcagtgaaggacatggacaaggtcagagacattccatgcgcatggtgcatatgcctgctcttgtggagtgtgca

SEQ ID NO: 481410 - DNA, 390 bp, Homo sapiens
ttttgtattttgtttttagtagagatggggtttcaacggtgttggtcaggctggtcttgaactcctgacctcatgatccgcccacctcggcctcccaaagtgctgggattacaggcgtgagccacccccccggcctgtgtctggtgtcattttaactgaagttcttgagggatagtttcaaagcctggacaacatagagggaccctgtctcttaaaaaaaaaaaagaaaaaagaaaaaattgcccaagcttggtggcacttgcctgtagtcccagctactcaggagactgagtcaggagaattgcttgagcctaggagttagaggctacagtgacctagcaccatgccactgcactccagcctgggcaacagaacaagactttgtctcta

SEQ ID NO: 481411 - DNA, 222 bp, Homo sapiens
  misc_feature (183)..(183): n is a, c, g, or t
gggggcacccccaccaaacgggacaagcaacaggcacgcagcaacgcagcgcaaaacgcgcagccaagccacacccccacgggaaacagcgaggaaaagccccgagcaaaaaacgaaaggggaacgaagcgaaacaaaccccaggggcgggcaaaaacgagccagccaccgcggcacacgagnaacccaaggaacagaagccggcgcgaagagggggcgaga

SEQ ID NO: 481412 - DNA, 916 bp, Homo sapiens
cggacgcgtgggtgaagattggcacccagacaccattcgcttttcacccaagatgatttagatgtcttataaaactctgatgaaccatgatggctacacagacattaagtatagacagctatcaagatgggcaacagatgcaagtagtaacagagttaaagacagaacaagatccaaactgctctgaacccgatgcagaaggagtgagccctccccctgtggagtctcagaccccgatggatgtggacaagcaggccatttataggcatccactatttccattattagcttcgtctgtctgaaacactgtgaacaatctacacagggctctgaaggcacaacttctgccagtttcgatgtagacatcgaaacatttcgtaacgaacagcaacgagaaggaccgggaaacctttcttcgtgaagatccagaaaccgatcaatttaactggtcaacagcaatccaggttctcgcgcattcatcttcttgagctggccccaggttaacgaactctgcaaagatttctgcagtcgatacattgcttgtctgaacatacaataatgaacagtgaacactctgttgagtggacgaagcctggaaagcccgtactcaccagtgcagtcccagcaggattcacagtgccatcaccaggcaccatcaagccctcagggacttgtggtgccggcgtcccgcgctgacagcagggaaacgtacccatggcgacggtggccagggtggcactgtgtatcacgctgtcacggtcgtcactcctcctaggcccaattgcgtcacacagacccttgtccgcctgggacaattaggaatccaaaactcccatcttcaggtactgttaatcccagatctcaagcatcttgcatcacgacgatgctcactctaaaatacaaagcgcgtctgcca

SEQ ID NO: 481413 - DNA, 1610 bp, Homo sapiens
  misc_feature (243)..(243): n is a, c, g, or t
  misc_feature (408)..(408): n is a, c, g, or t
  misc_feature (1359)..(1359): n is a, c, g, or t
gcggaagatggcggaggtgctgcgtcctggggcttgatggtcgaggccatctcctgggacgccatgggcggccagcgatgggctcaaacaggtacgtgctggggccggaatggtggctggctcgtacgcctgtgacaggcatcaaccatttcgtggcaatgtgtctactagaagaccaagctagagagatcacctggcattggtcactctcgaaaagacggtgagtgtaacacctgaatcctntctcactgagtgtcccactacactgacttccagtggcactgcagaccggcatcatgtctggacgagaacgcggtagacggcatgggtatagtctgtcgcgcaaacataacacactacaagcgaaaggtctcacgagcgcaggcctgcatgagtacccgttcctcnaaaggctagattttggagcgggggcaattcctcgagcccgctcgcatatcagaactaaaggaaagaagatgccgagcatgtggtgtgtttccattgcatgccccgtgcaagaagggtccgtaggcggtctcgaaaaagtcgctaaccgagagggagaaagtcttagcccctgcgatcctcgtgcgagccgccattggggtcttcccaccgtaggcggttgtgtgggctccgcgcacaaggttgatccccaggtgcaatgggggggacagatgcgccaaccccattgggagaagaggggatggaataggaaggggcacaaaaagccacgtacaaaggcgcgtacagataattcaccaaaataaaagcccggggcacatgggacagggcaaagaacccaagacatccgggtcgggaaagatgcgtaaaccgacgaagagaccaagaagacccggccaggatacacggatacggatcggaccggaacagcaaacaatatcctgggagggaaaagggacactcccaagtgaagagttccccatcacagaaacgcaaacccggaccgaggcacatttcccgggcgggatgcctctaggaagaccggcaatatggaagaaggcagggggcgtccaaattccgcgtgccaaaacataggcagagccgagtggaaagagggcccagcaggaggaggctacgacacggaggaaaacaaattcaactcacgcgcagtggggccgtcataaacacgggggggctaggcaccaaaagtgggtcggcagggggggacaagcgatatcaatggccgccttgaacgggagcgagcaccacggggagaagcttcaacatcaggacaaggtggggccaaaaacccccggaggggaggcaccacaaaccgggaacaaagaacggaagagagacaaggagaagtaggagataccctggaacaccagtgcnccgggtgcttacagaaaccacgaggcctgtacgaacagcaatgtggcgacaagaacaacacgctaccaggagacaagggggggagtgagcaaagcacgcgggccgctttccgggaggggcgccccccgcttccagagggagggactccacagaggacgattcaaacatgcgagaacacaaaccgcagggaggagaccacccgaccagaacgaattcaacacagactgaaaacgcacacgttcaatcccaga

SEQ ID NO: 481414 - DNA, 589 bp, Homo sapiens
cctcagctcccaagtagctgggactacaggtcgtgatgtctcgggagtcggatgtagaggctcagcagatctcatggcagcagtgcctgattcacagccccagggcgagcgttacccaagtcccaagggctcctccttcacagtcaccaggcgcatatccacgctcctcacaccagtcacagatgccgaaactcacagccatgtcctcgtcactccagtctcgtgggacactcgagctccataagagacagtgtccactcgaggaactctattctattcctgaggaccaagaacctgaggaccaagaacctgaggagcctacccctgcccccggggctcgattatgggcccttcaggatggattggccaatcttgaatgtgtgaatgacaagtacgggttggggagggacaaaagctgtgaatatggctgtgatgaaccactgctgaaaagaacagataaataccgaacatacagcaagaaaaactttcggatttccaggcaagtgggtcctaaaacttcttacatggcatacatagacgactcacgtggcaatggaacctttgtaaatacagagctggtaaggatgct

SEQ ID NO: 481415 - DNA, 233 bp, Homo sapiens
gaccagggaggaggtttaatcaacttggaccccctccggcctagccgccgaggaggtgcattcgggacaaccactaggtcagaacgcagcctctccagagtcctcaggctcgacaacgattatcctgctgctatcacgctttgatttactgatctcgctgaaaagacagacgcttttagataccgagtcgatagggggtctgcggtacttttcagtagataggtggtgcttgt

SEQ ID NO: 481416 - DNA, 200 bp, Homo sapiens
attcctgtggtcgtctctagcaggatcccctatcttttgctgggttcatggaccctgatgcttttttgccacagaaaattaagggtttagattcttaggagagaagctaatgttcatgttcaattttattcttatttattttttgcttatgttttcttatttcagtactgagttgaatatgatcattattttccacttac

SEQ ID NO: 481417 - DNA, 158 bp, Homo sapiens
gtatgagaataaatcagaaataccagaagctcctagcagtaggttcagcttccactggttctatgtatcccccatttctttccctattcaggtccgatatttcttttttttttttttttattttttttttttttttctaaattttttttatggggggg

SEQ ID NO: 481418 - DNA, 139 bp, Homo sapiens
ctgctctgcgacctgggaacacacacactgggtgaactgttaactttacggatcaccttgctacttgtaccttgccacgttttccgtgcctgacgcacacttcactacttgactcccagtcatttctccatttccattc

SEQ ID NO: 481419 - DNA, 128 bp, Homo sapiens
aaatcccactgtatctgatctcaccgctgctgtagaactattttccaagctctgaatgtatatgacaattattcgggccaggtgaaatgcctagaatatttcagagacagcaactagcagtcgggtgc

SEQ ID NO: 481420 - DNA, 132 bp, Homo sapiens
aggaaaaaaggtggtcaggattagggtggatgtaggtaaagtggcaggaaatcagagttgtttctgcctattgattttattttgctttgtgaaatagaaggcaagatgttggctgagcgtggggtaggaggt

SEQ ID NO: 481421 - DNA, 319 bp, Homo sapiens
tactatcgcccccactagagctcaacgtcctttgttcgaacctggcttatttatcaagtaaattagttgtacagcatgtagctaaaacaaaacaacaaaaaattctaaaaatgaattaaatcactttcatccacttcatcccacaaaattatggatacactgtgcatcatttccacatttctccacaaagaacgagggacaacccaaatgaggcacaatgactgaaggcagcagagcagtctgtctactttctgggcaagcacatagcaatcgcagggaccaaggtcaaggtgatccagcaaaaggttctctccatttg

SEQ ID NO: 481422 - DNA, 174 bp, Homo sapiens
gcaaggattggactggtcggcagtgacctttacttcgggcatcaacatgcacgaaagttgcgctgcctgctgtggcagctgcacgcctctgttccctcttcattccctacccacaaatgacttgtggaccatttttgctatcaaaatatctctggctcctgacatgccagaccg

SEQ ID NO: 481423 - DNA, 197 bp, Homo sapiens
ccgtatatgtgtctatctataatcacgtagagtaaaacggaataatcatgtaggcaaatttttatttggtatttttatggagacagtctcacttggccacccagcttggattgcagtggggcaacctcagtgatctcagttcactacaacctctgctcccaggtacaaggaattctcttgcctaagtctcccgagta

SEQ ID NO: 481424 - DNA, 198 bp, Homo sapiens
cccctttaaaccaaagttttagatggggagtttcaaaaaaccgaatgtaaatcctttatcagattttaacttgggcaggactttaagtgaaacccaatgaaaactttaacaaaaattgttttttaaaacatttacagttttggattttccaggtaaaaataaatagggaatcccaaataaatccctttttagttttga

SEQ ID NO: 481425 - DNA, 195 bp, Homo sapiens
aaaggagcatttggcctcctgcttccttttgtggcctttgccggggtccattcccaaggaaaaaaaaggagcttgggctcccaaaaaaaaaaggggatgaaaccccaaggggccctatttttgggatttacaaggaattttattttttacaagtttgcccttaaccatggtttgcaagtgaacagaacattttta

SEQ ID NO: 481426 - DNA, 373 bp, Homo sapiens
gattgcaagtggaatttaaaataaaagatcaaaggtctgaatatcaatacaatatctattacatgagagcagggtaagatttttaataaacaaaccaaaaccaaaaatacttcattaccattataactgtttcattggaggccataaaataagcccataattttccaatcaaatttcaaaaattaaatcacaaaacagagtagagtgtcagaaacatgtatatcaaaagcatgaaaagactaagcaaacctagatgaggaaatgtgtggtgaaaatggacagtccttggagacaaagctcagaggtgctacctgtagctggcaggatatgttcttgaagaagtaggaaaaaattgccaattaatgtatacaat

SEQ ID NO: 481427 - DNA, 103 bp, Homo sapiens
tacgtctctagacccatccccgggtttcgagtgaagctttcctagagcattggcttagtaaagattctaattctctttagggaccctacacgtaggtgtggaa

SEQ ID NO: 481428 - DNA, 126 bp, Homo sapiens
ctgccactccgtcatcccgggttcaggcgattctcctgcgtcggcctcccgggtagctagagattagcaggtgcccaccaccatatccaggctaatatttagtattctttagtagagatggggttt

SEQ ID NO: 481429 - DNA, 125 bp, Homo sapiens
cactgcactccagcctggacaacagagcgagaccctgtcttcaaaaaaaaaaaagtgatttatttttcccttggatttattaaaaatttatacaattgaacaaattcatccggggaaaagggatt

SEQ ID NO: 481430 - DNA, 549 bp, Homo sapiens
ctagaggatccccaaccgtacacctccttgccgtgtacttcttcatccggatcttggagagtgtacttggtcctccatgttcttggtatcttacattagccatggatgctagaaggcactgcgtgcagtccaggcggttattcatatctttcttcaacagattgctgatgaaatccttggccatcgtcggagatctcatcgaatgcctcgtcgtcgatgtcccccgtggctgaggtaacgttggccaaggtttcgttatcgttgtctcccatgaagggggaaaggccactgactaggatgtagcagatgaccccgatgctccacatgtctgtggcgtagccgatgggctcatagttgatcacttcaggagccacaaattctggggtgccaaagaggaccttcagagaccccgcattctccagcctcctggccagaccaaagtcgatgagcttgatcctggtgcccgtcttgttgacacacatgatgttctccggcttgaggtccaggtgcacgatgccctgcttgtggatgtactccactccctccgag

SEQ ID NO: 481431 - DNA, 624 bp, Homo sapiens
gagggctacccgaggatccgggctttcccctcaaatatcatctttcaactataataaagcctatcctataattgacaaaaaaaactttttggtaaggtaatggtggttgttacttaggctttgaagagtgtaccttggtaagtatttgtaagaagtctatggtgattcaggaaatgtctgtctgcataccttttaggagcgtgtgaatggtgtcttcacttattatgtatgtttatctgtatgtatattccttattttgtcatatatgtagagaaaattgcatgacttgaggcatcatttaggttgaagaagttaatgcttaggatgcattctaggagaaaaaatcagttttaaaaacctttgttgttaacaaagtatatccagattggttaattttattgaagggttttttcctgtaattgataaaaatgtaatgacaacaattcaggcatcataaaatactgaactattgtgactttattcttagaatggctgtcttacattaaacatgtttttagggggaagttaggtaggagatagaaaaataagtgcccctacaaggggcattaaacattacaagttaattcctaagagaaaaatggaatgggccttgaggggaaaaga

SEQ ID NO: 481432 - DNA, 267 bp, Homo sapiens
aagcttttactgcacatttcagacagttatgacatgcccagtcctttcatctctgtctcctcagttaatagaaaggaaacatagcccatctatctggacctgtgtagaagaatttggaggggaaaaaaaaaaaaacaggcaagaattgtccccttatttggtgagctacctttattctgtcccatggttctacagcaaagggtttattataaaatattattccagtttccctcgatctcaatcagggctattatttaatcaacaatt

SEQ ID NO: 481433 - DNA, 176 bp, Homo sapiens
aaaggagactatttactacagttatatgaaaggctgttcgggctgacaaggaatgatcagaaaactagtgataccaaataagtatattcagttcaataattattttcaatgatgaatcacttagtgtgaaagacttgcgttgtgctatcgtttatgtaattacaacatcactgtca

SEQ ID NO: 481434 - DNA, 402 bp, Homo sapiens
  misc_feature (22)..(22): n is a, c, g, or t
gacaagattgaggcaagtaaanaattttaaaaagctggttgcaagtaaaagaatgaaaaaaaaggccaaataaaaacttcaatctacttcaactgctgaaaagtcctcttttacaaaccttattctgctgaggagccccattatttaacttacgtattcaattgtcaacaataaaaactaccaagttgccactgctaccatttataatcaaaatagtcttacttaattattgagctcttaaactggggtggtaataattttttatttgttttctaacatcactcaaaacttagagacatttttttttaatgggaattaaaggctgtaatttcaaggtccataaaacaagtttgtagacattaatgaagctattccctgaactccaaaaaaccaaagcaagag

SEQ ID NO: 481435 - DNA, 536 bp, Homo sapiens
  misc_feature (36)..(36): n is a, c, g, or t
  misc_feature (38)..(38): n is a, c, g, or t
  misc_feature (71)..(71): n is a, c, g, or t
  misc_feature (108)..(108): n is a, c, g, or t
  misc_feature (113)..(113): n is a, c, g, or t
  misc_feature (149)..(149): n is a, c, g, or t
  misc_feature (152)..(152): n is a, c, g, or t
agtagcgtccactatgcgtagtatctgcgcgtagtngnatcgcagagacgcctctcagcacgactatgctngtaacctcagcctcacacaccgccgcgggactatctntgaangcactcatcaataataacagacacatgtcatgaggnggnctgcatccttcttcagtcatctatacctgcgcgagcctgtcgctgtcttcggtggtacacgatgagtcagacagaaagtgtcccgccgctgtcgggtgcgacacactatgtaatacctctcggcgtaccgggatatctgcgtattaattttttatatattctttgataattatggtgcagtaattaatatatacggacgatggatgattgattttttatagtgaatgcgcacggtagtgtaaggtgacgatttagggaagtatttgtgagtattgttgagatatattatgtcgtaatattgttgtatattaggtgcgggatgttagctgatctaatgcggtatgtgggacgtggttggattacgaggagagctaatgtatgacg

SEQ ID NO: 481436 - DNA, 109 bp, Homo sapiens
ggtgctacctctctgtcttatgaattcgaacagcataccccgattccgctacgatcaatttcatacacctcctatgaaaaaacttcctacctgggttaggtctacctgg

SEQ ID NO: 481437 - DNA, 433 bp, Homo sapiens
tatggtgctccaagaattgtctttgcacctctctcaaaaatcactttggacatatctctacatctagtttgtgcattttctactctatatcattgatctgtgtattcccccagctgataatatattgtcttgataactatagctatgttataagctttgaaatcaggtatactgatgattgccccctttattttctgatgcaaaattgtttctggttatactagttcctttgactttccagataaattttagcataccacttttctgtatctagaaaaaaatcttgctgtgattttaataggaattgcatcaaatctttggaagaattgacgatctttactgtgttgagtcttccaatctatagaacatagtatgtctcaccatttgtgtacacaaatagtccgcagcaggggtaccgagcgtcgaatatcgt

SEQ ID NO: 481438 - DNA, 1034 bp, Homo sapiens
agcggggaaaaccgtgagctggatttataatcgccctataaagctccagaggcggtcaggcacctgcagaggagccccgccgctccgccgactagctgcgccacgcgagcaacggccgtcgtgattgccccgtccgagtgcaggtaccccgccgtacccactcgtgcggccgcagggctaggcgccggagtgatgctgggggcaggcggcgtctccgaaatgcacgacgctaggctccgagaaggcacggcagaatcgatacgggatgcaatgctgagtaatcaactgaatgcgatcgctgaaatggtactgacggcgcactgtcgcgcaaatgagcgtccgatgactatgaagctcgagatgctcatggcgaaagacacgagatgcttccattacctgtataggaatgttgacgtgggaaattggccatgctactccaagatcggccaaaacctttaattctcaattaaacaaatctaccccggtgaggcgaacgacacaggaaacagctaagtgacctcattaagagattatcgcgcgcggatacgcgatagcacggcgaactaaggtgatatcggatctaatcgtgaaccgaccctgagactgaactgatcgcggcaggattcggacctcactcgagtcatcacatgggactgtaaatccgcgcttgaattaggacactgaactcgttgtaacgaactcgctcgagctgagacgcgagcggtatacgcctaaaggataacgagaacaagatgcgcggctaattgatattactactcgatgcagaaacaaccaaaaaattctctcgccaaaattctacaatccaattaaactgtatccttgtgtcctctgaatgaaatgcctaaaactgagtcgcctgaatggaactacgttgtatccgcgcggcgcggataacggaaagaatcccaagttcctttgattcgaataaacctatttcacaacccagtgtataccgtaacggaggcccctattggaggagccgacctgaacttggaccccattaaaggactcct

SEQ ID NO: 481439 - DNA, 281 bp, Homo sapiens
acaattaatccccgttgcaagtttctattggaccaatatacaatatatgttcacatcatggcaagacaaaagatcctaacctttactatgatgtatttcgtccaggcttagactttgacgtccaggcttagactttgacgtccaggcttagactttgacgtccaggcttagactttgggtgtggactccatctacaagcggtacctggcttatccggtcaatacaattacttcaattaagtaaattctggatggctctttgcaaagcgccccggtcgacgc

SEQ ID NO: 481440 - DNA, 179 bp, Homo sapiens
  misc_feature (143)..(143): n is a, c, g, or t
tttttcaaatcattagctatgtaaataatgctgcatgtacaaaggggtgcgttatattttcaatttagcattttcattttgttaggataaatgtccagaagtgagtgagattcctggtcaacatggtagttctatatttttanggaacctccaaatttgttttccattacgtggctgcc

SEQ ID NO: 481441 - DNA, 871 bp, Homo sapiens
gtctatgccttgaaccgagtactcaagccctatactaaagttatgagaatgcatacgggaaaaaaacccgtataattgtgaacgaatgtgcgaaaagccttgaagcaatcctatcaactgagtagacttacaggatagttcatagtaaaagagaaactcaactaagggtgaacgaattgtgggaaggccattaataaaatgacgtactactagtcaggaacttagtacatagaagatagaattccatattggcgatgagaatatccatagagagatgtggagggaaaagtggcatgagtgtttattaaccggaggtccttcaggtacgttatgtgaaacacagaatgataggttcgtatagggtgaaagaagtcaacctttcatagaaattttttgaacgaacgtggaagaaaagagtattaaaaacgtatttcggcaaagtgtttagctaatcataaagaataagttcagtatctggagagagaacccccaaaaatgtgaagaattgtggaaaaagtttataaacgatttgttcaaaatctagttatagataagagaattcagtacgggagagaaatcatttaaccaatgtgcagaatggtggcaaagcatttaaaagttgctctcaacccttatagaacttaggatattcatacctgtaggaaaaaccttacaacttgaaggaatgttgggaaaggttttatacatatcttaaccttaatgcaataagaaattcattggggaagaactataatgtggcaatgtgggaaggttaatcatctttaacttttcgtaagaatatgtaaagaacctaaagggagatggatttaaaagtatatgaaaatagaatcttgggaaaccattgttggaa

SEQ ID NO: 481442 - DNA, 1023 bp, Homo sapiens
tactgagctggttcttcctcacctgtgcttgtggccacgtgtgcacatgctgtgcctgcttgctcatgcccgctgcccccgtgctgtgcctcctgcctgtggcttccccctccctacatgagatgatgctgtcccgtgggtggttcaccgagacctcagtggtgctgtgattgcagagaccctgctcaatgtggcctgatgtgtgtccactgtgtagcttccttgtgctctgtgcccatgtctgcaatgaaccagtggtgacttctcgctctcctgtcagggtggggtgatcagtgtgacccatattccggatccatgaactcacgtggtgatttctatgacctgtatggaggggagaagtttgcgactctgacagagctggtggagtactacactcagcagcagtggtgtcctgcatgaccgctgactggaaccatcatccacctacaagtacccgctgaactgctccgatcccactagtgagaggtggtaccatggccacatgtctggcgggcaggcagagacgctgctgccggccaatggcgagccctggacgtttcttgtgcgtgagagcctcagagcagcctgtatcacttctgtgcttactagtgctcattgaccaagccaatgctggcccagtgctaccccgatcaaggtcagccagatcaaggtcatgtcgagggtggacgctacacagtgggtggtatggacaacgtcggacagccctcccgtaccattgattaagcaattccagaaaaccggtgcattgctgttgtcctcaggcgccattggacaaccgtgaacaaacggacgtaatgccacaggccttacatgccgggtgacatttgaggaccccgcgtatgttggcaccgtgtaccacaaacgagtgcggtcccgggaactcaggcactgtctgtgcactgccagcggctctgaatcttcagcacagccggggtgacggccctagccctccgtcgaggtgcagggctcctgaaccgtcgctaccctacagagcctcccgta

SEQ ID NO: 481443 - DNA, 1064 bp, Homo sapiens
tcctttgaaagggttaaaaaccctctttggccgagggagttgtggggagtattggtggggaacaagggtccccttgggggctgagtatggcgcctagaagggcgcctaagtctgtgtgggcgcaaatcgcagtttcctggtgggcgtctggggagaactctctcactgtgcgcgggggcccgggggacgcagcccgaccaaataacaccggcgtttctaaaaaaaaaaaaaaaaaaaaaaaaaaaaaaaaaaaaaaaaacaaaaaaaaaaaaaaaaaaaaaaagggggggggccacatacaaaaaacccccgggggggccaaaagataacaggaaacgacacaagtagcacaaaacgggccgcaccaagcgggggcccgcctctcacgcacaaaacaccctaccacctatgaaacataccactcactcaaatatagagaaaacaagttaccccattaaacacaaaactttttggtgacaacaaaatctattcatctcgaggttgataataaaacatatagccaaacaaacaccccctcaccagcctcccttataacaagcaaccctagaggccagaaaaaactaaaaacattttcccaccacccatatacaatggaataacaacacacacccctcctattatacagtcgactgtttcacacacactatccattgctctaaatcttgctatacaccactcaactcgccgccaaaatttctttaattacaaaaaaacacttatcacattatcaaacttactacaccccactcaccacatccaatccactcatcccccatagtccccaaacactacataacaccataaaacaatacacaaatcctatcacatctcctcaatcacaatcaagcaatacatcactataacagaacaaaaaaacactaacgagactaagctcaaagatcaccatactaatacaaaccaatcacacttctacacattaattatctaaacagtgtatgatctcaactcacaatattcacaataccactaacaaacctcaatctaaaacaccccattataaattgtctatatataatacaaca

SEQ ID NO: 481444 - DNA, 926 bp, Homo sapiens
tggagggtcggaaacctttttattgggggggaggggccgcggcccccaaatttcggcacccaaaaaaaaaacccaaaagggcgttgaacacggggccgtcggtggtcggattggaccagggccggtggtggcgggaccgggggaccaggacgccatcgcctacaaatctcggcccttcggggcaagggcatagaggcccggggcaacaggcatagcaagagaagcgcagtcgagaaggcagtagagggcgagactcacaggtccgaacccagcatctcgagcgcatccctcgtggatgccacagcgcacattttggacacccaaaatgtgccgcgccaaagaggtgatgagtgcaaccccaggtgggtataaacgcgtattgagggcggccccccacaagagaaggggcgaggggcgaacgggtggagcaaacagcgggggcaacgtgggttctacacaataagaattattgcgcaaagcgcacgaggccggggacatcactcacacacaggggcgagcgggaatcatccgaggggaccagatgtgcataccaatgatcggcgcagcagagtcagacagccgccagcacccccgttcgtgacacagcgaccagcgagctcgaaggttgtgcccccgtgagcacagctcactaggaaggagcagaaggcgccgagggcatcccacaagtgagacaaccaggcaccccaaatgggaccaagtcgggggcagcagcacaaaggggggcagaacaccttgtcgcgacacaaagctcggcaccagagaaagaggcaggaccacgcaagagagcccgcgagaaaccagtgactaaagaggccacacctagtacgtctgccccaggaaacccggagaccaaggcagcgtacatgagccaccccaggtggaggagaaaccaccagcgccctgag

SEQ ID NO: 481445 - DNA, 255 bp, Homo sapiens
tacagagtgaaggtgttcaccacaggggctttccatttaaggaaggtttcgctgtggaaggccagggtcgggccgccgaacaccaggcaggcgacgagggtgagccattgtcttttttccagcttgcgctgcgagatgaagatggcgccgtacactacgatagagctgatgagcagtacggcagtggcactgtagatgcccccgaacgacagctcgtggccggcgatttcgatgaccctgaggtcgagtttggta

SEQ ID NO: 481446 - DNA, 1061 bp, Homo sapiens
  misc_feature (10)..(10): n is a, c, g, or t
  misc_feature (63)..(63): n is a, c, g, or t
  misc_feature (227)..(227): n is a, c, g, or t
  misc_feature (244)..(244): n is a, c, g, or t
  misc_feature (251)..(251): n is a, c, g, or t
  misc_feature (266)..(266): n is a, c, g, or t
  misc_feature (271)..(271): n is a, c, g, or t
  misc_feature (281)..(281): n is a, c, g, or t
  misc_feature (317)..(317): n is a, c, g, or t
  misc_feature (337)..(337): n is a, c, g, or t
  misc_feature (354)..(354): n is a, c, g, or t
  misc_feature (361)..(361): n is a, c, g, or t
  misc_feature (390)..(390): n is a, c, g, or t
  misc_feature (414)..(414): n is a, c, g, or t
  misc_feature (417)..(417): n is a, c, g, or t
  misc_feature (537)..(537): n is a, c, g, or t
  misc_feature (606)..(606): n is a, c, g, or t
  misc_feature (609)..(609): n is a, c, g, or t
  misc_feature (984)..(985): n is a, c, g, or t
tctccgaatntataccacagatacgcgacagtgagttcacaggcagagcaccacaggccactntgtccacatgaggggcctgccgtacaaagcgaccgagaacgacagttacaacttcttctctcctctcaaccctgtgagagtccatattgagattggcccagatggaagagtgacgggtgaagcagatgttgagtttgctactcatgaagaagctgtggcagctntgtccaaaacagggccnatatgcngcacagatatatagnactcntcttgaatcnacaacggggccagcaatggggcgtatagcagccagntgatgcaaggcatgggggtntctgctgccccagactnacagtgncctggagagccagtcagtgagtggctgtnacggggccggctacagtgggcagnacngcatgggtggctatgactagttttgttaggaacatttgagtcacttcaatcattttcacaggcagcccacaagcaattaagagcagttataatagaggaagctgggggacccattttgcnccatgagtttgtgaaaatatctggattaaaaaattacctcttcagtgttttctcatgcaaaattttctnctngcatgtgataatgagtaaactaaaactattttcagcttttctcaattaacattttggtagtatacttcagagtgatgttatctaagtttaagtagtttaagtatgttaaatgtggatcttttacaccacatcacagtgaacacactggggagacgtgcttttttggaaaactcaaaggtgctagctccctgattcaaagaaatatttctcatgtttgttcattctagtttatattttcatttaaaatcctttaggttaagtttaagctttttaaaagttagttttgagaattgagacacaatactaatactgtaggaattggtgaggccttgacttaaaactttctttgtactgtgatttccttttgggtgtatnnttgctaagtgaaacttgttaaattttttgttaactcacaccttttttttcttaaaagtaaagggcttttttcacaa

SEQ ID NO: 481447 - DNA, 540 bp, Homo sapiens
  misc_feature (345)..(345): n is a, c, g, or t
agtaatagcagttatcatatcttcctcacaacacacagtggcacccagctaacaggaagacttcagcaacaacctcccttcctcctggggattgtgatgcctcggtgagaagagtgtcactctgcaaacaccaactccaaagtactcttctaggggagaagtgagaatatagggtactcacggaagatcatggttaaggagtgtgctggaaatccacaggttatcaatttccactgtttgctggtgctattgaaacttctaagagtaggcctagttctagaagtgtcaatagcagtacaacagcatacaatatcttcacctcctagcacgacatctgcccttgtngaggaacctaccagctactacagcagcccgggctctattgcaacatacacactttccggagagctccacaatctcaggccgtagtgaggaatctgcagcatcccacagcagcccagataccagtgggatcacacacttacctgcccattttactaccccaggcagcaatgtgctattgaaacttctaaaactagg

SEQ ID NO: 481448 - DNA, 619 bp, Homo sapiens
ggccttgcaccacaccctcggaaacctccgggttcgttatctttgccttgcgcagagctgcctctggttgaccctggttgctccagagtgtcccgctctccctccacggtgggaccctgggcagggtttgcccaccacactggggcacactgcactacagggtcttgtctgtgccccagcaccccggtgggcttgcagggtgctgtgttgccttgctccctatactgactccaaaccttgagaccacgtatttgttgtgtgagacccgagaggccctggcaaaccagggctagcgcctgccccctgtggttacctaggcgcctccagggttggtgcgctctgctgtggaatccctgggctcaaccaggcgaagcccctgctcttcactgtagttctttgtcctttcattttccagttgtccctgtctctgggtggggtggactggaccggactgaccccatggggtgcagcaagggcacctgggtgagccctcctgggggtcctcccaccacaaacgtgggatccgtgcacgttaacgattacaggacatcggaaaccctttgctctttttttttttttttttttttcttttttttttcttctcttttttttttttttt

SEQ ID NO: 481449 - DNA, 1191 bp, Homo sapiens
  misc_feature (5)..(5): n is a, c, g, or t
  misc_feature (147)..(147): n is a, c, g, or t
  misc_feature (193)..(193): n is a, c, g, or t
  misc_feature (293)..(293): n is a, c, g, or t
  misc_feature (397)..(397): n is a, c, g, or t
  misc_feature (409)..(409): n is a, c, g, or t
  misc_feature (514)..(514): n is a, c, g, or t
  misc_feature (558)..(558): n is a, c, g, or t
  misc_feature (581)..(581): n is a, c, g, or t
  misc_feature (596)..(596): n is a, c, g, or t
  misc_feature (677)..(677): n is a, c, g, or t
  misc_feature (1136)..(1136): n is a, c, g, or t
  misc_feature (1186)..(1186): n is a, c, g, or t
  misc_feature (1191)..(1191): n is a, c, g, or t
cccgnagtggggcgctctatagtggccggcaccccccgggaaactccgccctctatcaggggcccggaggcacgggaagtgcggttatatgcagcggggcgctcctgtatgacgacgagagcccacatcggctggctgttcgtcttntggcacgcgtgttagctgaatgtcaggaggagcgtatcagaggacncttatacattcctgcgcaccgcgcggggtcgatcacgatgtgtcacgctgagataagatttatgtgggtagtgggtcgtgtggtgcggacgcgtgcccgncggggtgtatctgcgcgcttagagcgtatacggagagaagaggcggaggagatggagggggaatgatgggtggtccggtgtcgttttgtttgctgatgataagnataataatatgntgaggggtagaaagagcacaaagagcgcggtcggtgtcggcgcggggcggcgcgtgggtggacaggtgcgccgcctcgcgcggacacgcatcccaagcgcaatgncagactcagcagcagggaagaaagagaggccattcgtgtccganactcggacaggcgctacggagantagaatgactagganagagggcgcaccaccggcactcccctccaatccaactacacatgtcccggcagccgtagggctgcttccgcttcgcccgcncgtgccgcgcgcgttcgattcgtcgaatgatagcagagcaggggacgtcgcgcgcccgctccctgagcctctcgcgccgctcgtatgcggagattaacgtcagcgatctccgcgaggcggacgcgagcggcgggcgagcgcggtgcgcgtagctgatgcaaccctaccgccgcacagcgcgccggctactcgcgcgcggtcgtgatgagggatgtcgtggtctgagcgccgggcgcgcgtgcggatttcgccgctgttggcgttggtggagtcgcgtgcggtcgtgtgagtgtagggtgatatgcggcggtcgtttattcgctagttgtgttgctgtctgcgaccgcggagtccgacgtcggagtagtgaatggtgggtgagcaggtagaggtgcagccatagcgtatgcgatggacgacgtgcgacgccccggtcgtatgttctgcgggccgtgtatncggatagtctgaactacatgtgcgccgccaacccgtcgatgtgtcacggncgagn

SEQ ID NO: 481450 - DNA, 1104 bp, Homo sapiens
ggaaatgaattgaaaggttgaacacagaatagggaatgaaaggccatttattactcaatgaatcaattagtaagaggaatggaacgcaatgccattttctgtttctaggcactcccacctatgtcacagcgtcatcgttcatataagtcggtcgtcgtatgatgtgcagtgatacagtacgatctgaactgtacttcaggatgcaggtctctatgatctactcatttggaccaatgcctatatcagcaaatggaagcaatcttgatgatgctgtgacggcatgggagcaggattggagctataattgaaaagcctacagtctcagctaacgctaggggaaggggaaatcacctcatttacagctagaaattggcaatctagaccaaaactcgattcaataatggcgtgaagaactaggtgcaattaactatatcgacctgtatgaacttgaagacgaaggtgaaggcgatacccgaaacttatcaactctagctaagcagattcggatcacaaggtgcaactactattctgccgcatgtcatggcgaaaagaagcaaaaccaggaagcatgacagaaggcagaaaagcaagaagcaggcaaccaagcaccgtagacgcacagccgcaggccagacgggcgcaagacggcacgacgggcttgacgcatagacccgaggacgcatgagagcacaaagaggaaccactaggaagtaggaggaacaaacgaaagcaggagcccagacaagaagccgggaacaccggacaagacgaagacacgagaccgagacaacgggagtcccaccacggcaccacacgggtccgcaacccggcaggaaaagaacgcccggacaaagcccggggcaggaacaaccacaaagcaaaggggggcacacccaaaaaacaacctgagataagaaacgcgcacgcagactagagaacacgagaggactcgacaagagcaacggacagtaataaaacatgacgaaacacgttcgcaaacagcgggataaagacacacatccacagggagacaagagaggaagcaagaagaaaaacagcgcgccgttcactgcccctcgcggttgacacgacacaggaggaagt

SEQ ID NO: 481451 - DNA, 215 bp, Homo sapiens
ctgtggaagacggcgaggagaacacacactagggtctgtgaaaaggtcgggggtagggggagggagagcctcaggaagaagagctaatggatgctggcttcatacctgagtgacgggttgatctgtgcagcaaagcaccatggcacatgtttacttagtaacaaacctgcacgtgcacccttgcccgtcttccacagccctacccgtcttccaca

SEQ ID NO: 481452 - DNA, 356 bp, Homo sapiens
caggccccggcagcactgctacttgggagaagccacttcacctttgtattagttattaaaaaatataatttgggctgggcgcagtggctcacgcctgtaatcccagcactttgggagtccaaggcatgcggatcacttgaggtcaggagttcgagaccaccctggccaatatggtgaaaccccatctctactaaaaatacaacaaagttagccgggcgtggtggcaggcgtctgtaatcccagctgcttgggaggctgaggcaggagaatcacttgaaccctggaggtggcggttgcagtgagcacagatcatgccactgcactccagcctgggcaacaaaacgagacttcgtctc

SEQ ID NO: 481453 - DNA, 1156 bp, Homo sapiens
  misc_feature (249)..(249): n is a, c, g, or t
gcaggtgttagcaggagcttcgaagggttagtgagcggctgtattttggggcatctgtggtacccggactgtgcaatcatgtgtgtcgcagtgaatgggtgtgcagtggacctaggaacgttactacgaggatacaagtgtcgtctacaagatatgttaaacgaggaagctctgggtgggcgctcgttcgcatcaaccagtaccatgacccagaggggttgtggcaggacttcccgatagctggtgttngggtaggggtccgtctagagtgctggaaagcatggtatcgtctagagggccgtgccgcaggtcgtcgtgacacgtacgacatcactctacgaacgattgaggtgaggcgggcacacgtcgaatgcgacgtatagtacggcgcgtatcattgcgtggttcgcagtggagcgacatacgatattccctaaatgactgcggcttatggttggtgtagaagagccacatgtggccttgaaggaaactgctggaaagattcagtggaaaaccattttgggcagccatgctttcaaagacaatggcagagcataggggtcagaggaggggtttgggcgtaggcgacgcaatttgcgcaatcatccccagatgcaatgtctgtagctgccagggacgagtgctttaagggaacagttatggcttcgtaatatacaatgtgagaatacgaagggacagatagaacaatactattggggcgtggttaacgggataggcgatgagtcatcgtctcttatataatccgtggtccttgtgtaagattggggttctatggacttgaatacggttcaaaggcggatttcatgtggtatggcgccataaaagtttgggatccaattaactcctggggtgagctttggcagcgaagggtatccacggggcacgcaaagatggacccgtgttggaacttagacttggggtgcgtcaataagatgccaaacaataacttgggttgcacttggtgtcattcgggcaaaagtggtcgaaataggggccatactcattcttctaaaattggccaaggggggcaagtaggtggtttgtggcaccccagtaggctttgcacttaggagggttatgagtacttttggccggggtttaggtacccggttggagtccccttgggaagactgaa

SEQ ID NO: 481454 - DNA, 114 bp, Homo sapiens
cagcctcgaaatacagaaggacaccggcgagttcgtggacctgtacatgcagcggaaatactccatagcaatctcatcatcggtaccaaggaccactcatccatccagatgaac

SEQ ID NO: 481455 - DNA, 397 bp, Homo sapiens
  misc_feature (294)..(294): n is a, c, g, or t
  misc_feature (364)..(364): n is a, c, g, or t
  misc_feature (392)..(392): n is a, c, g, or t
  misc_feature (397)..(397): n is a, c, g, or t
gagtgcagtggcgtgatctcggctcgctgcaacctctgcctcctgagtcggagcaattctcctgcttcagcctcctgaaggaggaactacaggaatggggaaccatgcccagctaatttttgtgtttttagtagagacggggtttcaccatgttggccagggtggtttccaactcctgacctcaagggatcctccagcctcagcttcccacagtgctgggattacaggtgtaagccaccatgcctggccataaacttgtatttttttaataacacagagtctccctttgttggntggagggctggatctcaacctcctgtggctcaaggggatcctctaggcctcagctttcccaggttagctngggaccacagacaggtaaccaagtggcngggtn

SEQ ID NO: 481456 - DNA, 152 bp, Homo sapiens
gggcaacattggtgagaccccatttctataaattttaaaaattaaccagggcatgttggtacacacctgtaagtcccagccacacagaaggctgaggtgggaggagtgctttagcccaggatgtcgaggctgcagtgagctgtgattgcacc

SEQ ID NO: 481457 - DNA, 132 bp, Homo sapiens
  misc_feature (51)..(51): n is a, c, g, or t
  misc_feature (85)..(85): n is a, c, g, or t
ggaataaaaacatattaacaaaatgtattcaatcatttacaatacaaacanggaatctgcagtctgttgttgtagcctgacaaangaaatctatccattaagaatctgtgcacaatgtaattgcaaatatgt

SEQ ID NO: 481458 - DNA, 164 bp, Homo sapiens
cacaagaatcagcggtaggtaagcaggcacccagcaggagctgatatcacagttcttacatggacaactctttcaggcattatccatcagagtactttattttacaaccgtgcttttctatctaaaactcaaaggtgcacttattatacatacaaagttttata

SEQ ID NO: 481459 - DNA, 506 bp, Homo sapiens
cgagcacggtgctgagacgcgagcaagggctgctagcagcgtgtcaccctctcactatgattaatacgttccgacgctctcatggaaaaagtagataccatgcaaaaacagatggacaatttaaacagaaagatacccattatcagaaagaataaacaagaaatgatcgagactaagacaaacaacccactaagaaatgaagaaagctttggctggactcatgagtacactgcaaatgggctggagacacaaacgcccctcttgagcgtggaggactatgtcaaccacgaaacctttgacaaacctgacaagttgacgacgaccaaccgacttgaaccagattgagaaagactatctaattacaaaaagtatactataggcatcatgagaatacctgaagaagacagagagaaaggaacaacagaaacatttgaagcaataatgcctgagaatctcaccaaattagtgccagacaccaaaccacagatcaggaagctcagaaataa

SEQ ID NO: 481460 - DNA, 532 bp, Homo sapiens
tattgagtggacttgatagtcctggcagatgttcgaggtgtacgagaggagtcgatgggtgccttgcgtcgggaccgtgggatgtggagtggatgctgggtgtgacagaggccgcgatgagaggaatggctgtactgccaatgggctctgcatgacgacgatctcatggttctaccctgagagcgtgaccttggcgttgccgattgatgaagcaagctctgttcctgtaggtgtgtgacctgcgatggcgcttggcgagcttagcgatcggacccgcgaagcatggggccttgtgccggttgcggcgggacgtcaatgtgttgctactgttcgaatcggtgagcgaggtcagactgagtggcatttctaggggagaggttgtctgtgactttgtatgtcgtggttctatgcgccgctatcacccgacggcagtcgtaagaggttccttggatggatatggtgggcatgcaggcttgtacgccctctaatggcgaagcccggtttcgtggtccctccgcgaggcgccacaccg

SEQ ID NO: 481461 - DNA, 682 bp, Homo sapiens
  misc_feature (465)..(465): n is a, c, g, or t
  misc_feature (560)..(561): n is a, c, g, or t
  misc_feature (594)..(594): n is a, c, g, or t
  misc_feature (599)..(599): n is a, c, g, or t
  misc_feature (617)..(617): n is a, c, g, or t
  misc_feature (619)..(620): n is a, c, g, or t
  misc_feature (624)..(624): n is a, c, g, or t
  misc_feature (631)..(631): n is a, c, g, or t
  misc_feature (634)..(634): n is a, c, g, or t
  misc_feature (648)..(648): n is a, c, g, or t
  misc_feature (661)..(664): n is a, c, g, or t
  misc_feature (667)..(668): n is a, c, g, or t
agataatggaatattatttggtgttaaaaagaaagaaactaccacgccatgaaaagacatagaagaaattcagatgcacattactaagtaaaaaaaaagccaatctgaaaaggcgacatattgtatgattccatactatatattaccaatataacattttggtaaagacaaattatacagacagtaaaaagtaaaaggcaaaattatagagacagtaaaaaatctggaaaggctatatactgtatgattccatactgtatgttaccaatataacatttggtaaaggcaaaattatagagacagtaaaaagaatagttgttgccaaggggtttggggaaggagggatgaataggtggagaacagaggatttctaggacagtgaaaatactctgtatgatactataataatggatacatgtcattcatatccacatttgtccaaactcatagaatgtccaacaccanaaacaaaattaaaaaaaaccctaacatatagactctgagtgacgatatggatcaatgtagtttcatcaggtgtaataaatgtaccactttggtgnnggacttggatatgagggagctatcatgtgtgtnggcangaggtagatgagatactntnnaccnttctctnaantttgctgtgaagcntaaactgctcttnnnnatnntataatttacattg

SEQ ID NO: 481462 - DNA, 620 bp, Homo sapiens
  misc_feature (465)..(465): n is a, c, g, or t
  misc_feature (498)..(499): n is a, c, g, or t
  misc_feature (532)..(532): n is a, c, g, or t
  misc_feature (537)..(537): n is a, c, g, or t
  misc_feature (555)..(555): n is a, c, g, or t
  misc_feature (557)..(558): n is a, c, g, or t
  misc_feature (562)..(562): n is a, c, g, or t
  misc_feature (569)..(569): n is a, c, g, or t
  misc_feature (572)..(572): n is a, c, g, or t
  misc_feature (586)..(586): n is a, c, g, or t
  misc_feature (599)..(602): n is a, c, g, or t
  misc_feature (605)..(606): n is a, c, g, or t
agataatggaatattatttggtgttaaaaagaaagaaactaccacgccatgaaaagacatagaagaaattcagatgcacattactaagtaaaaaaaaagccaatctgaaaaggcgacatattgtatgattccatactatatattaccaatataacattttggtaaagacaaattatacagacagtaaaaagtaaaaggcaaaattatagagacagtaaaaaatctggaaaggctatatactgtatgattccatactgtatgttaccaatataacatttggtaaaggcaaaattatagagacagtaaaaagaatagttgttgccaaggggtttggggaaggagggatgaataggtggagaacagaggatttctaggacagtgaaaatactctgtatgatactataataatggatacatgtcattcatatccacatttgtccaaactcatagaatgtccaacaccanaaacaaaattaaataaatgtaccactttggtgnnggacttggatatgagggagctatcatgtgtgtnggcangaggtagatgagatactntnnaccnttctctnaantttgctgtgaagcntaaactgctcttnnnnatnntataatttacattg

SEQ ID NO: 481463 - DNA, 314 bp, Homo sapiens
agacagcctgggcacataacaagacttgtctgtatacgaaatttaagaattagcctggcatgttggagcccacctgtggtcccagctacttgggagactgaggtgggaggattcttgagcctgggaggtcgaggctgtagtgagctgcatttgcaccactgcactccggcctgggtgacagaacaaaccctgtctcaaaaaaaaaaaaaggaaagaaagaaaagaaaattttggaatggacttttaataagcgggattggtcagtcgggggatgcgagggtgagtgcgtcggaagttggagttggctaggcaga

SEQ ID NO: 481464 - DNA, 400 bp, Homo sapiens
  misc_feature (31)..(31): n is a, c, g, or t
  misc_feature (85)..(85): n is a, c, g, or t
  misc_feature (111)..(111): n is a, c, g, or t
  misc_feature (117)..(117): n is a, c, g, or t
  misc_feature (220)..(220): n is a, c, g, or t
  misc_feature (271)..(271): n is a, c, g, or t
  misc_feature (321)..(321): n is a, c, g, or t
  misc_feature (334)..(334): n is a, c, g, or t
  misc_feature (367)..(367): n is a, c, g, or t
  misc_feature (388)..(388): n is a, c, g, or t
  misc_feature (393)..(393): n is a, c, g, or t
agaagtgatgttctttaaagaccagattctncatgcgcacgaaatccgttcttacccggaagttgaacctccaatttcatttctngttttcctggccacaacttgccaaantgggcnttgaagcttgcttacgaatttgccgacagagatgaagtccggtttttcaaaagggaataaagtacttgggctgttcagggacaagaatgtgctacacggatanccccaaggacatcttacagctccttttggcttcccctaagaactggtgaangcatatcggatgctgctctttctgaggaaaaacacttggaaaaaacctancttccttggttgntaacaaatacttggagggtatgatgaatataancggttctaatgggttccaggnttatncccaaaa

SEQ ID NO: 481465 - DNA, 300 bp, Homo sapiens
  misc_feature (32)..(32): n is a, c, g, or t
  misc_feature (66)..(66): n is a, c, g, or t
  misc_feature (99)..(99): n is a, c, g, or t
  misc_feature (108)..(108): n is a, c, g, or t
  misc_feature (146)..(146): n is a, c, g, or t
  misc_feature (158)..(158): n is a, c, g, or t
  misc_feature (285)..(285): n is a, c, g, or t
cttcctgctgctgcgggaccttctgcggcgangagaagaagaaggggcccaaagtcaccgcaaggngtattttgacctacgaattggagatgaagatgnaggccgggngatctttggctcttcggaaagactgttccaaaaacagnggataattttgnggccttagctacaggagagaaaggatttggtacaaaaacagcaaattccatcgggaatcaaggacttcatgatccaggcggagacttcaccaggggagatgcacaaggaggaaagagcatctacggngagcgcttccccgat

SEQ ID NO: 481466 - DNA, 217 bp, Homo sapiens
agctgctaccgttttacggaagcagatagtgaggaaagttgagcatcatgacgtgcagtccgtggacagcctgtggctacaaaaaatgttgagcctgtagatgccgtcggaaatggtgaagggagactcgaaggtactcttgaggcttgtagagagggtaacatatgagacccagataaaattgtaataagcagtgcttgaattatttggttacggt

SEQ ID NO: 481467 - DNA, 685 bp, Homo sapiens
  misc_feature (46)..(46): n is a, c, g, or t
gaagggtgggggacatgctaggagagggtaggggtgagaggtcggnataggccaggagagagagagatcagtgagtgggagatagagctagagtggggatatgggattgggtagatagggggctatctaatcttgtgagaagcgacagagaggagaggtctggaacagtaaagagcttgtccttgcattacagccatccactatgatgggatgtatacccttttgtgagagcttgaaaatagcaatttatttctcattcataagcctgagtgcaaaatacccttaagtggatgtctcaattagcagagactccaaggtcatataacacccagagcaccgcttcatatctgtgttctttactgtattgtagactcagttcgtccttattagaggtagagttttagccaagaaggaaatctcaccatggaactacagaagtgtaccagagaaagtctctctaggaatagactaatctaacctcaggcactttaggaaaactgaagcccagagaactcaagttcctcgcctgaggtcacacagctcagtatcatcaggaacagaccagtcctcagggttgccttcctccacttcagtgttgttgccatgatagcacaacaaagtagtgcagatactctttcagaagtgtgcgtttggaaaattgctagcctgagtacatttctctcta

SEQ ID NO: 481468 - DNA, 1420 bp, Homo sapiens
acgccctacctcacattcctattgacatctgctgcagatcacacccttgtgatggacaaactgctcaggtacagtcccacccaccacagcctccttgtcctgggcacgcaggttttatgcctcccatgatttggagtattgtggccctgtacatagacgagctgccgacgactgatggtgacatattccttcagccatgtgacgaacaggatgtgtgtgacggatctcatgcacttgacactcgtgcgcaccgcataccccaagaagtcaagtgtccactcctatcagcacaggccacaacacaaaaccctgtgtctctgtattatctagtccacagccagacatccgaccacaggatcgatgagttgcaatacaggaacctcacgacaggcatcacatcacccgagcgtcaaccattgccatccactcacaaatactgcccttatcaatgctacacaagattaccattaaaatcatacccaggaccccacatcgaacaccttcgctgcttgtgcatggcacacatgcataggaaccaacgaatgccatagagaccgtgcacaatgcaattagaattaggaatcagctctatatcctaattgcaacgtcaacacctaactggtatcaaacggacttggatacgcagagacaccactcgctcctgtagccatccttgtgtgacatgtcaacacacttccggtccatgttacgacactcacacagacaactctccatgcccagttgctcgccgagccacccatattccatgaccacctgagaccatccgcccagttgcgattactcatacatctacctaccctagcataaataccaaccactaataagacacaatatacaatatatctactacatcttcaataatttctaaacacacccagcactatacttgatcacccaaagaacatactacacaatcaaatcaacattcaataacacaccaacaataatcccaacacataacaccacaacataataccatccctcaatattctataccaccacattgtcacacttccaaatcttcatcgccatctattaaccaacctcaactaaacacctaaccgagtccaccccaaaaaatcaccatatacatcttctcaaacacaaatgcatgtacatcactcacatcactccacttttaacattcactacaactctctaactctctccccccctaacaaacacgaattacaatagtacatcacttcccatctctataccaactatcacacaaacatatactaatctcacctgccatctaacacattaacaataactacctactaacacacacacttcaacccttatcttacaactcacacccatacacacttctatttacacaataaattacaccccaataactaacttacaccttaataatattccacaacatctg

SEQ ID NO: 481469 - DNA, 572 bp, Homo sapiens
ccctgtgggaatgtcacaggttggagtcatagggtgtgtagcctttccagattggcctttcactttgtgatctgcatttcaggtttctctatgtcttttcatggatggaaagctcactcatttttagcactgaatagtatttcatggtctgcatggacgtgccacagttcatttctccaatcatctgccaaaggacatctcggctgcttccaagtcgtggtgattgtaaatgacgctgctatcatcatccaatgcattttaagtcttccctccactttagccattctgcgaattccacttcacgctgacatcacaaagacaggacccttttatgtgcatttttcccagcatccgtgggtgacaagtttgagaggcacaggcagcagcggccgctgcttctgttggatccaggagggaagggaggttctgagctttggagcgggaagtgaggagcctcagctgtccgcacccttttgcctgttgtgggcagcgtggtcatcacaccaaccttcacatccaacaaatgcttgcagaactgacaggcacatggcacgagcacgccgcctcgtgcc

SEQ ID NO: 481470 - DNA, 221 bp, Homo sapiens
aacctactacacatccacaaaaaagaatgaattatcagcatttgcagtgacctggatagactggagactattactttattttattattatactttaagttctggggtacatgtgcaggacgtgcagtttttgttacataggtatacatgtgccatggtggtttgctgcacccctcaacccgtcatctacattagatacttgtcctaatactatcactcccc

SEQ ID NO: 481471 - DNA, 1968 bp, Homo sapiens
tctctggagccccgtgcttgttcctgtattgtggcacggatttgcgtgctctgacaataatcctgcataaactcctgtagatgtctggtgtagcggctctagctagtgagctgcaatactgggcatgagttggatagctgccggtcatagcgaactgggtccattgcagctagatcttacacgaaggactagtatactggggaccccacatcttgtgaggcacggcctcatctgcgtctcgaaaattttgcggccaactccggaggtccctaccaagggtactatatcacaatcgtttcttatgacttctccatcgggtctagcgcaccgtgcaccaattgttgttcatatccattcttagctcagtttcacccttacagtattatttagtcagccagagcagaattacgtgctgtagttgcatgacagtattgctagtgacaagctagaatagaagctggtatacccactgtcttggcttatcgtagcatatctgacctgtagccttacaactctactgtgtaatccagtatttctcacccctgacaaaattcaaaagggatgagcaatgttctgttcccaggcatttcctcccaaagaatgaggtgagtcggcacgtgttgatgacgtggggcaacgcggaggactttggcactctggcaatttacggcccctatcacgctggcgaatggaccaatggtggcgttcctcaacgaattgaatgtttgtgggggccacggtaggtgctttaatccacggggtttgaacacgcgttgagccaatttaagtgggccttgtaccgaagaagagcgcggagcaaccactgtgacaacactctcgtgtgtacactgggtgcgacacacccaaagcaagctgtcgtctagcacacctcagcgtctatgatgtgtagtcgcttgacatgtcgtatcctgcttctgctacatatactactgtcagatcagaggacacgagcagacgcgagacggcgccaagcagacgacacgaggacacaggcgcgggaggcgggagtgcaacgagagaggagagcagagggagaagggaggcagagcggaagagagcagggaggcggcgggcgacgaggggcgagagacgcgcagagcggaggcgagcgagagccgcgaggcgagcagtgggagagcgagggggcagagcgaggcacgacgagagcaagccagagaggagagacggacgagagggagagcgcgacagagcagcggagaggcgcaacgacagagaagcgaagagagagaaggagagaggagacgcggagcaacgacggacagagagcgacagggagaaaaaagaaggagcgggaggccagcaggacaagcagaagagagcacagcggccagaagacaagaagagagaagacgagaaagacgaggaagagcgagaggcaaagaagcagggagaacgcatcactagccaaacagagcgaagaagagaaaagaacaaggagaagaggaagacgggaggagagagcagaagggaagacggacaaggagagcgaggacagaacaacaaaaggcacggagcgcggaggaagaagaagagcgaccaggcaaacacgcgcgcggaaacaagaggcgcggacgaggccagagaggaagaacacgaacacaacagacgaggcgagagcacggcacaaacgaacgacagagagggaagtcgcacgcaagagagaacaacagcacagacaacggagagagcagacgacagcgaacgcgaaaccggcagcgagcacgaagccaaggagggaggacggcagagagagaacacagacagacacaagagcgagagacaaacaagagacgcaacggcggagagaagcgaagaacgaagagagaccagagggcagcgaagaggaaccagctgacagagcagccaaccgagcgagcgagcgaaggaacacgagaagaccgaacaagagaacacgaaacagagacc

SEQ ID NO: 481472 - DNA, 1062 bp, Homo sapiens
tgtgagcttcagagggctgtgctgtaggcgccacccactttcctctcaagtacaggcagcaagagagacagggactctcacctcccagtggccctcagaaaatcagaggtcccgggcaggatgttggcatgtggtccactggctcctttaagaaaagccaggtatcctcagagacccgcacataaggtcagtactctctcagcagaccaatccatttctccccactaagtagcatctgatggcgttagatgctaagactctgtcttcagaagtaataaaaaataaaaataaaaataaaaaaggcagtcccttagtgggagggtgtttggcatttcatctgaattccacaatgaataatttatatgaaaattttatcggagcccagctttccacaataaacgttccctgagaacacacgcaaatgcttctgcagccatctctctctctgctggattgggctgacggcccaaatcagatctgagttgctgcatcacttatttacaaaaaatatcataatcttacttttatgtgcatttttcccagcatccgtgggtgacaagtttgagaggcacaggcagcagcggccgctgcttctgttggatccaggagggaagggaggttctgagctttggagcgggaagtgaggagcctcagctgtccgcacccttttgcctgcaacacaacaattaggagagggactaggaggaaaggagccacctggtttctggggcatagaagccctatgcagccacgtgtcccgagcagagttaggtggggagggggccagaaggagacctcagttattcagcgtcaggagggggggtccagagtgtggcttggggacagggagacccagcttgaaccctcctcctagctaggttatgtggcttctctgagtccttgaccttatttggataatggaaaaaagagaacccacctttcaggactgtcctgggaatgtactgacctgttgtgggcagcgtggtcatcacaccaaccttcacatccaacaaatgcttgcagaactgacaggcacatggcacgagcacgccgcctcgtgcc

SEQ ID NO: 481473 - DNA, 825 bp, Homo sapiens
gctgctgcaaatttctgtttcagaagggaaaatagtgcatatcatctataactagtgaaaatgtctactatgatgagtgtatattagtgaaggtaatgccaagtgttctaataaaagaaacccaataatataccatggcccagcacagtaatgctttgtatgttgctggaataaagtccagttgggtattcctgatcagtcggtggctctccttcaagctgtggttcaggacaagcccatttcctgggcaacagggccccttcctgggtcatctccatccagtcattttatgtgcatttttcccagcatccgtgggtgacaagtttgagaggcacaggcagcagcggccgctgcttctgttggatccaggagggaagggaggttctgagctttggagcgggaagtgaggagcctcagctgtccgcacccttttgcctgcaacacaacaattaggagagggactaggaggaaaggagccacctggtttctggggcatagaagccctatgcagccacgtgtcccgagcagagttaggtggggagggggccagaaggagacctcagttattcagcgtcaggagggggggtccagagtgtggcttggggacagggagacccagcttgaaccctcctcctagctaggttatgtggcttctctgagtccttgaccttatttggataatggaaaaaagagaacccacctttcaggactgtcctgggaatgtactgacctgttgtgggcagcgtggtcatcacaccaaccttcacatccaacaaatgcttgcagaactgacaggcacatggcacgagcacgccgcctcgtgcc

SEQ ID NO: 481474 - DNA, 1204 bp, Homo sapiens
ggagagagagagagagagagagagagagagagagaggatggctgccctggaccagcaagttactatgtgactatcattgatgccccaggacacagagactttatcaaaaacatgatctacaggggactatctcaggcgtgatcgtgtgcgtgtccgtgattgttgcgtgctggtgttgggtgaatgtgaagcgtggtatctccaatgaagtgggcagacccgagagctagtgccctttcgtggcttacacacgtggtgtgtgaaacaacataaattgtcgggtgttaacaaatagtggattccacgtgagccacccatacagcacagaagagatatgagggaagagttgtgaagggaacgtcagcacttactattaagaaatattggatacaaccgcagacagagatagctatgtgtgccaatctcgtgggtgggaagtggatgacaactatgctggagccaatgtgctaatatgccttggttccaagggatggaagagtcacccgtacaggactggcaatgccatgtggaaacacgctgctatgaggctctggacgtgtatcctagcaacaactcgtccaagtgacaagccctcggcgcctgtctctccaggatgtctacaaaagtgggggtataggatactgaaacctgttgggcgagatggaagagtgggtgtactcaaaccggatatgggtggtcaccctgtgactccgagtcaaagtaaacaggggggatgataaatcgtgtcgaaaagtgcacctatgagggctgtgagtaaaaggatcatacgtgggggaaaagagggggagtaaagtgtcaaagatttgttttgacagggagatgtcgtgaggaacgatgttgggaaagaaaagtagaaccccagggtatacagcatggctcacagtgcacggaatgatcattccgaaagacccagagaaaataaggcgagattactccggttgcttggtgatgcccccgaccacacaagagtagcagaagagggcgaacgagggaaacgagacggagtgtggaaaaagggggagagagccatatactgagtctgaggaatgcaaagaatgggatggacccgcgatagaagaacacacggaggaagatgagactaaaacgggcggtatggaggagtttgcaggcttccgagattactcctcgtgtcatgccacttacttgtgggaggatcgtgaga

SEQ ID NO: 481475 - DNA, 455 bp, Homo sapiens
  misc_feature (10)..(10): n is a, c, g, or t
  misc_feature (55)..(55): n is a, c, g, or t
  misc_feature (70)..(70): n is a, c, g, or t
  misc_feature (207)..(207): n is a, c, g, or t
  misc_feature (413)..(413): n is a, c, g, or t
tagggcatgnccaccccaggttgttaaacatgtataaagtacctccctttttaantgcctgaaattgtanccccattgtatggacatactgcattttgtttatccctgtcacccagttgatggatatttggattgttacccagcttttattaatagttattatgggctgggtgaggtggctcatgcctgtaatcccagcactttggnaggccacagtgggtggatcacttgaggtcgggagttcgaaattagcctgaccaactgaaaatacaaagtggtgaaacctcgtctctactaaaaatacaaaaatttgtgggcgtggtgcgcacgcctgtaatcccagctactcaggaggctgatgcaggagaatcgcttgaacctgggagacagaggttgcagtgaaccaagattgngccactgcactccagcctggatgacaaagtgagacttccttt

SEQ ID NO: 481476 - DNA, 935 bp, Homo sapiens
acccaggtagactaacttaatgagcatctccaccatcccctggaaggagagaaatcaaaaacccattcataggattatcgccaccatcacctctttcaattgccactttctcttcttttgaatttgaactctggagttactgttctacagtttggcggggacggggcttgggggttttctcttttgtttgtttccctttctttttcctttttttttttttttttttggtggggcttgggggtaaggatgctctgatctggactattggacatgaacacaaagttgctagatgctctggtggatttccagcagatggggagggggggaaacacagcagttctgggtaaagtccttggtaataatagttggattttttaattcgagagaatcttcatttcctatgtatgctttttccctttttgggcccagtttccttatacacttggctggtaagatgggcttatttggcattcattgcagactatggtggcaagtctggtttcatctagtaaaactggaaaatttttgggttaaaaaaaaaaaaaaaacaaaaaaaacaaaaaaaaaagggggggggggaaaaaaaataccccggggggggcccttttaggctcacccttttttggaccaggggggcccaaaagggagggcgaataaaaaacacacagccggcgcggggtaacacacgtcccgcgggaacacgtgcgcgcgggcgcctgggagagagcccacttggcgggggacctttgcggcccaccccacgaggattaaggcggggaaattaaacttcgggtaggggacccccgcgatttctcgggaaaattggcccggtgttagaattagcgttgacaaagcgcacacacaacacatcacaaatatggaaaagcacctcccacatcgagaagcaatatcaaccccagccacaatagcgcacc

SEQ ID NO: 481477 - DNA, 168 bp, Homo sapiens
caggtagaccagactgcagactaatgctgtcaaacacctctgtttctaacgaatgcaccgtctctctccgatgaccattttgacagggctccctcaaaaggtgccctcgccgcttccctgtatgtgatattactaaactgttatctcttgttctccacaccgtgacca

SEQ ID NO: 481478 - DNA, 944 bp, Homo sapiens
acccaggtagactaacttaatgagcatctccaccatcccctggaaggagagaaatcaaaaacccattcataggattatcgccaccatcacctctttcaattgccactttctcttcttttgaatttgaactctggagttactgttctacagtttggcggggacggggcttgggggttttctcttttgtttgtttccctttctttttcctttttttttttttttttttttgggtgggtttggcgttaaaatgttgcggatttgaattttgaagataaacaaaaagtggtaaaatagcctgcgttgtggactacccagaaagattgggacatggggggaaacacagcagttctgggtaaagtccttggtaataatagttggattttttaattcgagagaatcttcatttcctatgtatgctttttccctttttgggcccagtttccttatacacttggctggtaagatgggcttatttggcattcattgcagactatggtggcaagtctggtttcatctagtaaaactggaaaatttttgggttaaaaaaaaaaaaaaaacaaaaaaaacaaaaaaaaaagggggggggggaaaaaaaataccccggggggggcccttttaggctcacccttttttggaccaggggggcccaaaagggagggcgaataaaaaacacacagccggcgcggggtaacacacgtcccgcgggaacacgtgcgcgcgggcgcctgggagagagcccacttggcgggggacctttgcggcccaccccacgaggattaaggcggggaaattaaacttcgggtaggggacccccgcgatttctcgggaaaattggcccggtgttagaattagcgttgacaaagcgcacacacaacacatcacaaatatggaaaagcacctcccacatcgagaagcaatatcaaccccagccacaatagcgcacc

SEQ ID NO: 481479 - DNA, 273 bp, Homo sapiens
  misc_feature (17)..(17): n is a, c, g, or t
  misc_feature (21)..(21): n is a, c, g, or t
tttttgggttttttttngggnggggttttttgagacaaagtttgggtccagcctagggggcagagcaagactccgtttcaaaaaaaaaaaaaagaaaacccagtttatttgcatggtggttcaggacttccaaagaaagcatgggggtcagtagggggtaaagtagataaaaagtagggggttgagggtgcagtgagccatgactgggcccctggactttagcctgggggacagaatgagaccccatttcaataaaaataaataaagatttta

SEQ ID NO: 481480 - DNA, 156 bp, Homo sapiens
ttttttcagggcaaaaaatttttttggaacaaaaaaacgaacaactttgggatgtttttaagcaaaaaaactccctgaaaaaggatggggatgaattcccccccttccaattttagggtttttttggaaaaaaaaaatgggaatttcaatcctgga

SEQ ID NO: 481481 - DNA, 333 bp, Homo sapiens
cgtcgacatacgaacactttatagcggctgcagccactcgggaatgtcctgtatcccacatcgaggtcgtaaaccctattgttgatatggactcttacaatacgattgcgctgttatccctatgttaacttgttccgttggtcacgcttattggatcaattgacatatagtatgttcgctttgactggtgaagtcttatcatgtactgatcgagaggttgggttctgctccgagggtcgccccaaccgtaaattttttatgcatgtttgttactttagcgacctgtgagattgttatgtcctaatatgcattaataaattaaagctccatagg

SEQ ID NO: 481482 - DNA, 233 bp, Homo sapiens
ccatcctagtcctcattgccctcactctccctatgcatccttgatgttcctcacgaggtcaacggtcacgctgttagcttcgcatctgtcggcgtcaatggtgctgagactaggaatacaccgacgacggcggactaatcttcaactcctacatacttcccccattattcctagaaccaggcgacctgcgactccttgacgttgacaatcgagtagtactcccgattgaagcc

SEQ ID NO: 481483 - DNA, 1249 bp, Homo sapiens
tgccctctccgctagaaggtggataatcgagcccgggttcaccagaaaggaagtagtcccaataagttctcttttaagggtagtgtgtatcgtaaaagaaggtcacaaaggaattgcgctaaaccaggaagccttgttctgtagagccacacaaaaccgtcgtggaaggggatttccccccccatggggtcccaacatgaaccccactttttcctcttggaaaggcacaatgttggggaattaagaagaaccgggtaatgtaaaggtatttgccgaaacggttcaaacaaacttctcccaaaggaccccccctgtagggggggcaccacccacgggcttccaccgggaacctttgtttggggggagcctttcccaccgggaatttgtcccccgagaagagggttgaaagagtagtgtccttgggccacacctggggtaacacccttagttttttctggctttgggcctctctctcgtgtcgttttagtgttccctcggcgtaactttgtgcaccctcctttaaaagccacgaggccacgtccaacgagaggacaccaggcacttttaaaccacggagggcacactcggggtaatagaagagcggatcttgaaagggcctctggtgggtctcgggggggtatagagcccacagccccactttgtacaatttgtcttaaaaattgccacgctatgcctcttgaaggttaaacacactcttaagagactttggagaccacacatgggctataaaggagaagccactttggccacaatagttgtaatgtaataaatgttaaatttataatagtagaaaaatatgatttaaaattttcctcctcgggaataatgtcacaaccctcgccccacgagatatttcacaacctctcgagaggagaaggcccacgaaaggtgaaattttgggagagaacactatagggtatagaagaagagggtttggcgtatattaaacgcagcactttggaggggcccaccggcttcacctccacggagcctcgctggggcttgtgtaaccccaggaggccctctttaagtattcttttgtacgcttttcacccccacacccccaagtcctgggagaaatgccaggccaccactgagacatgggagaggcccagatatgccttgaccagaaagggtgattttgaggctccagttaatatttccaaaattgtaaccgtagccaaaactgcattggtatttagaaaaataaaaaatttcccaaaaagta

SEQ ID NO: 481484 - DNA, 834 bp, Homo sapiens
  misc_feature (551)..(551): n is a, c, g, or t
gtaatctggaacgactctcttaatcctccaccgctacagcgaaagaaagtttatcaaaattttttaaacctgtcttgaaatgacatcatattctaatcagagatttgctgaagcttcagagatcacctgccaaacacacgctagaacctgacagcatgtcacaccaggatgttgctatgaggacagattcatcaaagatgactgacgcggagtctggggtcgccaattttgtccctgctcaagggcaggccgccggaatgccttaccagacatccagagttcagctgccacagacggaacctcagatttgcccctcaaactggaggctctctccgtgaacgaagatgccaaagagaaagatgaaaaaacaacacaagaccaattggaaaagcctcaaaatgaagaaaaatgaaggctcataatctatcacgagtgctgaatttctagcatgttgaaagacttagagggtctagattcttgagacatttaatcctggtgcgaactgtggtaacattgcacccctaagcagcatgtgtatattagataattgngctgggatgcaactcactttgaccgcaatgatgatagtccaaggaaagccctttaacaggcaggttccttcccaaatacactgaaagaaaaggttacgaactaattcacgctacaccaaattgctttccgcctgtctagtaaacccaccaaatttgcactgttctcttttgggatcccttcagcccggagtagtttttaatatcaattttaatcggcatgcggcaatcatttcttggttaccgtaactagacacttaagtgctaaaaccttcttgaactcgcg

SEQ ID NO: 481485 - DNA, 381 bp, Homo sapiens
  misc_feature (26)..(26): n is a, c, g, or t
aatcccatcctgggcaacaagagtgnaaactctggtcccaaaaaagcaacaacatacaaaaaaggctgggcacagtggctcacgcctgtaatcccagcactttgggaggctgaggtgggcggatcacctgaggtcaggagtttgagaccagcttgaccaacgtggagaaacctcgtctctactaaaaatacaaaattagccgggcatggtggcgcatgcctgtaattccagctacttgggaggctgagtcaggagaattgcttgaacccaggaggccgaggttgctgtgagccaagatcacgccgttgcgctccagcctgggcaacaagagcaaaactccgtctcaaaaaaaaaaaagtcgacgcggccgcgaatttagta

SEQ ID NO: 481486 - DNA, 203 bp, Homo sapiens
ttttccccctttttttcccccccccaaaaaccccttcaaggggattaaggttttttcaaaactggtcagttttgggcaagtaacccctgtttttttttaaaaaacttgggcccttgccccgggcccaggatttttaaatttagcccataaagcccctttctagggggtaaaaaccgggccattttttttttcgccccccccta

SEQ ID NO: 481487 - DNA, 165 bp, Homo sapiens
gcggtccctgtagctgaatgtctttctcacactcaacttctaattgcacaaagctcaaactcctgctgctcgcaccctgctttgagtatgcacctgggtatgacttaaccctttggctgctttcaaagtgggatgaaaggtatccttaggatacagtcagggaga

SEQ ID NO: 481488 - DNA, 287 bp, Homo sapiens
gatctgctcgtgtgcactgattccgcgtgggaccccgctagatcactgcggactcgtaatggccagagaaagccctgcgccatcagcaacacactccaattgttgactcccctttgtggtgtacccgaattgctgcttataccaacagctaatgtggattcgtgctcatgatcttgcaacagtcttgcacacgaatcctaaactccaccactcctcccattccagcttcacactatcagaataatatccaaataccagattattgtctttattacttttatttcttc

SEQ ID NO: 481489 - DNA, 1032 bp, Homo sapiens
  misc_feature (36)..(36): n is a, c, g, or t
  misc_feature (51)..(51): n is a, c, g, or t
  misc_feature (74)..(74): n is a, c, g, or t
  misc_feature (79)..(79): n is a, c, g, or t
  misc_feature (93)..(93): n is a, c, g, or t
  misc_feature (118)..(118): n is a, c, g, or t
  misc_feature (129)..(130): n is a, c, g, or t
  misc_feature (133)..(133): n is a, c, g, or t
  misc_feature (153)..(153): n is a, c, g, or t
  misc_feature (156)..(156): n is a, c, g, or t
  misc_feature (177)..(177): n is a, c, g, or t
  misc_feature (219)..(219): n is a, c, g, or t
  misc_feature (291)..(291): n is a, c, g, or t
  misc_feature (476)..(476): n is a, c, g, or t
  misc_feature (1028)..(1029): n is a, c, g, or t
ttgttgttgttgtttttgagacagggtcttgctctntcacccaagctggantacagtggcatgatttcagttcnctgcngcctcgacctcccnggctcaagtgatcctcccacctcancctccagagtnnctnggactacaggcagtgtgccnccncatccagctaattttttaaanttttttcatagagacagggactcactatgttgtccaagctgntctcaaactcctgggttcaagccatcctcccacctcagcctcccaaaatgctggattacaggcatgagccantgtacccagccaaaatttttttcttttttaagtgaattcaacaatttctgtgagtggctctttgcatgaacactgtgcaaggtgttggagaaatccaaagctgaccaaaacatggtccccaccttttgagcttaacagtctgttctggggaacagagattcagccaaagtcaagaaacactgatnccagctagattatctgtctgtgctgggtgtctataagtacatatgtggatatgggttcatttaatccctaaatttagtaccaaaccagcattaatatctaattataaatctaattgggctaaatttattatggcacatgcttgaaaaaactattgtctctattgtaaattttttcctcatgaaccaggtgtgacctgcacactatttacggaattatccaaaacagactattctgttccaggcttcagaatgttcttgactctaagaaacttctgtaacagttgattggtgttggacagacgaaaacgggggggaattcttcaggagggaataatccttctttcattaaagacctggggtgggagaataaaatgaggggtcacatgcgactgtgctgttggatagtggagcttgttagtacatggccctgcttagaatgtggacagttgcgttgccaccctggagtaatagggggagagaggcagaagctaaatacacgattagtggggggagatcttgtcttgtgtgtgtaacagtatattatatgggggnntac

SEQ ID NO: 481490 - DNA, 172 bp, Homo sapiens
cgtttgtggagggcctcatagtccccctgtcacccgcatggtagactcagagataccccgacgccaggagcattatatcagcctggagcgcatccctcgtgaccacccctacatccagtacaacctgccggtggatgaataatagcagttcgatagtacaacctgccggtag

SEQ ID NO: 481491 - DNA, 832 bp, Homo sapiens
  misc_feature (214)..(214): n is a, c, g, or t
  misc_feature (249)..(249): n is a, c, g, or t
  misc_feature (291)..(291): n is a, c, g, or t
  misc_feature (305)..(305): n is a, c, g, or t
  misc_feature (324)..(324): n is a, c, g, or t
  misc_feature (326)..(326): n is a, c, g, or t
  misc_feature (331)..(331): n is a, c, g, or t
  misc_feature (333)..(333): n is a, c, g, or t
  misc_feature (347)..(347): n is a, c, g, or t
  misc_feature (349)..(349): n is a, c, g, or t
  misc_feature (355)..(355): n is a, c, g, or t
  misc_feature (361)..(361): n is a, c, g, or t
  misc_feature (372)..(372): n is a, c, g, or t
  misc_feature (376)..(376): n is a, c, g, or t
  misc_feature (378)..(378): n is a, c, g, or t
  misc_feature (394)..(394): n is a, c, g, or t
  misc_feature (396)..(396): n is a, c, g, or t
  misc_feature (417)..(417): n is a, c, g, or t
  misc_feature (458)..(458): n is a, c, g, or t
  misc_feature (467)..(468): n is a, c, g, or t
  misc_feature (481)..(481): n is a, c, g, or t
  misc_feature (487)..(487): n is a, c, g, or t
  misc_feature (489)..(489): n is a, c, g, or t
  misc_feature (494)..(494): n is a, c, g, or t
  misc_feature (498)..(498): n is a, c, g, or t
  misc_feature (528)..(528): n is a, c, g, or t
  misc_feature (584)..(584): n is a, c, g, or t
  misc_feature (595)..(595): n is a, c, g, or t
  misc_feature (802)..(802): n is a, c, g, or t
ccccgtagtgctcggggacccaccttccacctagcacgggttcgttcccctctcccggcctggcccgggctccccggtggccgccgccccctcgccgcccccgccttctcccggggagggggtcaggtgggcgggcactattgttgtaggagccggcgccagattcctcagccgcgctcggggtgggaccggctgggtttgggggggtggggtngggggagcggtgatctgagctccgagcagctggtnttcgcggctcgctccctccttcgcactctctcgctccctgcngccgcccgcagtgncagggctcggtggcatctncngggcncngcccgcagtccttncncctacntccagnccgctcccgcncccngnaccgctcgctcccccnanccggactcccccatgtatgangactcctacgtgcccgggtttgaagactcggaggagggttnaacagaatnntaaacaaaaagcncatctntngactnaaangtctccctggaggaggaccgggagaatacncggagtgaagtagagaacaaggctcagcagaagctcgaaaaggccaagcacaaacntgtagcatttncagtgaggaccaatgtcagctactgtggcgtactggatgaggagtgcccagtccagggctctggagtcaactttgaggccaaagattttctgcacattaaagagaagtacagcaatgactggtggatcgggcggctagtgaaagagggcggggacatcgccttcatccccagcccccagcgccttggagagcatccggctcaaacangagcagaaggccagggagatctggggaacc

SEQ ID NO: 481492 - DNA, 1015 bp, Homo sapiens
  misc_feature (422)..(422): n is a, c, g, or t
gacgtctttctccagcccagaacactcacagccccctgtccagatcaggagagctcggaaaggcaaggtacagaggttcacggatcttcctgctccctcgtggacccaagggctagcaatagtgagatgctccgatgggacgagaagaaaatcattatgactcctggggactacatgatttgctgcgcacagaggctgatggaacaaccgagggcggagtagagacagtgatggctggtgttggtatgcaaacgggatgaggatgacgcgtcctcgtgtgttgacgtacgtggtagcctagaagaagaggggacgatctgtgcccctcgacataaaaaacaactagtaatgttgacgacgtacattctcgcgcagaactcttgagaaggacaaggactgcattgataaagggggaactcaanttgaacgaagactctcggtgcaccttacgtgaaggacgatagttgactccaaaaagccacacatgaacaaactgcggagccctagagggactaacagcaactgagttggagccacatccttcaattacgtggcattgctactaattcgtcttcgcggaaggatggcactggacgcccgtgcacgtcgtggggtattgaaggacactctttatggcacccaacaaggtaaacacaagggaaggaatgggaacaggacctaggctggacttacttcgcaagcacggcgtagggttcccaaaagggatcgggggggacacacaatcaagtgaaagtcgtagggtaggagtagcgaccccagggaccaggatacggtggaagatacgggtagaccgcttaacgggcagaaccggacaaaacccgaaaggaagaagattaagcaacagggaggaggacccccagaagggaccaacgggaggccggaggtaagaggacccggtgtaactgtgaacccccaaaagcatgagcggtaacgacgagagaacaaggggcaaccacggggaacgcgccagaggcacgggagaaacggaagcaag

SEQ ID NO: 481493 - DNA, 211 bp, Homo sapiens
  misc_feature (23)..(26): n is a, c, g, or t
  misc_feature (47)..(47): n is a, c, g, or t
  misc_feature (135)..(138): n is a, c, g, or t
  misc_feature (140)..(140): n is a, c, g, or t
  misc_feature (143)..(143): n is a, c, g, or t
  misc_feature (150)..(150): n is a, c, g, or t
  misc_feature (180)..(180): n is a, c, g, or t
  misc_feature (191)..(191): n is a, c, g, or t
  misc_feature (195)..(195): n is a, c, g, or t
  misc_feature (199)..(199): n is a, c, g, or t
tttaatttgtttgcattaatttnnnntcatttgtcaaaatgcttctnttgttgccacagtaaagaacagtttttattgttttgtaagtaaaattacgtagctgattttgtatgtaaagattaatttccataatannnntnatngtatgtntactgtgatcttaatgggcagggttaaganagttatttaanatanagtnacctattctact

SEQ ID NO: 481494 - DNA, 180 bp, Homo sapiens
agttaacaaaacaaacaagaaaacaaacaaaataccaaaaacaaacaaacaaacaaaaacctcagcagttttcattgtgagcttatgtgaagccttgacctgcaaaaagggagcgttaagtcatggagagtgttgagatatcagtgtgggagagaaaaagttgatttttccgtgcatgac

SEQ ID NO: 481495 - DNA, 889 bp, Homo sapiens
gccaagacagtgacaatccctgcggggcatagccacagcattcctggcacaggccctgtacagctacaccggacagagtgcagaggatgctgagcttccctgagggggcactcatccgtctgctgccccgggcccaagatggagtaatgacggcttctggaggggagaatttgggggccgtgttgtgggtcttcctccatcgcctgtctggtggaatgagcatgctttggcctcgcgccgagggccaccttgaacttctcttgaccctgaacagatgctgccgtccccttctcctcccagcttctcctccacctgcacctacctctgtgttggatgaggccccctgacacctgtcctgcctgggggattcatggagcgctacatagttgcttagttgtcgtccatatgagatatattggcatactggtggagattgtggcttctagtgtacctgtaactcaaatagtgaacattggtacctgtatatgacaaagccctggacttccctgggttcctggactatgatggcaccgtacgtactcaggccgatgcagtgcaccgatctcccaccgcccggctaagggccccggatcctgaggcgagcctagataccactcacctgaaggcctaggcaagccttgagcccacagtcgatgctgcatgtccctatcttgcaagctgtcaagaccacagacatcaatgatccagagcagcacaggcaaaagctgacactcgcacctgtattatccaagcctctatcttccgaggggtgcgaaacttggccccgttcccattactagagcctggagacgcaacgccttattgtgtcccacttgctgctatcgatcgtctaggaccgggagcctacctcgtctactggtatgagcct

SEQ ID NO: 481496 - DNA, 136 bp, Homo sapiens
tgcggatgtaggacatctgccgctcttcccacattctttcatttatatggtttttctcctgtgtgcaccctctgtatgcatgtcacatggttcaagttgccagcttgaaccttgacctaatgcatcaagaattgct

SEQ ID NO: 481497 - DNA, 185 bp, Homo sapiens
tgggtataactaaatagggcgtcaacagtgtctgttcggcctaataatgtgcctcctgcataatagctgtgatcgttacggttaataccactgaaaacacgcccccccatattttgtccaggtttcaaaatatcagctgcatttagtgttttcattgaaacgactccagccaatgccgtcgacgc

SEQ ID NO: 481498 - DNA, 662 bp, Homo sapiens
gggggaggaagactctatctaaagcactgaggagttttggtccacacgctcctgctcctgactcaccggtgaaaactctcgccgaggaacaagtcgagcaggaagcccacgcgcaacagccacggcttttaaggataccggagaaacacccgaggagccggtggtggcatttcaccgaattcgaggggggtaacaagccgcaccggaaaatccttgaaaaaggtgtgtgctgacttgaaaagaggcgcaaaacaaattaatttgaaagtgataggaccaggtcgactgcctaccaagactatgagaatcattacaagaaatactccttgtggtgaaggttctaagacgccgaatcgatcccagatgagaattctcaagcgactcattgacttgcacagaccttgtaagaatgttaagcatattactcccatcagtattgagccaggagttgaggaagcagcacctttgcctaaacttaacataactatttgaccaattgatagccatgtgcgcaatataaaaaacacggaatacctgcaaaggggggtgaaacccccattgtaccacccccgtttataaaacggggacccggtttctttgccggcggcccggcacaaggacttttaatttagcattaaaaagggcggcccaatagagccccc

SEQ ID NO: 481499 - DNA, 1233 bp, Homo sapiens
gcgtgcgtgcgctggtgcccagtgactgccccgatagaccccgtggacgcgcctcaaaccctgccaagtacatcccgtgtggacacgtgacgaccgcgctgctggtacggctccagcaccctcttacttcgtgttcacgatgcccgtggattgacacgagctagtgtccccagctgttacccgtactacaatggcatcatacttcctctttgtacactggcacaacttacagcatggccactttcatggaccctggtgttaacccccgagacggatgaggatgaggacaaggaggacgacttccgggctccgactgtacaagaacgtggactgtgcgaaggtatccatggtccagcactgacagtgagtatgtgccacagatgccacttctaccagaccagccagcagctgactcccacatgcaagcagtcatgttgacaatcatgagataacgaggactcttgaccacacactgacccctgagagtcaacaaaactgacatacgaggacgatcgaacaacctaatcgcatacttcctctcctgtatcctgcctgatccactcagatgacaccaccactgcgttggagacagacacaatagggccctatcgaaccctaggtacaaacagttgcttagaaaaacaacggacatagacggagagcttagagacgcacagaagacaacaacaacccatacacacatagggctaagtcactagagtagttggccagagcctacaatccttaccataacccctgatacatatggagccgtacaaactagtgccttatccaatgatgagagatgctgggctccaacaacgagagaagacggacaaccaaacaacaacgagacaaaggtagaactgggacaaaaggtatcaccacgagccggattgatagaaaaccactttaaaccacccagaaggatgacaagtaagggaacatttgtaggaagaccacgagagcgctaggcgccgaatcgaccacacaatgaacagcccccccagtgactacagagattgtgtggtgaatacacaacaacgcggaattggacatgacatcgaggaaggcaagaattgaacgccaagacatagtccagaaaagggccgagaaacaacagagtaaaacggaaaaagtaacaggagaaaacgatccacagcgctcatagtagaacaaggaatagacaagaatggaccgagtaacagatgaaaagaccagcagcaagcagaa

SEQ ID NO: 481500 - DNA, 1068 bp, Homo sapiens
gctgggaaacagctgaccaggtcaaggtcaggcttccgggacacgacagggagtgttggggatgatggctcatctgggtcagattgtggggttcggtggggacctgtcggcagggggtagatccaaggcagctgatcctgaatgccagggcgagagcaagcttggatgccagcctgcgggcagtgggacccagtgacatactgtaagtgcgcaggtgggacgtggctcacgcatttgggctcccacgaaagctcagctctgctgctagcgaggaaacacgctagaccagcatgcgggcaagactcgcggagcagtacgcggcaccagggccacacgactacggcaatggctcccagcagacagtcctgcgaggccacgcacacgaacgatcacaggcagtcggcaactgagcaagggcagcacctgcgcgatcacgcgcgcactggcccctgcggcgccgccacttgaacggctctgggctgcacctcaccatcgcaatcgctcaccgcaaacagctgcagcgctcgcagccgtgccacgcactcggtggcctgcactgaccgtcgtacactcccgcgggcacctcccgcgccacggcctgcacgcgctgcgaccgcgactcgccatcagacccccccagcgcagcatcacgaacgacaccagcgctgacggcccacccgcacactgcagtacccgctcgccacatcattaacgaacacaaagccctcagccctccatttcagcgcctgcgggcgtgtcgcgcaccgcacgccacataaccggccctaggtcgcgctcgcccaagccataaccctcccgagcggaaccggccttggaggggccaacgagccggaaaatacccccggcaggggccccccccgggcaacgctcccgacagcgccccggcccagccgcgaagccccgacacggccctaggcgagctggctggacggcaccctagcccctgggcgcccagccaccaactgcaaccagccaccgcccctcccacccagcacaccccaccaacccacccccgcgcgccccaccccgaggcggcgcaccccaaga

SEQ ID NO: 481501 - DNA, 131 bp, Homo sapiens
gctctggatcaagatcccatgcacagactacatgggcagctgtacctttgaacacttctgtgatgtgctggacatgttattcctacgggggggccctgcccagagcccctgcgtacctatgggcttccttg

SEQ ID NO: 481502 - DNA, 245 bp, Homo sapiens
ttaggcgcgtcttggtcctctgtatattgtaatgcagcaggaggcccaacatagaacatactcgcagtactcggctgtgcaaaacatgtgtgctagcgctgaagtacaaatgggaaaacgtgattcttatatgttataactaaatacttagaacacgacttggctcctaccaagcatctggactctcggtctcagtactggagtgtctcacccatgtggccccacgcagaatgcgcctaaatcat

SEQ ID NO: 481503 - DNA, 153 bp, Homo sapiens
  misc_feature (19)..(19): n is a, c, g, or t
  misc_feature (42)..(42): n is a, c, g, or t
  misc_feature (67)..(67): n is a, c, g, or t
  misc_feature (118)..(118): n is a, c, g, or t
  misc_feature (120)..(120): n is a, c, g, or t
tcagtcaccgtatttgggngaaccaagcaaacaatccctganaattgcagatacaatacaactgcanctaaataagagtaggtagcgtggggcagaacgagcgtataatcggaaacangnatatgcagactcaggatgcacaccgcaagtggc

SEQ ID NO: 481504 - DNA, 427 bp, Homo sapiens
atcaactcgatgagctggagcagtgatcggcacgaatgaacgtgtcggccgccgtctcgagactgagattcacgttttctgaatcgatccaggcgaagaatcggcgcaatgcactgatcttgttctgcaccgagaagcgacttccgccaccagcaaggtcgtcagtcatgtgctcatgcagctgcgtcaccagctcgaaacgttccggcaagggactgccgagttcgccctgcgcgatctggcggcccacatgcttcacctttgctgctgcacctccgcgaaacagcagcggccggaggtcccagggcgtttcagtggccccatactcaagcatcgggaaagtgaggtcgaattcggaactatccatcgtgccgcgccccagcgccgatcccgctaaatgccgccatgaagctatttgagagggctt

SEQ ID NO: 481505 - DNA, 851 bp, Homo sapiens
  misc_feature (295)..(295): n is a, c, g, or t
  misc_feature (302)..(302): n is a, c, g, or t
  misc_feature (305)..(305): n is a, c, g, or t
  misc_feature (308)..(308): n is a, c, g, or t
  misc_feature (345)..(345): n is a, c, g, or t
  misc_feature (355)..(355): n is a, c, g, or t
  misc_feature (372)..(372): n is a, c, g, or t
  misc_feature (431)..(431): n is a, c, g, or t
  misc_feature (454)..(454): n is a, c, g, or t
  misc_feature (465)..(465): n is a, c, g, or t
  misc_feature (469)..(469): n is a, c, g, or t
  misc_feature (476)..(476): n is a, c, g, or t
  misc_feature (486)..(486): n is a, c, g, or t
  misc_feature (521)..(521): n is a, c, g, or t
  misc_feature (529)..(529): n is a, c, g, or t
  misc_feature (542)..(542): n is a, c, g, or t
  misc_feature (545)..(546): n is a, c, g, or t
  misc_feature (556)..(556): n is a, c, g, or t
  misc_feature (576)..(576): n is a, c, g, or t
  misc_feature (582)..(582): n is a, c, g, or t
  misc_feature (596)..(596): n is a, c, g, or t
  misc_feature (600)..(600): n is a, c, g, or t
  misc_feature (605)..(605): n is a, c, g, or t
  misc_feature (609)..(609): n is a, c, g, or t
  misc_feature (612)..(612): n is a, c, g, or t
  misc_feature (633)..(633): n is a, c, g, or t
  misc_feature (643)..(643): n is a, c, g, or t
  misc_feature (654)..(655): n is a, c, g, or t
  misc_feature (660)..(660): n is a, c, g, or t
  misc_feature (691)..(691): n is a, c, g, or t
  misc_feature (699)..(699): n is a, c, g, or t
  misc_feature (710)..(710): n is a, c, g, or t
  misc_feature (717)..(717): n is a, c, g, or t
  misc_feature (738)..(738): n is a, c, g, or t
  misc_feature (748)..(748): n is a, c, g, or t
  misc_feature (774)..(774): n is a, c, g, or t
  misc_feature (781)..(781): n is a, c, g, or t
  misc_feature (819)..(819): n is a, c, g, or t
tgcctagtgtgggatgtaagcgcggaggccgccgcccaccgcccgccgccatggggctgaaggccgcccagaagacgctgttcccgctgcgctccatcgacgacgtggtgcgcctgtttgctgccgagctgggccgagaggagccggacctggtgctcctttccttggtgctgggcttcgtggagcattttctggctgtcaaccgcgtcatccctaccaacgttcccgagctcaccttccagcccagccccgcccccgacccgcctggcggcctcacctactttccccgtggccngcctgcntancancgcccgcccccctactgccccgcctccacccgcccangactcccganggccgcccgtccgaccntgtcccctcattatccctcaggagaaagggggggttgtcttcccagccagttgtagctngggttgaaagaaagagtcttccngaattgttcantatnggggaanaagctcttcnagctcagcttcactttactattcaaaagggattcngggtgccncaacaattccaangtnncccttctttncaagctgttcaattcaacangggcancccaaaattttggnacancgctncccnggnggtgtgggcctttttagcttngtcgggtttngggggcacctnnccaanggcccccttgggggtcctcccaggggaaatngtccaacncatccgccccnttgttcnttgaaggaagtcaagtgcccntgggggtaangttggttttgggggccccaaatgggngggaagncaagaacaagcttggaagggttcacccttggggcaacngggcaaagggggacaaaacggaagggaacacg

SEQ ID NO: 481506 - DNA, 291 bp, Homo sapiens
tttttttttcccccccttttttttctccccaaaaagaggggccccccccccctggggggggggggggtcccccccccccgggtttggggggtcccccccggggggggggggcccccccccctttttttttggcccttttttttttttctttgggggggggtcccccccccccccccggggggttttttttttccccccttgggtttttttttttttggggggccggggcctttttttttttttttgggggggggccccccccccccccccccattttgggggggggtttta

SEQ ID NO: 481507 - DNA, 351 bp, Homo sapiens
gggtgatctagcaggatcttccgcgtacagttgcgggacgaagttgatttacgccgataatattatagtgaatggttttggggtaggtttggctagggtgtagctgagaataggggaaatcagtgaatgaaggctctattatgggaatacaggtcctattgataggacattagtgggagttgggtacaatgtagtacgtgtcgtgtagtacgatgtctagtggatgagtttgctaatacaatgccagtcaggccacctacggtgaaaagaaagatgaatcctagggctcagagcacttgaagcagatcacttcatcgcaactggtacggcgggggcaactggtacggcggg

SEQ ID NO: 481508 - DNA, 419 bp, Homo sapiens
cacgaggagagagagtagagagagagagttagagagagagagagagagagagagagagagagagagagagagagagagagagagagtgagagagagattactatgtgatgtatttatatttttagtcctgagattgttacttattttacatacctaagcataattattttccccaccatctatctaacctccttaccccctctactgactgcatgtaacactttgtcaatctcggaccttttatatttatttattcatttttttaaatagagggtctcactctgtggtccatgctgtagtgcattctcttgatcatatctcactgcagccttgaactcctgggtttatgcgatcctcttgcttcaacctcccgtgctgccattatatgtgtgtgtgagctatcacacctggcctatctt

SEQ ID NO: 481509 - DNA, 306 bp, Homo sapiens
tatgcacagtgtcagcacatgactcttctttggtgggcacttcccagacggatgctgaaattgtctgctaggggagtttcctaatctgtgccgtcgcccacagagaaggcctggtgggcattgagatcaacatgggactgactaagtacataggacacaatatggacaagtgaggggtgagctaatggaagaaaggagcacacaatgattgagaacccagtgctgtactaggtactaccagctgccttatctctgtcatcccggtaacaataatggaaggtgggtcctgttatccccctgtgaatg

SEQ ID NO: 481510 - DNA, 686 bp, Homo sapiens
  misc_feature (40)..(40): n is a, c, g, or t
  misc_feature (197)..(197): n is a, c, g, or t
  misc_feature (205)..(205): n is a, c, g, or t
  misc_feature (247)..(247): n is a, c, g, or t
  misc_feature (267)..(267): n is a, c, g, or t
  misc_feature (274)..(274): n is a, c, g, or t
  misc_feature (343)..(343): n is a, c, g, or t
  misc_feature (430)..(430): n is a, c, g, or t
  misc_feature (436)..(436): n is a, c, g, or t
  misc_feature (470)..(470): n is a, c, g, or t
  misc_feature (473)..(473): n is a, c, g, or t
  misc_feature (477)..(477): n is a, c, g, or t
  misc_feature (479)..(479): n is a, c, g, or t
  misc_feature (487)..(487): n is a, c, g, or t
  misc_feature (494)..(494): n is a, c, g, or t
  misc_feature (511)..(511): n is a, c, g, or t
  misc_feature (544)..(544): n is a, c, g, or t
  misc_feature (547)..(547): n is a, c, g, or t
  misc_feature (550)..(550): n is a, c, g, or t
  misc_feature (626)..(627): n is a, c, g, or t
ctggaaccccaaccttctatgacccccaaaaatgtacttngtggctttagcataatttataaaggggaagagggaaaatactgaaaaaggccactatttaatggtgaaagaatgaagccgtagaggtcccaaccagcctagggccaaaaaagaaaattaaaaatctgcacaaagcaagccagcctctcactcccganagtaaggnatttaggcgccaacctggtgagagtcctcagcgagccctgtnaggtcaagtacacataaggntgttggnagtcagccgcacgtagacacacacatagaaatgggcacatgcccacatacacacccgaaaaagggagantttactggattacacaacagtaaagtaaatttcatttttcctaagggtttgtgccaagttgaaccagacccttccagccttggggtntgggtnactccacccagaggctgccactcctgtcggtgtngtnacangnctgcaccnatacgcngtatcccaaagtgcatnaacgaagagcaagtctggcttctgacacgtgcngtngcncccaagaaactaagttggcttctgttcaaatggccactctcctgccggactatgctttatcaaagggataaaaaanntactttattctgttagggactgcaccagttcatccactgagtattttgctcggtccacc

SEQ ID NO: 481511 - DNA, 81 bp, Homo sapiens
gttgaggacacggctgtgtattattgtgtgcaagaggggagtccgtatagtagcagctggtacggagcctggggccaggga

SEQ ID NO: 481512 - DNA, 403 bp, Homo sapiens
gctgaggcaggagaatcgcttgaacccgggaggcagaggttgcagtgagccgagattgtgccattacactccagcctgggcaacaagagcgaaactccgtctcaaaaaataaataaaataaaaataattaaaaaaaataaaacattttaaaagtcattgaacccaagaggcagaggttgtagtaagctgaggttgtgccactgtgctccagcctgggagacagagtgagactcagtctcaaaacaaacaaacgaaaacaatgaccagtggcacatgcctgtaatcccagctattcaggaggctgaggctggaggattgcatgagcctagaagtttgagactataatgagccacaattgcaccactgcactccagcctgagtgacagtacaacctgtttcttta

SEQ ID NO: 481513 - DNA, 1496 bp, Homo sapiens
  misc_feature (1448)..(1448): n is a, c, g, or t
  misc_feature (1473)..(1473): n is a, c, g, or t
gtgcaatcatacttctatacctcacattaggcgcgtgacccgactgtcgaagaactcgaatgagtgtgccgagattcccgtgagcgatgcttggcactccagataggacaaagccgcattctgcagatggcagaacttactaatggagttcagcatgattctatgaatacttggttactgcgatccgtgtggtttgctactcgggtttcccacatacgattcacgacagcttctaccggaagatacgttcgtatcatcatgggatcacacagacaaactgaaagattcacatgaaggccactcgtaatgccttgtggaattggcatagactattagggctttcctcaatgtgtgtgcggaagcaatgtgtccctagggtcccgagcctcgaatctcatttgcattcctagagcaagggaacccaccagattttcttctggaagcgaatactcaggtttgcacagaggaactgctgcattggacttgagggtttttccttatgggggaatttcgttacacagcctttcacatttactttgttatcgcacctattgcaggctacattttgtgcagcacaagcttttaggccttttggcgctttggagaaaggttcctcagtgtggaccctttgggttctgcctttccacaattgccaagaactgtcctaggtttaggaagatttaagacgccaaagccgtcgaaagattttcagtcggtgtatttctaccacacacgtgtccgattgtgaaaacaatctataggagcaacaccccggttttgctacagcgatttatgtcggcccgtttactatttcttgccgttaggaatacccaaaaaagccccaatatgggctggcctatgagcgcgcattggtggttaggccgctaatcatcaagttggtccgaaagggcgggcgttcctccaaattcggataataacaggcagtggccctgtggaaacgcgaccctgtgaatttgccccacttatcctttggacacaccgcaaccacccaaatggtgtgcacattcacgcagtcctcacagtgtcccccagttggtttcactatatggcgtggtgcctctacccatgtcactctttggccatggcacatacagcactttaccaaacacggaaagtgtggtacctctacctattaagcggcgccgtttgctgcgatatggggtcgaaaccgcttgacccctggatacgatgggccataggcgtttatagtcccctttagcctaggagaacattttcggcaaactaggcgtctgacaacgcggtacgatagctttggccgactcccacttatatcgcggcaaatatgtgtggcccgcccaactaacttttggcgcagtctcactattttactcctgtttccaccaccccttttggcgttttaacttacacctttggcaacattcggtcgctggtagagcaacgccgcnacaaagaagaaacgggcttataccnccggggtgtgggcaacacatacc

SEQ ID NO: 481514 - DNA, 1627 bp, Homo sapiens
  misc_feature (706)..(706): n is a, c, g, or t
  misc_feature (718)..(718): n is a, c, g, or t
  misc_feature (786)..(786): n is a, c, g, or t
ggctggatgcaaaagagaaccagagcatcagagccttcaatagtgagcataagattccctatgtgcgactggagcgactcaagatctgtgctgcctcctcaggagagatgcctgtgttcaaactgaagccacagaagaatgatcaggatgggagcttcctgctgatcatcgagtgtggcactgagtcctccagcatgtccattaagcggccaccagaagtggagggcacatctcctgaagaacacagactcattcctcgaaccccaggagccaagaagggccccccagccccaatagagaatgaggacttctgtgctgtttgcctcaatggcggagagttactgtgctgtgaccgctgccccaaagtgttccacctctcctgccatgtgccagccttgctcagcttcccagggggagagtgggtgtgtaccttgtgccgcagcctgacccagcccgagatggagtacgactgtgagaatgcctgctataaccagcctggaatgcgggcatctcctggcctaagcatgtatgaccagaagaagtgtgagaagctggtattgtccttgtgctgcaataacctcagcctgcccttccatgaacctgtcagccccctggcccggcattattaccagattatcaagaggcccatggacctgtcaatcatccggaggaagctgcaaaagaaggacccagctcactataccancccagaggaggnggtatcagatgtgcgcctcatgttctggaactgtgctaagttcaattatcctgactccgaggttgcanaggctggccgctgcctggaagtgttctttgagggctggttgaaggagatctacccggagaaacggtttgcccagccaaggcaggaggactcagactccgaggaggtgtctagtgagagtggatgttccactccccagggcttcccgtggcctccctacatgcaggagggcatccaacccaagaggcggcgacgacatatggagaatgaaagagcaaaaagaatgtcatttcgcctggccaacagcatctctcaggtgtgagagccaaaaggagactgggcactctggcagctgttgtcccatactgtcgaccattcctccccatcttgcagcttatcctcttcagagtgtggatggtagatgagtcttgttgaactgtgtagtgctcttctttgccatttgcatctacagcatttatttgggagctgtagtacatccactacagagaagatttcagtaataaacaggaaagaggaaggtatttattattaccagagtaatcagatgtataggctccattgacagacacacctggttaggctcgggaaacctatttccttggtgaattttattctgcctgggaaagcagacccgtctaaccttttagtgtccagggctcaggagccatgtatacatctgaactcctcctgggctcagaagtgggtaaaagcaagggagagaggtttagcccatatggcaggactgtgatccctggcccagcacacgcaaagactgtcactgttagactttgcttgtcctgtctggatagaggcaccttgccatgtgcagactagtggaggcttctagaggcataggtctcaattgtgcctatttgggtctaa

SEQ ID NO: 481515 - DNA, 568 bp, Homo sapiens
  misc_feature (70)..(70): n is a, c, g, or t
  misc_feature (376)..(376): n is a, c, g, or t
ccactgaatcctgagtgattgcaggcttatcagacttgggacaagttggagcccacgaagccaccgtggngaacaagctcaacattccccccttttcctttggggtggtcatccagcaggtgttcgccaatggaagcatctacacccctgaagggcttgatatccaagaggaaactctgcattctcgcttcctggagggtgtccgcaatgttgccagtgtctgtttgcagattggctacccaactgttgcatcagtaccccattttatcatcaacgggtacaaacgagtcctggccttgtttgtggagacggattaccccttcccacttgctgaaaaggtcaaggcctttttgggtgatccatctgcctttgtggntggggccccctgtgggtgttccaccccaaggggctcctgttgttgctgcagccccagctaaggttgaacccaaggaaaagtcggaggagtcggacgaggaaatgggatttggtctctttgactaatccccaaaaagcacccaacttagccagttttatttgcaaaacaaggaaataaaggcttactttttta

SEQ ID NO: 481516 - DNA, 512 bp, Homo sapiens
  misc_feature (511)..(512): n is a, c, g, or t
gtttggagatactaactgctctcagagaaagtagctttgtgacatgtcatgaacccatgtttgcaatcaaagatgataaaatagattcttatttttcccccacccccgaaaatgttcaataatgtcccatgtaaaacctgctacaaatggcagcttatacatagcaatggtaaaatcatcatctggatttaggaacttgctcgttgtcatacccccaatgtttctaagatttaagattctccgttactactgatcctacggtttaacatatctttgaaagatttgtattaaagtgtgaatatttaagaagataatatgttatactttctagtaaaatgtaaactcgtgaaggatacgttatataactgacagcacgatacctggtaaccacctcaaagaacttccatattatggagagatttttattgcccctatgtgtttggaatctataataatatagagtaaacagtacggtacattaaactagatgttgtttggctaaaaaaaaaann

SEQ ID NO: 481517 - DNA, 1165 bp, Homo sapiens
agcgggtgctgattccggggcagcgagtcgtcggccgtcgcgctcgaagcttccgcccgctgccatgccgcggtacccgggccgtaccgcgtcatggggccgctccgggcctgcgagcgcgatcgtcagctgacgcgtgcggcgcgtcgccctggcacctggcgcgtggtggcctggctggtgacgcacgcgattgatcgctgtctgttcatcgaatgctgctgcatcgtgctttctaatggctcatagttcgtgtgcagcgcggaaattgcgagctcaacgcatgcatcgggccttcaactacctcgggccaagacccacacctttcttgtcaaactgcttgattcgcttttcagggactgttgtcaaagcgaggcaccattgattccctcaccgttgcgtgttttcaaactattgccgcataaagatcacgcaaaaagggggacaatgtgaactgtattaaagaacttcctggggaacatttggaggggaaaacaggtacccggcggtatgcccccgactagacattagttaagaaagagtccggcattagcatttggctacgatagggaaaggttgaatgcctgcccatagttcaggttcgttaccatgttggatatggaattagtcttgtcttgaaccccaggagaaggcataagaattttggacgcgcccatcctataagaaagcggaataccttcctagaaaaagaccttttatctgtgggaacgaaaataacctttccaaagcttggcaatgggtgtgcacattccccagggattgcatataacgtcccatagagtgttaacccaaaaggcggaaaacactcttttccagggggaaagccattttcgaagattagaagaataggacaccaccttggaatttcgcacgaacagcaggttgaaatattccttgatgccatagacccaattaccgagaggaaaccacgaaagaaagaaatcctgaagttgccgttaccttgccagatcctttcttaggcaaagaaagatataaagtgcgaaccaaatttatttagactcaatttcaaggccctttaaaaggtgggcttttcatttcaaaaacgaacttccggaaaggtccactgaggaaacaaacctgtgagaattttgcactgacaagttcactcacactttgaaaaacg

SEQ ID NO: 481518 - DNA, 400 bp, Homo sapiens
  misc_feature (212)..(212): n is a, c, g, or t
cctaatattgtaaagcactagaaaccaattttgtatacctccaaaataaaatttggcactcttataattaaataaaaaaatttcccacaacaagtttactgttcataaaattgccgtagtacagggctaggcatggtggctcacaccctgtaattccagcactttgagagaccaaagttggtgcatcacaaggtcaagaggtcaagaacatncctggccaacatagtgaaaccccatccttactaaaaatacaaaaattaggtgcgcatgctggagtgtgcctgcagtcctagctactcaggaggctgagacaggagaatcgcttgaaccccaggagtcgaaggttgcagtgagctgagatcacgccactgcactctagcctggtgacagagtgagactc

SEQ ID NO: 481519 - DNA, 416 bp, Homo sapiens
agcggagaggcggctccgggacggcgcgaagcgctggtggcgtggcccgggctgcgtgcgtgtgcgcgcccgccagctgctccggagatacgataagacatgaaaatctgtggattcttagtaacatggagaagaattgcatttgtgtgaaacacacagaacaagaattgtctgcaagaggatcatatctaaggtgcacgtttttgcgtgatacttcattatctagctctgaacacggaaggaacacagcagggggtgccgaacaagcaccaggaacccctgaataacttccagtctttgttgccgtaaccgttccagcgataacgatgctaggaaggcacatagtgacgagaacacgtacgacgtgacagggacagtgctgctcaagtagtgcatggcgggcaaatacggtccag

SEQ ID NO: 481520 - DNA, 103 bp, Homo sapiens
tctagaggatccgatatgtgttatacatgaagtgcagtgagcagcagtgttatgtagaaagctgtgaagtatgcagaagatctagctaagatgatgagggcgg

SEQ ID NO: 481521 - DNA, 613 bp, Homo sapiens
cccatgactgcatctctctgatccacctgacattcaccccatttccccatattacaagccactagcccatctcttagaacctctcatttcctttccattgtagaaatctatcctcaaggaaataacttctcagtgttccatctgctattctatctgctattctgctactcctcaaggatcattcaggcccctcccttccctacacatcaagctcgaggatttgcccccgcccaggactggcaaattagctttactccagcatgctcccggagtcgagcaaaaacgtaagaatggcctccttaagtctaaagttagaccattttttcaccttagaattaggttagaaggccttttccttacggggctcgtgagagaggccacgcgacagcacatttcttcccttctgtcagacataagttcctcagttttagcccttcccacctctatacagtctgataacagaccaggctttattagtcaaattagccaagcagtttttcagtttatatcccttatagtcctctgtcttcaagaaaagtagaacggactaaaggtcttttaaaaacacacctcaccaagctcagccaccaacttaaaaagaactggacaatac

SEQ ID NO: 481522 - DNA, 1185 bp, Homo sapiens
tcatacactcccctccccccttttttttttgtagcgaccccccccccaaaaaagcgcgcggccccccctcctctccgcgcggggcgcccgcgcgcgcggggggggcgggcaggagggtgagacagaagagaggggggggggggtgacacacacaaacagcgcgcggggggggggggggggcacgagaagaggggggagaaacaaatatatataaaccacgacgagagagggaaacgagagagggggggaccccgccaccgccggcgcggggcccaccgagagagacagcgcgcgcgcgggcgccacgaggagggcgcgcgcggcggcgctcctcacaacacaccgccgggaggggggcgcttcgagaggtgcgcacacacacagagagggggcgagggagaggagagagagagagagtagtgtacaccacaccctcttctacgccgcgcgcgcggagggggagagaaccccccacgagagagagagaaaggaggagaaaagaaacacaggcgggagggaggagggaaccaacaaaacaataagtagaggaggcgggagggagagggcggcgacaaaacaaacagggaggaggagaggggggggtgttactcctcccagagagggaaaacacaaaaagagggaggagaccacagcgcggggaggagggaggagggaaacaagggagggcgtccggtgggggcaaaaggaggagggacgccacacccacggaggcgggagaaggggagaacaacaagcgctgtgaagtgagtaggggagaaagaaagaaagaaacataacagatgagaactccacatatagatgggggggtcgacacagcagagatgtataaacataattaggatttgaaggacctcccatcacaccagcggagggaagaaaatcagcggtagctcccaaaaaaaagacgaaaaagacagcgcggagcaaccaaaaaccgagaaaaaacacaaaacaatatacacacaacacagacaagagaaactaataagtggagtatgtgaacgcgaggaagcaataaaaaatactgggtggagaccgaaaagagaaacaaaagagtagcgcgacggcagggaatccaactaagcatacacccagcaagacagaggccgcttcctcaccacaacacacatctagtggggacgcatccaacagaataatgaagac

SEQ ID NO: 481523 - DNA, 139 bp, Homo sapiens
gcacagaggaggagctgaggtccaagggagacaggcaagatatttgtcagcaccgagttcaagttttacaactgcagtgcccaccaactgtgcctgtcctgtgtcaacagcgccctcctctgccacctcctctgttcca

SEQ ID NO: 481524 - DNA, 490 bp, Homo sapiens
  misc_feature (396)..(396): n is a, c, g, or t
  misc_feature (405)..(405): n is a, c, g, or t
  misc_feature (462)..(462): n is a, c, g, or t
  misc_feature (469)..(469): n is a, c, g, or t
tccactgagactggagtgcagtggcaagatcatagctcactgcagcctccaactcctggggtcaagcgatcgtcctgcttcagcctcccaagcagctaggactacaggtgtgcaccacctttcctggctaattttttttttattttttgtagagatgggggtctcactttgttgcccaggctgaccttgtacttgtggcttcaaatgatcctcctgccttacctcccaaagtgttgagattacaggcatgagccactgtgcctgggccaaaaaacattttaaatcccttgtctggggggtcagtcctctaaaacatccctcagatttcagatagtacttttcaaccctgttcctaaacataggcaggttttgcagtaatcttttaggaatataggnttgttcaantaggaggatgggtttttaaccccacatgtttttcataggggggacattatttatttnggaaccntaagggtaggacatgtttatt

SEQ ID NO: 481525 - DNA, 294 bp, Homo sapiens
ctggtctgcactagaggatcccgcctaagtggaactgctccggctaagtggaactgctccgcatcccacaggcccagctctgatttcagccatagctgtgctggtcaggtccctgtgaactcatcccaaccaaacccatctggaacagaagcctcacatttctctgcagttttctgtcctagggatttctccaagaagaaggcactcggcagtagccctcacccacacacaatcatggtggagaaatatgggagactttatatgcctggggggcaaccccggagcagttccact

SEQ ID NO: 481526 - DNA, 277 bp, Homo sapiens
gttcatctagaggctcccccatgttggcgatgtgtcggtgtgcacggactgatgctgtgcgtgggggggcatggggcagtttcctttggtgggcccaggacttcggccccatccgggcctcccctccctgctaggaggcaatcgtcacgaccaagctgctggcctccagtcccatctcccccaacacttgtgcccccaaaaagtgagccagggcacctctgtttcctgctgtatatggacagccgatgcagcgctttgcccatgacctcccttgccc

SEQ ID NO: 481527 - DNA, 481 bp, Homo sapiens
atattgtccaaaaaacccgaaagaacccaagtcgacctaaaggcagtgattcaagagaaagaaaaccccaatgctgccaccagagctttttggaaaaaacagaatactggccgccttgtaaccttctcaaaacgtcaggcctggacttaaaaaattttttaaaaaccccataaagtagtccaggggcggtggctcacgcctgtaatcccagcacttgaggaggcagaggcaggcggatcacaaggtcaacgagatcgagaccatcctggccaacatggtgaaaccctgtctgtaccaaaaatacaaaaattaattgggcatggtggtggacacctgtaatcccagctactagggaggctgaggcaggagaattgcttgaacctgggaggcgaaggttgcagtgagccactgcactccagcctgatgacagagcaagactcagtctcaaaaataaataaaaataataaaacctcaaaaaaaa

SEQ ID NO: 481528 - DNA, 135 bp, Homo sapiens
  misc_feature (60)..(60): n is a, c, g, or t
  misc_feature (85)..(85): n is a, c, g, or t
gatcccagtaaggaaggcacataagttgttcttcccagtgcacacaaagatatgacactncactgtaacctattaagtgtgcaangcattatgtctaaaaacaaaaatgtacataccctaaaaaatactttttgc

SEQ ID NO: 481529 - DNA, 108 bp, Homo sapiens
ctgggtcgagtctattctttgtggaatttcagctaggaatgttattccggtacagatgtacacagtcaaaaagattatgagctgtttgacgagttctgaagtgtgctg

SEQ ID NO: 481530 - DNA, 122 bp, Homo sapiens
gataagtttctggaaagggaggggaggcagacgtggggcatgccagccgtgctctctcccccattcttgtgcatgcaatatctctcatttccctcagttttcctgcaagaatgttctctctc

SEQ ID NO: 481531 - DNA, 205 bp, Homo sapiens
  misc_feature (24)..(24): n is a, c, g, or t
  misc_feature (173)..(173): n is a, c, g, or t
acatcatcctgaagaaagtaatgnggaggacatcgacacatttcccaaagctgggttcaacatcaagacctggagcaccgaggattcaagctgaacatctgggatgtgggtggcagaagtccctgcggtcctactggcggaactaattttgagaagcaccgatggcctcatcntgggtagttggacatgcgcaggaccggacagg

SEQ ID NO: 481532 - DNA, 1076 bp, Homo sapiens
  misc_feature (267)..(267): n is a, c, g, or t
  misc_feature (299)..(299): n is a, c, g, or t
  misc_feature (380)..(380): n is a, c, g, or t
  misc_feature (387)..(387): n is a, c, g, or t
  misc_feature (456)..(456): n is a, c, g, or t
  misc_feature (559)..(559): n is a, c, g, or t
  misc_feature (582)..(582): n is a, c, g, or t
  misc_feature (589)..(589): n is a, c, g, or t
  misc_feature (593)..(593): n is a, c, g, or t
  misc_feature (610)..(610): n is a, c, g, or t
  misc_feature (629)..(629): n is a, c, g, or t
  misc_feature (639)..(639): n is a, c, g, or t
  misc_feature (652)..(652): n is a, c, g, or t
  misc_feature (654)..(654): n is a, c, g, or t
  misc_feature (657)..(657): n is a, c, g, or t
  misc_feature (675)..(675): n is a, c, g, or t
  misc_feature (678)..(678): n is a, c, g, or t
  misc_feature (681)..(681): n is a, c, g, or t
ctgagttctatctttaggatttatctttaagagcaaatttctggtcagctgtgctcctgcccacacctacctccctttaaatattttaggttgcagaagcacagctgaccagaaatatttaaagggaggtaggtgtgggcaggaggaggaatgataaattgggccaggcaagaaaaatctagcttcatataatttgtctgggactatacaccctatataatgttagttttacagaagtaatatgacttttgattgctacataccacnaagagtttatgaactgagatcataaagggcanctgatgtgtgaagaaagtagtcagtacatcctggctcatgctctgaaagaatatccagagaggctctctcaaagatcaggnagatgtnttcccatgccatgcaccctgcttcccagcatttctgcatggtcaagtgagctttatgctcatgagcttnaagtatataattatccaggattttaaatcctcaacttgttctagctgtgatccctcaaagttgggtcatacgttagtgctagatactagaaattttcactttncactgatcagagagacagacatnaaaaacnaaantagaagaaggaagcttncaccctgcagcttcttagnaggaacaatngtcttgccaaaantnttntcccttttctctcccatnttnttntaccaatccttcttactcttgcagtgtgacatgcttctctctgtagatgttaacagttatggcctattttcctcgggacacttaatcgaagcaatcagaacacacatatgtaggggaggtaaaccgtggccgaacagtcgtgatccatcaggttagccctgctgtagggcaagggagccagattcagctgcctttgactgcccttgatccgatatctgattacccgtgttcataggagttatcaggtaagggctcagctctgcacggcatgtaacaaaggaagtgttaaaaaaaaagaaaaggttggctcaaggggggctgtgggggcctttggggcacaccgtcctcgttgatgcgttaagatgcaattaatctgaataccaaattaaatgtta

SEQ ID NO: 481533 - DNA, 157 bp, Homo sapiens
gaactagtctcgagttttgttttttaaatacagagtcatgttgtttctgcactttatatagcaggaagacattatcttagtaggcaattgtaacacttttttgacagtaacccatttcagatttgacatactgcaataatggttgtctttaaaaaaa

SEQ ID NO: 481534 - DNA, 89 bp, Homo sapiens
  misc_feature (13)..(13): n is a, c, g, or t
  misc_feature (19)..(19): n is a, c, g, or t
cacgatgtaatantttaanaacggcaatttaaaacataggccgcttggaggtgtttgcgttttcggttagagataaagcaattttttca

SEQ ID NO: 481535 - DNA, 214 bp, Homo sapiens
  misc_feature (57)..(57): n is a, c, g, or t
  misc_feature (107)..(107): n is a, c, g, or t
atcctcccaccccagcctcccgagtagccgggaccacaggtgcttgccactgtgacnggctaattttttaattttaactttttggtaaagataagttgttgcccagntgagtcttgactccgggttcccagcaatcctcccaccttggtggcctcccaaagtgctaggattacaggcgtgagccaccgtgcccagccaacaccacaaaatatta

SEQ ID NO: 481536 - DNA, 210 bp, Homo sapiens
ttgggagaaaaaaaaaaagggttggggggaaattgggggtaactgggcctttaggtccgaaaggaatttttgggttcttggggcccttaggtggcccaagctggcccaaggttttgaaggcttttaggttggccggtatgccttctcccatactcctggggttttgggggggttacctttggttattaaacctggccggttttttcccca

SEQ ID NO: 481537 - DNA, 229 bp, Homo sapiens
cagctacctgggacctggaagccccctccccactttgagttgtccccgcctttttggacggaaccaacgtactttttacataaatcgattgatgtttcatgtttccttaaaatgtatgaaaacaaactgtgccctgacccccttgggcacatgttgccaggactccctgaggctgtgtcacgggcacgcattttcaaccttggcaaaataaagtttttgaattaactga

SEQ ID NO: 481538 - DNA, 736 bp, Homo sapiens
ggatttcttcgagacccagcgtcccgcttccataatctcgctttcccccccggcgtcaaagtatttagcgtgactcgccccactcccggaagccatatgaaatgattttcttcagatgctctgagcccttaggattcatctttcttttcaccgtaggtgggcctgactggccttgtaataccaactcattcactagacatcgtgctacacgacacgtgatctacgttgtagctcactttccacgatgtcctatccataggagctgtattgtgcccatcataggaggcttcattcactgatttcgccctgattctcaggctacaccctagagcccaacctacgcccaaatcccgtgtcactatcatattcatcggcgtaaatctacttttcttcccgacaacacatttctcggcctatccggttatgccccgacagttactcggagctaccccgatgcataccccacatggaacatcctatcatctgtaggcgtcacttcatttctctaacagccagtaatattaataattttcatgatttgagaagccttcgcttcgcaagccgaaaagtcctaatagtagaaggaccctccataacctggagtgactatatggatgccccccaccctaccacacattcgaaggacccgtatacattaatttagacaaaaaaggaaggaatcgaacccccccaagctggtttcaagccaaccccatggcctccatgactttttcta

SEQ ID NO: 481539 - DNA, 397 bp, Homo sapiens
agagcaggttcccgcagtggcctgtcctctacggctcaccacggcacaagccttcccagccgttccgcccgcgccccccatctcttcctgtctaacttggtgaacgatgcctgagctgtgaggacagggcccccacaggggatggtttcacgagtgtagtcccggaggccttccctttacagctctcctccagccctgggcacatagcataggctggggacacagcgatcctggcctgagaatagaggggaggtggccaagcccgcacaggtggggtgctggggctgcatgcattattgccctgcgtcccttctctttggggctcctttcccctctcatacatgatatcgctttcaaattaaatatcgctgtatgtctgtaaatccacaatacatat

SEQ ID NO: 481540 - DNA, 419 bp, Homo sapiens
gctataatagttttcacatgtgacatacctcctgtttttccaatctatctaagcaccctgtactaatccataatttctggctccatcaggagagatataagggatcagaatcatctggttctgacctcatcctgtatgtctttgtcagcacttcatttgtaaaatattcattgggttcaaagtgaaattctaagacaaaactcataggctggccagcatctgagaacttcactttaatatgtttcaagtgcttcagaataggttcatcgtgttcctgaaccatatcactgagcaagtcaacattcttaaaaacagttaaccaaaattcaggaattcctttggggtcttctttttcttcatcctttttctcatcttcaatcttggccttttctttcaattcctccgaaatctcatcttct

SEQ ID NO: 481541 - DNA, 1117 bp, Homo sapiens
  misc_feature (62)..(62): n is a, c, g, or t
  misc_feature (135)..(135): n is a, c, g, or t
  misc_feature (188)..(188): n is a, c, g, or t
agatctgcggctgtgatgacgtagagcgactggtacggtaagatggaattgcaagaacacgncagcacgagacagcaagacggacgaccggggcggatggtgttgatccatgcaacaaagagaagggtagttgtntgcaacctcgccgagcatatttcccgggagagaaagcggttgctgcccgctcnccctcggtggggacctcgcgtctctcctagtttgtgccacacgaagcgcgcttgggtgggtgtccaatataagcagctggagacttgacgctgagcgacgtgcaacgcaaagcgattaggcgaaagcggcgccaagcgcaccggtgtgcacggtgtgccgtccccaggaccgcgtatcgcgttgccgcagaacacggtttgtccggggaacccgagcgccaggccgcctgggtacgcgcagacccacagagagagttcccctagaaccaagggcccacgaagcaaggggtggggacaccagacaacagccgggggcgccagaacgccgtggctgacgagaccgctcgccgggcggctaaaggtgggacaatgtaacaactacggggggcgcgggccaagcattaacagggcgaagcagacccgttgttcggaggacacgccggactccacggcgggttggcgaacgcagagacaggagcgtccctctcaatagtggagaactcgcgcgtgtctcccgcgaccgcccttcggggtggttgaagctaaaacatgggggcctctaccaaagaggcgtgaaacccctgggaacacacagaagttgtttctgcgggaacagagatgatcggcgccctctgctctgcaggaaatagaggtacccaccagatgacacccgcatgtggcaaatatgcctgggcgcatggaccctctcggggcacagtcagagcatgtgtcttccccttccactgggcacaaacaaagttcaaagaaggcgctgttcactggaaacgggctaaacacaaagaaagagatgtgtgaatttaggcgtagcgaagcgagctcccgtgcattatgcgggcaaattttatccttgatcttttttcaataaaaaaactttgcgggggaaaactttaaatacacccccacataca

SEQ ID NO: 481542 - DNA, 645 bp, Homo sapiens
ctttcgctacgtgggtttgtggtgggggcggtcgaaagggtcgtgtcgcggcctggtgatcccgcccgagtgtcgggggggaacgccgtgtggcccccccttctcgcggggtttaacctccggccccgcggattttggtatacccgcgctccccaacttattggctggttatcttcttcccccaagttccttgatgtgctcgcggggcgccctcgagatactccttgtgcggagagggataaccggcgcgccacaaacatcttctgttggtaggcgcgtgtccctttgtttatcgggatggttttttccgcgatcgtggccgtgcccgaacaaatcatgccgcgggatttcgtcccctctttcccccggcgggagatattcatcctctggtcgaaccaccgcgggagaaccgccccgttggttctctattaccgatagactcccaagataaacaaaacaaccaacttaactcgggtgttggtggtcgcgggcccctcgtcaatatccccagtatctccccgcagaggtccacagctccgcgaaaccacgccgcgaaccatgtggaggcacgcagctcttcaccgcaatccacaatggcccccgccttcccccccgggcccaaaagaaactttttttccaacaaca

SEQ ID NO: 481543 - DNA, 277 bp, Homo sapiens
acacactttagatagagtctaggagctgctagctcccatgtaatggcgcctactccctacgtcacaaatattctcagtgatttggtttcacctacaggaagcggccacattaagtacccacgggagctttcaataaccaacctttacttcccacacaatgctagcccacaagtggactagagtggttactggacacctgaactcggccattctctgcctgtgattgtttctgggcttacgccaagctgagctatgtgccctctctgccctcctttct

SEQ ID NO: 481544 - DNA, 333 bp, Homo sapiens
  misc_feature (102)..(102): n is a, c, g, or t
  misc_feature (333)..(333): n is a, c, g, or t
agccgggtagatgaaggagttgctgaccatcgcggcattggcaccaggcacaaacaacatgctgcggcgggtgcgagttttacgttgttgcagcgaagcganaatcattggcaatcctcccatggcagagccgggataccgctggcgcgtgccagcagggcttccagtcgtgcacgtaaaatgcagtccagtgcgcctttgtcatcgacattcagctgtacgccgcgcacgttgtagcgggcgagaacgtccagaatggtggtgcgaattgcatcgccaaactgtttctcaacgctgctattgatttgcaggtcgatatcctgcgtatcttgn

SEQ ID NO: 481545 - DNA, 1046 bp, Homo sapiens
ctcaggcggagcggcccgtgcgctgtttttctgagtcggggtggcctggcagccgggcgaggacgagggtcggcgggggctgccccgtggtggtggccgcatgctgggagcctgggcggttgagggaaccgctgtggcgctcctgcgactgctgctggtgctgctgcccgcgggatccgggacccgggctcgggtggccgggtgccggctgcgtggggggcggtctgccgagagcgtcatttgggcggtcaacgcgggttggagaggcgcatgtggacgtgcaggggatccacttccgaaaggaccctttggaagcgccggtggtgggccgagcctcaagacttatggcatgaaattgccattcctgcgttccaaccctgagggaaccaagatcctgtatcaaaactgagcggtacaaatgagggagcacccttgggctacggaggtgcccatcacggcagggacgggggactaccgttgcgtgggttcttctgacaatttcgcaggagggtctactttttgcaccaggccccacgccacgcaggggtattttgaagtgtaccgatttgaagtgggccacgttgtggttgacaggcgccctgggcatactcttggactcgtgtgggacatgcagagctcaccgattgaatttatccttattgagcctccgcaaagggggcacgcctgacgttgtccaggggagggtgctccaccttcagagggcaacactctacatttgaggtttggcaaggggttctatgacaatcccaaggtcttgtgcaccctatcattgctgggacaggtgattattttcaaagtcaggctaatcgggaattgggacacagagcgaggagacaagcagagaattgctgaggccatctcaaaacacgccattagacggtgggcaggccgaaacaacctaatctggaaagagccttgtccacggtgcttgagttatcacctttgccccggctgaaaagcttccaagggggggtggaaaccatgtgttcttccgtgcacaaaaaaaagctctttgggaaaagcgt

SEQ ID NO: 481546 - DNA, 1420 bp, Homo sapiens
  misc_feature (402)..(402): n is a, c, g, or t
  misc_feature (492)..(492): n is a, c, g, or t
  misc_feature (551)..(551): n is a, c, g, or t
  misc_feature (611)..(611): n is a, c, g, or t
  misc_feature (652)..(652): n is a, c, g, or t
  misc_feature (758)..(758): n is a, c, g, or t
  misc_feature (1128)..(1128): n is a, c, g, or t
gtgtgtacgacattcaagtgggtcggtggattgtattgttctgtcgtgcagtagctgattgttagagtacaagattcctgtcatgagtacacgtgtgacatgatctgttaatcgtgtactttccaataggattacagagcattactcggatataacatttatggagaaaaggatttaatactaacttacgcgacagtacgttatcatgtacactctacgaattaaacatattctatggaaaataactatgcaaaaaggtctaattgtatccacattgtgttatggtcggtgaaaggacacaaaaattagtgtcctcagtaatgacttagtatggtagcaatgtatgcaataggtaatcatactagaactacgtagagttttttggggactaggagtagaccntataagggcatgggtatgataatagaggaagattgcatgatggttcagtgggatgtcctttagaacagataaccacaggaaaagtatagnacactcgttccttatatgggagttgtatgtggcttctagaaatcttgtcaggagacatngataggtgacgtgggctttcaatatgcaaggtagcctttgcgcaaatataggcaaccatnaataatgcattgttagcatagctgccagagtttagtcgtgntatagctcttacacaatagattcagattggtgagttgattttagaacaccagtgtaaataaggggtttggaatacgagggaatatatagggttggaaaggacaaantataatagtcaggtgccaattatccgtttttaattatgaagacttactaaatatcttaagactcctaaggaatatcttaggaggtggggcaagttccaaacaaattgatagagtgttaagagatggagattaaagcataactttaaaagttcatggtggagaaggtaactgaacgggaatgcaccgaatccatattttgaacaccattttggaaaaatttgacggtcataaaagtaagcatgggaggaagtaagtggaagcggtgtttggaaattagcaattgcgagggtctccaaattgccattggcttcttcgaaattacaatttatggagagcgccttctgagtttctataacattgctcatagttnggacgcagcaatggtacaagaagacaagaaggttcacaaatgcttaatagatcacttggtgtgatacttgggcgggtgaattggcataacgtttgtctaaggaaagcaaagactctttggaatgtgatcatctccaatcaatttgagagagttaattaccttcgagagtcgagcatttgaagacacgtaaagaggatagatccgaacaaaagttgtgacgatatggaaaacactcaccaaggtatcagtgggcgcaacgcgctctcagagatccatcacatgtatgagatta

SEQ ID NO: 481547 - DNA, 117 bp, Homo sapiens
gatgtccttattcgtgttgccagcatataggatgaactttatttttacattgtcgtacaattcattggtaaacttaaaacaatacaaatacatgatttgattgttgtcccagaaaag

SEQ ID NO: 481548 - DNA, 850 bp, Homo sapiens
gcccggcggcctcggcaagagccatgtgcggattcctcgtcccgcactgtccctgtcggtgaagtgacttggtccccgcggcgccgtggccctcgggccctctcgcacgtcatcgaactcgctgctcgcgagcgtccggtaggtccggagagaggcgcagtatgcttggtcaggcttgaagacctggtccacggtcatctccaagaatcctcggcgtcgctcactggacaaggcgaccgaccaatgcggttgggcaggggccagcacaggttgcgtgcgcccccgcgttaatcgactcggaagcaggcccactggtttgagaatgtcaacgcaggggagatcccagccgaccaggaggggcagaagagatgggcgtttgacattgtggcgcgaggttctcgcaagcgctacaaacaatctgcgagagatacaagccgatttttaggggccaaggtggggcgccaaggataaagacccttgctatattatcccaaaagtagactctgggtaggtaatttcatccccttcgagaaggagaaaagaacgatttgtcgaggacagattccaccctagactttgagtgatccagagcagaacaagcgcgcttacggggatcgggcgtcaattcaatgtggggaccctctcaaagcctcccaaaggtctcgccaattcccgtcctgaggcaacaaggcgatggcaataagctggggttgaacttaaaaccgggaatgtaactacctcgttccaggtgggagaaagcaggaggaataccctcagaattggggttggtgcctcgagggggcgcaaaagaaaccacctccgccatcgattcccgccaattcccggtcga

SEQ ID NO: 481549 - DNA, 232 bp, Homo sapiens
agtccgctcatgccagcacatcaggctaatttgtacaattatttgtagcagatgtggtcttcctatgtttcccaggctggtctcgaactcctggtctctagtatcttcccgccttggcttcccaaagtgctgtgattacagacgtgagctaccccactcagctttgtttccttcatgtagcccagagggcgacatctattagccccatttttacagatttagccgactgagt

SEQ ID NO: 481550 - DNA, 695 bp, Homo sapiens
  misc_feature (597)..(597): n is a, c, g, or t
cccagcgcagaagggtggcagcaactcctccaccctgcggtggcggctgccagcaaactcgatgcaatgggaagcgggtgagcgagatgcctgcatgccaagcggttgcggctggacacgggaccccagatgcctgtctgggaagtcgacatccccagccaccatcaggcaagacaacacctcaatcatgcggcgactgtgcagtgtgactgagtgatgccgtgcgccgctacctgacgcggaagccctagtgaccactaatggacctgctgaaaaatgttccagaccaagaagactagggctgatgcagcgagtcagacagtgaacgtgttgtgccacgagtcctcaagcgattctagaccgcgagcgcaagatgatcaaacagactaaaagtgcaacttcatcccatccaaggcagtgagggcttggatccacatacagttggctcttgcctcctcgcagaacttaacggctctcatcttgccccgttcggcgcatccttagagattgcagtgctctgtgcgctaattacgatgggctcttgctccttcctagagacttacaggtcgtctgcgagtgtagcacctttcgaaccantccttgactttgcttcccctggacgtccgcagtggtccccgttagtataggcaaattgctgggaagaacgtttaaagcccattcttcctgcctctggg

SEQ ID NO: 481551 - DNA, 723 bp, Homo sapiens
aaagtctgcaaccagaatctgcatgcaatgcaaatgcaggcaggcattcacttcggcacttcagaatggcattggctcatttgtggaacaagactgtgatgccttacattagcacaacaccagctaagctcaggaacccttgcacaagtgaacagaactgcaccagcccattatagctcacaaaaatgtgctcactcttactaataaaggagaagtcattcaatgcaacttgtcgggaacaaccagcgccatcatctggcaaatttggcattctcccagacaggtggttatcgatgcccatcatgcacagttgcagtttgtggatcactgattggctggaggaatgttacacggctgctggtgttttccaccagatgccgggtttcactttcgctggagcatgggcaaaacttggtgcgcatcgctattacccaaatgcatgcgccaaatgccgaccttggaacacatcaatcatgtacgacacatgcagccaattcatttatcgattaattcacttcctatttgctccactctctgttcccaagaaaactggaggtgaacacatcaaatatttcaagaaaaaataatataggcaagttcactggaagaactttcaaggtcctgcttacaaaaaggaagctggaacaacaacttgatccctaaagtaaggcataggcaacgattatctgcaccatactgcaaaagtaattccaatgatcaccg

SEQ ID NO: 481552 - DNA, 681 bp, Homo sapiens
  misc_feature (78)..(78): n is a, c, g, or t
  misc_feature (104)..(105): n is a, c, g, or t
  misc_feature (114)..(114): n is a, c, g, or t
  misc_feature (200)..(200): n is a, c, g, or t
tttggaaccgcggttgtttaaaagcctgagggaacctggaggggggctcccactctctaccttctttcctccgagttngtgactccgagatggacaaagtgtgnngctgttttnggaggctcccgaggcattggcagagctggtggcccatgttaagtggcccgagaaaggcataccgacgtggcggcacatgtgccagnaaaccgtggaagggcgccaaaggccgcgcgcgcggtgaccttcggcggagaactcattgggcatttagctgtgatgttgctaaagaacatgatgttcaaaatacttttgaagagatggagaaacatttaggtcgagtaaatttctgggtaaatgcagctggtattaccagggatggtctttagtaagaacaaaaccctgaagatatggtatctcagtcttcatactaacctctgtgggttccatgctgacctgtaaagctgccatgaggactatgattcaacaacagggagggtctatggtcaatgtaggaagcattgtgggcttaaaaggcaactctggccagtccgttatacaggtgccagtaaaggaggatagtgggatttccacgtgctctggctaaagaggtagcaagaaagaaaattagagtgaatgtagttgccccaggttagtgaaaactttattaaaataacttgattatga

SEQ ID NO: 481553 - DNA, 207 bp, Homo sapiens
  misc_feature (14)..(14): n is a, c, g, or t
  misc_feature (100)..(100): n is a, c, g, or t
atcatgaatttttnctccagaacgactggaggaataaattacaaaacctgagaggacccacaggccccctgaaggaagcagatggctcctgcaggacccnggagacacaccaaatactgtgttagtatttacttatagaaatgcaaaatggtctggaaagtctcagccatagaatcaaacaagtagaagaaagaaattcagagctcg

SEQ ID NO: 481554 - DNA, 152 bp, Homo sapiens
acctgacgagttggtggcatgggaaggatgtgggtctctagtgcctctgcccatgctcagcagcagcaacagcaacaacctcctggtggccttgccgcccccacaaccccgaggtataaagccaggtacacgaggcaggggacgcaccaagg

SEQ ID NO: 481555 - DNA, 298 bp, Homo sapiens
tgatgcgctggatagtcggaactcgcgcgcccacactcagactcctacaaccacgcaagttccttcttgacccctggtgcctcctaccctatggacctgactggtgcactggtttcacttgtgtcggtgtcggcccctcaccaatgcagccacgtcatgtcattagtcatctggcacacagactaacaacagcagagacttgcgggttctacccagtcagaagatcacaccatggagactaactactagaggacttgaaagagcactgaggggacacaaaataaacttcaccttccat

SEQ ID NO: 481556 - DNA, 122 bp, Homo sapiens
tgtggtacctctcctgtgtgatgcgcgatggtgttcctgacctgtgctgacgcgctgactggaatcggcctacgcgctgggctccaccaatgtgggaatgtgatgctgggacatctgtcctg

SEQ ID NO: 481557 - DNA, 117 bp, Homo sapiens
tcagctggtccccggtcctaagctggactcctcctacacaaatttatttgagcgttattttgggttttccccacgcccctcaatctgtcgggctagtcggggacgtgtcgggctagg

SEQ ID NO: 481558 - DNA, 226 bp, Homo sapiens
  misc_feature (113)..(113): n is a, c, g, or t
gcacatgaaagtagtccagatgaaccacaacgaagatgggtgggatacatctaaatgctgtgctcagagaggaatagcggcgccaggtgaacacccagcatttcacaccgaanggatctcagcacaggagtccgagcttccacctcaggaaaccagaaaaaggagcgaagtcaacccccagacccaaggctccattcctgggaagggcccagcaaggctgcaaaca

SEQ ID NO: 481559 - DNA, 899 bp, Homo sapiens
  misc_feature (23)..(23): n is a, c, g, or t
  misc_feature (91)..(91): n is a, c, g, or t
  misc_feature (98)..(98): n is a, c, g, or t
  misc_feature (110)..(110): n is a, c, g, or t
  misc_feature (122)..(124): n is a, c, g, or t
  misc_feature (126)..(126): n is a, c, g, or t
  misc_feature (222)..(222): n is a, c, g, or t
  misc_feature (243)..(243): n is a, c, g, or t
  misc_feature (307)..(307): n is a, c, g, or t
  misc_feature (363)..(363): n is a, c, g, or t
  misc_feature (379)..(379): n is a, c, g, or t
  misc_feature (387)..(387): n is a, c, g, or t
  misc_feature (409)..(409): n is a, c, g, or t
  misc_feature (423)..(423): n is a, c, g, or t
  misc_feature (479)..(479): n is a, c, g, or t
  misc_feature (491)..(491): n is a, c, g, or t
  misc_feature (526)..(527): n is a, c, g, or t
  misc_feature (546)..(546): n is a, c, g, or t
  misc_feature (563)..(563): n is a, c, g, or t
  misc_feature (781)..(781): n is a, c, g, or t
  misc_feature (795)..(795): n is a, c, g, or t
  misc_feature (807)..(807): n is a, c, g, or t
  misc_feature (824)..(824): n is a, c, g, or t
  misc_feature (834)..(834): n is a, c, g, or t
  misc_feature (899)..(899): n is a, c, g, or t
aggggtgtatttggggtaatgtnggggacataggaaagatgacatggccagggcacaattcttctgtcgtggggaagagggatgaaaaganaagaatnggtgttggagcnggggtggaagannngnggggggcactggctgcattcccccgcccccaggaagcacctctaggccctggacccctcgctcaccctggcccctaagactccatctcttctctgnctctggccctcctggctcttnctcctgctccccttgactttttcccctgacagattctcaagtaggacgatgttcagggcctgancccaaccccccataccaccttatgaaggtacaacctttgccggccctgcttctgcncctcctcaaacctcancgcttttnctctttgggacagctctgatcnccctccttcctctnctccctccccctggtaaaaaaaaggaaaagaaagcaccaattccctggggaggggntgcagacagctnggggagaggactggaaggagagaagaggaccgttnngggaagaggctcacaagtncctgggaagacagggcntgggcttacagagaggtgagggggtacgggcagtggctgctcgtgtcctctgccacccctgcccactgtccaggggacttcaacacaaccgaggggacaggtttgtgtggggtcaggtctgatagaagaggagcaggagaaacaaatcgttaaaacctagcgaattcccctaagaaaacatttcttcctcctttccttctggaggctccttggttggnaggaaataggagtnggtgggaaaganggggggagaggagcttntaccaagggntctactccattctccctctccccgcaacaacttgggctcacagggttggaaggagtgctgaactn

SEQ ID NO: 481560 - DNA, 1850 bp, Homo sapiens
tctccctgtctgctggaaaaaatggcttcccgcaaggaaggtcaccggcttcttacgtgccaccttcttctccagcttccaccgcccggcgccagcgagggaaagaggcaaaggacaaaggcggctctcgggagaatttccgccggtaaagcaagttgcaatatagagtggccgtggtggtacttaaagaatacactcaaactatcatcaagcaaaacaaggaacagaggaacacgtgacaagtgtgtgtcacagacggagaggtgcttataggggctcgtggatgtgctcgaacagaccatcggatgtgagaacaactccacaccaaaagtgaaattatccatatatcgccctctgcagagacaaaacacaagaaagaagaaacgaaagtcgacatagcacttatgagtactagacgacgatcacaaatatatctcaagaagttgagacacaattgaacctgcgagggagcgccatatctcgccccacgtgttcacaacatgtggaggatcacaacttctctataaaacaggtagagagacaggagaggaatatcaccagaggaacacaccacaacaaataacccatccatgtgaggactctaccaatctatgagagaataataaacccccgcggaggggtacacctccttctgcgtgggaaacatatcccatacaagagatgaatacagactactaacccacaaagagcaatgttgacgcaacatgtggaggacaggagacacactctgtggaatccgagatatcatctacaagatcttcgaagatagaactccccacgattattgaaaagcaaatgttgaggcgacacgaaagagagaaaactccttatcattacttgaacaaaaataaaaaagaggggacatacttaccaacagaacacgatagaaatcttccacattaaaaaaaccattggaaatgtgagcaacatgtcattctgtggaacacagagagaaacacaccgcgacgagcattcttcaccgccccccacgtgaaacaataagcacaagttttcggacaaaacacaaacaggcaccacaacattttattcacaccctcttatgtgagacactcaaaccaactcggcttcgaaagaaaacacaaaaagcgattccaccaataatatgaggaaccaactaaccaacagagcagacaagccaccacagtaacgagacaacaaccagagagggtcccacaaatgattgtagggggaagccaaccagacacaacgacaacgacgagacagccccaacgagcgtagagagcacgcgaaacttaaccaacgtactagcaaacgtaccccaacccaaaccagtcgcaacacagacccgaacacacactaatctgtggagagcacaaaaacacacctcaacaaagagtagagctggagagggacacaagaaggcgagcacaactcaataggccagaccagaaagacatgcatacactaatacacagccaacacacgagaagaggaagcgaaatcaagagagagacaacaaaggacgcacggagagcagcctagtagttgcagtcagctcatacagagacgtgagaacatacgtgagagagctagcagacgatagaccgcgcacccacgagcgacagacgcgaaatacagttcgaacacgaggcaggcgcgacgacagcatcgcattcagcagggacaataccacctacagacagacatgcatacaaccaatgagataatggcgactgacctaacctagcgaaaagacagcaagagcctcagcatgaacttagtcatgccacggcgccactcaacacaatccgactcagagcagcgcgaacagcagcagagagcggacg

SEQ ID NO: 481561 - DNA, 904 bp, Homo sapiens
  misc_feature (44)..(44): n is a, c, g, or t
  misc_feature (84)..(84): n is a, c, g, or t
  misc_feature (86)..(86): n is a, c, g, or t
  misc_feature (270)..(270): n is a, c, g, or t
  misc_feature (277)..(278): n is a, c, g, or t
  misc_feature (287)..(287): n is a, c, g, or t
ggcacgagggagtgtggcactttggcggggaaggggcggctcanccctcgggccctcgcccgccctctccgggtctggagcgtntnctcgcgccatccctgcaccgccagggggaacgtgcccatcgcagccgaggccagagggacccccgtccagcagagactggaaccctggtctctggccaccgcccccatccctcccccagctcctaacgccttctcttctgtgcccccatctccagaggaggctgcggaggaggaggaggaagangaggaanngccccaaancaagccgcgcccgtggtgcgctcgctagggatgcccgccgaaaggatcccagaaggggagcgcgtggacttcgatgacatccaccgaaagcgcatggagaagacgacctgctggagctgcagaacactcatcgatggtacatttcgagcagccggcaagacagcgcggaagaggagcctggtaagccatgaaggagcgcacctgagccggccgccggtcagacgagcgccgagcaacacagcgctcccggaactgcagaagcgaacgcgaagcgtcaagcataagactgcgcggacacacgacggaatcatactagccctcggcgcaaccccgcagtaccctgggcaactaccaggcatgcgcacagatgacggacacgcacaagccacgcaggccacagaagacgagccaaaggatggacggccaacccagaacagaaccgggcgcatgatccccaaccacgggaggccacaaaacgaggaacgagcaaacactagggaccaacggacaggaacccgagcgccgaaggacacaggcgggacgaaccgggggcgagggcacacaaaaagcaggcacaatccgcctccgggacgctaacaacggccccaggacccagg

SEQ ID NO: 481562 - DNA, 88 bp, Homo sapiens
tgacaggcttacacaaaatgcagctaagtcaaagttgcggaaccgcacggctcttaagaacacagggtttcccctgaaattcctctcg

SEQ ID NO: 481563 - DNA, 498 bp, Homo sapiens
  misc_feature (44)..(44): n is a, c, g, or t
  misc_feature (254)..(254): n is a, c, g, or t
actgagtatcttggtagctgacagcctcttcctccctgcttgcncaagtcctgggtaaaaacctcagacctcacagattgttgaaacaattaaataacagtacatattaaagcactctataaatggtaaagtactgtacagatgttaatttaatatccactgatatttcttctgtgtccattttgaaagccacttgctgcttccattgccagtaggttcacttaaatttaaaaaaaggaccaacctcattaccncacccggttacatttaaagtgaatattcctgagagtttggagacccaagtatagttttattatctttctacatagaaaacctgcttttaaaaaatgatatctagatattatttgtaaaatgtataagattattttatgtttaagctaattatattattaaggtaatatagcccagatgtgaagaatgtaatagtagatgtaaatatacactagagtgcttactctgaataaagaataaactttt

SEQ ID NO: 481564 - DNA, 889 bp, Homo sapiens
gggacgctagtaaccatgggcttgctgacttagccaaagaagagttaagaagaaaatacacacaagtatacagactagttcctagtttcttagacttatctgcatattggcataaaatcaaatgcacattgtgctcttcatttaggatgctttcattgtctttaagatgtagttaggaatgtcaacagagcaaggagacaaaaaggcagtcctggaatcacattcttagcacacctacacctcttgaaacatagaacaacttgcagaattgagagtgattcctttcctaaaagtgtcacagacaagcatcagcagataagttccgtatttcagacatgggatcacgaggacaacgagcacaggcacagtgatttttttccacaagatctgtaatgttcatttccacttatcaacggcacatcacacacaatgaaaaacattatctggatatcaaaagcaaataaaaacccaattcagtctcttctaagcaaaattgctacagagcagatgaaccacattcataaagtaatctttggctgtaaggcattttcatctttccttcggagtaggcaaacctattttacacaggtaaaacactgctggtgaaccaggggatgtcgcatcggtgattacgggaggcatatacgaattgaaagactgcactattaccttatgttgacacaaattagaagttttgggaccacatcgccctggctgcaccagggcggtcctcactttggaccgtagtggttctttcaaacaggttattccacagaattcctacaggtattacaccctcacgacaaggattatagtattcaagattctgacatcgaggagttcccataggtccagaattgggtcaattctaatccctaaggcactatcc

SEQ ID NO: 481565 - DNA, 131 bp, Homo sapiens
  misc_feature (67)..(67): n is a, c, g, or t
cgatctttttacgcggctcgatctgactacgcgggtcgatctgactacacggttcgatctgactacnctggtcgatctgactacggcgggtccatctgactacgcggctcgagcggactacgcagggcgac

SEQ ID NO: 481566 - DNA, 403 bp, Homo sapiens
  misc_feature (51)..(51): n is a, c, g, or t
  misc_feature (65)..(65): n is a, c, g, or t
atctgttattatttcaatgtttattgaggacccataatgtgctacacactngttttgatcccaanataaacagtctgcaaaaagcaatatggctgtggttgcttcagatttccaggtcatggggaccagttgcaagggaagcatgagtgaccggataaatattaatgagcatcatgtggatgagcatagggaacctataattaaggtaatataatttaaactatatttaggaggaggatgctgtctgaggtgttgattataacccaggaaggagatccgtaggtcatagtaaccaagtcagaccatgctggggaccatctgcaggtgtgttggaaacaaagtatattttcatgctattgaatgtatattgggtgaaccaatgaataaacgaacaattttagca

SEQ ID NO: 481567 - DNA, 390 bp, Homo sapiens
  misc_feature (110)..(110): n is a, c, g, or t
  misc_feature (199)..(199): n is a, c, g, or t
  misc_feature (204)..(204): n is a, c, g, or t
  misc_feature (241)..(241): n is a, c, g, or t
  misc_feature (303)..(304): n is a, c, g, or t
  misc_feature (310)..(310): n is a, c, g, or t
gcaggaagcgtcagcccccgagcgcctctggttccccgtcttctagtgcctctgttgcccccgcctctatgtgctctggtcgcggctcttctgatgcgggtaggcttttnttctgcctggcgtcccctccctctgtcttcggctcccgggggaggagagagccggctgttccctgccggagtgggccggggctgctggnccccnggctctgtccctctgctctcggggccccctgtcctgnctctctcctggtggtgggccctctgtgctcttctcttcctgtcggctctctctcctcgctgnncctggntgggctttgggtttgccgggggtctcctgccccgccggctgcgcttgctgcctctggtttgccgccgtgttgcaggcgcc

SEQ ID NO: 481568 - DNA, 175 bp, Homo sapiens
tagagtattcccgacaggaagccaaagtgaactaagaagattcgttgaacataagagtacttctttatcccgagagataagtttctaagaaactctctaaagaggttaagaacatatgagaatcacacagtgggaatcagtttggcgcagtggctcatgcctgctcatttcagcc

SEQ ID NO: 481569 - DNA, 252 bp, Homo sapiens
cacgcctccctccttcctggcctcccgggagctgcgccctttctcactggttctctcttctgccgtatccgtaggactctcttctctgacctgagtctcctttggaacctctgcggttctattctcgctttgttcccaggagtagctcttgttctggatgttcgtctctcgttactagcgtgtcttgcgacggctgttgttggacattggagcgtgtagcgggtctcgctcgtagcagtcgtaccgtgcatg

SEQ ID NO: 481570 - DNA, 122 bp, Homo sapiens
ccgtatcaaaccctacagcccaaatgccatccctagttttgcacctagaagtttagccattaattgtgttcatagatttagggtttagggtttcgatgagggtttcgatgaagggtttcgat

SEQ ID NO: 481571 - DNA, 1044 bp, Homo sapiens
gtgtaccctggacctgtcctgtctcctcgtgctttgagatattgtatgtcttccttggtacaaatttgggtgtcaaccctttcatgttcttggccgctatgccaggtgcaatggctcaactttttcacccgaagctaaagggtagaacttcattacggccttaccatggtctaaaggtgggcttttgctttgttgatccctgaaaacggtagcctggggtctggttctgggctctctagctttgccttcccgcctcctcgggatgtcccgtcgcatggcccctgtcgattcgatgccggcaccagagtcctggggcagccataggcaagctcatgcaggggctctgtatcactggtcaccaagcatgatagcagcagcaaggacacgtgatctccatactggtcactgccaaggtgccaacccttcatgcccaccatgttttcactgggaccatggtagggctgacctccgttctctgggggaacgtggctagagcttgatggtaacacagtctacacccgcatggtgctctttccatggtggatacctgctcatcttgctgatgcaaaactaggaagtataggctgcatctacggagatggcatttacgctggagagtgtgctttcgctgtctcctcagacctcagtgcacatgtgttccctccgccgcctcgtcttatcgtccatggactgtctttgcagctactccgcagtgtactttgagggtactgagcgtggaattcactctctgtggtattgctcattctgcgttctacactcatatgtaattaagaacggagttccacaaaggagagagatggcattccctgcatgtctgctgtgtccagaccagagtttctctgaggggaccgtgaccctaaccctgccagctcagcccatgtacacctgaccctgtaaatgagtggggtttgctgactgtaattcgctgacaccagtataaaccaaaagaactcttgggggctcagtgtgagagccagggttacctactctgccaagtgaaaacaaagtggctaggcatgatca

SEQ ID NO: 481572 - DNA, 212 bp, Homo sapiens
atcaatatcaggataatctgaccaccacaggtagacagattatagaaactagagcagaacatcacgttgagagtctgtggaagagctatccatagcagaaatggctggtacttcctcttaattccccccacccccttaatcagactttaaaagtgcttaaccccttcaacttgttattttttactttaagcatttagagctggtccgaacgg

SEQ ID NO: 481573 - DNA, 242 bp, Homo sapiens
cctctctccctcctcctcttcctcctattcttcctccttcttcccctccttttccatcccccaacttgccccatgtcccactcctcctcttctttaaaacaaggccctacctttatagcccagatgggccttgaactcactgtgtaactcaggatttctgtgaagcccaggttgctctggaatttgcaacccccagggctcagcctagagtgacttttcttttatggaagtccagtcgacgc

SEQ ID NO: 481574 - DNA, 364 bp, Homo sapiens
  misc_feature (105)..(105): n is a, c, g, or t
  misc_feature (128)..(128): n is a, c, g, or t
  misc_feature (132)..(132): n is a, c, g, or t
  misc_feature (138)..(138): n is a, c, g, or t
  misc_feature (142)..(142): n is a, c, g, or t
gtgttcagagtgcatgtccccttgtctaatccttgtctagttttccctttattcagttactgcttctaaagctggctatgtgtgcttaggccattccagactggnagccatgttgtctgcggaacggnggcntcattntttnatctttcgggggtttttgaatgcttctgcctggcaacatctgtgtcacgattcctgctagctctggttggctcctgactttggcttttttttattttttttttttaattgcagaagaaggtagtgtaaatgaggaaataaagaggggggtgacaagagttggcactctaccagaaccaggggacaggcgttcaagatgcataaagaggaagaaaagcagatg

SEQ ID NO: 481575 - DNA, 1278 bp, Homo sapiens
  misc_feature (25)..(25): n is a, c, g, or t
  misc_feature (36)..(36): n is a, c, g, or t
  misc_feature (53)..(53): n is a, c, g, or t
  misc_feature (73)..(73): n is a, c, g, or t
  misc_feature (100)..(100): n is a, c, g, or t
  misc_feature (112)..(112): n is a, c, g, or t
  misc_feature (120)..(120): n is a, c, g, or t
  misc_feature (125)..(125): n is a, c, g, or t
  misc_feature (181)..(181): n is a, c, g, or t
gacctcgcaagtggttccctcattngagtgctccgngcgcacagacccgcgcnccgcgcgtccgcgagcctcnccgagagccgtcccttcgtccggcccntggagcattgcngtttgtcngccgngtgtcgcagtgcgaggatggcgccgcggggtgtagctggtctctctgcgcaggccngagtgggcccagaagaagcgaggaactccgcagctcgtcgacacgtctcgtctcctgtcccaattcagggcttggtgaggtgactcgcggtcgcgggtgactcgccggcaggacactgcctggaacgcctggagcgcctcccactgcagacgtctgtccgcctccagccgctctcctctgacgggtcctgcctcagttggcggaatggcggccacgggagccaatgcagagaaagctgaaagtcacaatgattgccccgtcagacttttaaatccaaacatagcaaaaatgaaagaagatattctctatcatttcaatctcaccactagcagacacaatttcccagccttgtttggagatgtgaagtttgtgtgtgttggtggaagcccctcccggatgaaagccttcatcaggtgcgttggtgcagagctgggccttgactgcccaggtagagactatcccaacatctgtacgggtcctgcctcagttggcggaatggcggccacgggagccaatgcagagaaagctgaaagtcacaaaggtctggagcccggcactgtggtcataacagagcaggcagtggatacctgcttcaaggcagagtttgagcagattgtcctggggaagcgggtcatccggaaaacggaccttaacaagaagctggtgcaggagctgttgctgtgttctgcagagctgagcgagttcaccacagtggtggggaacaccatgtgcaccttggacttctatgaagggcaaggccgtctggatggggctctctgctcctacacggagaaggacaagcaggcgtatctggaggcagcctatgcagccggcgtccgcaatatcgagatggagtcctcggtgtttgccgccatgtgcagcgcctgcggcctccaagcggccgtggtgtgtgtcaccctcctgaaccgcctggaaggggaccagatcagcagccctcgcaatgtgctcagcgagtaccagcagaggccgcagcggctggtgagctacttcatcaagaagaaactgagcaaggcctgagcgctgccctgcacctccgcagacctgctgtgatgacttgccattaaaagcattgtcca

SEQ ID NO: 481576 - DNA, 461 bp, Homo sapiens
gcacgagccgagatcataacatatgagcaccgtttatatacccctaactttgaaagcggttctaaaagttcaatttttcaaaaaatagctgcatgatattaacgttacaagccaaggcaacttttttgccttctcggcattcgctcgaaacatcttgcagaagtgaaagagtagcaaaaattggaccctcaaccccctctataaggtattacctttttcctctttccttttgcagcggaaaatttcggagttttcaaagaacaactccggaataaggataaacttgtgattggctttgcagtagatgactgacaactcccgcaagaaaactgacccgtttttgattttgagtttgcttcttcttgtagttaaagtaaataatctgcaaagtgcggacatatgtgctgaaccactaaaattaaaaaaagaaggttagtattttgttatgcagttctcactat

SEQ ID NO: 481577 - DNA, 491 bp, Homo sapiens
ggaggagctgggaatgtcgaatacgagttggaaacagaattgttatcacagaataattagtgtaagagaaggttgatagtggaagtagggtagatccttaatgcaatatatgcccttttaagaggaggagaagggacgcagagatagagagggagaacacgcatgatgacaggagcggatagtggaggaatgtgcctataagccagacaaaactaaggattgctgctgaaaacggaaactaaaagaaaggtatgcctgttccagatactgttctctgacatctacactgggtgtcctaaaattcaagtcaatgctgacactaattacctagacttaatacagacccaacaaggaaagaatatttcacaaaactgccccatttcagacgtatatacagctggcctttgaacaacacaggctggaactgtgcaggtccacttatacacagactttttccaataaaagttacaccaaatatgcctgcctgtcct

SEQ ID NO: 481578 - DNA, 1428 bp, Homo sapiens
  misc_feature (25)..(25): n is a, c, g, or t
  misc_feature (36)..(36): n is a, c, g, or t
  misc_feature (53)..(53): n is a, c, g, or t
  misc_feature (73)..(73): n is a, c, g, or t
  misc_feature (100)..(100): n is a, c, g, or t
  misc_feature (112)..(112): n is a, c, g, or t
  misc_feature (120)..(120): n is a, c, g, or t
  misc_feature (125)..(125): n is a, c, g, or t
  misc_feature (181)..(181): n is a, c, g, or t
  misc_feature (1151)..(1154): n is a, c, g, or t
gacctcgcaagtggttccctcattngagtgctccgngcgcacagacccgcgcnccgcgcgtccgcgagcctcnccgagagccgtcccttcgtccggcccntggagcattgcngtttgtcngccgngtgtcgcagtgcgaggatggcgccgcggggtgtagctggtctctctgcgcaggccngagtgggcccagaagaagcgaggaactccgcagctcgtcgacacgtctcgtctcctgtcccaattcagggcttggtgaggtgactcgcggtcgcgggtgactcgccggcaggacactgcctggaacgcctggagcgcctcccactgcagacgtctgtccgcctccagccgctctcctctgacgggtcctgcctcagttggcggaatggcggccacgggagccaatgcagagaaagctgaaagtcacaatgattgccccgtcagacttttaaatccaaacatagcaaaaatgaaagaagatattctctatcatttcaatctcaccactagcagacacaatttcccagccttgtttggagatgtgaagtttgtgtgtgttggtggaagcccctcccggatgaaagcaggtctggagcccggcactgtggtcataacagagcaggcagtggatacctgcttcaaggcagagtttgagcagattgtcctggggaagcgggtcatccggaaaacggaccttaacaagaagctggtgcaggagctgttgctgtgttctgcagagctgagcgagttcaccacagtggtggggaacaccatgtgcaccttggacttctatgaagggcaaggccgtctggatggggctctctgctcctacacggagaaggacaagcaggcgtatctggaggcagcctatgcagccggcgtccgcaatatcgagatggagtcctcggtgtttgccgccatgtgcagcgcctgcggcctccaagcggccgtggtgtgtgtcaccctcctgaaccgcctggaaggggaccagatcagcagccctcgcaatgtgctcagcgagtaccagcagaggccgcagcggctggtgagctacttcatcaagaagaaactgagcaaggcctgagcgctgccctgcacctccgcagacctgctgtgatgacttgccattaaaagcattgtccaaaatccannnntgtgtggactttgagcacactttacacaagaatctagaaaatcagatcgcgattaagagacagagaatcttggattaaccgcatgggagatgttcttccttttgaagtttcattggagcattttcaatgatgttagcctgatttggggtttcttcaagaacattctaccaaatttttgtactatttctagggaaatttttcaggactttaaaattctaatggtagtcagatttcatgtcactaaacagaaatctgacataggacaagcaaccat

SEQ ID NO: 481579 - DNA, 1405 bp, Homo sapiens
  misc_feature (25)..(25): n is a, c, g, or t
  misc_feature (36)..(36): n is a, c, g, or t
  misc_feature (53)..(53): n is a, c, g, or t
  misc_feature (73)..(73): n is a, c, g, or t
  misc_feature (100)..(100): n is a, c, g, or t
  misc_feature (112)..(112): n is a, c, g, or t
  misc_feature (120)..(120): n is a, c, g, or t
  misc_feature (125)..(125): n is a, c, g, or t
  misc_feature (181)..(181): n is a, c, g, or t
  misc_feature (1331)..(1331): n is a, c, g, or t
  misc_feature (1370)..(1370): n is a, c, g, or t
gacctcgcaagtggttccctcattngagtgctccgngcgcacagacccgcgcnccgcgcgtccgcgagcctcnccgagagccgtcccttcgtccggcccntggagcattgcngtttgtcngccgngtgtcgcagtgcgaggatggcgccgcggggtgtagctggtctctctgcgcaggccngagtgggcccagaagaagcgaggaactccgcagctcgtcgacacgtctcgtctcctgtcccaattcagggcttggtgaggtgactcgcggtcgcgggtgactcgccggcaggacactgcctggaacgcctggagcgcctcccactgcagacgtctgtccgcctccagccgctctcctctgacgggtcctgcctcagttggcggaatggcggccacgggagccaatgcagagaaagctgaaagtcacaatgattgccccgtcagacttttaaatccaaacatagcaaaaatgaaagaagatattctctatcatttcaatctcaccactagcagacacaatttcccagccttgtttggagatgtgaagtttgtgtgtgttggtggaagcccctcccggatgaaagccttcatcaggtgcgttggtgcagagctgggccttgactgcccaggtagagactatcccaacatctgtgcgggaactgaccgctatgccatgtataaagtaggaccggtgctgtctgtcagtcatggtatgggcattccttctatctcaatcatgttgcatgagctcataaagctgctgtactatgcccggtgctccaacgtcactatcatccgcattggcacttctggtgggataggtctggagcccggcactgtggtcataacagagcaggcagtggatacctgcttcaaggcagagtttgagcagattgtcctggggaagcgggtcatccggaaaacggaccttaacaagaagctggtgcaggagctgttgctgtgttctgcagagctgagcgagttcaccacagtggtggggaacaccatgtgcaccttggacttctatgaagggcaaggccgtctggatggggctctctgctcctacacggagaaggacaagcaggcgtatctggaggcagcctatgcagccggcgtccgcaatatcgagatggagtcctcggtgtttgccgccatgtgcagcgcctgcggcctccaagcggccgtggtgtgtgtcaccctcctgaaccgcctggaaggggaccagatcagcagccctcgcaatgtgctcagcgagtaccagcagaggccgcagcggctggtgagctacttcatcaagaagaaactgagcaaggcctgagcgctgcctgaantcacattactataaaccaaaacggccgcgtgggggcttntgaagttaagcacgttggcccaccttaaacgcatt

SEQ ID NO: 481580 - DNA, 751 bp, Homo sapiens
  misc_feature (25)..(25): n is a, c, g, or t
  misc_feature (36)..(36): n is a, c, g, or t
  misc_feature (53)..(53): n is a, c, g, or t
  misc_feature (73)..(73): n is a, c, g, or t
  misc_feature (100)..(100): n is a, c, g, or t
  misc_feature (112)..(112): n is a, c, g, or t
  misc_feature (120)..(120): n is a, c, g, or t
  misc_feature (125)..(125): n is a, c, g, or t
  misc_feature (181)..(181): n is a, c, g, or t
gacctcgcaagtggttccctcattngagtgctccgngcgcacagacccgcgcnccgcgcgtccgcgagcctcnccgagagccgtcccttcgtccggcccntggagcattgcngtttgtcngccgngtgtcgcagtgcgaggatggcgccgcggggtgtagctggtctctctgcgcaggccngagtgggcccagaagaagcgaggaactccgcagctcgtcgacacgtctcgtctcctgtcccaattcagggcttggtgaggtgactcgcggtcgcgggtgactcgccggcaggacactgcctggaacgcctggagcgcctcccactgcagacgtctgtccgcctccagccgctctcctctgacgggtcctgcctcagttggcggaatggcggccacgggagccaatgcagagaaagctgaaagtcacaatgattgccccgtcagacttttaaatccaaacatagcaaaaatgaaagaagatattctctatcatttcaatctcaccactagcagacacaatttcccagccttgtttggagatgtgaagtttgtgtgtgttggtggaagcccctcccggatgaaagccttcatcaggtgcgttggtgcagagctgggccttgactgcccaggtagagactatcccaacatctgtacgggtcctgcctcagttggcggaatggcggccacgggagccaatgcagagaaagctgaaagtcacaatgatgccccgggaataattcccccgaccatt

SEQ ID NO: 481581 - DNA, 139 bp, Homo sapiens
ggcgagcgccgggaggaggcggccggatcgagcgggcgcccgcgcgtgtggcgtgatgggaagccgcttgccccggcagattcgccttgcgttctgtcgcgctgcgcgatggaaagtcgaaagagggaggagaacgatg

SEQ ID NO: 481582 - DNA, 242 bp, Homo sapiens
  misc_feature (25)..(25): n is a, c, g, or t
  misc_feature (207)..(207): n is a, c, g, or t
  misc_feature (228)..(228): n is a, c, g, or t
tcctgctctgtcacccaggctgatngtataatggagtcaccacagctcactgcaaccttgacttcccaggctcaagctatcctcccacctcagcaccacttgagaggtggttaatttcccatagagacggggtctttatgttgcccaagctggtctccaactctccaattcctgggctcaaatgatcctcccaccttggcctcccanagtggtggggattacagggcngagcaaccacaccc

SEQ ID NO: 481583 - DNA, 331 bp, Homo sapiens
tgtgggtagcatcaatcaggaagggtccccagcgttggggagagccccaacgttgagaacaagtaagtgaacaattagttgtactgaaccacttgttacgaaacagctagatcacaaacaacctgtgtgtacaattacttccttacaaacgtagcacccttcagcaggaccctataaaactttcctccagcccttgcctctttgcaggtagccccttctctgctgagctgcccactgcaacatattttcacaatttctctaataaatctgcccttctttacctacaactatcttggtaaatggctttaccacctgcaaaactgaccctagg

SEQ ID NO: 481584 - DNA, 885 bp, Homo sapiens
  misc_feature (1)..(1): n is a, c, g, or t
  misc_feature (147)..(147): n is a, c, g, or t
  misc_feature (580)..(580): n is a, c, g, or t
ncttgtttttctgtgcgttttgtggtttttgtttgttgtgtttgtgtttttgtttttggtttttgtttttgttgtggttttgttgtgtttgccccccgccccgctgtgtgagggcacgcggtcaccgagtgtgaatcacgatccccnctttaatgggtgctcgaaggaacacccactcacgcatttttagggggcacccctgagtaaggacctccgaagggatccccaccaaagttggggcacccaaaaaatccgagccttgttaagaacgcccgcgccccgctgaacttattaacgcgttcctcaaagagttatacgcaagcccttgggtggcgcattccgcccccaaggagaaaggtggtgaaacccgcgccttcgcgaagggccccccctccaaagggcacttccttgggctaacaccttgaggcaccccgcgtgggttctccctctctcgaacttttccaacacgcgaacacacccaccttcctcccaccctttgaaccctggggctggcacattgccctcacacgaccacctttgtcaaagctcacatttcctggtatatgagcacaccgaaatnttggctacacccacacacacagggtggtggaccctcacatggcccacacacatggcctcccaagagagttaaggacccctggacaccacccagcccccagccagagccaccagaaggaagaagaagagaaccctccacatgctggggagatccctgcccaccacatccagtctcccccacccaccacatgaatttctccctcctcaccgttgccctgtagaccccttgtaagaaggggaggggcctagggaaccccccccttgtcatgtacccatccaattaagtacccctgtgctccacccaca

SEQ ID NO: 481585 - DNA, 85 bp, Homo sapiens
gcggccggaccttgtcttcgaggaagaggacctcccctatgaggaggaaatcatgcggaaccaattctctgtcaaatgctggctt

SEQ ID NO: 481586 - DNA, 608 bp, Homo sapiens
gaaatttacttgcagcatatgtaagctaatgtatatactgtggtggacgatgaatacagctgcagatatcttcaacacagtatatgaagtattataatgactatggagatatcatcaaagaaacaatgaggtaaaacaaggcagatagacaacaatgcagtgtgctaagacccttatactcagtctgcaacagcttcctgtacatgaacatgatacacgacacaatggcctatcacatatttagatagatcatcctctacaataatagtggccataaacagaactatgactacgacgaaagaagaataaaaacaaaataggacatagactcacgaaagaaaaacgaagagaacgcccataggcacaatgcgtacacaaacagaataggccatcagcacacacaagccatatcacaaacaagaacgccctaaacatcccagacaccaggggagagaagcacaaatcgcaaccatatacaacaaaacacgagacacataacgccttcgcaatcacacacatggaacggtggaacataacaccaaaagtacaaaacataagactaacagaaccaaaagaacaaaacagaaaaccaggaacgaaacatggca

SEQ ID NO: 481587 - DNA, 210 bp, Homo sapiens
atggcagctcatttgaacacgagatgaaactaccttctgaattattattccagaccctcatcaggtagctcgtgtcatcgaactgttaagatatattgtttactaacttggttgtcacaattgtatcctagagaacactagcatctgcagaaactataattttggtacacaatgtatctctgcgcgagtccgctgcattgggttccggag

SEQ ID NO: 481588 - DNA, 214 bp, Homo sapiens
tctttcttcccaacttttattttaggttcagggagtacatatgcacatgtgcaggttttatacgggtaaactctgtgtcatgggggcttggtatacaatttatgttgtcaccccggtaataagcataatacctaataggtaacttttcgatcctcacccccctcccacccttcaccctcaagttaagccctggcttatggtcgacgcggccgcg

SEQ ID NO: 481589 - DNA, 329 bp, Homo sapiens
aaagccaaagctagctttggcccccaggtgggggaggtcaccctgctccccccccccccccaagttttaaggttttttcaaagggtggaggtgtggaaggagggggtgctctcccaactaagcccaaggcgggggcaaaggtggttttttggttcccttggaaaaaggttttggtgccctgatttatgaactttataaaagaggaaaaagggtttggcccttttttacaggaaggggactttttggaacaaagcgaaggaaattaaactttttataaaagttaaccttttggataaaaaacgattttttaacccttggggatatgatga

SEQ ID NO: 481590 - DNA, 164 bp, Homo sapiens
ttgaccggtaggacgaagtatgaacaattatacgcgtagcatacgtatagcgaggacttaaccctattccttctgcatatgaatttactaaaaattactttgcaaggagagccaagcgctaaagacctcccggaaaacagacgagctaccttatgaacagctaa

SEQ ID NO: 481591 - DNA, 301 bp, Homo sapiens
  misc_feature (3)..(3): n is a, c, g, or t
tantctgcgtcactcagctgacagctatcggagcagttcttcggatctcactgcagagcatgctgagcttcgttctgtgtcaagacgcatgctccttccgagggcgagtcttgggagcccactatgaaaatctccataaagagagaaaaatccagatgaagattcatcattttaattgatggattaacatgaagcagaatttcacaaaccggattatggcgatacaattgtatcgtttctgagtaaaatgtcgggaagtttcttcttggctcaactaattgtaacagttaggtctacctgg

SEQ ID NO: 481592 - DNA, 673 bp, Homo sapiens
ccgggtctcgaccgatattatggaattgtagtctatacgcgattcatagtatttaagaataattgacggctgttcacattgcaggcgctgagctggtccgcatttaacgcccctgatgttcatttatctgagctgttcttacaaattcagcattataccgacggggaatggcagattgtgaccagccggaggatgaacagctgataccgagacagctgatgagctacacatgcgaagattctagctaatgctagaggacgtaggtcaccagacgacgccttccgttgctgatggcagtgcaatacgggattatgtggtacccaccatgtgtatacaggatacatctgtcgactccgtaccttgccgccaagggacttgtatgtccctaacggctggaaacaccaattattgaagacaccctaatggagactcagaggagagcgatattgcataaatgcaggctcagagaagtttaagcactgcatacttagtctccatcagcagagaggctgtttaacaggctgcatttgtaatcaccgacagctgtaccagagcagcacatattaagtgactaacgattgttctgaaccagcacatagtccatgactctagagttcaacagtgatccatgagtactgcggactgcgcgacgcactgtgtaagcatgtggcac

SEQ ID NO: 481593 - DNA, 474 bp, Homo sapiens
  misc_feature (7)..(7): n is a, c, g, or t
  misc_feature (49)..(49): n is a, c, g, or t
ggaaganaatgtggtacatatatactatggaatactatgcagccataanaaagaataaaatcatgtgctttgactgggattacaggtgtaaaccaccgtgcccagccttaatctaggttttgaggccatgtctttttctttctatttctcttctttccttgtaatccgtagtcagttttacttaggaaaggtgggagggtggaaaaggaagaagagaaatttgaaaccgtgtgttcaatgggtaaactttgtaagagtccttttcaggaagatcgggagcatgtaatttaaacatgaaatgaaagcagaaaacatgcacctgacattgttacattagtgttgcaacattctcgtcatcttgcactgaaaaatggaaggaaaaatgcaccaagcaaagtgtattcagtcccctgatgtgaagcaaattatcaactccactgcacttcagcctgggcgacagtgagactccatgtc

SEQ ID NO: 481594 - DNA, 343 bp, Homo sapiens
taataaaccaagaaatttctttaatcattttttataaatggggttagtccatgaaaaatgttttccctccaaacagaatattttattttattgggtcacataaccctttcctaaaaaaaaaacactgtttttccccagttccaagaaactaaaaccttcctaaaacccctttatcgcctttcctaaaggctttaaatccccatcctaaagggaatttgctgtttttccgatgaaatccataaaacgttcttcagggcaaaaaaaaacccgtacccaacattggaaagatggcccccccaaaaaaaaaaaagaccagttctaaaattttgcagaaccttttcaa

SEQ ID NO: 481595 - DNA, 331 bp, Homo sapiens
atctctttcatccctaatcacccaatttgtataaaactcttccttaattcagaacaagtcaataatagcccagttctacacagtctatagaatacttacaaaccccggaagaaatatttgaagttaaggagtttccttaaaaaaaaaatgagaaaagagtaacaaaaggctgttgtttaataaccttatagttcaaattttacatttacaaaaagtaatatgtaaactctcctagtcagaaaacctactgggacctaacttacacttggtcttagccgaaaggatggacctaacacataaatattaccctttaaaagtgttttgggtgctg

SEQ ID NO: 481596 - DNA, 461 bp, Homo sapiens
cagagagactagtcgggagactactgcagtaatacaggtaaaagatgatggtgtccatttccaggtagtagcagtggacacggtgaaaagtgattggatttgggatctaatagagccaataaaatctcctagttggatttagatgggaaacaagagaggaggaaacttgactccaaggttttgggcctcccaagcaactagaagtatggagatgccttgagatgagcagactgtaggagtcatagttttgagtgcggaagatcaggatgtcggttttgggtgtgttaatgttccgatgcctatttgacatgggtctttcgaatacagcagatggatatgctaacttggagtttgcgtaacaaggctgggcctgagatccccatttaggtcggcgtatggtgtttccactgagtgagacaggattttaatgcgatgagactgggttagtgagtgtaactaga

SEQ ID NO: 481597 - DNA, 114 bp, Homo sapiens
cacgctgggaagctgccaggatggaagaaccagccaggccatgcctgcccatagctcagtggacccggacctcaggttgcccttgtctgcgaaagttgcttcctgatgcttcag

SEQ ID NO: 481598 - DNA, 472 bp, Homo sapiens
gtcgacactagtggatccgaagcagccccttctttgactcttgcattttgagtttttacagatgtttgtggagctcttactctgacatgcatttataattgccatggagactcagacaacgttgtagatcacagagtgaactatgctttttagtgtcaatgcatagcttaagatagaatgttttacttgttacataaatgctggttttctttcagatttcaggacatactttattttttccagagatagggtcttctatgttgcccaggctggctttgaactcctgggatcagtgatctcctgcctcagccttcgcggtagttgggactacaggccacgcaccgtgcatggctggacacgggatttgattgatggtaaacatccagctagctgagagatggcaaacctacagagagctacagttttttttgcactagaagtgaatggttccggggggattgtgattttttaa

SEQ ID NO: 481599 - DNA, 336 bp, Homo sapiens
cttgtccaataacctcagcgaattttagtatttttatgttcagacggggtttctccatcttggtcatgctggtctcttactcctgacctcaggttattcactcacctcaggctcccaaaatgctgtgattacaggtttgatccaccatgcctggccgatcatgtgatttttcttctcctagcctgtttattgtcacgtgattgcacttagctaatttttgaatattgatccagtcttgcctacctcggacttatctctgtctggtcatgtccttataattctcttttacgatatatgctgaacttgtactttgctagatattagtgtaggtaactt

SEQ ID NO: 481600 - DNA, 175 bp, Homo sapiens
tgtggatatttttccacagacttttaagaaaatgcgtagatatttataactggcaaacctaaagaaagggaaggtaaagtactttacataagtatttgcataaataaaaccaatggggctaattgtttaattcttaattcattgtttacttcacatttattattgataccgcgaa

SEQ ID NO: 481601 - DNA, 512 bp, Homo sapiens
ttgcgcgtcttctggctggtgtattttgtaagctactctaaattcctatttatagaaattgctggctgggcacggtggctcatacctgtaatcccagctacttgggaggctgaagcaggagaatcacatgaacccaggaggtggaggttgcaggagccaagatcgcgccatgcactccagcctgggcaacagagtgagactccatctcaaaaaaaaaaaaaataaggttgtcctctgaagagcaaatgtctcattccagttattgacccattcagcaggaatatggtggagtccagcccaattcaggtcagccatatccaaaagaccacaagttcattactaggttgagcaaaagagttttaatctataagcagaaagagcctctctggcagcagagataaaaaactgccccaatttcatttccatacttcagggaacagcaaatggaggattaacttatctaggacttgaattccttctttgcgaccaagtgattaaaagacggcaagcgg

SEQ ID NO: 481602 - DNA, 290 bp, Homo sapiens
tgatgctgacacttgagggtgcgtggccgaggactttcacagtctctaagcagctcccccaccctagacacggaggccccaaggggctgtgaacacgagtctgtggcgaagcaagtgaggcatcgctcggtgggcgctcttgctgggtgccccagccgcaggcgtgtacggactggacggcctgtcttttttccactggccccccggcatgggatgggccagggcgccggtccggtaaccggagtgcaagctcgaaagagagagagagaaaacactgagacagctttagt

SEQ ID NO: 481603 - DNA, 93 bp, Homo sapiens
aacggggcagggaaggtagtgtgaatgatgtaaaggtgtgccaaattggttctgcaaaattaaccttttttgaataaaatattcaattttcaa

SEQ ID NO: 481604 - DNA, 943 bp, Homo sapiens
  misc_feature (186)..(186): n is a, c, g, or t
  misc_feature (259)..(259): n is a, c, g, or t
  misc_feature (306)..(306): n is a, c, g, or t
  misc_feature (342)..(343): n is a, c, g, or t
  misc_feature (348)..(348): n is a, c, g, or t
  misc_feature (351)..(352): n is a, c, g, or t
  misc_feature (354)..(354): n is a, c, g, or t
  misc_feature (408)..(408): n is a, c, g, or t
  misc_feature (413)..(413): n is a, c, g, or t
  misc_feature (444)..(444): n is a, c, g, or t
  misc_feature (446)..(447): n is a, c, g, or t
  misc_feature (460)..(460): n is a, c, g, or t
  misc_feature (495)..(495): n is a, c, g, or t
  misc_feature (506)..(506): n is a, c, g, or t
  misc_feature (532)..(532): n is a, c, g, or t
  misc_feature (550)..(550): n is a, c, g, or t
  misc_feature (552)..(552): n is a, c, g, or t
ggttctcccaggccccaccttccatccagtgccctggaccctcggctgggtagcgccaccagagcgaccaaagtcccgcgccttccagggcgcactccagagccacaagagctccatggcggcggcgcgcaagcccaaaaaacctttccctggtgtgtgcacggaccgggggacttgcgcctgganaactatcctatccctgaaccaggcccaaatgaggtcttgctgaggatgcattctgtgggaatctgtggctcanatgtccactactgggagtatggtcgaatgggaatttattgtgaaaangcccatggtgctgggacatgaagcttcggggaacanntcganaannangtgggatcatcggtaaagcacctaaaaccaggtgatcgtgttgccatcgagccntggtngctccccgagaaagtgatgaattctgcaagnanngggccgatacaantctgtcaccttcatcttcttctgtgccacgcaccnccgatgagggnaacctctgccggttctataagcacanatgcagccttttgttacnangcttcctgacaattgtcacctttgaggaaggcgccctgatcgagccacttcttctgttgggggatccatgacctgcacggagaggcggagttaccccgtgggagcacaacggtccttgtgtgtggagctgggcaatcgggatggtcactttgctcgtggccaaagcaatggtgagcatgctcaagtagtggtgactgatctgtctgctaccgcgattgtgcaatagccaaggagataggggctgatttagtcctccagatctccaagtgagagccctcaggaaatcgccaggaaagtagaaggtcagctggggtgcaaggccggaagtcacatcgagtgccggggcaagagggctccatccaggggggcatttaagcaattcgtctggtgg

SEQ ID NO: 481605 - DNA, 354 bp, Homo sapiens
ttcctgtactcatgatgttcgcatcttgtaatgctttttggccatttgcgtgtattctttatgaagcgtctatccaagacttttgcagatctgtattttttttcttttaatagacaaagtttcactctgtaactcaggctggaatgcagtggtgcaatcacagctaactgtaaccttgaactcctaggctcaagtgatcctcctgctccagcctcccgaatagctaaaactacaggcattcgccaccacacctggctaatctttatttttgcagagacaggttctcactatattgcccaggctggttttgaactcctagcctcaagtgatcctcaggcctcggcctcccaaagc

SEQ ID NO: 481606 - DNA, 634 bp, Homo sapiens
aatttactccccatctagattatgtgcacaattttagttaaatggattatgtgctcaattgggggtttttttttggagacggagtctcgctctgtgcacccgggctagagtgcagtggcgcgatctcggctgcactgcagagctccgactcccgggttcacgccatactcctgcctcagcctcccaagtagctgggactacaggtgcccgccaccacgcccggctaagtttggtatttttagtagagatggggtttcaccggtgtgggccgggatggtctcgaatctcctgaccttgtgatccgcccacctcgggcctcccaagggtgcgggggtttacagggtgtgaaccatcggcgcccagacccgtggtgctcaatttcttaactaaggtgcacaatgggttcgtggtgaaaaacaagcaacgtgggctatatgctgggtagccagactaaggagagacttagatttttctggtcaagcagatggtgagggtaacatgtgtggggccaagcttcaggtgtaattactctggattgttactcttttctctttcatcccaagggttcagttcatattctttcttcagtactacaaagataccagaataagcgggcatagaaagcaaaggtgta

SEQ ID NO: 481607 - DNA, 429 bp, Homo sapiens
  misc_feature (429)..(429): n is a, c, g, or t
taataatacaataaaatgttcccaagtggtttaaagtcaaattttaactttgagaaatatactcaattcaagattgtaattaccaagggttatttgaaatcaactatacaaaacatttaaaagtgcttaggtatggctaggaattttctaagaacagggaaatggtttactacacaatgatagtcagaccacatacaaagaacaagaatccgtgcgtcctgcatggggacggttaatgctcagtatccattctgagaaagcagagcagaagctgtctctaatctaatctgatcttccaccagagtcttccttgttaacagtcagaagcacaagctgcctagcactcctgacagtctgagggtgggtagagtcacatgccagtcacactgatggcagaatttatttccttttagagtccacacaagtacn

SEQ ID NO: 481608 - DNA, 1379 bp, Homo sapiens
gcacagtaaatgttgcatccggagcgccagacgatgcaatgtatatgtgctcatatcaggtcacaatatgtatttctgtgctacctagaatcactagctcgtgaactagggatagcctgtgagcattactcacgcgggtaccatattagcgacccctggcgataaacgacgctatcgctgatacaaccgtgcacggaatgtaatatcttggacaagtcgttagcatgaatacctatcgccactgggttgcatatctgatacttcagtattgacgctgaacggcgctctctgtcacagtgtcaattaccgccgggatagccccccaaaagtggttaccaaaagttaaccagaccaaaaacgcacgttcactttgagactgcaacgcgggtttttcaatggaacgacgtgctcttacggcttgacacaacacacatttcattcgcaaacgcaaggacctaacaggatgtactacaggcacttccaactaatcaaagggcccatgaactaacgtggggccaacattgcttgcacatgacctgtcttaccaattccctgtatttccaacggccgcttcttttcccagtacttaatgcttctaaccacagcaattccactccgcgctgcggaccctttgcattgcacgacacgcgcaaaacggggggcgccttgctactttacacgcacttatatgaagttcccaagatacagagggctcctttaacacatgaacgaagaacttccctttcacacagggccctggccaggcctcagacaaacggttgcccactgtcctaaacaaggaccctctgacttgtgaccaaacccaaagactacggggttatccacaagaaaccacttgacagaacactgtgtgggaacaccatttgtttccccgcagtggattcccttttggtgaaccaagaaaggcccaattggcagggcattggggtttcaaacaacgaactcggttcctatcccaattatccattgggacgcggcatttgaatcaaggaagacattgttcgttaccacagtgggggggcaacgcaacatcccaggagaagttccgtggcaatttaaatgaatccacaaccaggaaagagacatttcaagggagaagggggaacaaccatggatgttacccttttaaagtggcaagtcgacccgtggaattcctgtagtatgcaaccttaaatctaccacccacattcacggatttcacacaacccttgagttagaatcttgttagagtcactatgtgggtaacattgggatgcccttggaaaatggatatatgcttacattatacaaacgtgactgaacaccccttaggcaagtttaccaacggcagatacaacaaagcacaactaaccataagc

SEQ ID NO: 481609 - DNA, 307 bp, Homo sapiens
  misc_feature (33)..(33): n is a, c, g, or t
  misc_feature (58)..(58): n is a, c, g, or t
ttttttttggggggggggtggaaggggggcttnccccctctttttaaggacaataaanaaggcgtggtttgggtttggtttttggggggggggattaaaaaaaccaaaagggggggtttccccggcccaaacccgggttttttggggtttttaaaaaaaatggggggggttttgttttaagttgggatttggggggggcgggggggttttccccccccggcttcgggggggaaggggggttttggtttttttaaaaaaggaaagggggggggggggtaattttttttcaaaaaaagggttcctttta

SEQ ID NO: 481610 - DNA, 408 bp, Homo sapiens
caaatttggttactttgcggcatgcaatgattttatgtacaattatattattaataacatacagtaagtcacattagaattagaggattttcccatacttttggaacatatccaataacacatttatacaaataacagcccaaagaaaaccaaacaccatttcacatttgataatgcttcctgagcaatttttgcaccaaataagccaaacgtcactcttgcattagtgcactgttgatgtcaaagccaattaattcttaatgaaatcttatagacaaatgtgttcaaacttaatcagtttggccataaggtaagtttctcataagcctttgataaccctttacacatttttattaaagagcaggtcataggcaggtttttgctcgaagaaaaaacctgttatgcttt

SEQ ID NO: 481611 - DNA, 474 bp, Homo sapiens
  misc_feature (35)..(35): n is a, c, g, or t
  misc_feature (39)..(39): n is a, c, g, or t
  misc_feature (469)..(469): n is a, c, g, or t
cagaggtcggcttcgctcaagtggcttcctaaacnaggngaagatacttgcatcttcttatttgttcaatttgcctctctggtttccagttgccctattagcaggcaatctagaacctccttcttaatgacccgctccagccaggtaggtcctatttgcaaacaccagattttccaggcaccgttagacactgatggcaccactggcttacaaaattcttttggtgcacctcccaggcttagggattattttccaaacacaactgctgaggccagattctgggcctggcctgtgtgtctagcatcaatttcccactgtgctcaaaccagtgtttccctctcacccaacaacaacttcctatacctttgtctggggagctcagacttggagtatatcaggaagggaacaggcatatgatttggatacagcaccacattctttcttggaccctggtccccagcggcctganctctg

SEQ ID NO: 481612 - DNA, 1186 bp, Homo sapiens
ggtctcagcaagagccttggaacactaggcagcagggtaccagtagtgacaaaggtggggtgcagagaccattgaggtacaacaacggtaacgaaggtgcagcgaaggcccgtgaaggcgaacgggagtggtcgggtgctcctggtagggatggtaggcaagggccatggctgtcgggaccactacagtgtggcttcctagctcgcgtagagcgccgaccttatgtccgtcactcagagacagctgtcgagctgatccgccgtaaggagaagttggctgccgaggtatcccagctggacctgacgtcacgtcttgtgaggagatcttaaggaggagggtctctgagagaggtacacagcaagaactctccccaggcacagctgttgtgaagactctccaccagcgtcataggcgtgtaggtgcaagaaaccctctgccatcagaggccagcttcagcctttgcctaatcaccgcaaggcgcaaagatggagaaggtaagacgggaaggagatgtctccccatgtaggcgtatttgaggacagtcctttccctgcagaagatctcaagctggggtccacagagtgggaaatgttagagtagggagctaggcaaacatgagcaggacaggtgagggccccacaggaatgtcagggctaccatcaggtgatggtcaggtggttgtttagactgtctctggtaaactaataattggttgcagccagcttcaagcaaggacagtctctctatagatacaaaacgccctgatctggtgaatcagcggttcccggatagatctcaaggagctgggcaagcattctggagcatgcgcaccaagaggcgaaatggaggggaatttaaccagtatattgaccctacattcctctgggaacgccagaactgggtaggggacaaatggctcaatgagatggcgcacttcagaatcacactgtgcatgcgaacctttacagatgttgggggtatccacattgggaacacgtttgaggaacatatgtggattgtaagttattcccgaacttcgcaattgtagctcgttaggtagagggctaaatctagtacgtacccgagagatcacttggtcgtcaaataatcacgcgtaaaaacgctttgtggatgagggaaattcactagcctatgcacagtcaagaacaagagcgaagagaagaga

SEQ ID NO: 481613 - DNA, 429 bp, Homo sapiens
gggagaaagaagaaatacttgaaatggtaatgacagatttctccaaattaatgtcagacactaaaccacagatccaggaatctcagagaatcaggacaaatgccagaaaaactacacctgggcatatcattttcaaactgcagaaaatcaaagataaagaaaaagtcctggaaggggccagagtgaaaaaaacacattacctgtagaggagcaaagggaagaaatgcacctgacttatcctcagaaaccaggtgagcaaggagagagtggagtgagatgtgagggtggagagagaaaacccaccagcctagaactctgaaccctgcacaattatcctttaaaagtaaaggagaataaagactttttcagacaaacaaaacttcagggaatttgttgccagtccgtttgccttgcaagaaatgttacaaa

SEQ ID NO: 481614 - DNA, 341 bp, Homo sapiens
  misc_feature (17)..(17): n is a, c, g, or t
tctcaggccttctgggnaggttccagcttttccttggatgctctcttctctctggccagctcaggctggagcagtgggtgttggtgccatcctgtggctataggtgataaaccaggttgtgttttgacccctagtcttgaatcctggagttctcacatgcgtggatttaaatgctgtgtctttctaagggcagattgtgcccattttccttctctgcctctcaagggactgtttgctgtgtttattgacttaccattaaaaaaaatcatatacattgatgaattagattgtactccataaattatatatgtttgaaaaataaagaatattttttcaatttt

SEQ ID NO: 481615 - DNA, 202 bp, Homo sapiens
ccgtactgtggtgtaccgtcacgtccgcaacctacaccacagctcagggcaacgccggatccttaacccactgagcaaggccaggatcaaacccgcaacctcatggttcctagtcggatttgttaaccactgcaccacgacgagaactccctacacccactcatttctgaagcgtgaatctcctcctggcactgaccaattc

SEQ ID NO: 481616 - DNA, 146 bp, Homo sapiens
  misc_feature (17)..(17): n is a, c, g, or t
  misc_feature (43)..(43): n is a, c, g, or t
tttgagaaagcgcatanagcacttttattgaataataaacttngactcataaatggtctggggaagggtcagcaacgatttctcaccaaatcactacacagacacaaagggtgagaaggctggggggaaagccaggaactgagatc

SEQ ID NO: 481617 - DNA, 199 bp, Homo sapiens
gcagagtcgcgacagaaaaatgacatttcctgtaagggtggcgccttactgaagttcgtaatcggcgtgtaggtgaattgacgtggttgggtccgtacagatgtctacagcgcttggaggcctgttgcgaggctcctttcagggttgagagagccttacaaaaagtgtgcaggcgcggcaaccggtttgaatcatctag

SEQ ID NO: 481618 - DNA, 701 bp, Homo sapiens
  misc_feature (1)..(1): n is a, c, g, or t
  misc_feature (8)..(8): n is a, c, g, or t
  misc_feature (10)..(10): n is a, c, g, or t
  misc_feature (26)..(26): n is a, c, g, or t
  misc_feature (39)..(39): n is a, c, g, or t
  misc_feature (55)..(55): n is a, c, g, or t
  misc_feature (57)..(57): n is a, c, g, or t
  misc_feature (69)..(69): n is a, c, g, or t
  misc_feature (161)..(161): n is a, c, g, or t
  misc_feature (174)..(174): n is a, c, g, or t
  misc_feature (176)..(176): n is a, c, g, or t
  misc_feature (204)..(204): n is a, c, g, or t
  misc_feature (225)..(225): n is a, c, g, or t
  misc_feature (228)..(228): n is a, c, g, or t
  misc_feature (238)..(238): n is a, c, g, or t
  misc_feature (252)..(252): n is a, c, g, or t
  misc_feature (375)..(375): n is a, c, g, or t
  misc_feature (397)..(397): n is a, c, g, or t
  misc_feature (422)..(422): n is a, c, g, or t
  misc_feature (444)..(444): n is a, c, g, or t
  misc_feature (474)..(477): n is a, c, g, or t
  misc_feature (491)..(491): n is a, c, g, or t
  misc_feature (503)..(503): n is a, c, g, or t
  misc_feature (516)..(516): n is a, c, g, or t
  misc_feature (535)..(535): n is a, c, g, or t
  misc_feature (543)..(544): n is a, c, g, or t
  misc_feature (551)..(551): n is a, c, g, or t
  misc_feature (612)..(612): n is a, c, g, or t
  misc_feature (664)..(664): n is a, c, g, or t
ngaaaacngnccagtttattattatnatttttgatggcnacagacaatgtgggcncncacacctagacnagcttttctggtggaagggcttgggcacagacagacagcagggcttctggttttccttttttttttttcctttttccttttttttttttttnaagaagaaagcananaggttgaatgggggggggggcttgcaanaaaatatccatttaaaaaaanttncccccaaaanacccccccgaaaanaaaaaaaaaaaccccaacaaaggtaaaaccccaaacaaaaaacaacaaaaaaggggcatgtacagaaaagggcctttggggaaagggcaaggggggggatttttctgggcactgacttgaaanacatttttgagagttttgtccntcttgttttatggaaaaaaaaggtnggcctttttattgcatgaaacnaaaattgggaaaggtagaggggcgtggacnnnncggggggggggtgnggggggccgggngatgccccccccnccagcccccggaaaaaganaccccacnncaagcanaattcccggcaacttcccgcccgcaatgcctgcccccccagcgtctcggagaaggggggancacacactcatcgtcatgcttggagaataattgtcgttctgaaaggagtggnggaagttcccccctagctcgccgtcatctcgaggggt

SEQ ID NO: 481619 - DNA, 176 bp, Homo sapiens
  misc_feature (142)..(143): n is a, c, g, or t
  misc_feature (151)..(151): n is a, c, g, or t
  misc_feature (160)..(160): n is a, c, g, or t
tgatcagaggatcgctttggcgggccttcctatatatcagatcttttttcttctttttctttggagacagagtctggtcctggtcacccatgctggagtgcagtggctcaatctcgggctcactgcaatctccacctcccannagttcaangtgattctncctgcctcagcctcca

SEQ ID NO: 481620 - DNA, 367 bp, Homo sapiens
gtcggcgactctaaggatcccacacgtaacgcttccccaacggtaactattcaccacacaaacgccagggaggaataaacctcctgaatcaatgtggagaatgacaatggatcctatttcaacggccgcgggtgcagtgccaatgttatcctggtcttcttgagaagggaatggacctggcgaaaagcgcactggacttgacgaacaaactcgtagacatagcgggtgaacagtcaaaggtcggaggggaagagcaacagccagagggtaagatcaatttttgagagcgtcgccaaacagaaggcggatctgttccgccttcttcttctctgcccggcgtccagcccgaagacgttacgtgtgggta

SEQ ID NO: 481621 - DNA, 233 bp, Homo sapiens
  misc_feature (50)..(50): n is a, c, g, or t
  misc_feature (154)..(154): n is a, c, g, or t
  misc_feature (161)..(161): n is a, c, g, or t
  misc_feature (188)..(188): n is a, c, g, or t
  misc_feature (220)..(220): n is a, c, g, or t
gtgacctggtgtctagaggatcccactttcccattagagtactgcacggncgaaggacaagttttggaatgcacagtattatagacaacaagcgaagcaaacaaaagttgatcctcacacatgccatcctcctgtgtcactttacagctgtttngtgtttnggttttttttccccagttatttattantgataataacttactttttcttacattctgtngtaaataaagtac

SEQ ID NO: 481622 - DNA, 405 bp, Homo sapiens
cgggccagtacggatgtggcgaagtcaagagaaccaatggcagaaggaggagtgtagagcttacatgatggagggattgttattgatggtaggggtgttggtagtgaaggataaagagtcaagggtgacttacggatggtgatgccaatcagcgagatggcaaggagtaggagaggaaaggtttttgaagggttgggaattaagagttatgttacctaagtgagaaggttcagtagacagttgtctatgtgagtatggaatgcaagggagatgttagggctaggaaagtgaacctcgtgactcctttaatgtgaccggcagagaccttcacaaatgcggtgtttgtgttagtaggtaagcctgatactggaagctaatttttatgggggaagggaaattgcgata

SEQ ID NO: 481623 - DNA, 338 bp, Homo sapiens
cagtcgtacataattgtctgatgacacgctactacaagggagtaaaaaagaaggccaggcaaggtggctcacgcctgtaatcccagcactttgggaggccgaggtgggcggatcacgaggtcaggaaatcgagaccatcctggctaacatggtgaaaccccgtctcaactaaaaacacacaaaaaaaaattagccgggcatggtggcaggcgcctgtagtcccagctagttgggaggctgaggcaggagaatggcatgaacccgggaagtgaagcttgcagtgagccgagatcgagccactgcactccagcctgggcgacagagcgagactccatctc

SEQ ID NO: 481624 - DNA, 287 bp, Homo sapiens
  misc_feature (12)..(12): n is a, c, g, or t
  misc_feature (69)..(69): n is a, c, g, or t
  misc_feature (103)..(103): n is a, c, g, or t
  misc_feature (191)..(191): n is a, c, g, or t
  misc_feature (207)..(207): n is a, c, g, or t
  misc_feature (227)..(227): n is a, c, g, or t
  misc_feature (259)..(259): n is a, c, g, or t
  misc_feature (265)..(265): n is a, c, g, or t
ctaaaccttgtnttggccctgggagtgtgatcattgtccattacagtctgggcggtgggaaaaagtttntgtattcttgaacacagagtgtgttattaatctntgcgattaaccactacaccatgctgcagcaagaatatctgctgtattgggcctggaatggaagacatagtcagtgggatttagcatgnggtaggggacaagatnccctacctctagttggctgnatgcagccaggtgagccaggtggaacagcttnccactnagggaccaggatgactggcaca

SEQ ID NO: 481625 - DNA, 463 bp, Homo sapiens
  misc_feature (339)..(339): n is a, c, g, or t
ggcactggtgttttttaaaagcgccccctgctctgccacctcccagtgattctgatatgcatctaaggttgaggatcaccgctttacattataaagtgctttcacatacatgattcaggatttttgtatgcacacagaaaggaaaaagaaacaccgttaatgactgttgactgtaaaagaaaataggaagaaacaggggtagtaattgtgaaaatgaaaggattagagaaaagtcaatttctagaaactggaggaaaaaaacttcacctttctaagggctaaaattagtcctatgcatatagaacattaaggagggactgtatgtccatatttactgcntatatatggaatagtttttagatgaccataaaattctcagaagagaagtctgaaaacagtcatttagtatttgatgccaattattcctaagatcatatgcttctcctctataaatgaaatatat

SEQ ID NO: 481626 - DNA, 280 bp, Homo sapiens
ccgatcactagcactcttgggaggctgaggcgggagcgatcaccctgagcgtcgacgagttcgcagatccagcctgatgacactggagaaaccctgtctctacttaaaataccaaattaaccaggcacatgcctgtaattcccgctactagggaggctcgaggcccagagaatcgcttgaacctcgggaggtggaggttcccctgacacccagattgtgcccttgtactttaccctgggccacaagagccaaacctctgtttccaaaaaaaaaaattaat

SEQ ID NO: 481627 - DNA, 437 bp, Homo sapiens
  misc_feature (414)..(414): n is a, c, g, or t
aacctcctctcctcccttggtcctaacaatttctcttcttgtcaaaccctagctgcggttttaggatcatgactgtttctttaacaataccaagacagccccgaggccaggaccatacctccatgtttgccattgtctcaacaatgtcttgtcaatgtgaggtcttttcgatgttaaaagatattgatttaccagaagcatttttccttaaaataaataaaaattaaaacttaaagaaagttatgggatttttgcaggcattttcagctgtagtcatgttggctagtctttagtgagatattgtactaccaaagtttggatacacaaaaacaatagaagatctacaccaaaattttaaataaaatatagatgacacgaggcatttcaggcagcagatttactgtagatgatagntttaccacatttcccagaaaatc

SEQ ID NO: 481628 - DNA, 712 bp, Homo sapiens
  misc_feature (712)..(712): n is a, c, g, or t
ggtgcgacactgaggcctgaagaacctgcggctggaggacagtgtgcaaatacacctgccgcgtgttgaacctgcgcgggcgccatcaactgccacctacaaggtggatgtgatccatgctggaccctgttccaatgccctgtgctcacatggcactgcacccctgtgaacactgactgtgtggacttcggtggggaccactgtccttccagtgcaattgtgctgcagctgactgtgaagccggtgatccagtggctgaatgctgctgtggagtactgtgctgccgatgtgtgccgctcacaactccaccatctgatgttggtggctgtgccaggacacgtttcgttgtgttgctttgcgccactggggtgactgttgttgtgtctggctggacctgactgtggcgtccctagcccttcgaagtaatgccttgcatccatcaagccctgttgccctgccacgtgcacgattgctgtgtcgcattgtaccattcttgcctttgtgacatgcccaaatcagcacaactcgaggggcctaccatggctttcccttgcaatgctgcccatttcacgtacaccacagtgctagcccaatgaccccaaatagaaccctgctcaacgtgggccagcctttgttggacccttccctccgttccctcctggcccacttatgcctagcctgttggcccagtgggccatctggaatcccaagn

SEQ ID NO: 481629 - DNA, 547 bp, Homo sapiens
cgctcaccgaattttgcacgagacacagatcactgtagactacaactccggggcttaaccaatcctggctcctctgtctctcaagtagcttagaccacaagcgtgtgccaccacatctagctaactttttaaattctcttggagtgatgaaggctcaccatgcgtgctagactcactgcattttttaaagtacatttttgtactcttttcacagtatgcggtcatcactattctatgatgaacagcgtatcttattcctagcttataggtttatggagagagagttcttcatattgatccttagagctttttatacattgaacatgctatggctttgcatatatagtatgcaattattccccaatttctgtattctttgagcattctattgcactttccagatagacattatatagcatacggatgccggattctcaggagactgcctcatgttgcacgctgagttatgaagagctttcttatgttaggattgacagagattgagccggacttgctagtaattgtgcgattcgtgacttacactttt

SEQ ID NO: 481630 - DNA, 340 bp, Homo sapiens
caggattctgatgctgaagtgaagttgaccacattcatggaagaaccttctgccctcgctttgcaggatgaaacatttccgcgcttggctctcattcttccacatgtgtgacttttctccggactgtgttgctatctggttctgcagtttgtagaaaatgtcctcctttgtgtctgcctcatctcgtacctttgtcctgaagtccctgcttttatggcagcccctcatcttccaagttttgtgtctcccctttacctaatgcttcctgtctcccatgcatctgtactccgttgtgcctcaaacacattactattattaaatgtttctctatcttgttaaa

SEQ ID NO: 481631 - DNA, 462 bp, Homo sapiens
  misc_feature (67)..(67): n is a, c, g, or t
  misc_feature (248)..(248): n is a, c, g, or t
  misc_feature (264)..(264): n is a, c, g, or t
  misc_feature (394)..(394): n is a, c, g, or t
  misc_feature (437)..(437): n is a, c, g, or t
aattatgccaggactgaaaaaaaagaaagaacattgcccatgtgggaaagtaaaatgaaagcattcnagtgtggttgtgctagcccaaccattaaaaatgctggaagattgacccccccaaaaaagtaaatatcccacggaggagctgtttctctgggccatccaattgggatgtctggagcccggattgttgttcattatggctcatgccctgaagccaggagagttcggtctggctagtatttgcnaacggaggaggaggtnttccgccctgctgattgagaagctgtagacaacctgttttaggagacagttccatgtgaccggctgaagtaaatgtgactcccttgggccaggttatattcagcataagctatttcattttttattattntctactaaaatttttaaaaaatcatatccaaaaaacacacttnaattacaaataaaaatttcttcttt

SEQ ID NO: 481632 - DNA, 574 bp, Homo sapiens
  misc_feature (1)..(1): n is a, c, g, or t
  misc_feature (42)..(42): n is a, c, g, or t
  misc_feature (44)..(44): n is a, c, g, or t
  misc_feature (70)..(70): n is a, c, g, or t
  misc_feature (96)..(96): n is a, c, g, or t
nggagcaattgattccaggtaaaagtggttagtccccagtangnccccactttcagtccaggagggcctnaagacaggggtccaggttgccagtcntgcagactggagtagggacttcgtggtgcatcttctggcctgcccatggaccaatcggcatgtacttcctcccctcggaggtccataaaaaccctgggttcagccagagtagggcagaggactgccagaggaccaagagggcagagacctatgggtcaacaagcctaagagaggagctaccctctctgctgatagttggagatgatggaacagccagttgcagaaaggacctaccctccctgctgacagctgcagagacaacctgtgggcagagaagagccaccctctccagggcctcctctcttctgagagctgcagacattaggacgatcagttgcagagaggagccatcctctccagggcctcctctctactgagaactgaatacctgatggacaacctgcctacagagaggaaatacccactggaggtctctgagctgttgtaacactcaataaagttcatctttgtcttgttc

SEQ ID NO: 481633 - DNA, 179 bp, Homo sapiens
ctgattgcgattcttgaatgtctctctcggcctgataattaagaagaactcgcgttcctcagataaaagttctcttttctcaaaaccatttaaatgtggtaattacgaattggcccatgaaggggcacgagtgcctatttagctcctcgccatatacttgctcattcaggagttgcatt

SEQ ID NO: 481634 - DNA, 505 bp, Homo sapiens
atacaaatatgaactattttagggatatagagaagaaaaatgtcaacataaggcaaaaaataagaagtcttaggtaaatttgtaaccttctgatcacaataagtgctttgggtcttctagctaaatatttttcagaactaaagggagataagtaaaagtttttcatctttaagatgtattaaagctttataatttaatacccaaatatagtccaaagaaatgtgtccttatcttaaggatgattgtcatcattgcatatgttatttaaatttagcacagttcttgaattatgaaaagtactgatttcatatatggaaagttatagtgtgaaagctaattcagtgcttgagactaatgaaatcagtaagcctgagatcataaatgataacagtcttcatttgaagtgtgtaactagtctttatttcttttggcagcttctgggctggctggctgagaaaatacctactcttcgttccacccccactcccgtaccaggggtaacgag

SEQ ID NO: 481635 - DNA, 165 bp, Homo sapiens
ttggggctccattcatgtgatatccggcctataggatatacttggcatccccaaggcatggggactgggctgggagcacttccctttcctccaacagcactgccacttgattgccggggaggaaattccactcttcttgggacggtcactaatctggcaggggct

SEQ ID NO: 481636 - DNA, 611 bp, Homo sapiens
cgcggtggctcacgcctgtaatcccagctctcagggaggctaagaggcgggaggatagcttgagcccaggagttcgagacctgcctgggcaatatagcgagaccccgttttctccagaaaaagcgaaaacaaaaaaaacaaacccaaagagacaaaaaaaacaaaaaaaaaaacaaaacaaaaacctctttgtggcgggcggccttgggccctgtggaaaaaggtttttatacacacaatcgcgcggtggggcgcgcggggggcccccaagataggccataggtgaaacaggtggcgccacaaagagcgggttcccaaagaggagaacacccgcggggcacagaggcacaagagggggagggggggaattctccccacaaaatacaacacaagcgccccgggggggggaaaccaccacgaaaggctgttcttgttgaaaacaaatatttctcaaaagagaggggggggcatcaccgaggaggcgccacaataacacggggggggactctctatattccacacaaggggggggtgtccccaaagagacgaagatcgctacagataatcctccacaatattaaacacccccccctgtcctcgggtgggttaga

SEQ ID NO: 481637 - DNA, 899 bp, Homo sapiens
ggcctgctacattgccccggtactggatgattgagaagcggagtaaggactatgtcattatagtctcggggatctactagggggggtgtgtagggtgtgctcctgagtacgtggaaactggattagatcgttagacccattagtactgtttggctagtagagcaattaaccgagatttcggcacactttccataatcggagttgtgggcgcagatttagccgagcgtaaagtgcaggatagaaagcttcctagggttgccatggacaagactgtgccgcattctcctgtctacaaagagtgcgcttggccaacgaacctaggacgtaaatgaccgtgatcgtcttgagaagctctgggcatggactgaaagtgttgtcactatctggtgcagagggagacacatctcccgcatgtaaggagatcctgatctttactccccttagacactaatgtaaaatgtcttgtgtgacagtgtcttggcaccagtgtctcgatggatattgtcgatgctggaaagccaagtgagtgagccaatcgagttttgggaatggcctgatgcggagaaggatcatgcggctaagggttgatccgcatgattgtgctgcgtaggaggcaaagttttgacttggtagcgctgatttgctcttgtcttccgcggtcccacaacgattcgtccataatgctagtagcgggcattgtttgatggggtgcctaggtcgattcgctactcctttgattcgctctgtttcgttgcctccacctgggggtccatgagtgggtcgtccttcggagacaccctgatgaagtttatgtccattccaatggagcttttggtattgagggttttttccaggctttgcatacccatgtggcggtcggtcccttattggtgttccta

SEQ ID NO: 481638 - DNA, 170 bp, Homo sapiens
  misc_feature (158)..(158): n is a, c, g, or t
acgttccagctcccttcaacagccattcgtgtttctcatccatctcgtttggcccatgggcatggcacacagcagcccgtggcagcaattggcagtcacaagtctgtcgtcgtgtggtggtcccagcatggcacgcccattccaccagtggggtcacngcagctcgcaat

SEQ ID NO: 481639 - DNA, 134 bp, Homo sapiens
gagtatgcgtcagacccaagacctgtgtctgtctgcgtgtgctgtgctttgtctcattgagcgacggcgcgggaatgtgggcggccggagtccagagccaggtcataagtctacaacactctggcatctgtcct

SEQ ID NO: 481640 - DNA, 1129 bp, Homo sapiens
gattttggatgatcggaggggagttgagagcctaggcgaggattgcttggagctgcattcatcagtcggagactccagcactcgacatctggatgccactaattctactgcatggttactccatctactggtgtgtgctccatgagccgctgactgatcaaggttgttaccatcacgatccggctaaaccggcatacctggtgaagtccctgtgcttaactacgttttatggcccctgtcagataactcgtggcttcaacgctgcatcaagtagactccgagttagaggccagcttaactatctagactaattgagttcatacctctggatggtcagtccatcgcgtctcaattgccaagatccaaggttcatcgagattagagggagcctattgtcatatccagtagttgcacttaggtagcgatgtactccacatggtccatccagttcttgatcactaatcggtcctggcatgttctccggtcagtatggcaactccaagacataagtctcagagtgcgttcccctcaagtctattgccccactagttgtggtcattccatcaatcctctcaggtgtagctaatgcgctctgtgtcttctggcaagttggtgcctccgagggctaggtagtacaccagggggtcccgaagagtcgggctcaacccaagcaacatctccaattcaagggaggaacatgtagttgatggcactaacgtgcccttccttgataaccctcgaccttgggggactggatttcatgtcaggctagacttatatcacggaggtcaacccctcaatgggtagacacaactatgttagggtacccagcgtgacattggtggtaacgtcctgaaggcactttgataggcagcgaatgtccgttaggtaacgtcaaggttagggacgtgccaagttgagcgacggagccccattagtacgctatgtctcgagcaccttgacgacaaaggctagagcctggagcgtaaggagccgcgtttaaattcgcaatggcaacgctgtgtgcttcatcacccgttaggaaggggcttggcccccggtgttatacccgggggttatgtagggcccaacgttggggccattatatggaacgagcaggaggaacagc

SEQ ID NO: 481641 - DNA, 180 bp, Homo sapiens
ttatggacgcttgggatacatcaggtcaaacttgtggtccagtgcgcagcccatgcctcagccatggctgtgagtagttgctcagcactgcacacagctactctagtaccttggccaggtctccacacaggcaccacagtgaggagagctggtagttagatagccaacctatgaaagcca

SEQ ID NO: 481642 - DNA, 329 bp, Homo sapiens
  misc_feature (167)..(167): n is a, c, g, or t
atctctagatcgctcaccacaatgatgggatctaaatcttcagatattacgtatgaggctatggagctgtttccctgaaatcttccacacggagaaaggcaagctcaacatgggtgggcaatgtggcaagatgagagagccagaagttggtttgggggtccttaagnaaaggcagagcctctgtgtgtaagacattagaaggcagagccggggaggtgcctggcgccaagccactgccttccggttgggggcccggaccgggaaagcttggtcttatgctagattcagaagcacttgaagaatggagggtgacacttttagaggactag

SEQ ID NO: 481643 - DNA, 108 bp, Homo sapiens
gcaatgttcagtctttgtatggtggaaagtggagctgatgaagtaaatttgcatggcgtgaccagcctgggcttaaaacaggctctggagtttgcatacacaggacag

SEQ ID NO: 481644 - DNA, 353 bp, Homo sapiens
  misc_feature (19)..(19): n is a, c, g, or t
  misc_feature (70)..(70): n is a, c, g, or t
  misc_feature (105)..(105): n is a, c, g, or t
  misc_feature (107)..(107): n is a, c, g, or t
  misc_feature (157)..(157): n is a, c, g, or t
  misc_feature (243)..(243): n is a, c, g, or t
  misc_feature (248)..(248): n is a, c, g, or t
  misc_feature (292)..(292): n is a, c, g, or t
gatacgatgtggatgatanatggttggataaagatgatagttatagatgataaaaaggcatacatgatanatacatatagatgacagagatagatagagatgatntntaacattgtaacacgtataaataggccacacataggtaggcagtgggtanataggaggtacatggatggatatgcgtatacatataagtatatgtcctgaagggacaacccggaccccaggctggccaggacagtncccangctttggtaacctcctcaatagacacgaagctgcaggttttcanctgcttacgccgggcaaactgtaaagtgctttaaatccctggaactaaccacaacggcagc

SEQ ID NO: 481645 - DNA, 192 bp, Homo sapiens
  misc_feature (115)..(115): n is a, c, g, or t
gacttgggttattccgtgtgaccgcggtggctggcacgaaatttaccaatcctggcgttcgtatagcttagtttaactcttcgtttattgcctaaaggctaatcacatgctgctntcccgctgcggcggtgtgtgctaggcataagcgcttttgcagctgccattgcctgcgatgcgttacatgacttgatg

SEQ ID NO: 481646 - DNA, 138 bp, Homo sapiens
gtcgtctcttctccagcagctccgccaggttcagccccatctcattcagcgcattgtcgatatcctgatagatgcccatcgacagcagcgcgttagacagggtgcggccgatcaggaactccatcgacaggtaataca

SEQ ID NO: 481647 - DNA, 824 bp, Homo sapiens
gtctccaggacatggttactatcctgtggctacctaatcctgtctcatggtcctcagtcacttcacacccatgatgtatgctaacacccttcggttatctgtttagaagggataattattgtttttttttgtttttggagaacagagtctcggtcgggtggccagggcgtgggaggtgcagtgggcaacgagtcgtgcgggctcccgtgaaacctcgggccttacgggtgtaacaggcgaattcttccgggcctcagacctccgcggaggggcgtggaaactaaagggcgagtgggccaaccggagtgcccgagaagagagatgtctggaggaaatttataagagggaacgaaggagtggccaccaagggtggggccgaggaagaggagggtcgaaacatcacgtgaacgcatcagggaaatgccgaccgcgaccttaccggacgcgtcacacacacaggaggcggggagagagtatacaagaggcgattggagaacacaacgcgtacgggcccgcgagacgacatacataaaagagtacactaaagatgtataaaggagagtacgaggcgggtggagagaaaaagcggtcactacaagctgcacacaggaagaggctgtgcgacagaggaaaatgtgcccgtgcgggggaccgcgagacaaaagaaagcaaatctcacggggcgtgatcgaagaaaaacgcaccaacgaggcaggggaaaacccccaacgggaggacaccacaccgcagaaagcgtagagggacaaacacaatcagaccacacagaccagaaatataaactcacactaacagaggaggacgag

SEQ ID NO: 481648 - DNA, 1132 bp, Homo sapiens
  misc_feature (571)..(571): n is a, c, g, or t
  misc_feature (1132)..(1132): n is a, c, g, or t
ggtgggacgcgccgagccggaggctgcaggatgatgcggtgtcgatggctagttatgtcagtcgcggcgagggaacaagctgcggctgcaagaaagtggtatcgcgtggaccagttcggacgaaggatacggatagaagatggtgtcgacgagctcaatgcgaggttgtgcctggtctcgaaagcccaagatgtgcagcttcctggcagtggtagggacctcagaagttgtctataagagatatgccagacctgctaacttactgctgcggccatcgagggtcaagacaatgagctcatcagactggagctgatccaccgataacgtggagctctgtagcacagaatactgtgggcagatgtgtgcgagctggacgtcatcttcaactttgagaaggcctatttcatcctggcatgagtccaggatgggggggggatgtccaggacacctccactttccccattttaccactgaaggttggagaagctaggaggcaggaagatgtgaaccagatgcgcgggtgctataaggcgttatagtccgctgtgctatgggagagctgatgttcaancaccagatgtccttacgctcgctaataactgtcaatatatagacatgtcaggtcacgcgggagacggtgtcagggggcttcttgtccgctctgtccattactagctccaagcttacccctaaggcagccagggttagttctactgcctgggaagggtggacgactggaaccccactatactccttgggctgcgttggggccttatccagtgcacggacggaacaacatagtcatctcgcaccaacctggcaactttgacggacgacaggctgggcgaacgagcacgacttacgggacccgtggcctggcccgagcacataaaccagcacgcgcaccaagacctccagggcacgcacagccccgcgcacagtacgcaaaagaccacacagcacaagggaaactctggagagcaccaccaaccccgacacaccagcgggccaagaacacacgcacaaccgccagcccaataaataacggccacaggcatcaaccgcacaacaccacgaacacaaagaaccgcgacgacacgccccaccccaccaccataccataactgcacgn

SEQ ID NO: 481649 - DNA, 2008 bp, Homo sapiens
tttggaggaacgggccatgaggcagtttgccatggatgcggctgccactgcggctgcccagcgagacaccactctcatcagacactccccccagccctcgcccagcagcagtttcaacgaaggcctgctggcaggcaaccacaggcaccaggagatggagagcaggttgaaggtgctccatgcccagatcctagagaaagacgcagtgatcaaggtccttcaacagctttccaggaaagaccctggcaaggctacccagggcaccctacggcccgccaagtcggtgccgtccatctttgcagctgcagtggggactcagggctggcaagggttctcaaccagcgagcgacaaactgatgcacctgcccgacagacagtagaccgtggaccagcagaagagcccccggccacacctcctctccctgcccacaccaaacatggcagcagagacgggagcacccaaactgatggccctgcagacagcacctctgcctgcttggcctcagaacccgacagcctcctggggtgcaacggtagccagaggcaacctctctggactctatagctgcaaccagagtccaggatctgtcagacatggtggaaatactgatctgaaggaaggaggccttggggaccctgaagcctggctcccccatggcattccagcaattgtcttcaaatgctgcacctcacttcctccaaccagcaatggttttgtgcaggagctcagagaggagcactccaggggagccagaaaaggctgcacccccagaagactgcttttttttgacctatatttctcccacgacaatgaggaaggaagaggtctgttgctggagcaggaaggggctgagccccctccgtcctgccagtttgtatttgggcatgaagggaaaggagactggattctgattcccaagaatggctggacaccagccaaatggtctgcagggataatcaggccaaaccatggtgttctgtggctaagcatggccccagccagccctaactgctctcagtccctcactgccttcttcagatcactaagacttgaatcttttggggaaccattgggagtgtgagcctttcgggagccaccagcatgtccccttgcttggagtaggttagaggccatttgagaggcccgcagaacagtgtgttttgtatataattctctttccttgggaacagaagactaagcatgctggttcagagtctccttccagagctgtgctgcctgcccctgcttgccacagttcttgaaacatttgacaggtctaccagatgtccctctgcctccagttcttggcggtgtttttttgatactggttgcctttcctctgttttaaacccctgtgttcaatgcccgtgggattcttgtcaccagcctttgttgtgaacggctccaccgctcctacccctgggacatcctgtcagtttggttataaactgagccagatgcgatgagccacaacaagcggatatctgtcatacccagccccaggttctctttgaagaaactggagacgttgttctcataaacgtgttcgttcccaccagcagggactgggagagggagctatgctgttaaaagtaatcggtgaacttaaagaaaagtccccactaggtgcccccatcacagaatggcacccaagaggctggctcctcgagctttggtgccccagccctgaagcagggccagctactcggaattaggcagcctaccagcagcagtgactttaacttctggtcttaaagtaacccccattcagctgaaaaagcgattggtggattgcagatctgttgtgttttctcttgttgttttgttcgttttttctctcattgtttgaagttctgtctgttgttccattcccatggttctccgtgtttcctttttaaacatttgcatttgctgggcaattgcgtatttttttaattccccttttcccctgtgtaaagctgagaaatacatctggttcatgtgcgttgtttacaaagataaaagttt

SEQ ID NO: 481650 - DNA, 879 bp, Homo sapiens
caggccattgagcgtttatcggatgcccactcccacatccggggtactggggctggacgatgccttggatgcctcgagcagtgcttcgcaaggcatggtgggtcatgctgtgctgtgcactggatgaggacatggctggctgatggatgcttgtgagagtgactcctggagaatgggagagacttagccagtgtctggtgcatgtcacttatttgcgtggcgcagcctgtgtgcaacttgtgagtgaatgactggccatctgccatggggcaatgtgctgcagtgccactggtgcactgacaacagccattcacagaccatctgccggcagtgaaatcttcatcccatggagatgagcaagacctgagagcagcatgactgcaaagccattcctgggacaggtccatacggactgtatcagcatcaatggaggagacggagatcatcgaaaggggagtgtgcgtggagatccagattgatctgaccagcaacagtgacgggctccaaggtgggcaaacatgacccatcaagaacacagagatggaagacccatcctacgacctgggccaccaaaatgattgaagttccctgaacaaatagacgaacgagtccacggccggtggaccgtgatcaacacatacgaacaagtgcgcgtggcaaaagaatctccaaagcttgggcccgctcccctcacagcgccgcccgcgagtaacgaacaggctattgggctcccagagaccacgtacgtgcaggtgaccagatgggggagctcatgaaacgcatggggttgtcacaacgatgtccttgagacgagatcgaggtataaattcgaacagggatcatgagacaactcggtacactggagcagtaaaccggacg

SEQ ID NO: 481651 - DNA, 664 bp, Homo sapiens
  misc_feature (31)..(31): n is a, c, g, or t
  misc_feature (71)..(71): n is a, c, g, or t
tagtgtaggggtgtgtttgttggtgtggggnagaaagggaagagaagagaaaaagggctaggcggcgacgnagaccttgtgcatgaataatttgtttccacactacagagtgggtaataagcagattagtaaaaacaattctgcttcacttcaataacagcctcctccaactcattttttctcaacaaacttatttttccagcagaagaatcccagacttcttagagaacccagtgactttttgcaccttaaatctgtgaaatcctcatgttttcttctgccgtatccatagttcaaacaaagatgaggcaaagctagacgcattcctgaaggaacccaagaaattcctctctttctctctctggaatgaaatgaattctctagaccaccagttctaaccttcaaaaaccaaacctgtttgtgagatctccttcaaatactactgtagaccccagtgtttattcattaaattttttaaatatttgttttatttggaatcaaagtatttgtaattttagtatttgtattaatatcagggagaaatgtttaaatctgtctatgccatatgtgcctctggcttattgcccaattaattgtagcctcaggctaaactttggtttctgtctttaatttttgtcagaagaaatataactgatctcaaaac

SEQ ID NO: 481652 - DNA, 1397 bp, Homo sapiens
  misc_feature (322)..(322): n is a, c, g, or t
  misc_feature (346)..(346): n is a, c, g, or t
  misc_feature (380)..(380): n is a, c, g, or t
  misc_feature (390)..(390): n is a, c, g, or t
  misc_feature (399)..(399): n is a, c, g, or t
  misc_feature (404)..(404): n is a, c, g, or t
  misc_feature (428)..(428): n is a, c, g, or t
  misc_feature (447)..(447): n is a, c, g, or t
  misc_feature (552)..(552): n is a, c, g, or t
  misc_feature (556)..(556): n is a, c, g, or t
  misc_feature (580)..(580): n is a, c, g, or t
  misc_feature (602)..(602): n is a, c, g, or t
atagataaagaaaatacatagctgttccagaaaacagaaatggataatttcatgaaccaaaagcagagtaatatactttagaaaggaagcaggctggaagacccacagttgcaaagcaaatagaatttccaactgcctcttgtagccccttcctggaagtagtcacagcccagggtgttcaacttcttcctctgtttttgtttgtttgttgtttgcttttctgtggggtttttgttgttgttgtttgctttttaaaaaaaatccctttccctgctttttgtcacagcagccttgtcacttcaaacaccgcaagtgttctttnaaaaaattatatcaacctttcaantaaaatgcaacatgtctgaaacttggtatctggngaggtgaganggacaaagnagccnttgttactgcacgttttcattctncaaacttcaccttgcacanagtaacagacaatgcacaaagccacttccttatggacggaaattctgaaatccttttatgcctggcctttccatccttcatcttcccctctcccatgctgtgaangatngtattggacatttttgttttaatntcagtgacaggggaacacaggnagctctaatatagctgtgacccagatgcttctgtttctagcatgtatttattttgcagcaaacatttacatccatgatgtttcactgtcttttgaaaataattaggcaatatctcatctgaggtaggatgtttctaggggttgtgttctgagggaggaaaactaatctgttctctttccactgcattctaggaacagtaagaggaccttgtgcatgaataatttgtttccacactacagagtgggtaataagcagattagtaaaaacaattctgcttcacttcaataacagcctcctccaactcattttttctcaacaaacttatttttccagcagaagaatcccagacttcttagagaacccagtgactttttgcaccttaaatctgtgaaatcctcatgttttcttctgccgtatccatagttcaaacaaagatgaggcaaagctagacgcattcctgaaggaacccaagaaattcctctctttctctctctggaatgaaatgaattctctagaccaccagttctaaccttcaaaaaccaaacctgtttgtgagatctccttcaaatactactgtagaccccagtgtttattcattaaattttttaaatatttgttttatttggaatcaaagtatttgtaattttagtatttgtattaatatcagggagaaatgtttaaatctgtctatgccatatgtgcctctggcttattgcccaattaattgtagcctcaggctaaactttggtttctgtctttaatttttgtcagaagaaatataactgatctcaaaac

SEQ ID NO: 481653 - DNA, 316 bp, Homo sapiens
accgccgctatccggtcaattatgctaatatttttggctgttatattttgtgattctgtaactctacagcactatcagatggcatgaaggacaagataaacttcacgtacacaatgggcacatataaaccatcaagatgcagtctaaccaactgatgtcccattgtcctggttcttcccagaagctggaaggtttccacagccaagatcagttaggcttaactagggcttcagctccttaactgttatttgcttaggcatgatcagctgagtcagcctggccttaagtaacttttaaaattgaaccggatagcttg

SEQ ID NO: 481654 - DNA, 162 bp, Homo sapiens
agctcgactctagagttatccccgcgctgggcctccatctctgcttgcacagaatctttcgcactactcatgctgtttcctcaaagaagctttgttttttgttaacgtattactcagagtcacccccagcctcttgtgctgacgggtgaagagtgggacggg

SEQ ID NO: 481655 - DNA, 1046 bp, Homo sapiens
  misc_feature (322)..(322): n is a, c, g, or t
  misc_feature (346)..(346): n is a, c, g, or t
  misc_feature (380)..(380): n is a, c, g, or t
  misc_feature (390)..(390): n is a, c, g, or t
  misc_feature (399)..(399): n is a, c, g, or t
  misc_feature (404)..(404): n is a, c, g, or t
  misc_feature (428)..(428): n is a, c, g, or t
  misc_feature (447)..(447): n is a, c, g, or t
atagataaagaaaatacatagctgttccagaaaacagaaatggataatttcatgaaccaaaagcagagtaatatactttagaaaggaagcaggctggaagacccacagttgcaaagcaaatagaatttccaactgcctcttgtagccccttcctggaagtagtcacagcccagggtgttcaacttcttcctctgtttttgtttgtttgttgtttgcttttctgtggggtttttgttgttgttgtttgctttttaaaaaaaatccctttccctgctttttgtcacagcagccttgtcacttcaaacaccgcaagtgttctttnaaaaaattatatcaacctttcaantaaaatgcaacatgtctgaaacttggtatctggngaggtgaganggacaaagnagccnttgttactgcacgttttcattctncaaacttcaccttgcacanagtaacagacaatgcacaaagccacttccttatggacggaaattctgaaatccttttatgcctggcctttccatccttcatcttcccctctcccatgctggaccttgtgcatgaataatttgtttccacactacagacagaagaatcccagacttcttagagaacccagtgactttttgcaccttaaatctgtgaaatcctcatgttttcttctgccgtatccatagttcaaacaaagatgaggcaaagctagacgcattcctgaaggaacccaagaaattcctctctttctctctctggaatgaaatgaattctctagaccaccagttctaaccttcaaaaaccaaacctgtttgtgagatctccttcaaatactactgtagaccccagtgtttattcattaaattttttaaatatttgttttatttggaatcaaagtatttgtaattttagtatttgtattaatatcagggagaaatgtttaaatctgtctatgccatatgtgcctctggcttattgcccaattaattgtagcctcaggctaaactttggtttctgtctttaatttttgtcagaagaaatataactgatctcaaaac

SEQ ID NO: 481656 - DNA, 103 bp, Homo sapiens
tgttagcatcatgtagttgccttgccctaaacgtcatacaggtatcatattagactcatcaggtagatgcccacctgatgatgaagaggtcatcgtcgacgcg

SEQ ID NO: 481657 - DNA, 574 bp, Homo sapiens
  misc_feature (28)..(28): n is a, c, g, or t
cagagtcatgtggtggcctggacattgnaagggagagaagtggatttgggagacattttagaggaacagtaagaggaccttgtgcatgaataatttgtttccacactacagacagaagaatcccagacttcttagagaacccagtgactttttgcaccttaaatctgtgaaatcctcatgttttcttctgccgtatccatagttcaaacaaagatgaggcaaagctagacgcattcctgaaggaacccaagaaattcctctctttctctctctggaatgaaatgaattctctagaccaccagttctaaccttcaaaaaccaaacctgtttgtgagatctccttcaaatactactgtagaccccagtgtttattcattaaattttttaaatatttgttttatttggaatcaaagtatttgtaattttagtatttgtattaatatcagggagaaatgtttaaatctgtctatgccatatgtgcctctggcttattgcccaattaattgtagcctcaggctaaactttggtttctgtctttaatttttgtcagaagaaatataactgatctcaaaac

SEQ ID NO: 481658 - DNA, 567 bp, Homo sapiens
aagggagctgaaatgggataatcgcttgagaccaggaagtcaaggctgtactgagccttgactgggccactgcactccagcctgggtgacagaatgagaccctgtctcaaaaaaaaaaaaaaaagggaaaattattagggataaagagtgggcatttaaatatgtgagaagggggcaattatccaaaaaacattaataatttcttaagtttatgcaggtaacacagcattctaaatacattgagacaaaaattttataaaactgcaagaagaaattaatcaaattttaatattatttaataatattttgggagatctcaacatcccttatattaattaacagctaatttcaacaagcagaaatcagggaaaaaggttcaactgaattagcactaacaattgaacagggatctaactggttcaagtaggcgagcagaaattaatttaattcaagttaacagccgagaaattacattatttccttcttcagagtttataatatgtggggaaccttatatgtggcaaaattagaaacacacaaatttgcgtgggggggctgttggaagag

SEQ ID NO: 481659 - DNA, 575 bp, Homo sapiens
  misc_feature (14)..(14): n is a, c, g, or t
accataaacaacancacaataacctagaaaatcccgattcgctatcaataaaaaaatttttcacggacacaagaaggaccttgtgcatgaataatttgtttccacactacagacagaagaatcccagacttcttagagaacccagtgactttttgcaccttaaatctgtgaaatcctcatgttttcttctgccgtatccatagttcaaacaaagatgaggcaaagctagacgcattcctgaaggaacccaagaaattcctctctttctctctctggaatgaaatgaattctctagaccaccagttctaaccttcaaaaaccaaacctgtttgtgagatctccttcaaatactactgtagaccccagtgtttattcattaaattttttaaatatttgttttatttggaatcaaagtatttgtaattttagtatttgtattaatatcagggagaaatgtttaaatctgtctatgccatatgtgcctctggcttattgcccaattaattgtagcctcaggctaaactttggtttctgtctttaatttttgtcagaagaaatataactgatctcaaaac

SEQ ID NO: 481660 - DNA, 191 bp, Homo sapiens
cgtggtcaggcactgaacgcctggtcatggcactgccgcctgatcaggcactgaggcctggtcagtgcgctgaagccgtggtcatggcactgacagcctggtcagtgaactgaatgcctggtcagtggtgtacagtgacatggcgtgtgggtggcatgcaactactggtattacgggacgtggcactgttg

SEQ ID NO: 481661 - DNA, 232 bp, Homo sapiens
cccccccccccccccccccccccccgggggaatcccgggggggggttccccccccaaaggggggtttttaaagggggttttgggcccccgcctttaaattcccatgggggttttttggggggaaaatttttttttttgggggggttttttttttttttttttttttttttttttggggttttgggggtttttttttttcttcccaaaaaaaacgttttttggggcccgccca

SEQ ID NO: 481662 - DNA, 134 bp, Homo sapiens
atgtgccggtgctgcatccggtggagtagacatcccctcacattccacaggccatggactcactttcgtaacaaactcctaccaacactgacccaataaaaaaaaatgtgggttttttttttattttttttttt

SEQ ID NO: 481663 - DNA, 506 bp, Homo sapiens
  misc_feature (493)..(493): n is a, c, g, or t
  misc_feature (498)..(498): n is a, c, g, or t
  misc_feature (502)..(502): n is a, c, g, or t
  misc_feature (504)..(504): n is a, c, g, or t
ggggaggtcgtctagaggtccccgagtgggtccctgcagctttatgaaaataatctccgagataaaaacaaacccgctagaacatattacgatgacatgcttgtttcatcaggtgaaaaatgtccattttgtggtgatataggacagacaaaaaatatagatcattttcttcctattgcacattatcctgaattttcggtgatgcctattaatttagttccatcgtgccgcgactgcaatatgggagagaaaggtcaagttttcgcagtagatgaggtacaccaagcgattcatccctatatcgacaaggacattttttttcgtgagcaatgggtatatgcaaatttcgtttccggaactccgggtgctatcagtttttatgttgaatgcccggcgaactggaggcaggaagacaaacacagagctcttcatcatttcaagctattaaatattgctaacaggtatcgtttggaggcagggacccactcggggncctcnaacncncc

SEQ ID NO: 481664 - DNA, 998 bp, Homo sapiens
gattcggagatggtcttggagagtatccaaaaggggtgtgtgtgtgtctgtagtgtgtgtctgtgtgtgtgtctgtgtgtgtgtctagtgtgtgtgtctgtggtgtgatgtctgtgtcgtctaaatatttgatgacaaataccatggtacatgtacgcacccagtatcctatccagtataacatattcttgtctctaagactcatctcaagccagcttggcatcggtaagcgaacagttagtcttaacacaggataaaacgtgcctactgataagggaccttaataatatttcctacagaacaacgcaagaacatgagaggaacaggggtacgtgtgatcactagtcatctcacgtactgcctatgtccaagaaacatacgagcctggtactgagtagacgaacaaataggttgccgtatggccaatactccatgatgggctgatgatcacctaagtgtggtgctaaacaaggtgagcctggactggcgaagagttcacgctttactcgctagacgaaaatcccacttggtagagacgtgaagaaacttcgactggagagtggcatagagacgacgagttgaagccaccgtctagggttggtgaggtggcagatatacaacgtcttgccacacttgggaattgcgttgtgcacgaataggcacgtgaagcgtatgccaagtcgctaattcccccttagagaaacggcaacagggtgcaaggtacggcgctgagcgagtcacacggaaggaaagagacaaatggatgcagggtgggtccattgaaacgaacaaggaaacccaaagaggcattattatccctatggggtcgagcagtataaattccagacacgaaaaatccacgaaagaaaaaactccgacatagaaaacggaacagggtcacaaccaataatggaacaggccaaccttttcacaaaaagcacccacaaaagatccaccttacaaaaaaccacaagcaagcgaaaaccccttacccctag

SEQ ID NO: 481665 - DNA, 423 bp, Homo sapiens
gagccttgctggtgcccgtctgcgcctggcgatcatgtcgtgaccggcgaggatgatcgggatcgattgttgctgaatggcggacggctcttcgtagccggtcgccagaacggcagcaacaatattcggattaagatcgagagcggcgaagccgccggtttcctgggtcatgggtctgcctctaggtgcatccgcaaagacccatgctccaaagctgcacatgccttgaaagaccgtcaggtcacccaggcagctttggcggtggggatttgcgaaaacgattgaaaaagaaaacgtgggaaggtccgcctagcggacgtgcagccgaagctggactcggaggatttgcaccacctgattttgaggtccgctaaaagaccggcgcgtactatacccgaaatcgtgcggggacgtgaggaatat

SEQ ID NO: 481666 - DNA, 135 bp, Homo sapiens
ggtgccgcccgctatctccaaatcggactgtacttactagctgagatttgcatttgggcagatctgtagtgccatgaagcgattctgtgtattgagttcgcaacggctaacctgggctgatcgggaacaagcgcg

SEQ ID NO: 481667 - DNA, 1062 bp, Homo sapiens
acaaaatgattgctgttgagcgtcttaggtggcagggctgttccctccaggccaatgcccgttcaaaccgacgatcattgtgcccacattaccctgggctggagagttggtttcaggttcctacaggagatagctttctttcccttactccctatctaacactttggctctgcaggcagccttgcccattctctaacggcctggcttacgaaggcagctgggaactgtcctgtagagagacgatcctagatagggtcatgcacagtgacgaaaccgacatctgacggaacaactggacacgacctaaggcagaccaggacacggaacgcacaacagacaagcatggggtcagacccataaaccacctcccaaaggctgtcatttcattggcactggaattttgctttatcagaagcaaggaagtacgggagtcattagccttgggcctgggaatctaagtgggagacaatataaattaggatccgattaattggcgattactaacatgtggaccaaaacgtttatctttagcacaactcaataaacaactggcatataatatagtcaaattacgagcataaccaatattgctagaggttggcactgttagtctaccagaagcgatacttttcaggcactttacgcacaatatccttaaagaagccgcgagtgcatgggctaattatcatcaatctccatgtacttgtcaaggacacatctacaggatcttatcgcggacctatatgaagacctaggaggaggtactaccttatgtccttgcaaactactacaggggaattctatatgaaaaaaagaagtatacaaaaacagacaaaccaagacacgcagcagcgagcacacaaagacaaagcggcagaccaacaacatacaaaaacaaaaaagacgacacagacacacacgaggcgaagaacgagagaacacacggagcagaacaggagagcaccacggagagagacacagcacaagaagcaaagacaaagaccgaagaacagaaaagcaagaaaacagcgcacagaagaagcagaaagagaccaatagaag

SEQ ID NO: 481668 - DNA, 243 bp, Homo sapiens
tgctgtgcgtgagagtaacagcgatctgcagtcgatggacacggtgctccatgagcatgtcagcactcgcatatctgcactgtttatgacatttagcagatctatgtataggtacagaacaaggggtttcgttaaactgtatcacatttatacttgcagaaatttatttcattgttcattagtcaggaatttgggttggttcaataaaatgggcaaaactgcaacacccaaaaacacaaacac

SEQ ID NO: 481669 - DNA, 4050 bp, Homo sapiens
gcactcaagcagagaagaaatccacaaagactcacagtctgctggtgggcagagaagacagaaacgacatgagcacagcaggaaaagtaatcaaatgcaaagcagctgtgctatgggaggtaaagaaacccttttccattgaggatgtggaggttgcacctcctaaggcttatgaagttcgcattaagatggtggctgtaggaatctgtcacacagatgaccacgtggttagtggcaacctggtgaccccccttcctgtgattttaggccatgaggcagccggcatcgtggagagtgttggagaaggggtgactacagtcaaaccaggtgataaagtcatcccgctctttactcctcagtgtggaaaatgcagagtttgtaaaaacccggagagcaactactgcttgaaaaatgatctaggcaatcctcgggggaccctgcaggatggcaccaggaggttcacctgcagggggaagcccattcaccacttccttggcaccagcaccttctcccagtacacggtggtggatgagaatgcagtggccaaaattgatgcagcctcgcccctggagaaagtctgcctcattggctgtggattctcgactggttatgggtctgcagttaacgttgccaaggtcaccccaggctctacctgtgctgtgtttggcctgggaggggtcggcctatctgctgttatgggctgtaaagcagctggagcagccagaatcattgcggtggacatcaacaaggacaaatttgcaaaggccaaagagttgggtgccactgaatgcatcaaccctcaagactacaagaaacccatccaggaagtgctaaaggaaatgactgatggaggtgtggatttttcgtttgaagtcatcggtcggcttgacaccatgatggcttccctgttatgttgtcatgaggcatgtggcacaagcgtcatcgtaggggtacctcctgcttcccagaacctctcaataaaccctatgctgctactgactggacgcacctggaagggggctgtttatggtggctttaagagtaaagaaggtatcccaaaacttgtggctgattttatggctaagaagttttcactggatgcgttaataacccatgttttaccttttgaaaaaataaatgaaggatttgacctgcttcactctgggaaaagtatccgtaccgtcctgacgttttgaggcaatagagatgccttcccctgtagcagtcttcagcctcctctaccctacaagatctggagcaacagctaggaaatatcattaattcagctcttcagagatgttatcaataaattacacatgggggctttccaaagaaatggaaattgatgggaaattatttttcaggaaaatttaaaattcaagtgagaagtaaataaagtgttgaacatcagctggggaattgaagccaacaaaccttccttcttaaccattctactgtgtcacctttgccattgaggaaaaatattcctgtgacttcttgcatttttggtatcttcataatctttagtcatcgaatcccagtggaggggacccttttacttgccctgaacatacacatgctgggccattgtgattgaagtcttctaactctgtctcagttttcactgtcgacattttcctttttctaataaaaatgtaccaaatccctggggtaaaagctagggtaaggtaaaggatagactcacatttacaagtagtgaaggtccgagagttctaaatacaggaaatttcttaggaactcaaataaaatgccccacattttactacagtaaatggcagtgtttttatgacttttatactatttctttatggtcgatatacaattgattttttaaaataatagcagatttcttgcttcatatgacaaagcctcaattactaattgtaaaaactgaactattcccagaatcatgttcaaaaaatctgtaatttttgctgatgaaagtgcttcattgactaaacagtattagtttgtggctataaatgattatttagatgatgactgaaaatgtgtataaagtaattaaaagtaatatggtggctttaagtgtagagatgggatggcaaatgctgtgaatgcagaatgtaaaattggtaactaagaaatggcacaaacaccttaagcaatatattttcctagtagatatatatatacacatacatatatacacatatacaaatgtatatttttgcaaaattgttttcaatctagaacttttctattaactaccatgtcttaaaatcaagtctataatcctagcattagtttaatattttgaatatgtaaagacctgtgttaatgctttgttaatgcttttcccactctcatttgttaatgctttcccactctcaggggaaggatttgcattttgagctttatctctaaatgtgacatgcaaagattattcctggtaaaggaggtagctgtctccaaaaatgctattgttgcaatatctacattctatttcatattatgaaagaccttagacataaagtaaaatagtttatcatttactgtgtgatcttcagtaagtctctcaggctctctgagcttgttcatcctttgttttgaaaaaattactcaaccaatccattacagcttaaccaagattaaatgggatgatgttaatgaaagagcttcgccaattaagaagggccatgtaaatgtgggtaacctgattgttttgtcaaaaatgctaaagcggggtggggggtggcgcagtggcttatccctgtaatcccagcactttgggaggtcaagacgggtggatgacctgaggtcaggagtttgagaccagcctggtcaacatggtgaaaccccatctctactaaaaatacaaaaatttgccaggcatggtggcaggtggctgtaatcccagctactcaggaggctgaggcaagagaatcgctggagcctgggaggcggaggttgcagtgagcagaaatcttgccactgcacaccagcctaggcgacaagagcaaaactctgtcaaaagaaaagaaaagaaaatgctgaaggagttactcagggtcaagaaagttttcagaatgtccgtaagataacatcatcatgggacactacctgttgctgggtgctctgcggcttttacactgatgctgattgtgtgagatccagaaaaagaaaatggagttctacatgcccatctcacagcagggtcatcaaatcctgctagtgacacagaagctgacatccagctcccacccgccttcctcccaggttcggggagcaggtagagtgggagccattaggtgggctctgccagtgttgtcatagagtggcaagtcctccatgggatgggagtggcatgtgggagccttctgcatcatgcactatgaaaaaagaaaatttactatggggcaagtggttcatatagttaagtgattgtatatatatatatatatatatatatatatatatacactatggggcaagtggttcatatagttaagttgattgtatatatatatatatatatatatgtattccagtgtagaaagtattggctgggtctgtaatcaagtattccacagaagtgccttcataggtgctgaaacaggattatgagagtgacagacacaggactgaagacagggagaaaatgtgcatggctgtgagaatatattgctttgattctttgacttctcatgatatatgaaaacaaataaagtgggggggggtgacttcaataatatcacgaacatatttaaaatgaaattctgagcatggagaaaaatttcaaattctggtataaacaaataatctaaaaatatagataaggaaaaaatgttttcatttttttggtcatattgatttgggtcatatatgattgaccaaaaaaaaagatatttctaaaatcctggtgctttttcatttaaaaatagacaaccaaagaggaaaatgaacaatgatggaaattcgtggaagaggaaactaaaatggcaaaatagcatattaaatggcactgagccttggtgtgatcaaaaaaaaaaaataaagcaaaatgagata

SEQ ID NO: 481670 - DNA, 4003 bp, Homo sapiens
gcactcaagcagagaagaaatccacaaagactcacagtctgctggtgggcagagaagacagaaacgacatgagcacagcaggaaaagtaatcaaatgcaaagcagctgtgctatgggaggtaaagaaacccttttccattgaggatgtggaggttgcacctcctaaggcttatgaagttcgcattaagatggtggctgtaggaatctgtcacacagatgaccacgtggttagtggcaacctggtgaccccccttcctgtgattttaggccatgaggcagccggcatcgtggagagtgttggagaaggggtgactacagtcaaaccaggtgataaagtcatcccgctctttactcctcagtgtggaaaatgcagagtttgtaaaaacccggagagcaactactgcttgaaaaatgatctaggcaatcctcgggggaccctgcaggatggcaccaggaggttcacctgcagggggaagcccattcaccacttccttggcaccagcaccttctcccagtacacggtggtggatgagaatgcagtggccaaaattgatgcagcctcgcccctggagaaagtctgcctcattggctgtggattctcgactggttatgggtctgcagttaacgttgccaaggtcaccccaggctctacctgtgctgtgtttggcctgggaggggtcggcctatctgctgttatgggctgtaaagcagctggagcagccagaatcattgcggtggacatcaacaaggacaaatttgcaaaggccaaagagttgggtgccactgaatgcatcaaccctcaagactacaagaaacccatccaggaagtgctaaaggaaatgactgatggaggtgtggatttttcgtttgaagtcatcggtcggcttgacaccatgatggcttccctgttatgttgtcatgaggcatgtggcacaagcgtcatcgtaggggtacctcctgcttcccagaacctctcaataaaccctatgctgctactgactggacgcacctggaagggggctgtttatggtggctttaagagtaaagaaggtatcccaaaacttgtggctgattttatggctaagaagttttcactggatgcgttaataacccatgttttaccttttgaaaaaataaatgaaggatttgacctgcttcactctgggaaaagtatccgtaccgtcctgacgttttgaggcaatagagatgccttcccctgtagcagtcttcagcctcctctaccctacaagatctggagcaacagctaggaaatatcattaattcagctcttcagagatgttatcaataaattacacatgggggctttccaaagaaatggaaattgatgggaaattatttttcaggaaaatttaaaattcaagtgagaagtaaataaagtgttgaacatcagctggggaattgaagccaacaaaccttccttcttaaccattctactgtgtcacctttgccattgaggaaaaatattcctgtgacttcttgcatttttggtatcttcataatctttagtcatcgaatcccagtggaggggacccttttacttgccctgaacatacacatgctgggccattgtgattgaagtcttctaactctgtctcagttttcactgtcgacattttcctttttctaataaaaatgtaccaaatccctggggtaaaagctagggtaaggtaaaggatagactcacatttacaagtagtgaaggtccgagagttctaaatacaggaaatttcttaggaactcaaataaaatgccccacattttactacagtaaatggcagtgtttttatgacttttatactatttctttatggtcgatatacaattgattttttaaaataatagcagatttcttgcttcatatgacaaagcctcaattactaattgtaaaaactgaactattcccagaatcatgttcaaaaaatctgtaatttttgctgatgaaagtgcttcattgactaaacagtattagtttgtggctataaatgattatttagatgatgactgaaaatgtgtataaagtaattaaaagtaatatggtggctttaagtgtagagatgggatggcaaatgctgtgaatgcagaatgtaaaattggtaactaagaaatggcacaaacaccttaagcaatatattttcctagtagatatatatatacacatacatatatacacatatacaaatgtatatttttgcaaaattgttttcaatctagaacttttctattaactaccatgtcttaaaatcaagtctataatcctagcattagtttaatattttgaatatgtaaagacctgtgttaatgctttgttaatgcttttcccactctcatttgttaatgctttcccactctcaggggaaggatttgcattttgagctttatctctaaatgtgacatgcaaagattattcctggtaaaggaggtagctgtctccaaaaatgctattgttgcaatatctacattctatttcatattatgaaagaccttagacataaagtaaaatagtttatcatttactgtgtgatcttcagtaagtctctcaggctctctgagcttgttcatcctttgttttgaaaaaattactcaaccaatccattacagcttaaccaagattaaatgggatgatgttaatgaaagagcttcgccaattaagaagggccatgtaaatgtgggtaacctgattgttttgtcaaaaatgctaaagcggggtggggggtggcgcagtggcttatccctgtaatcccagcactttgggaggtcaagacgggtggatgacctgaggtcaggagtttgagaccagcctggtcaacatggtgaaaccccatctctactaaaaatacaaaaatttgccaggcatggtggcaggtggctgtaatcccagctactcaggaggctgaggcaagagaatcgctggagcctgggaggcggaggttgcagtgagcagaaatcttgccactgcacaccagcctaggcgacaagagcaaaactctgtcaaaagaaaagaaaagaaaatgctgaaggagttactcagggtcaagaaagttttcagaatgtccgtaagataacatcatcatgggacactacctgttgctgggtgctctgcggcttttacactgatgctgattgtgtgagatccagaaaaagaaaatggagttctacatgcccatctcacagcagggtcatcaaatcctgctagtgacacagaagctgacatccagctcccacccgccttcctcccaggttcggggagcaggtagagtgggagccattaggtgggctctgccagtgttgtcatagagtggcaagtcctccatgggatgggagtggcatgtgggagccttctgcatcatgcactatgaaaaaagaaaatttactatggggcaagtggttcatatagctatggggcaagtggttcatatagttaagttgattgtatatatatatatatatatatatgtattccagtgtagaaagtattggctgggtctgtaatcaagtattccacagaagtgccttcataggtgctgaaacaggattatgagagtgacagacacaggactgaagacagggagaaaatgtgcatggctgtgagaatatattgctttgattctttgacttctcatgatatatgaaaacaaataaagtgggggggggtgacttcaataatatcacgaacatatttaaaatgaaattctgagcatggagaaaaatttcaaattctggtataaacaaataatctaaaaatatagataaggaaaaaatgttttcatttttttggtcatattgatttgggtcatatatgattgaccaaaaaaaaagatatttctaaaatcctggtgctttttcatttaaaaatagacaaccaaagaggaaaatgaacaatgatggaaattcgtggaagaggaaactaaaatggcaaaatagcatattaaatggcactgagccttggtgtgatcaaaaaaaaaaaataaagcaaaatgagata

SEQ ID NO: 481671 - DNA, 740 bp, Homo sapiens
  misc_feature (344)..(344): n is a, c, g, or t
tttatgctgatcatatgcataacctataatctcacaattctacttctaatggtatacccaataggaataaatacctacctgtaccagaagacatggtcaaatatgctcataacagcattaactggacaggacaaaactgggggaaaagacataattggcccttaaaagtaaaatgcattaattaactggactatgctcactcaatggaatattctattaccattaaaaaggaagaaagtgctggtattcacactatcatgagttaatctcataaacatgtggttcaaaagtgtaacacaaatgtgaaggtatgccgaatgaggccactcttatatagagcacanatgtgcgcaacagagctatatagcgctggaattataggatttggtaccactctagagaggaatattccctgtgatagaggtatatgagggatgaggagtttattatgaacactactaatattataattgttgatcggggggaaaatcccattactgaaatttctatgccgcgtggtctaactttaggacgtctttttttagtgattgtcctcttaaataattttgttaaaaaatatatttgtggcgttatttgttcatgcatgcttctatttttatgatgattttttagaaggggaatactgtgagttgtgctaactctttttgtaataacctcctgcgattgtactttcatggagggttttgtctattggttatggcttttattccctctttgcg

SEQ ID NO: 481672 - DNA, 451 bp, Homo sapiens
tccataatgtgtgcccgttcccgtcgaccacccaagggctgaggaatgcgagcgcacggacaggactggcaggcagctccaactgtagccccggtgcgggatccactaggtgaagccagctgggctcctgagtctggtggggacgtggagagtctttatatctagctcagggattgtaaatacaccaatcagcactctgtgtttagctcaaggtttgtgagtgcaccaatcgacactctgtatctagctgctctggtgaggacgtggagaacctttaagtctagctcaaggtttgtaaatacaccaatcagcaccctgtgtttagctcaaggtttgtgagtgcaccaatcgacactctgtatctagctgctctcgtggggccttggagaacctgtgtgtcgaaactctgtatctaactaatctgatgggcacacattatggaggggtaccg

SEQ ID NO: 481673 - DNA, 128 bp, Homo sapiens
cagcggaactatcgcagattctcatataacacattccccgcatccccttcaaacacaatcccctctactaaaatcacagcctcgctgtcctttcctatgacttctaacaccctagacctcactaggta

SEQ ID NO: 481674 - DNA, 132 bp, Homo sapiens
cacgagggcgaggcagcgttggtctatgtctcttggttctgcggcacatgacggacaggacgcttcagcctctctcattactgcggcgcggggcaaggtgtgagggaggaaatgggcacaggcacccccgcg

SEQ ID NO: 481675 - DNA, 317 bp, Homo sapiens
aaagcttatagtggcctcctttggaggaatagaagtggtcttatcaaattgaactatattaaaaagcaccggcttaccatctttttcaaaataaagagaaggcagcagtacgaatctttcatcatattgtgacaaacaccccctgattaagaacatcagggacgcaatataagcgccgatcactagaaaaccaccaaaaacaagctttctcataaatagctttttgcgaaaattaggtacactccatctaatagaataagatagctagccaacggcaggaactaattattaatcggcctttttttacttgtataacg

SEQ ID NO: 481676 - DNA, 1308 bp, Homo sapiens
acgtggtgcggtcgtgctgcgttctgttgctggttttgtggggcgtttgggcggtcgcggtgtctgcgtgcgtgtggttttgtttttgggtgtgtcgcggtgtggtgtgggggtgtggggtccgtgggcggctgttgacttcggttggttttgggtggtgggggtggggtggaggtgggagggtgtcttgcttggggcccgtgtggctcgttaatcgcgtttggggctgtgctcgcgttcgctgtcgtcgtgttgcgcattgcggtgtcgcttcggtcgggtccgtgtttacggggcgtggggcgcggtttgtgcgttcggtgctggtggtcggtgtgggtcgctgctggggcttctcggtgtcgtggtggtgctagggggttgtggcgtggccggggggtgggaggtgccgtctcatcttccgggtcgttgtgtggcccgtcgttagtgggggggtgtgcggttgttcgcgccctgaactcgatcgtgtggcggcttagtgtcctgggaggacgggctggtgctggtgcggtaggtgtggatagggccccatgccgctgcagtgcgctctatgtttagcggtggttatagtctcgcagtggtggcgagggggactgcagtgtcaggtgcccgtgcccgctgcttatctcccgtgctggtggcggtctgttcgccgccccgtagcttgctggcgtgtcaggtgatgccttagtgggagttgccctctgtggtctcttgtgatgtcttgtcccgctgttagagcgagcctatgcagtttaactcaatcctaagggcctcctaaggccttggacaactgcatggtagctgcactctaggagaaggaggggatatccagatgtttagattcaggggtagggtagtacggagtgtccctccctgtctagtgcctagcccagcctgtgatggcagccttcttgtatgtgctctggcccacgcttctcgcctagttatccatggggtaggtctctgtaggcttcagttttactgctgctgcatataatgaatggcgggcctgcaatgccgactacacctacggagtgctgttgaggactaatttcattcctattaatattaaaataatactgatctggcttggcaggtcaggtgccatgtctgggaacagggacgggggagcttcacctgttttgtcttggctgttctttgggctgtgggtggggcatccattgccagggtcggggaggaaataccaaatgcattgttgttctgctcaaaccatctcactgtttctatgagagctcgggtgttgtgtgaggtggtctggtgggg

SEQ ID NO: 481677 - DNA, 315 bp, Homo sapiens
  misc_feature (73)..(73): n is a, c, g, or t
  misc_feature (137)..(137): n is a, c, g, or t
  misc_feature (162)..(162): n is a, c, g, or t
  misc_feature (296)..(296): n is a, c, g, or t
ggttattcctagggtaatacaactgctcttcaaagaaattgataaacagagtgcactttgaatttactctganagtgctcttacttagagatttacaatgaagaaattttggatcttctatgcccatctcgtgcganagctcaaataaatatacgcagcggntcctagggcggcataaagcttgtgcgcggctgcagctgcgcaggctgttttgcgcttgcgcttgcggtcactgtttgcctgtttgggcaccggggcaacaactgctgggcactgtgcggcctgccgacggcctnatgcaactgcgcccgtgcg

SEQ ID NO: 481678 - DNA, 171 bp, Homo sapiens
gcggcgtagaagcgattagcagcaaagctttgcgacaccctttacgaggcggttcgggaaggtcctcacgggaaccagcgcaagcccgcaagttcctgagacggttgagttcagatcagccttagaccattgatcccagaggacaaggccctttgtggcaccgtagcttag

SEQ ID NO: 481679 - DNA, 959 bp, Homo sapiens
gggagaccatgggcttccaggcttgcagggccaccccggccaccagggcatccccgggagatgttggcctccagggaccaaagggaatgagaggcctggagggaactgctggtcctgcctggtaccccctggcccctaggggtgttccatgggcatggcaggggcctaggggctactagtggagagcgaggaccgtccagggacctgtggtggcccaacaggactgccgagggcccagaaggggaacgacggagagacagggcgagccgcgatgtccctttgaccactcactcttacctagcgttgtgagccatggctcatgtgatgtcgtggcatttcagacgacgacgtgtcaaaacgttcagagtcctttccaccgagaacatcgaggccgccccatgcgccatcttgtgagccatgaatgcttgcgagcctggtgcgacgtgatgccccgtgagggtcccccttgggcacccagcaagtaatggtcctgtgttgcctggcagaatcgcgcgggcgttggtggcgcggcctacccttgtaggtgcggacggggagccctggagcttgtatggtcgatgatgggtcagcctgtggcgtgcagggggcgtatgcacccaggccgtctggagagtgacgaggacatttgttctgcactggcccgaggaacgctgagccttcctccctgggttagtctggacaccgtgaggcgacatatcctggagaagccagggatgaaaaaggtcggacgagcctgtgcttgttggcatggccacggaacctagggcctcgtgcaagggtcaacccgataatcttggagtctggcgcatttcccaagtttcgcgacattttaaccgcccttttgatttgggtcttttggcacccacaaggaatcgtgagcactagcgagcacatagatacgtacctgcgaaaagtaacacaaaccaaaaacaaagcgg

SEQ ID NO: 481680 - DNA, 142 bp, Homo sapiens
acagatagctgcctcagtgggtagcttgtcttttctctctcctcatgatgtccataattttaagaaggtctcctatttccagaacgccaatctgaatggccaacgcaaagcaaagcgagcttccccagtatggctcagcgct

SEQ ID NO: 481681 - DNA, 126 bp, Homo sapiens
tgtcaaatgaagcagcacagtgcaagaggaaggacaagatagaaagggtagcatactgattggaaagcattatgaaaatttagttgaaagtgcattgaaggaagagtaaacagagaagaaaaaggc

SEQ ID NO: 481682 - DNA, 293 bp, Homo sapiens
tagtggtaaaatatataattcaagagcacattcggcggacggacaagcaagtatacgagtagcccgctccagtccccggacttaagcaagcatcaagtgagggcggcaccggtccaggaaaagtagggaatgggggtgagagtgtggacaaggtctagggcttaatactaacgagacgccccttgtaatatacatctaatagcaaagaagacgcgggatgcaggctactgagagaaaacaatctacctaggtacctatcccctatcgcatataggcccccctctaagaacttc

SEQ ID NO: 481683 - DNA, 184 bp, Homo sapiens
gcatagacaatcttttgtgctttatcagattctcagtcaatcaatggtgtagctagaaccggggcggcgcgggcgcgtgtcgaagagagagtgcgcgcgccaaaaagagagagatccagagaacgggcatcgccagttgcccggggggccttcactttgcagtcatcatctgtacaaactcttc

SEQ ID NO: 481684 - DNA, 81 bp, Homo sapiens
gtatcccccagacagggcccaggaaagggctctctccgcccatagggggggcccaataaatgtttttggctggctgcccca

SEQ ID NO: 481685 - DNA, 323 bp, Homo sapiens
tactgacgcgctgatcataatccatgattgtggtcttcccagatgtaaattaatactccaactctgaccaatacatgggggcttgtgcctgtaatcccagccctttgacaggaggccaaagtggtgaggatcgcttgaggccaggagattgatactagcctgggcaatgtagtgagacccccatctctacaaaaaattagctggacatggtggcacgtgcctgtagtcctagctacttgggaggatgaggtgagagaatcacttgagccaaggagtttgaggctgcagtaagctatgactgtgctgctgcacttcaacctgga

SEQ ID NO: 481686 - DNA, 710 bp, Homo sapiens
ccttcccccaccctggcttgctcttggtcacagggcggttctgggcacttgaactcagggccgaagcagaagcacaggcccagtcctggctgcaagcacaatagcctgaatgggatttcaggttaggcagggtgggaggggaggctctctggctttagttttgttttgttttccaaatcaaggtaacttgctcccttctgcctacaggccttggacttggcttgtcctcacccagtcggaactccctaccactttcaggagagtggttttaggcccgtggggctgatctgttccaagcagtgtgagaacatggctggtagaggctctagctgtgtgcggggcctgaaggggagtgggttctcgcccaaagagcatctgcccattttccaccttcccttctcccaccagaagcttgcctgagcttgttggacaaaaatccaaaccccacttggctactcttgcccggctttaacttgaacccaatacctaggcttacaggccatcctgagccaggggcctatggaaaatctcttcctggaggggcttttaggttgggcactataatggcttttcccttttccattttttcttttggagcaatggcacaagccctggaacctggaaaggacctaaggctaaggccttatttcctttccctccttattcttaaccccattgggtccctttcccttttttttggaggtccaggg

SEQ ID NO: 481687 - DNA, 267 bp, Homo sapiens
gacagtggacacaagaaggacgttcgccctgagcacaggtgccaacggtgccaagactggcaggacgtgagggcttgattgtttcatttaggcagttgctgcaggtgtggtctcatggtgccatctgctgctcccttgaccacttttctatgtcctccttccaccccaagtcccggatcactggctgttctctggggagctcttggcatctgccatctgagcctaaagttgcccactggcgccaatagattctgtttgtcctgctga

SEQ ID NO: 481688 - DNA, 148 bp, Homo sapiens
aaaaaaataatatcagctcggtacctttatgtaatgaagcctccataacaacccaagaggcattgggtttggggagcttccagcatagctgaacacgtgaaggttcttggagggtggtgcatctacggaggacgcagtgacccactcg

SEQ ID NO: 481689 - DNA, 432 bp, Homo sapiens
ttcttgtctagcataaaagccctggctcttaaaggctggcaacctttaagatgcaaatgcaagagggtccacccaacatggcgattcccaccgttgtcctcttgcccttgctccatcaggtacctaacagcatggccgcccccacataaccccgtgtgtaaaatgtcatggcatcctgcatttgtgtattaaaggactggggtgggagggccagttttcttgagggctaaatgacatgcctggtcaaaccaatcctctgagccctatgcaaataagacaccaccccctccagccgtcacataaaactggctagtattgtcagaatgtaaggtctcctctttcagctttagagcccccctccctctgtctgtgtaagggggagcttcttccttctgccttctcccttcaagcctactaaacgctctgctcctt

SEQ ID NO: 481690 - DNA, 939 bp, Homo sapiens
ctcccccggggccctatgttcagcccttctccccggggtcttttaccctatgtgcccccgcggggcgcgagatatcactgttgggttccccccccgcgggacccaccctttttgtgccccctttgggccccctctcttttaggggggcacaccccgttttggaccccacattgttgtcgccccacaagactccgcgggtggtgtcccgcgttccgcggatatttctcccgcgggaatttgttctgtcaccccccgcgcggtttcggggtctcccaccgcgcgttcccccactcaggggccccgcgcttttgtcacccccacaaaccctcgtgagaaaaagggcgcgtcccgcggtgtatattatacattggaaaaagtgttttcaaaacgccgcccccggggggcaccgcacactcttcacacaccgcgagcaacagggcgcgtgtttgcgagggagagagatctcccccctatttctctcccccccaaagaggcgttccccccacacacacaagaataccgcgggtttatgttcccgccacatttgtgttatgaaggcgaaatttctcgaagagaggcgcccgcgaaagagagggaattctcccccacacagccccacagcgagagagagaggagagagagagagaaaagagagagagagaccacacaataaaggttcccgaggggttcacacccccggagacacacagagagagagatttttagaataagagttcctctgagcacctcaaaggaatattttaaaactttttgggacttttggcacactgtttgtgccacacacctcttctcggtgtccctcccccccacacacacttggggagtggatttgtccacaaacccctccgggggcccttttttatattttttttttgatgctgttttattttccaaaaaaattggggccaccacaccaca

SEQ ID NO: 481691 - DNA, 80 bp, Homo sapiens
  misc_feature (7)..(7): n is a, c, g, or t
ggaaccncaatggtttccatttaataatctcaaaaaggagaaaaaaaaaccttgtaaaaaaagcaaaatgccaaacttat

SEQ ID NO: 481692 - DNA, 387 bp, Homo sapiens
ctcgagtaatcttcgtgtatggcgccagttgcttattcatcatagcatgcataggcatttctagtgacatattcaggatctgttccatttaacttctcaccaaacatggtgagctacatggtgcaattgatggggcctgtatcctcattcatcatggcatctagatactcatcagttggattcttccccaatgaagctagcatatcatgcatgtcttccttgtcgatgacaccatatctgttatgatcactcatgttgaaggcctctttgaactcctatatctgtgactggtcatacatagcaaagctcgacatggtggtggttaagtcccggctcagctacgagtttccgagcacctctccgagcccctcgcttccgctatcacac

SEQ ID NO: 481693 - DNA, 1090 bp, Homo sapiens
  misc_feature (370)..(370): n is a, c, g, or t
gagatggtgctggacctcacctacagccccccggccgaggccttctcctgcctgcccccgtacttctctttccctggcgccgctgctccctggacgccggccccgtgcgtcagtgcctgctgtgtgcacccctcgacgtccgcaggccgacctctgcggcccttcgtcgcatccagtggctgcgcacatcaagcttcaagtgaggtgctggactgagcattgcttgcgtctctgcttgcatcgcgtgtggcctgcccttccgagtggtcgcgactgctgggacgggccgctgtgcgagcgtgggggcagctggctgggcggctgttcccgatgcgggctgatgcgtgatccactttcaggcccatccctntcgcccgtgcggcccaaggctccctcttctgaccatcggccctattagcgcgatacatcattgcccctcaatgacgcagagggcacctggttcttcctcctagtgagatgcaagcggagttgcgagtgagcaggcgtgccaaaggtcccgcgtgaaccactatgctcacaagggatgcgcctagggccccgtgtggctcggacgtttgcctttcatggcgcctcacgtatgccctggggcacgcccaaccgttgggtccagtcgccctgagccggggggccccaccttcagtggatcaagcttggggagtccctgtggggcagtttgccacgtggccccctcttcttgatcgcccctcttccgttccccataggttagggacatggggggctacccaggctctgtgcctagcttcttgtggacctttggggcgaaccccatcacagggggcctcaaagtgggcgacccagaaaccccctttgagcaattcccggctgaagaagccccggggttcggtcccccaaaggaaggctttaaggagaacgttccatgggaaaagaggccccaatggtttagcttcaacgcagggcacccccccggcaggttcttcacgtgcgtggaggcttccaccggtgggagcgcgccaaagcagcccccccgttagctttacgatcaactcaacttgccagacagctgtcttgcaccccattcgcaccaccc

SEQ ID NO: 481694 - DNA, 928 bp, Homo sapiens
  misc_feature (926)..(926): n is a, c, g, or t
taactctttcttgtgtttgtaagtagagaacagggtcccccagtgttgcccaggctggtctgcgaactcttggcatcaagcgatcctcctgccttagcctcccagagtacggggatacaggctctttcttttacaaacataaaggttttaaatgggttataactctgtactctggcccttagatggtttatagcttcggttctgtaatcatgagttgggtgggagatattctccatagatgatcttctactgaaatgcctaaagaagtcacaggcgggcttctggtttatcagggattttttttaaaaagtcaatcagaaaggggatactggagcttcttcatgtttgtaacagctatattaaaacgggagacagtgatgaatcagctacaagggtaatatggttttacacatcatgttaagatagcggctttatgtgtatttatatggcatgcttttgtaaaaaacatgctgggtgatgaaagattagtttagagagaaactgtcatctgtgcagaggatgcattttctcattaattctggaaaaaacggttcacgggttatatatactggtatttgcacaaggctattaattggaaccttgtgagaatgagttaatgtacggaaatatttttaaaataggcttaactgtcaattgcaacttttttttagcatacgggtggacaccgggcaagtagtggcccttcttacaaaatttttaggccctttttaaggtgctcatttctgactttggaaagtgtttaccataagggggtattagggtgaaagtgacggagtcgaaagggggagtgaatggtggtgtaagtacggcgtgggggagggtgggttagttagacattgtaaagtgtttgggaggtgtgaagtgctgctatctatatgtgttatgatgatatttattttattggntg

SEQ ID NO: 481695 - DNA, 414 bp, Homo sapiens
ggatgtccgatatgggagagtagaggaggtgagatgtgagatagaagaaatcgtgtaatgtacatgatctcaggtagaagcggatataaaggtagcagtggatgaatagaggggaaagttacctacggtcagaaaagtgctgctggtggtggaagctataaaggccatgtggatatttgggcacctacggttcaagagtgggccgccctttaaagggaggcgcagacatctggccggcatcgtggctaccttcctaaccagctgttcagaaccttctgatttttacatgtactgaataagatttgagtaatgaaagtctgtagtcttaaaactctaaaacagttgtactgcttccaagcagcagtatttatagtaacgtaagctattaatgctaactctcgcatgtcaagaaac

SEQ ID NO: 481696 - DNA, 873 bp, Homo sapiens
gagaaacctgcggaaaatggtagcgatggcgggctgggccgagtgggtgtcgtggttgccgggctgatttgggcgtacaggctagttatagttaggctgcacatgctgcctatcaagcagcgtgctcatgcgtattatggtgagtcaggaagttatgtcagatcgggaagcgcaatagacagtagaagattaaaggcttttatcgtgagtccaactctgctatggcagactactgggtgatcattctctggacgagtctcaaacccatgcgtatctagcataggaatcgcgtggattgcagaggcatgctagtcaggcagggagagctaccaatatggaaagccatataaagctagtatgcgaggtagctatctcttgcacagtttgctggatggaaagattgggcaaggttccctcgaagtcacagagctttcgctctaggagttgataaacaccaataactgtctcagaggactgcatagatcaagtatgtccgttggttcaggacccatgtattaaatgctttggggacgacaatgggatactattgctgatagaactgatgctattcgtcataatgtgaacgacatgacagtgtagtaagaattcctgagtgaagaagttggaatcgcattatataatcttggcttgatattgtggtccgtagtgcctgtgttgttacctgtattcaaatgataatattacagtcaccgtagaacaataatttagttatagctgtgctgccattgatcagtcttttacttgaggcagttaaatatcgtaattaagtcgtgacatggagtatagtccatgatatctaagggagttgggaagcttaaaagaaccattttttataaagtgttcatcctcctg

SEQ ID NO: 481697 - DNA, 870 bp, Homo sapiens
gaagctcagctgtagacgcctgcagtgtgactgtgaatagtaatggatcttccaatatgagtgcaatactaaatcgttgagagacgcctaagtctcagaatacacaattatgttggcactctcctagttagaaagtcatcagatgtaataccacggggacagttgtgaaaccggtgcatcggtagtagactctgccagtgttacagtcccgcgaaagtgcgcctcttgactcaagcaccttgatgacaatcaaaaacaggtttatctagtgtcaaaaccagttcttctcaaggtttactaagaaataagatctatcaagatccatagcatctgaagtggtagccaggcctgcttcattgtctacatgaactaacggctgttggaaacgtcagagcccgttgatcagcgaagaacatactgcacggaaaacgcaattggtgtgatagtagatcaggtcagtccaaagaaaccctcggaagagaagacaagctcgtctgagccgcagtggaaagctggcacagggaacgcagtgctaacacacggccccctaatacagtagttgactcagcatgcagcctgcagggatcgacacattgacaaaaaaccagtgtgatgtctttttgggggataccagtgggcagacaggaatgatgacccaagattattactggaaaaagtacacacatagattttctgaatgcctgacgtggattaatgaggggatgtccaaacagagatttactggtcacatgaatgacttgtttaaatatccaggaggcaagaagttggagctttgggactgtctggatttttggacaagcaagggtttgaaacttttgcgtcttgaaagaattggggggcaggtaaaca

SEQ ID NO: 481698 - DNA, 120 bp, Homo sapiens
tcagacgctgaactatgtggaatccagaactcagtgagtgcaaaccgcagtgacccagtcaccctggatgtcctctatgggccggacacccccatcatttccacatagttcagcgtctga

SEQ ID NO: 481699 - DNA, 503 bp, Homo sapiens
  misc_feature (8)..(8): n is a, c, g, or t
  misc_feature (102)..(102): n is a, c, g, or t
  misc_feature (104)..(104): n is a, c, g, or t
ctcttttnaatatcataatagtgtattgatgtaaaacacgaacagctgtctggcgtacgaacggtgtgagtgactctgcagagtcgccacagtcctcagtgnanctatcagtcagtgcctgtgtggggaacccggggactccgcccaggctccaggcccagtgtggctgacttcaagataaaggcagcggttccttccactcctcctgcttgcccttccagcagaggctctgggccacccaccagcagatgtgccccaggtcctgcaatggctaggaaccttgggagccatcttcctccctctggtcatcctcttccccagaccgtgcgctgcccctagatgaacttgaagcacttggtcttgtcatggggcaggcgtgtcttgaagagcacagaatccaccctgaactgcgtgtacaggaggggcatgtagccgtacaccttcacgaagaagttgatgcacttgtgccgctcgtggaagtgggagtcatcatgagacagggc

SEQ ID NO: 481700 - DNA, 484 bp, Homo sapiens
gatccagacttggtcgagcgccagtctggaactagagctccacacgtcaactctgggacgaccccctgtacatgtagtcgtctcaatagttactggggaatgttcgcagccttcacttccgccccggccccacattttccaaagtcatccatcaacccaggaaaataccaaatctaggtcttacaactagggaagggaaggcaagggactggacgggagagaagaaaggaacgatccgaaagcccaacctccttccagaatgtccatgagaatcttgagcacatatggtccttgcgatgaccacatgacctgccgagccccctttactatgaacctcatccttatattttccttagtatcacaattaatataatatgtcatttctgttaatagtgtcttcttgtcattttactttttaaaagatttcattgacatatacatacaggaaagtgcatctatcataagtgttccacttgatgaattc

SEQ ID NO: 481701 - DNA, 119 bp, Homo sapiens
  misc_feature (65)..(66): n is a, c, g, or t
cacttatccgcttactatctacagcttgagtgcagagatgaagagtcaaatctgaccaagatgtnngatgtggataagagaatctctgctccccacctctaagtggcccgccaatcgaa

SEQ ID NO: 481702 - DNA, 123 bp, Homo sapiens
gcttagggtggttactctgtgtggtactggatttgactggcggaggttcgggctcgcctggggatctcctcagcccatgtacccgccatgtccggagtcaatgtgcctctggcggaaggggga

SEQ ID NO: 481703 - DNA, 215 bp, Homo sapiens
gtccgacttacacctcatctgcgtctgagcttaatactgtgtaagtaacgtaattcgtaactctcatttgctgttagcacctacgcgcaaccagatcacgatagattattacttcttcaaatattaattcggtgagatatttcaaactaccattttggacgaaacggcacctcgagactgtcacgagtgactcttgctcctatgctccatttcag

SEQ ID NO: 481704 - DNA, 269 bp, Homo sapiens
ttttttttttggagataagatcttgcgctgtcctccaggctagaaggctagaggagtgcagtggcaaatcatggcccactgcaacccgaacctcccaggcccaagtgatcctcccaccccagcctccagagtggtccatcatgcctgactaatttttctatttctgtagagacaaggtctccccacattgcccaggctggtcttggacttctgagctcaagtgatccacccgcctcagcatcccaaagtgctgggattacaggtgtgag

SEQ ID NO: 481705 - DNA, 195 bp, Homo sapiens
ctatttttcaggaagatctcgctcccaatcattaacacaggtgagtctgtactgatcgagaggcgcagtgtttccagagggccgatggttgggtccacctctccctctgccactcccttgtagaaggagccgatctggaggtagccgtcggggctccgagggctaccggagcttggtggtgcggcccttccttgc

SEQ ID NO: 481706 - DNA, 119 bp, Homo sapiens
tctcgagcttccgtacatgcagcagacaggattccaggcaaccaggtgtttgatgaagctaggactgagcgagcaagcgatcaagccgcatttcgtggtgaaaattggataagagtcca

SEQ ID NO: 481707 - DNA, 649 bp, Homo sapiens
gaacagcctctggcatgtggaacgtggttggctcagggttgacagagaaaagacaaataaatactgtattaataaggaaaaaaaaaaaaaaaaaaaaaaaaaaaaatttttgggccccccggcgaaaaatttataaacccatttcggctgggcggcgcgcgggaccagagtgggttactgcgaaccggcggtccaagagcgttgctcccgaaggaaaaccgggggccatgcgccataggccggtgggttcctccccaaagataaaaaaaggccggcggcggaaaccggaacggtgttggtgacaaacccaggagtgggcgtccggaaagagccatacggggcttttcaccacagagggggcccaagggaacgcccaatataaaattacgcgcccccgggggggaacataaataaaataactacaaggaagaaaagaaaataaaaaggtaaaatataactgtacagaaaatgtaaaaagaaatagaatcaggaaacaaatcaggaagaaagatataagtaaaatataaataaaagtggaaagtgagaagggagagaaaaagaaagaaagatatataggaagtggaaaacaatagaacataaagaagaaagataggtaaatagaagatagatgaaaaaaagtgacagagaa

SEQ ID NO: 481708 - DNA, 464 bp, Homo sapiens
  misc_feature (72)..(75): n is a, c, g, or t
  misc_feature (217)..(217): n is a, c, g, or t
atacattttagataaatgagatcttgcagccttttacacacagtaggaattcaatatttttatgaggctaannnnaaatcacagaagagatggtttcagaggtagggaagatttaaacaaacatattccaaggaacttatctttgggaatgtctttgcttttccacaaagatattaagcttaaggaaaccttgccatttctgtgctttccgttaagntaattaactaagatgtttgattattatgcatattttgtgatattccaagatacattaacattttcaaagccaggcagtatgctaaggaatttctcaataagtgaacaaagtctaccctgaaatcattgatttcagtcatttagtcactgatccaacccatatactcttacggtttcaaagtcatatggtttaagagaattaaacaactgaaaagaatagtaaatatcacctattaaaattccctcat

SEQ ID NO: 481709 - DNA, 687 bp, Homo sapiens
gggggcattaagagtgttttgggtcatccaatacagatctagattctttaagggaatagagctggttgataaaaactgttgtactggcaaagcacgaagcttagatggacagtatgatgaccgttaaacctaccaatactcatgatcctaattctattaatgaacactttgtaaatgtcccgacaccttatgctgtatcgcctgagagaatgtcatttgatgcgatgactgttctatcaggcattgatgattctgaggaaaactttgaaaaagctaagggtgtccaaatcctagggcttccctgcatactagcccagttctgccactagtggtctgtcttgatggaacttggtacgacgctcttaattaggctatgcacctactatgttatctgatttgtacaatttgcaattcgcagtttacaatcatatttaaatctgcttgtaaacttacagattgaatgcctgagttgttcataaaatgcctaattatgagacatttattctaaaatgtaatcgaaaatccgcgttaggtggagaattcccaaaatcttatctgaaattctcttcttaggtacccttactggtatatgtcaataggccttctttggatgcggccttttcgagaacgactttttaaaccttctggtgactaggtacctgactttcattttttcgatggccccct

SEQ ID NO: 481710 - DNA, 834 bp, Homo sapiens
ccactgaacatctggtgtcgccatgggacgacgcccgcccgttgttaccggtatagtaagaacaatccgtacccaaagtctcgcttctgccgaggtgtcactgatgcctaaattcgcatatttgacctggggcgcaataaggcaaaagtggatgagttcccgctttgtggccacatggtggtcacatgaatatcatgcatctgtcctctgtagagccctgtaggctgcccgaatttgtgccacattcacgtcatggtacaaacatgttgtggacaaagagtggtcttccaatatccagtggctgtcggctccagccctcgttccacgtcatccgcatcatgcccagatgttgttctgtgctgctcgagcatgacgaggtgtacgcttggtctgggccttattcatagcgcacgtcggagtctctactagttagtcaggcttgcattgattcttgtcaggagcatagaggtggccccagtgactcagccactatggcttactataaacagccaggtctggcaagtgactttcagtggtcactcaggtaccccttcctgcgagatgcaatagcaaagcatgacgtaaggtcttagcaagctcttccccacaggttaggggaaatactggtgatgggcagtagctcttcttgctttagctgaatgacaaccatcttgccagcatggtaggctgaagcttggccagagtgagcccagtgtgcgccttttcagttggttcttgggatgctcctgcagccaattaatggccgactgagttcctttcctcctgggggcccattgtgcgatggctgcacgcaagtggcttcttggtatgtac

SEQ ID NO: 481711 - DNA, 308 bp, Homo sapiens
tagaggatccgccactgtagcattgctccaatctcggggggctgcacggcccattgtccctctaacagcaagttgggggcagccgcaccgctcgggggtcgctgtacctcagttcagccatgcccagcagtctcgtatcgttcatcggcacattaagccagcacgacaagtcgcgcccagccacactcaagcacacggcccatgccaccacccagcccacggcacatcgcagcacaagcagctcatccaatcttgtctaatccatgtcctgtgtaccgggccgggggtgcaggtaagagccggtagta

SEQ ID NO: 481712 - DNA, 139 bp, Homo sapiens
tatcatacatatccccaagtagttttagatcaaaaacatgaaatagatccacctgcttatatttaacgcatattaaaaaggaaactaattggaccatatttctatatatagtctattttatacaaaaaggctacacaat

SEQ ID NO: 481713 - DNA, 198 bp, Homo sapiens
aattcctgacgcaaacgtcgatgacctgaatctggctattgccaatgccgctcttttggatgcctctgcttcaagccgctcacactccagaaaaaactctttgtctctgttgtaagtgttgtacacgagaattagcacactattagcataaaagacacttggcatctttacttacttgggcaagtaagtcacgtactt

SEQ ID NO: 481714 - DNA, 227 bp, Homo sapiens
ccctggccaaaaaaaaaatttttaacttttccattccctttattcccttttttaattttaaaatctttagcttatttttgaatgttgggcccccgtaaacaacatttattgtcgctgggtaaacattgccccccgcaggtttagggggtaatgtcaaattattactttttttatagggccaatgccccaatcctaggcctaccccccccaggtttgttcttttttta

SEQ ID NO: 481715 - DNA, 144 bp, Homo sapiens
  misc_feature (82)..(82): n is a, c, g, or t
  misc_feature (107)..(107): n is a, c, g, or t
cggttcggaggccccgttcaccaccaggcgcagagattcaggttctcccccatgggcgtcgatcacatgagcgggctctctngcgtcaacgtgccaggaaacgcctncttcggctggtgcattttcatctacaacctggggcaa

SEQ ID NO: 481716 - DNA, 564 bp, Homo sapiens
  misc_feature (39)..(39): n is a, c, g, or t
  misc_feature (69)..(69): n is a, c, g, or t
  misc_feature (85)..(85): n is a, c, g, or t
  misc_feature (142)..(142): n is a, c, g, or t
  misc_feature (187)..(187): n is a, c, g, or t
  misc_feature (220)..(220): n is a, c, g, or t
  misc_feature (242)..(242): n is a, c, g, or t
  misc_feature (251)..(251): n is a, c, g, or t
  misc_feature (329)..(329): n is a, c, g, or t
  misc_feature (336)..(336): n is a, c, g, or t
  misc_feature (338)..(338): n is a, c, g, or t
  misc_feature (374)..(374): n is a, c, g, or t
  misc_feature (379)..(379): n is a, c, g, or t
  misc_feature (399)..(399): n is a, c, g, or t
  misc_feature (407)..(407): n is a, c, g, or t
  misc_feature (435)..(435): n is a, c, g, or t
  misc_feature (459)..(459): n is a, c, g, or t
  misc_feature (471)..(471): n is a, c, g, or t
  misc_feature (555)..(555): n is a, c, g, or t
gggaggggagtgggttaagcgcactgcagtgcgcggggngctacgttgctttcacacaaacctgcggcngtggcccacacctggnaggggcctttggtcataggacggcgtgggggagaatactgttttaagtttgggattngggtgggttttggtgttaaaggtgagggtgcgggttaagaaaggntggccccagctttgcaccatctaggctgaaggnctttggaccactcctaggagtnagggctggntccattagctcctggtactttggtctggcccactccctccttaaccaagcgggtccaaggtcaagaatggcacaagancagcccntntggggccttcccacctctacaacctagtcccctggncagcnacagtggcaaaaggcaactnggtaaatngcagctttctccagttttaagggcactngctctccaacacccctcccttgcntaggggcctctnccaaaaaaaaattttacctcctgtttcagaaaatctaaccagcaaccagcctgttgattccagggcagttagccagacgcaacnggagaaaga

SEQ ID NO: 481717 - DNA, 152 bp, Homo sapiens
aatctcaatgtatcctatcaccactgcccatctgatcatgggtgtagggccatccactggagcacagacacagatggcctaccacaacctcaggaaagaatgattttctgcctcctcgcagctgtccactgacaatagctcctcaacaagag

SEQ ID NO: 481718 - DNA, 89 bp, Homo sapiens
  misc_feature (29)..(29): n is a, c, g, or t
gaattcaaagcttctaaccgatgtacggnggacatgattatttttctaaagctggttgggttaataaacagtacctgctctcaaattga

SEQ ID NO: 481719 - DNA, 341 bp, Homo sapiens
cgtaagactaaagtctcatagtgggatcctggtgtagctttccttcgtcgctattcctaaaaagcaacaaaaaagttttttgtgaatgctgcaagattgttgcattgtgcatactgagataatctgaggcatggagagcagattcagggtgtgtgtgtgtgtgtgtgtgtgtgtatgtgtatgtgcgtgtgcgtgcacatgtgtgcctgcgtgtgggtataggactttaacgctccttggggcatagggaagtcacgaaggatcgcttgacatcaggagacttgcggggtataatagcagacgtctgagcttttccccacccagagaatagccccgttcga

SEQ ID NO: 481720 - DNA, 220 bp, Homo sapiens
ccccccccccccccccccggcacatttagtgggctgagcaagggcggggccatctccgggtttttcttttttggcggttttttcccggccttggttttttttctccccttttttgagaccccccttttgccccatttgggtttggcttttggggggtaattttgcggtacctggggtaatgaaaaaaaagagcaaggaacaaagtaaggaacaaaagaga

SEQ ID NO: 481721 - DNA, 1193 bp, Homo sapiens
atggaagatccgtcgggggctcgcgagccccgggcccggccgagagagcgggaccctgtggactggtgccccctacccatgacctaatggcctgctacccacgatctgacctgctgtgtgacctgaccctgtgtggacccgctgcaggaatgcgaagcagcgacgggaaccggcgaagggacggggaccgtggacccggagagagaccaggagagggacggggaacctgcgaccgtggaacctgggacctgggagagggagagagagagggcaaagagacccggacctgaggccccctgcctaggacacacacagggacgcgggccctcgcgcaggtgaacacggagttgggaaaaaccgtgccaaagccggacgcgggaccgggagccccggggaactgacctgggacgcaagcctgagccttcctgggcccgcgccctggagaagccccggagccgccgtagccgcagcaggacaggggagaaccccgggcgccgaagacccgaaagtgaaccccgcttcggagagatatctgcctcgaccccccaggcctggacgagaaggaggggtggaatattaccagtcagagggcggaaggactcgtgagaatgccaactatatgcaaatacttggtgccactggggagaagcctgttgcaaaatgctggaggttctctgaacttgctgatcttggctgtagacttctgatgtttacaggttccacagtgggggctacacaggtggtattaccagctttggggggcatttcctacttatcagtcgaagggggttacagtggttgatggtgcatgacgggagaaggccagcaatgggatttccagttttacaggttaaggtgccctggctactgtgtgcaatggccttatatggaggccataaaagcctttgtggcgcttggtcccaagaagtccgcggggacccgagggagtgtaccaagtgggtgtagaccaacggagttgagtacttcctacgggggagaacaccgcagatagtattatcagacacattgtgagagtcccgtttagtaaagaggaggtgcacaaagcgaagaggttgggtactaaaaataagatggtgcagtatgagtcggtgagcaagagtaaatctttttttttttttttcttcttttttttttttgtcttttcttttgctttctttgtttcagggtgtgga

SEQ ID NO: 481722 - DNA, 1263 bp, Homo sapiens
  misc_feature (256)..(256): n is a, c, g, or t
  misc_feature (264)..(264): n is a, c, g, or t
  misc_feature (302)..(302): n is a, c, g, or t
  misc_feature (308)..(308): n is a, c, g, or t
  misc_feature (310)..(310): n is a, c, g, or t
  misc_feature (341)..(342): n is a, c, g, or t
  misc_feature (389)..(389): n is a, c, g, or t
  misc_feature (413)..(413): n is a, c, g, or t
  misc_feature (427)..(427): n is a, c, g, or t
  misc_feature (621)..(621): n is a, c, g, or t
  misc_feature (635)..(635): n is a, c, g, or t
  misc_feature (658)..(658): n is a, c, g, or t
  misc_feature (678)..(678): n is a, c, g, or t
  misc_feature (695)..(696): n is a, c, g, or t
  misc_feature (723)..(724): n is a, c, g, or t
  misc_feature (905)..(905): n is a, c, g, or t
  misc_feature (965)..(965): n is a, c, g, or t
actcccaccacccactcccccccctcccccccacaccccccatccccccaccaccccccactccccccccccctccccacatccacccccactcctcctccctcccccccacccctccctcccccccccccccccacccccccccggccccccccctacccacccccccaccaccacccctccccacccaacccccccaccccccccccaccctcaaaacaactatcgggtctatgtgtattcgaggtcccgttgngttttaanttggtcacagggttactcagctgtaccttctagtccgncatggncngctctcacccgggacccccagttccagaacnntgcagcaatggtaccgcgagcaccgctccgagctgaacctgcgccgnctcttcgatgccaacaaggaccgnttcaaccacttcancttgaccctcaacaccaaccatgggcatatcctggtggattactccaagaacctggtgcacggacggacgtggatgcaggcatgctggtggagtacttgtgcctagatccagggcgtggaggccgcccggtaagcggatgttccatggtgagacgatcaactacaccgagggtcgcagcctgtgctgcacgtgngctctgcggaaccngtcaaacacacccatcctggtanacggcaaggatgtgatgccnagaggtcaacaaggttnntggacaagatgaagtctttctgccagnngtgtccggagcggtgactggaaggggtacacaggcaagaccatcacggacgtcatcaacattggcattggcggctccgacctgggacccctcatggtgactgaagcccttaagccatactcttcaggaggtccccgcgtctggtatgtctccaacattgatggaactcacattgccaaaancctggccagctgaaccccgagtcctccctgttcatcattgcctccaagactttactaccnggagacactacgaatgcagagacggagaaggagtgggttcatccagcaggccacgaacttctgaagtggcaagactttgttgcctgttcctaaacacaaccaaggaagagtatggatgacctcaaaacatgtccatactgtgatgggacgagacacatccactggcgaaacaatctcatgctgtgttggttacaatccgtagttggacagatagcaatctcagactgataaaccacattgcaggatgatacactgggagaccagaaaagagcttgtatagaggtaacacgcccatcta

SEQ ID NO: 481723 - DNA, 138 bp, Homo sapiens
atctgagaatttagtaattacttggctttcttttcttaatatatatttaaaataattctataatatgatatggagacattctactgtcatattaaattcaccgctttaggaggtgtattatacataatcttagtcatc

SEQ ID NO: 481724 - DNA, 1297 bp, Homo sapiens
  misc_feature (256)..(256): n is a, c, g, or t
  misc_feature (264)..(264): n is a, c, g, or t
  misc_feature (302)..(302): n is a, c, g, or t
  misc_feature (308)..(308): n is a, c, g, or t
  misc_feature (310)..(310): n is a, c, g, or t
  misc_feature (341)..(342): n is a, c, g, or t
  misc_feature (389)..(389): n is a, c, g, or t
  misc_feature (413)..(413): n is a, c, g, or t
  misc_feature (427)..(427): n is a, c, g, or t
  misc_feature (536)..(537): n is a, c, g, or t
  misc_feature (592)..(592): n is a, c, g, or t
  misc_feature (655)..(655): n is a, c, g, or t
  misc_feature (669)..(669): n is a, c, g, or t
  misc_feature (692)..(692): n is a, c, g, or t
  misc_feature (712)..(712): n is a, c, g, or t
  misc_feature (729)..(730): n is a, c, g, or t
  misc_feature (757)..(758): n is a, c, g, or t
  misc_feature (939)..(939): n is a, c, g, or t
  misc_feature (999)..(999): n is a, c, g, or t
actcccaccacccactcccccccctcccccccacaccccccatccccccaccaccccccactccccccccccctccccacatccacccccactcctcctccctcccccccacccctccctcccccccccccccccacccccccccggccccccccctacccacccccccaccaccacccctccccacccaacccccccaccccccccccaccctcaaaacaactatcgggtctatgtgtattcgaggtcccgttgngttttaanttggtcacagggttactcagctgtaccttctagtccgncatggncngctctcacccgggacccccagttccagaacnntgcagcaatggtaccgcgagcaccgctccgagctgaacctgcgccgnctcttcgatgccaacaaggaccgnttcaaccacttcancttgaccctcaacaccaaccatgggcatatcctggtggattactccaagaacctgtgttgactgtgagtgactgttgacttgctgtgattgcttggttgtgacttgtgnnccaagtccagtggtgactgtagtgatgtgcctgccctgtggagcggattgttcanatgtgttgatgaaatgaaatcaacttacacccgatgtgtgtctgatgcctgtgctgcacgtgngctctgcggaaccngtcaaacacacccatcctggtanacggcaaggatgtgatgccnagaggtcaacaaggttnntggacaagatgaagtctttctgccagnngtgtccggagcggtgactggaaggggtacacaggcaagaccatcacggacgtcatcaacattggcattggcggctccgacctgggacccctcatggtgactgaagcccttaagccatactcttcaggaggtccccgcgtctggtatgtctccaacattgatggaactcacattgccaaaancctggccagctgaaccccgagtcctccctgttcatcattgcctccaagactttactaccnggagacactacgaatgcagagacggagaaggagtgggttcatccagcaggccacgaacttctgaagtggcaagactttgttgcctgttcctaaacacaaccaaggaagagtatggatgacctcaaaacatgtccatactgtgatgggacgagacacatccactggcgaaacaatctcatgctgtgttggttacaatccgtagttggacagatagcaatctcagactgataaaccacattgcaggatgatacactgggagaccagaaaagagcttgtatagaggtaacacgcccatcta

SEQ ID NO: 481725 - DNA, 349 bp, Homo sapiens
tgtcgctcacatctgacaggtgtattgacagtgtggatcgtcagtcgtggactagcgatcggtaatgggaaataccggtgggatgcagtggctcgccctgtaatcctaacactttaggggccaaggggggaggatcgcttgagtctaggagtttgagaccagtctggggaacatagcaagaccccattctacaaaagaattttaaaaattagttgggcatgatgacgcatccatagtcccaactacttggaaggctgaggctgaggattgcttgagtctgggaggtctaggctgcagtgatctatgattgtgccactgcacttcagcctggttgcaaagtacgactctc

SEQ ID NO: 481726 - DNA, 440 bp, Homo sapiens
  misc_feature (23)..(23): n is a, c, g, or t
  misc_feature (29)..(29): n is a, c, g, or t
  misc_feature (121)..(121): n is a, c, g, or t
  misc_feature (142)..(142): n is a, c, g, or t
  misc_feature (166)..(166): n is a, c, g, or t
  misc_feature (169)..(169): n is a, c, g, or t
  misc_feature (176)..(176): n is a, c, g, or t
  misc_feature (205)..(205): n is a, c, g, or t
gggacatattgttagctgccacntagcgntcattgtataggtaatgcctgcaccataattcctagtaatagccacgaccaattaacagtcgggctatccttgctgtagttctcgtcatggngccacaaatcactgtgtaacntggctcactggtgagcatagggtnganggtaaangtttaatccttgctagcttgtgagaagangagttgatgactgctccataccagtggctagatggagtattaaggtggagcagaaaagaagtgagaacatcttgattcccctttcacttgatggtgtttatgaacatgccgtagtgcctttatggccagtttgagtcctgcctactttgacttttacgttcccattcctgtgttaccaccttcctcccgatttgttcacctattttgtgctttaaatctcaataaaatacttact

SEQ ID NO: 481727 - DNA, 869 bp, Homo sapiens
agagtcaacagcacacagagagatatggcggtagatacgtcgcgcaattatcgtgtggcggctcggagtcttggagcacccgcaccagggcacccaatgtttgtgacaccgcggtttgggcacaccgatagacccttccgaggccctatgttcgcccggagaaatccagttgccggggacaaaaacatacttgggcctgggatggcgcccacacacgcacgctttgtgctcgcgacaacgcgtcaacgttgtgggccccagcgttgtcacagacttaacccggggccgaccccgtcagcgtttgttccggccatactcagacatattagctgggggcaaccccttcatcaaagaaaacttgcggggccacccccaatagcgtggggagatcttcacccctggagtccccaacgctcagaaagacctccgtcaagtaccccagagtgttgtcatataatccccattactgcgcttacaaaaatagttggctgctaacagggcgcccctattgttaacccttgtgtatattatactcgcgagcccccgagaacacatggggtcataaaaagcctgatagcccgcgatgaggacgacccaaaaggtgttcccccccttgcttccccctccccagagggtcccaccccatagttacttcagattacaggacaaaattcattcccagccattatttacgtgggcacactaactcaagatgtgtccaaacagtcaaaagagtgtattttagtaataaaccaacagtgcgggtaaatacaagaaaaatataggaaatactcctcactgttattgtaggaagcgaatgagtctgaaggactcatgcaaaacagggaaaaaacccaccgcccacatgc

SEQ ID NO: 481728 - DNA, 317 bp, Homo sapiens
gaggccaggacttcgagagcagcctggccaacatgatgaaatgctgtctctactgaaaataacaaaaattagccgagcatggtgacaggtgcctgtagtccctgctactcagaaggctgaggcgggagaatcgcttgaacctaggaggaaaaggttgcagtcagctgagatcgcgccactgcactctagcctcggtgacagagtgagactccatctcaaaaaaattcggcacggggaaagcgagaaggaggctcctcccctcctaagctgagccaaagcgaggcttaaagccacgaggcagttttaaggttcccaag

SEQ ID NO: 481729 - DNA, 453 bp, Homo sapiens
  misc_feature (57)..(57): n is a, c, g, or t
  misc_feature (93)..(93): n is a, c, g, or t
ttcagtatgtgtctctaaagttaatgatattatctcatccaaaaaagtgacttattnaatatcatcacatattcaggtagcattcaccatttnactccactgtctcaagtgttttttggctttgttttgttgtatttgtttttcagtatgttcactagactcaggctcttaagtttcttaagtctcttttaatcaataagtttcttctccatctctgttttttttttctcttttcctcttacaaattgaagaaaccaggatttttgaactatagtttcccacattttggatcttagtgattgcatcactggtgttttgaagacattttcctttctgctatatttttcttttttttttattattatacttttttttttttttttatggaggttgcaatgagccattgcattccagcctggatgacaagagtgaaattccatctcaaaaaaagcg

SEQ ID NO: 481730 - DNA, 353 bp, Homo sapiens
cacgaggagcattgcaagagcgtttggtggccctctgagtcatctcttctcctcacgggacatcccagcatcttcatggatcctcagaggcacggggggccaccctgaccaccctcctcagagtgaacctctgtctatgtgtccttcttcatatgtggtggccagaaaccagatcatgtgcacagaacagacaggctctggaagagtgattgcaaagtggggacctggaggcagccagcggggagtcctgagaagtacaagacccagaggtctattcagagagaaaccaaacagtccagagacgtggtggccacattcccctcagcactgtgagaaacaactctgttttacag

SEQ ID NO: 481731 - DNA, 779 bp, Homo sapiens
  misc_feature (681)..(681): n is a, c, g, or t
  misc_feature (743)..(743): n is a, c, g, or t
  misc_feature (757)..(757): n is a, c, g, or t
tctggtcaaccatcaaaagtgccttcccaagtctcacctgtttttcacctcttctaggacctttgacaactgtcttgttacaaatgtttggtccttgcttctttaacctcttagtaaagtttgtgtattctagattaccacagttccagagacaatgctggcacaaggcttccagcccatcctgtccactgacacggagaatgaaatcgtcctgcctctgggctccttagatcaggtatccagagatttttactcctccagtgccaggcagggcctacgtccataaactcagcaggaagtagttacggaaaacagatctccgcccttctgcagcccccttaagattaaggaggagtatctaatctctgaagggggaatgaggtaggaggtgggactcaactctggaagtggggctcaggcactcagaccaaactgagcactagctaaaataggtccagggcagatgctagtttccataggacacaccgacctgtgtcaagtcagttcaccatggctctggcagcacccagaagttaccaccctcaccctggaaatgtctgcataaactgccccttcatttgcatataattaaaagtggatacaaataccactgcagaactgcctctgagctgctactgtgggcgcacagcctgtagggcagccctgctttgcaaggagcancgcctctgctgctgctgtgcacagcggccgcttcaataaaagttgctacaccactggcttgnccttgagttccttnctgggcaaagctaagaccctcc

SEQ ID NO: 481732 - DNA, 233 bp, Homo sapiens
attttagggggtattttggggttccctattcctggatggcccccaaggggaattgccattttttttggttttttcggttaattctatttttttgggggtaaaatcctttcaaagaagggaaatttttttttttttttttttatttaaaaattgggggattttgggttttttcccccctttattgtcaagggttttttttaagccttgtttttaaaaaaagattttttccccta

SEQ ID NO: 481733 - DNA, 259 bp, Homo sapiens
gctatactggcagtgttttacactctggaaactagtctataatggccggtcgtttattgcactcggaatgcttcaatcccagagcttcgttatcagcctaggcaacataccaagactcgatctctatcaatttttggggaaaattgaccaggcgtggtggcattaaccctgtggtcccaggtacttgggaagttgaggtgggatgactgcttgagcctggaaggattggggctgcagtgagccgtgatcacgtcactgc

SEQ ID NO: 481734 - DNA, 816 bp, Homo sapiens
agcggacgggtgcccggcgaggctccccaattgacgtggtgtgcttcaggacgtgcggctccaacggtgggctcttcgaccatggtaagcgtgtaggactcccgggccacaacggtgctccttgctcgcggttcctcgtggtggtccctctctccggcgcggtcctgtggggaggggcccaattcggtgccgtgcctgagcctagcggtgagagcggatgacctcgaaggggtctggaaccgtgtggcctgtcgcggtgtccagtggtgaccagcgctggggctctctgacggtgtggtgccggccgatcggtgcttgcgtgtcccatcgtgacggcacgtgttgccttacgccacgtggcgactcggtcgtgtaccgtgacgtgcttcagaatcgattccggccatgtacgcgagccgaacttgcgagacgaagctgttcctgcgaagccagtcctcgcgacagctggtggtgtggcactgatccattggggcttttgcagcgattgcctgggcctttcctgtgcgcgtcggatgagggcccgtccttgaatatggcttggacttagatacaagctggccttgcagcccgcgggcgctccgggcacacgcgtgctggtgaatgactacggccgggggggaacggcggagccgctcgagcccggggacccagaccttcctttcctggatagggtacgctgtgcacgttgaggcctggcgtgggaccggccatccatgcggtcgaaggagaaccgcgtgcaaaactcgtatacaggcaggggccgagccgaacaaatgttcactcctaatcgtccaa

SEQ ID NO: 481735 - DNA, 135 bp, Homo sapiens
tcagattgacacgtcgaatgtgcccccgtcccaggtcaaatgattagcacgttgctgctcccccttgcccgtatctgtcgcaggccgtaagctatggcggcggccagtgggctcgcttgatgatcctgcagcacg

SEQ ID NO: 481736 - DNA, 341 bp, Homo sapiens
ctaagatattccgagggaagggcaccaggccacctcccttccgcaggtctgtcagattaagggtcttccgaatgaaatgccactgtgcattttcagacaaaaaaatctctgataaacagactatgaatggatgttcgttcctcccgattcctcttttctcttcgtggcgacttagagattggcggatattcggaattgtgaatgtacattgcgtcgagttaaaccccttgtgtgtgagacaggacgcatcgggcccctggtggcctgggggccagacccgtgggcaggtggggcatgggccctggcctgcggggacctgctggggtaagagggctaggaag

SEQ ID NO: 481737 - DNA, 877 bp, Homo sapiens
  misc_feature (29)..(29): n is a, c, g, or t
  misc_feature (62)..(62): n is a, c, g, or t
  misc_feature (66)..(66): n is a, c, g, or t
  misc_feature (77)..(77): n is a, c, g, or t
  misc_feature (82)..(82): n is a, c, g, or t
  misc_feature (88)..(88): n is a, c, g, or t
  misc_feature (105)..(105): n is a, c, g, or t
  misc_feature (114)..(114): n is a, c, g, or t
  misc_feature (135)..(135): n is a, c, g, or t
  misc_feature (148)..(148): n is a, c, g, or t
  misc_feature (168)..(168): n is a, c, g, or t
  misc_feature (173)..(173): n is a, c, g, or t
  misc_feature (175)..(175): n is a, c, g, or t
  misc_feature (179)..(179): n is a, c, g, or t
  misc_feature (185)..(186): n is a, c, g, or t
  misc_feature (209)..(209): n is a, c, g, or t
  misc_feature (211)..(211): n is a, c, g, or t
  misc_feature (216)..(216): n is a, c, g, or t
  misc_feature (226)..(226): n is a, c, g, or t
  misc_feature (316)..(316): n is a, c, g, or t
  misc_feature (414)..(414): n is a, c, g, or t
  misc_feature (513)..(513): n is a, c, g, or t
  misc_feature (521)..(521): n is a, c, g, or t
  misc_feature (554)..(554): n is a, c, g, or t
  misc_feature (571)..(571): n is a, c, g, or t
  misc_feature (584)..(584): n is a, c, g, or t
  misc_feature (674)..(674): n is a, c, g, or t
  misc_feature (684)..(684): n is a, c, g, or t
  misc_feature (689)..(689): n is a, c, g, or t
  misc_feature (755)..(755): n is a, c, g, or t
  misc_feature (859)..(859): n is a, c, g, or t
ataaagcaatatatgtatatatatttttncagaaaaacaccagaggtgaatttctacaaaancgcntgcctccccancagancatgtntgcctgattatcaaganttctttttngtaacattaactctctaaagncaatcgagggggncgggggcatcactgctacancccangncgcnaactgnncctctggtcttcagccacatctngnttttnctaataatgngtaaatactgcctgggtaaaatgctgcaaagtcttgatgagagaaagcatcaacagatcaagcaaagccatgaaaattatgaagcaagcnagagctgattattagaattagtaaaaatgattaagagaggatgacacaaccatacgggatttgtatattctgattgacactcttttggcagcgaattnggtcagcacctcgggcagggaaccaaaactgagtgaaaactgctctttttcctcctagctcaggccaccaacgtcacagccgggactgagagaactgcngcatctgnggaaacttctattctcggggggcagagattgcnctgtgaaaccctaccgncactaccccgganggccctggcctccgaggtgtctgcagcgtgctgccttcgccggggcttttcagaatgggccggggcctcgggggtcttcatccccaaggnagcctcttgnttttnggcgccgcctttgtttttgggccggacgccgttttgcggctgtcttctgtgttcgtggcggctgtngccctttcccagtggctcggcttcattcccactgccctgcgacttggcaggcccatttagcctgttgttatgatactgtggattaaatctccgtctttggttanaagatccattctgcttgt

SEQ ID NO: 481738 - DNA, 282 bp, Homo sapiens
aacgatggtcctcagcttgggcaagagcgagactccgtctcaaaaaaaaaaaaagacccgtctctctacaaaaaatgaaaaaactagcagggcatagtggtacaaccggtagtctcaactactggggaggctgaggcaagaggattacgggctgcagtgagctgtgatcatgcccgcctcagcctcccacagtgctgggattacaggtatgagccaccacgccgggcccattttttttttttttttgggacaattttttttttttgggaaagggggtcgtgt

SEQ ID NO: 481739 - DNA, 514 bp, Homo sapiens
ctccggaaatcatgagactgacagaacagatcttgtggcaataagaccccaaataatcaacaggacctagggctcatgccaggcaagggtaagtctatgtcaccctactcttaaagaataaactagattctaactaccacatagtattcatttttctctagcagccaagcaagcactggctatgagagaagcaagattaaaacaattacaacacacccagctcacagacactgagtaactgatctcctgccccaccgaccttaacgacagctttcactggacaagggactgatttcagtaactttctcctgataagagacgatcctccatggactggttctgcccagttttagaggctgtgcctttacagaggctgagtaccttcattccctgcttcactttttgatgtgtagagcctaattataacacatttaaatgtcaagtctccaccccagaatgaacatgcatgtttattcaatatgcatgtgtaaggacctcttttatgagtatactc

SEQ ID NO: 481740 - DNA, 194 bp, Homo sapiens
  misc_feature (7)..(7): n is a, c, g, or t
  misc_feature (165)..(165): n is a, c, g, or t
cagcctncttagcccctcagccctcagccgtcagccccctcaacccctcaactccctcagcccctcagccctcagcctcctcaatccctcagcccctcagtgctcagccccctcaaaccctcagcccctcagtcctcagtcccctcaacccctcatcccctcagncccctcagctccctcagccctcagccctt

SEQ ID NO: 481741 - DNA, 204 bp, Homo sapiens
gtgacccagaagttataatccacttcataagggctcactttcatgatctcatcattttaattatccatatctcaaagagctcacctcctaatactctcactcgggacctaggacttccaaaactagaaagtttcggcggcgatacaacacacctcacttccactaacttgctacttcttctcctgctgctacggataaccacca

SEQ ID NO: 481742 - DNA, 817 bp, Homo sapiens
aggctgggtttgatcggccgaggctgagcctgggctggtgcgcgccgcttcctgtcgccaccctctctggacatgcccagtgcctgcatggctcatgccctctccgcgtccatgtgctgcttagatgtgtgctctgctgcctgctctgctgctgctgctgcctgccccgtgctcttagcccgaccctcgctcctgctcctgccgtgtccctcatgctgctggcctcctgcccccctgatctccttgccctgcctgcctgcctccctggagcagcatgtgactgtgctgctggtggtgctgatgtgatggtgcttggcacctctgatgtgctagcatgtgctgccatgcagtggagatcttgtgctgaaaactcaaatgaagataaatgcaccccaagtagactgtagacaaatgcatgtggctgagctcaaagcccgcaatgagtggttcttgtgaatgcaaatgtgagctgtgcgttacatgcccaaagatgatatttgtaggacctgagcaacaaactggacagataccctgaagaggaggtttttctatgatcaagcttttgctatttatggagtgtgtaagtggtctgtatgactttgggccagttggcttgtgcttttgaagaacaatattattcagacctgtgaggcagcactttatccaagaggaacagatcctggagatctgatttgcaccatgctcaccccctgagccagttttaaagacctctggccatgtagacacatttgctgacttcatgctgcaacgacggtcaaaatggccatgtttcgtgctgacatctataaaaggtcaa

SEQ ID NO: 481743 - DNA, 125 bp, Homo sapiens
cttgcgaatcacataatggcataccagatacagggagacacaaacatgctctgtgtaaatagaactacaaccagttgttgactttatgtttcacagtggctcccctatccccatgtgctgtgtag

SEQ ID NO: 481744 - DNA, 219 bp, Homo sapiens
acgatatttccaaggttattggttatcttccagggtttttatagtttaaagttttacatttaagtctttcatctatcttaagtttgttttctatatgggataaagaaggggctcaatatcaatcttctgcatatggctagccagttatccatcaacatttattgaatggggaatctctccccgttgcttgtttgtcttgactttgttgagatcaaatgg

SEQ ID NO: 481745 - DNA, 187 bp, Homo sapiens
aaaagtcctttttctcagatattgctgaagtattcaggggcgacgtgacgtgtgtagatatataacatataaacaaatgtgacaaactattaattgctttgaaatttattttcttttttttttttttttttatattatttttttattatttttttttttttttttattattatttttttttattttt

SEQ ID NO: 481746 - DNA, 192 bp, Homo sapiens
acccagaacagatcagccgaatcaaccctggtgatcaatggggtgacagatgtcgcagctagatcgtcctcacatccaaaatcatgtatgaattccatgaacgccacagcagaagctataaaaaatctcattaggagcagaaagcacaatgcccaaaaggcaaaaatgagaagaacttcaagagggggatcc

SEQ ID NO: 481747 - DNA, 1018 bp, Homo sapiens
tatgggcgtcgtgtgcagcaccgtgtggctcctgggcttgctccccgtcgtccggttggtgctttcgctctctccctggcttgttggttggtcgctcactcttggtcgtccccgcacgcgtgccagcatgcgctttgaatactgggtccccgcgcctgcgccttcttccggtcgccgtccggggtttctcctctcggggggcaagaccatgcacagtgtggcgctatcggcgcgcgacacagagatccgtcaggcactctgctacttactggatgctgtttcagttgattcgcgcaggcaggttagcttgcatagactggcgctgctcactcacgtgtcacgtgggtcgtaccactcgcgtgttgcagcaacagcacgcacccggtctcggggggttgggagttagatcactcatactctctcacccctcgacgacgttgtccgttcgaaatgcgagctgcacccagcagtagcttctggcgcgccaggactactctagtttcactcttgttgtccgttgttttcggcagctcagacgatcgagcgactggggtgttaggggggtgtgatattatatctgctcctgtcgtcgtattcctcctgcttggacacacaagctgctagtcgtgatttcattgatcctccccctggtcgccgattattgtctttgttcttaggagaccgatgagaagcacgagagaggacacgatccccactacgaatcttagcagtgtttcgctccgacgagaagaacacatcctacttgccctcctcgtcggtgctgctgtcgttttactctcacccccgcttatgacatcctctctgtagagaggtgtctgtgggctctagctgggactacctttcttataaccaagggggaggcacacacacacacacacacacacacacacacacacacacacacacacacactcttgatccctgcttccctcccccaagtgccgttctgtgatcgccagttcaaagttacgcacaggacactcaatttcttgccccc

SEQ ID NO: 481748 - DNA, 1035 bp, Homo sapiens
ggctgtacggcccggagattttgggagtccggaactggtgtcgtgtggtcgcatcgtgattgtgtccgcccggtcagccggttcggccttacggattatcgaggatgcagtgacctaggctttccagcgtgattgccagaactcgacgatcacatacagcatggatccccaaaatcaacatggcaggtggcagttcgttagtggtgatccagcagcctatctattggatagccgtcagagcattagactatgagagagagattcagcctactgctatctggtccttagaccagagtcaaggccataagaggcagcaatgaatacacagaagggccttcggtggtgaaaagacctgctcctcggacagcaccaagacaagaacagcctgaccggactcatgaacatcataccaattactgtgaataataactacgagcacaagacacacaagccacctgggacatgcagtactcccaagtaatgccaggggccccatccgagcagatcaaccagcacggggcaagtgccagccagctctgggagcaacagcagtgcctctcctgcaacagggactggcccgcacgggccacccaccaaccacgacccacgccccgggatcccatcacgccctgacacagggccaccacacgcaacccaagcaccacacaccacactggactgctcccatcccctcgcacagcggccaccccagacaccgccgcgcaccctgcaccaccccccccaaggtcaccactccggccaaccccgacctccgagaaacgccgcacacaccgacggccaccaactagccactacgccaccaagtgaacccctaccccaccccgtgctagggccccagggtacacccgtcgcccccacgcccccaccggcaccccgcccgacacaccccatcgcgcaacacccccatccacacaccctgcaaacaccaccaacacccccacgggccgaccacacccaaaagcacctgcgacaccaacaccaccaaccacacagccggaagtccccgaactcccc

SEQ ID NO: 481749 - DNA, 1413 bp, Homo sapiens
  misc_feature (565)..(565): n is a, c, g, or t
ctgaaaacaagttcataagatgagaaaaatctacgagacttcttgatttacaacactgctagccccctttcctcccagactctgacatggatgttccagtgcgagacttaagtgtgttggtccctgaagctttgctgtgaatggttgtcagttctgtgtgtgaaactctgacaaactgaagaaaggtttcaatcgttctctactgaaagagattcgtcatgcaaccaccgatagatcatggtgagatctccatgcgagacaagcgtgtcgctgttacacttctttacttgtgatgtgtatgtggaggttgtagcatacgggtcgagtgggcgtgacaacttggtgtaacctatccgttctcaattgtatccatggtgaaggtccaacgtgttacagtctctgcagtagggttggtgttgtgagaatgaaacagggcccattcgtgaggttaaggatgccatagattactatcgaagtagatcaagaagtaataaataaacaaaataaggaggaaagcgggtaaggagattatagtatccccagaatcatatttaacacaacaacnctgacattactcgaaagcgctgcgaaaatcttgggctttgtcacgagacatggcgttgctctctacagttcgccatagatagtgtgccttgtattctcctagacatcgtcgcatttggcgcacagcagaaaaatttacttacgcctataatctcatttagagccacgatcttggcctatcggtccgatcgctttgtccctcatatagggttggcgctagaatggtggcgtggcgaccacactcgcggaaaaccttctgcagcataacgtggattccggtaaaggcctcccaagggcgtggcgcatttcggcctggcccccgtataggggccgaagtggtcacagggttgtggccctgtttattgccgcgcaggcagcgctggcgccccattggtggcctgtggccattctggggcccccggcgtgctcagagacgagcgacgggggtaatgggcttcaagaaactttggtggctttgtatcccacggggacaaagacaagcgacccacggcgggaggacttaaaagtggataacagccaggtacatggcgcacgagacaaggacaccctgtaggggggcgcccctggtcgacctatggctggcctcccgcctccttttaagcagacggggacacgacgaccgacggagaactcctcggccacacggcgggaacacaacaacagcgtgcgcgacacgaggcgaagccccgcccaaacgaaggagacgagcaacacaatgtgcgaccagcgcccactatcatcgccgaacaacgagagagacgccaaacgaatgggtcaccccccaaacaatgtgtcggagctgacacaaacaagcaggccccgaattaa

SEQ ID NO: 481750 - DNA, 284 bp, Homo sapiens
gctgacaaatcataaaaagacaaagaatagccgggagtggcggctcaagcctgtgatcccagtactttttgagaggtggagacaggaggatcacatgagcccaacagttggagaacaacctgggcaacacagcgagaccctgtttctacgaagatttcaaaaattcgttgagcatggtggcatgtgcctagtcccagctcctcaggaggctaaggaaagaggattgcttgagcccaggaattagagtgagctatgatcatgccactgtactccattctggggga

SEQ ID NO: 481751 - DNA, 231 bp, Homo sapiens
  misc_feature (49)..(49): n is a, c, g, or t
  misc_feature (126)..(126): n is a, c, g, or t
  misc_feature (128)..(128): n is a, c, g, or t
  misc_feature (138)..(138): n is a, c, g, or t
  misc_feature (181)..(181): n is a, c, g, or t
  misc_feature (186)..(186): n is a, c, g, or t
  misc_feature (189)..(189): n is a, c, g, or t
  misc_feature (214)..(214): n is a, c, g, or t
tgagagaccgtgttgcaatgagtgagtaaccttcagtgaagcatgagtnaaacccagagtaaggtgtgagtacatctcaaatagagtgtgactacaaccagcgcaattgtgcgtaaaacccacagnantgtcaaagtnaaacaggcgtaaagtgtgagtaaacccagagtaaatgtgagtnaaacntgnaagaagttgtgagtacacctggcantgcaacacggtctctca

SEQ ID NO: 481752 - DNA, 373 bp, Homo sapiens
gtgatagctgactctatgaggatcaacgagggcctgcgaaccattcatgattaagtttgctgtatcttgatgataaaaactgaatggggccggccgcagcgtctcacgcctgtaatcccagcactttgggaggccgaggtgggtggatcacaaggtcaggagatcgagaccatcctggctaacacggtgaaaccctgtctctactaaaaatacaaaaaattagccgggcgtggtggcgggcgcccgtaatcccagctactcgggaggctgaggcaggagaatggcgtgaacccgggaggtggaggttgcagtgagccgagattgcgccactgcactccagcctgggcgacagagcgagactgtctcaaaaaaa

SEQ ID NO: 481753 - DNA, 2138 bp, Homo sapiens
ggttgttaccgaggttttcaaacagtgaagcatcgaaatgagaacacatgccctctcccacaagaaatgaaagctctgtttaagaagaaaacctatgatgagaaaaaaacgtatgatcagcaaaagtttgacagtgaaagggctgatggaactatatcatctgagataaaatcagctagaggttcacatcatttgtccatttacgctgagaatagtttgaaatcagatggttaccataagcgaacagacaggaaatccagaatcattgcaaaaaatgtatctacctccaaacctgagtttgaatttaccacactggactttcctgaactgcaaggtgcagagaacaatatgtcagagatacagaagcaacccaagtggggacctgtccactctgtctctaccgacatttctcttctaagagaagtagtaaaaccagctgcagtgttatcaaagggtgaaatagtggtgaaaaataacccaaatgaatctgtaactgctaatgccgctaccaattctccttcatgtacaagagagttatcttggacaccaatgggttatgttgttcgacagacattatctacagaactgtcagcagcccctaaaaatgttacttctatgataaacttaaagaccattgcttcatcagcagatcctaaaaatgttagtataccatcttctgaagctttatcttcggatccttcctacaacaaagaaaaacacattattcatcctacccaaaagtctaaagcatcacaaggtagtgaccttgaacaaaatgaagcctcaagaaagaataagaaaaagaaagaaaaatctacatcaaaatatgaagtcctgacagttcaagagcctccaaggattgaagatgccgaggaatttcccaacctggcagttgcatctgaaagaagagacagaatagagacaccgaaatttcaatctaagcagcagccacaggataattttaaaaataatgtaaagaagagccagcttccagtgcagttggacttggggggcatgctgacagccctggagaagaagcagcactctcagcatgcaaagcagtcctccaaaccagtggtagtctcagttggagcagtgccagtcctttccaaagaatgtgcatcaggggagagaggccgccgcatgagtcaaatgaagaccccgcacaatcccttggactccagcgccccactgatgaagaaagggaagcagagggagatccccaaggccaagaagccaacctcactgaagaagattattttgaaagaacggcaagagagaaagcagcgtctccaagaaaatgctgtgagtccagcttttaccagtgatgacacacaagatggagagagtggtggtgatgaccagtttcccgagcaggcagagctgtcagggccagaggggatggacgaactgatctccactccttcggttgaggacaagtctgaagagccaccaggcacagagctccagagggacacagaggcctcccaccttgctcccaatcacaccaccttccctaagatccacagccgcagattcagggattactgcagccagatgcttagtaaagaagtggatgcttgtgttaccgacctactcaaatgatgaatttgaatttatgagagttcttgcctgtgtgtctgtattttgggtaaggaggggaggtctgaaaaagactttggggctttttcttctgtttttcatgacaatgtaatttgtgtaactgttgaatctggaaattgatcagcattaaagggcacatgaagcagtgtctgcaggcgttcagtgctgcggagcctgttaaaggtcactcagatgtgcaggtgttaatcttctctaaaagcctggtgatacagctctggctttctgagcacactacggatctggaaaatactggaaaatgtgatacttagaatactttggctgctaaggaaacttcctctccattgcagaatagctgagccaagtgagtgagtttgcagaaagcaggtggtgagctcctgcctgctggaggttgccatggagggccattcctgcccggcaacagcaccgtcctgcagggagccacttggcagaagggtgcagggctgctggtgtcagagcaagagggctacagggaaagggccctttctcagggg

SEQ ID NO: 481754 - DNA, 1368 bp, Homo sapiens
ggttgttaccgaggttttcaaacagtgaagcatcgaaatgagaacacatgccctctcccacaagaaatgaaagctctgtttaagaagaaaacctatgatgagaaaaaaacgtatgatcagcaaaagtttgacagtgaaagggctgatggaactatatcatctgagataaaatcagctagaggttcacatcatttgtccatttacgctgagaatagtttgaaatcagatggttaccataagcgaacagacaggaaatccagaatcattgcaaaaaatgtatctacctccaaacctgagtttgaatttaccacactggactttcctgaactgcaaggtgcagagaacaatatgtcagagatacagaagcaacccaagtggggacctgtccactctgtctctaccgacatttctcttctaagagaagtagtaaaaccagctgcagtgttatcaaagggtgaaatagtggtgaaaaataacccaaatgaatctgtaactgctaatgccgctaccaattctccttcatgtacaagagagttatcttggacaccaatgggttatgttgttcgacagacattatctacagaactgtcagcagcccctaaaaatgttacttctatgataaacttaaagaccattgcttcatcagcagatcctaaaaatgttagtataccatcttctgaagctttatcttcggatccttcctacaacaaagaaaaacacattattcatcctacccaaaagtctaaagcatcacaaggtagtgaccttgaacaaaatgaagcctcaagaaagaataagaaaaagaaagaaaaatctacatcaaaatatgaagtcctgacagttcaagagcctccaaggattgaagatgccgaggaatttcccaacctggcagttgcatctgaaagactttggggctttttcttctgtttttcatgacaatgtaatttgtgtaactgttgaatctggaaattgatcagcattaaagggcacatgaagcagtgtctgcaggcgttcagtgctgcggagcctgttaaaggtcactcagatgtgcaggtgttaatcttctctaaaagcctggtgatacagctctggctttctgagcacactacggatctggaaaatactggaaaatgtgatacttagaatactttggctgctaaggaaacttcctctccattgcagaatagctgagccaagtgagtgagtttgcagaaagcaggtggtgagctcctgcctgctggaggttgccatggagggccattcctgcccggcaacagcaccgtcctgcagggagccacttggcagaagggtgcagggctgctggtgtcagagcaagagggctacagggaaagggccctttctcagggg

SEQ ID NO: 481755 - DNA, 960 bp, Homo sapiens
ttagagtggtactttcagctgtgacttactacagtgaaaaggcacaaagcaaaattagcaaagcgaagaggcacatggggttaaatgtgggggaaaccaggctccagcttccaaaagtcacttttagtgacatcacataggagactcttaatatcccagagacaagttaagagcccgtgggaagtgttgtctaccaggggtgctcattagagactcagcgcctagggttctgttggggggccggtcacacaggctccctctctcatgctgctggttttcttacaggagttttcctacttgttgatgcctattcctcactcgtgctgttttctcattttagttgaaatctggaaaaaacatctggaagcatacagtggatgtaccctggagctagaagaatccttggaggcttcaacctctcaaatgatgaatttgaatttatgagagttcttgcctgtgtgtctgtattttgggtaaggaggggaggtctgaaaaagactttggggctttttcttctgtttttcatgacaatgtaatttgtgtaactgttgaatctggaaattgatcagcattaaagggcacatgaagcagtgtctgcaggcgttcagtgctgcggagcctgttaaaggtcactcagatgtgcaggtgttaatcttctctaaaagcctggtgatacagctctggctttctgagcacactacggatctggaaaatactggaaaatgtgatacttagaatactttggctgctaaggaaacttcctctccattgcagaatagctgagccaagtgagtgagtttgcagaaagcaggtggtgagctcctgcctgctggaggttgccatggagggccattcctgcccggcaacagcaccgtcctgcagggagccacttggcagaagggtgcagggctgctggtgtcagagcaagagggctacagggaaagggccctttctcagggg

SEQ ID NO: 481756 - DNA, 94 bp, Homo sapiens
attctagttatcttaattgaatttgaaaactttttcaaatgcattaagataactagaatggattatggtgtaaaaataaaaaaaaaatttattc

SEQ ID NO: 481757 - DNA, 360 bp, Homo sapiens
  misc_feature (339)..(339): n is a, c, g, or t
tttttttgaggcagagtcttgctctgttgcccaggctggagagcagtggtgagatcacagctcaccacagccctgaaatccagaggtcaagtgaatctcccatctcagcctctcaagtagctgggaccacaggcacatggcaccacactcagctaatttttaaattttttgtagagacaggggtctccctgtgttgcccaggctggtctcgaactcctggctcaagcaactctctcgcctcagcctcccaaagtgctgggattacaggcgtgggcccatccagtaactcatttttaatggaacacctttaaaaaaattacatcttcactcctcatacanttgtttgcattcatcagaatt

SEQ ID NO: 481758 - DNA, 212 bp, Homo sapiens
gctcccagagtgtaggatacaggcatgagcaccatgcccggcaggaacttgtatctggcaaggaaacatttcaatattggtatggaaaaaaaaaaggtgtttagttgaacttttatttctcttaaagtcctactcatgggttcattcctgcacttaaaagaaatacaaacggagtcttctctctcctcaaaatatggaaaccaagggggagg

SEQ ID NO: 481759 - DNA, 401 bp, Homo sapiens
ctccacagcaccggcttatcaaaaactccgtggcccctctgtgagcccatatttcttggaagccacatggtatcgcgccatgcagaccatgttacgcgtcatacacaaagctttgcttccaaagtcacataacctggttagtttccagcattggcctttatccatctcaagttagaacgcgttattcaactcaatcaagtctggacctaggggatatttggacgctggccataccggtcgcggttctctcggacacttaggcgctctcatgataggacccggcaccacatatcacacttttgtcaggcacagccagacacagccgcaggccggcgcacaacagcgtagccaacgaggcatgactctttaagagcgtgcacagtttagccgagagcacagtg

SEQ ID NO: 481760 - DNA, 120 bp, Homo sapiens
cattcaggtttctatttttatttttattcaacacaagcaaacagcacaattaagcaacattcagcaactccagaccagcttttcttaccccccagaagaacgaacaatttaaaaacaaga

SEQ ID NO: 481761 - DNA, 690 bp, Homo sapiens
ataaaacaatttaatgatggcttccttgatttacacacaactctaagacaatgatgtgacaaaattattctctccatgcactggtacaactgaagttcatggaacaagagtgcaacccaagtacatgtgggctgtgtgtgttcagatccactgctcagcctcgagtctcatgttccaacctgaccgtctggctcagtgacttgtgtgacactggtggagaggagtggactgcccagacccctcaagtgcagtgtgatggtggacctggcatgcagatgtatgcatgggcactccatgccccatgttgcgagaatgtgcacaggggagacatgcagaaacaccatgcttccaggtgcaccctgaaagacccatgttggtgtctcatgggggtgcccatgctctcccatcatgatgcttgtcctcaggggctggagctggttgctgggtgcatgaggcagctagggtgcgtggagatgtggagtgtggtgataaagaaccacatgcagaatagtgacccacatgctgaattgctaggtgccattgctattcctcccagacactgagttcctgaagacccagctttatcttccaaggtgtatcaacattcccaagatctcaaagctggaaggcggcaagatgtggagcctgtgagagacagatcgaatccagtcctgaggccgcctcaatgtc

SEQ ID NO: 481762 - DNA, 517 bp, Homo sapiens
tactgccgggcctctactgagggagaggggccatgctggggcagacctggcatctttagaggtgtgcccctggccaggcatttccccctgtggccattcatttgctcacatcatcacctgtttacctgttcagcccttccttcactcgccaggtcactggcctgttcactcttccatttcctagtcctctgtccgttctttgtgctactagtgcttcctgaggcccactcagtgtccagccctgtgccaggcttggggacacagagtcaaacctgtgaggaccccactctgtaaactgtagccatcctgccaggtgcttcctagtgatggagactggtgctgtccaaccactggaagtgcttcataaaggacatgcgctgagcagggttttggaggatttggggatttgggtagatcgagaatagtggggaaggacactgctggctgcaagaactgcatggacaagcacagtggcccatgcttgtaatcccagcactttgggaggccaaggtgggag

SEQ ID NO: 481763 - DNA, 125 bp, Homo sapiens
cggatccccttacaccccacgactcccggggttggtggttgtggtaaacctttacattacgttgtacggacagctgacctcactttctgacacggcgacggggctcggggttgacttcgggagga

SEQ ID NO: 481764 - DNA, 509 bp, Homo sapiens
gtttaattcttaagtattttactcttttaggtactactgtaagtagatctttctcagtttccttttcggatcgttcaatgttggcatataaaagtgtaagtgccaggcacagtgtcacatgcctatagttccagctactcaggaggctgagacaggaggatagcttgggcccaggagtttgagatttcagcatgctatgattgctcctgtgaatagccactgcactccagcctgggcaacataacaagacctcatttcgtaccaaaacacataatactgattaccgtgcatcggttttgtatcctttgctgaacttgtttattctaacagtcttactgcgggggtgtgctgggatctaggatatgctagatacaatcatgtcataatgctaacagattttacttcttccaaatctggatgtcttttatcacttgttcttgcctaatcgctgtacctagaacttcaaatactgtgtgaaggacgcgaggcaaaacacaaacaagcaacca

SEQ ID NO: 481765 - DNA, 1071 bp, Homo sapiens
  misc_feature (438)..(438): n is a, c, g, or t
gggagggactacggctaggtagctgaggccctcgtgtttaatcacttaaacctgggagtgcggaaggttgtggtgagcagagatcacgccattgcactccagcctgggcaacaatgagcaaaactctgtctcaaaaaaaaaaaaaaaaaacgggtaaccagttgcttggaaaaaggaagctggataaaagaggggagggcttgtgtaaaaactctttcttgccttatgaaggccacacattcatctcatagaagactcccttgatcttcatatgctacctaagagggggacgacacaaccccttatttgttgtaatatctcccataagcaatgtgatctcataaggcaaggcaagggggtacattaggaaagtttgggacacatgtgaggggctatataggtacaacgtgatattaatgtggagatatagccgaagtnataaaagtggttgggaaaagtctgaggcgagggaggcatgtgtgtcattaaaatattaaagtgactttttactataatcattccggggaagtgaaaaaaggccaattataagaaaaattttagaggtgttaaacaagatatttaaaagggaactcaatgtgtatagaaatagatagatagtgattaggtagtaaaaaggcgaagggaagtataatacaattattgggtgtggatttgtgagctgacagttatataagattataacaatacaaaatatatgggaacttatgagaaaaagacaaggagcaaatttttaacaaatattataagaggaagaggtaaatacgttgaaaatgatatttgggtggggattataaatccagggaaagggatattatatcaaaattaataatattaatatataatatagaagaaaaaaaggacgattgtgagaaaaatcataattgtgacgacaaaaaaaagaagaaatgtgaataggaggaagattatatgaacaaagaggataatataaatgacaaacagctagtatatatgtacaagacatgtatgtatgagaatggtatgcgacacaggagataagaagtaataaaaagagagatgagataatatata

SEQ ID NO: 481766 - DNA, 133 bp, Homo sapiens
taaaaatggtgtgggggggtgtgcggggggagagagaggagagagagacttttttttgtgtgtgggtgaaaaagagagggggggaagaagaacaaaacagagagagaggagccgcggcggcgcgtggtgtgtg

SEQ ID NO: 481767 - DNA, 111 bp, Homo sapiens
tcgagctggtaccgcatctgtacttcgggggcttctctcttgttataaaacttttaccaagtgaaacatcgataccaccttgtttccattctcactggtgtaaatactgag

SEQ ID NO: 481768 - DNA, 199 bp, Homo sapiens
cgtgcttatttatacgagcgggggacgttcttacactatcaagccagggcactttctccggaccccttccctaggggactccaggatggagaccttctcccatcgcgcctttttacaatggtcggactggtcccggtgggcttcagtgatgggatagtacacttcactcagaggcattggcatctttaaataatttctt

SEQ ID NO: 481769 - DNA, 100 bp, Homo sapiens
tcccctaagctatgggactgggatcacacggcatgcatcatgccacatacatgggtatttgctggaggggagatggagactctctgtcctggatgtgaga

SEQ ID NO: 481770 - DNA, 179 bp, Homo sapiens
cgtatcaggcactgaggattgaggtggcaaatctggacggggcccaccggaaggtgttgctgtggcagaaccttggagaagccccgggccattgccttgcatcccatggagggtaccatttactggacagactggggcaacaccccccgtatggaggcctccagcatggatggctctgg

SEQ ID NO: 481771 - DNA, 127 bp, Homo sapiens
ctttgtagacgtacgtggtgttacgggctagagattgggggaaatgggaaatggggagtgactgctaatgggtatagggcttcttttgggatgatgaaaatgtcctgaagttgactgcagtgatggc

SEQ ID NO: 481772 - DNA, 763 bp, Homo sapiens
ccttcagcagcacattgatggtgcaccacattctgctgtccaatgctcctgtatgctacaagaagtctgtaacctccccagccctgtctgcttttttgcttctcttttttctgttctcgtccgggatcccgagactgtcccgcagctgtaccctgaggactcagaccttggactgatcaccaccccggcccccaaggccggcttttcccgtggcctggtggtagactaccctaccgtgcccaagccaagaaattctacctctgcttgttttctgggccttcgacccttatacccgaggggctgagtgaaaatccggatgaagttgaaccccggtagtctgtgttcacccatgagaggttccccttaaggatgtcgaggcgcgggaatggtgaggaagaatcgggcctgggtgctggagagagaaggagcggcaccggcgcccgggcacgggaaagtcagacctgacaccccgtacaccggccgcagcgccagccccgcttctaagtcaccaccgccggttctggaaaggcaccttgcctctgcaccttttctatattgttcagctgaccaagtagtattttagaaaagtttctaaagttataaaaatgttttctgccgtaaaaaaaaagttctttgggcccggcgctggtggctcacacctgtaatccccgccccttgggaggctgaggtgggaggatcatttgaggcccggagtttgagacctgcctgggccacataatgaaacttcctttcccgggagaga

SEQ ID NO: 481773 - DNA, 426 bp, Homo sapiens
acattccaataggaagtgcaaactagttcgacagtcacacttcagcaggagagagagatggtcttgggcgaaggcactttagtcagtgagctagacccagtgccggagttggtcttctcgtgactctgataaatctagacaccactctgttggagaaccagcactgccggcagctggggttagtgcactgactgagcgaggcatgaggcctgctcactggtagaacttcttgttagggctgttagcatggtcagctagcagctggcatggggtgaactgttttccataggcagcttcatatttcttgagccggtccactatcttctgggcgccatacagatccacaaagcggaaaggccctcccagacaaggcgggaagccaagcccaaagacggctccgatgtctccctcttgtagggaaggcca

SEQ ID NO: 481774 - DNA, 105 bp, Homo sapiens
tggatcccgtgtgtgttcttgggtcggtgtgggtctatactaagttgagatgatatcgttacgggggaaggcgcttcggtgggtcgttctctcggcgccccctct

SEQ ID NO: 481775 - DNA, 857 bp, Homo sapiens
gactggctatttattataaagtactgaagtcacatagccacctataaaacagcatagcaacatgtctgcctgtttcacaaacagtcatttctaaaggtcagagtgtccacatcaggcaccatttgtgatatgactccgagtggcatcatatttccattttttcaatgacaagacactccgaaaccgtttcagataaccaaactcatcattgccagaccgttcaccgttgtggaatgcaatcgttgtatatctttctgtgccatcacaacaacaatgccgttttctgccacgctggttgccattagtccatcttcctcacagcaccatctagaacaatcgaaacaattggtcgctcatcatatcaatctggtcaacaggcaacattctgcaagagaatgaacagtggcctaacaaagtcacacgatcttcacaattccatatcatgggacacagttacttggtggtacaagatgacaatggtacagaacaagttggcaacccctttcctatcctactcagacaacatataataagagaaccaaacataatcttctaagtcgtacacaacttctcaaacgcagaaacctatggggcgcttatcccagtggtacacccgtgtccagtcccttacaccggtatttcctctggacacccaacagatcaaactcggacaggcccatgatattcactataccccattaacgaccaccaaagccccacccattttccagcggacaaacactgtccattcacatagcgcgacagggagaacataattcctatttccttcggacattctccagatacagggtatacaccacacatcctatcaaccagctacactcaagcccacggtt

SEQ ID NO: 481776 - DNA, 375 bp, Homo sapiens
cctaaactcaacttcttgaaagaaaaggaaaggaacttatcatcctggcaatgtgagaatgcaaaccgtttttgcttcttgactggctacgcagactcccaaacatcccacctccactgccagcacagtggcccacacttgcatcaaagtcctggttgcaagcaagtacatggatattcccaaaccattccattagaaaaccgtcctccctgcacacagaacaaaaacagcgctatttcctacacctatgggacggaaagtgcttggacaatggaatgggcaacgaatatgacgaagaacacaaaccaagtagctgtggatcaacttggagggggaccctgaattcaattccattgccattgcgccagcggggag

SEQ ID NO: 481777 - DNA, 152 bp, Homo sapiens
tctagaggatcccggagtgcgatgtgtgagggatgataaattctatacagagaaggggagtaatcatcactggtagaaaacttgggttttattttttccaggtctgagcaattagggtgtataaaaaatggaatcggtctggcgaggacatc

SEQ ID NO: 481778 - DNA, 849 bp, Homo sapiens
  misc_feature (17)..(17): n is a, c, g, or t
  misc_feature (62)..(62): n is a, c, g, or t
  misc_feature (64)..(64): n is a, c, g, or t
  misc_feature (66)..(66): n is a, c, g, or t
  misc_feature (77)..(77): n is a, c, g, or t
  misc_feature (101)..(101): n is a, c, g, or t
  misc_feature (117)..(117): n is a, c, g, or t
  misc_feature (119)..(119): n is a, c, g, or t
  misc_feature (124)..(127): n is a, c, g, or t
  misc_feature (138)..(139): n is a, c, g, or t
  misc_feature (164)..(164): n is a, c, g, or t
  misc_feature (186)..(187): n is a, c, g, or t
  misc_feature (203)..(203): n is a, c, g, or t
  misc_feature (215)..(215): n is a, c, g, or t
  misc_feature (217)..(218): n is a, c, g, or t
  misc_feature (225)..(225): n is a, c, g, or t
  misc_feature (238)..(238): n is a, c, g, or t
  misc_feature (240)..(240): n is a, c, g, or t
  misc_feature (243)..(243): n is a, c, g, or t
  misc_feature (246)..(246): n is a, c, g, or t
  misc_feature (251)..(252): n is a, c, g, or t
  misc_feature (264)..(265): n is a, c, g, or t
  misc_feature (270)..(270): n is a, c, g, or t
  misc_feature (276)..(276): n is a, c, g, or t
  misc_feature (284)..(284): n is a, c, g, or t
  misc_feature (286)..(286): n is a, c, g, or t
  misc_feature (289)..(291): n is a, c, g, or t
  misc_feature (293)..(294): n is a, c, g, or t
  misc_feature (298)..(302): n is a, c, g, or t
  misc_feature (304)..(305): n is a, c, g, or t
  misc_feature (315)..(315): n is a, c, g, or t
  misc_feature (321)..(321): n is a, c, g, or t
  misc_feature (331)..(331): n is a, c, g, or t
  misc_feature (338)..(338): n is a, c, g, or t
  misc_feature (340)..(340): n is a, c, g, or t
  misc_feature (349)..(349): n is a, c, g, or t
  misc_feature (471)..(471): n is a, c, g, or t
  misc_feature (551)..(551): n is a, c, g, or t
  misc_feature (650)..(650): n is a, c, g, or t
  misc_feature (687)..(689): n is a, c, g, or t
  misc_feature (828)..(828): n is a, c, g, or t
ttctagacccccccagnaagaaaaaacaaaaaacaagatagaggcagcaaacacaaattctnangnagaggaaaggngcagttgagtaagacggctaaggnaactgagaagcctgangngatgnnnnctcccccttanncctcctcttccgcctcctcaccganatcctcctcctcttctgccgtnncatcctggtactgctnatactcagagangnngtcgttnatgttgctctctncntcngtnatctnnatcttgtttatnntctcntttgtnttccagtngnggnnngnntttnnnnngnntatgggagtnaactgntccgggatgngcttgangngctcctggntggctgtgctattgccaatgaaggtgactgccatcttgaggccacgaggtgggatgtcacagacggctgtcttgacattgttggggatccattccacaaagtagctgctgttcttgttctgnacgttaagcatctgctcatcgacctccttcatggacatccgaccacggaagacagcagccacggtgaggtatcggccgtngcgggggtcacaggcagccatcatgttcttggcatcgaagacctgctgggtgagttccggcactgtgagagctcgatactgctggcttccacggctggngagaggggcaaagccaggcataaagaaatggagacgnnngaaggggaccatgttgactgccaacttgcggaggtcagcattgagctggccagggaaacggaggcaggtggtgacacactcatggtggctgagacaaggtggttcagatccccgtagtttggtgtggtcagcttcagantgcggaagcagatatcataga

SEQ ID NO: 481779 - DNA, 524 bp, Homo sapiens
gtgacctagaggatcccggttgggggtagggttatttttggtttcaatcatttcactgctgattatataacaaaagctcatagtataatataaccccaccatatggctggaatttgattccagttggtcaaggctttcaatttcctgggaggaccaaaagtaacagaactagacacttaggccatattgcaaagaatattttctttcaattacataatgaatctctcagtttgagaaaataaggaaggatgtccgtgttctactgagatcactcacatctggtcgggtgcggtggctcatgcctgtaatcccagcactttgggaggccaaggtgggtggatcacctgaggtcaggagttcaagaccagcctggccaacatggcgaaaccccgtctctactaaaaatacaaaaaattagctgggcgtggtggcgggcgcctgtaatcccagctactcgggagcctgaggcaggaaaatctcctgaacccgggaggcagaggtccggcgagcaagaacatgccact

SEQ ID NO: 481780 - DNA, 220 bp, Homo sapiens
  misc_feature (201)..(201): n is a, c, g, or t
  misc_feature (207)..(207): n is a, c, g, or t
gagacatcaagtagcgtggagaccactgagacccagccactggagaccattagcctagggaggtcattggtgtccttgccaagccctgttttgattctgggtccaggagacagagtgtagtcagaggagaggaatcacagacagcccagtgcagacaacaggcaactctttcaaggagtcatcttataaagactgaagctnagaggntttttttcccagt

SEQ ID NO: 481781 - DNA, 862 bp, Homo sapiens
tcaattctgaccgtaatcgccgtgcaacctcgacctagggtggcccctcgcttgttccgtgtgctatcaaggccatttttggcccttctaccaaggtattggtttcttgagaggcaaaacttacgttcattcctgcaagaatggtgaaaaatgaatataacgcgaattgcgatagcgttggcccgcaacttgggaaataaatgggggaaaaaaatggcgttttccaaacaagtgaagtttaatctgccaatgtacgttattaatggaccaagacttcaggggaactagggaacagtccactggaaactggtgcggccccaaggacagttgagcttcttggttgaagtgaatttaacgcaatttggactgaagactcttgaagctatgttcggttaaacacctcatcagtctgccagcatgaataaaaggagaaatgcctgcctacatgtccttgaagacactccctatttgtaacgaactgtctgtagagtttgggacaatgctagttcttcctcgaagttccttccacatggactagcttcagtgaatgtttctcatgtaaaatagactgcttcttatgttgtcagccatcgaggaattttactcacaaggacttactagcgcccatatgttgcagaagcaaccatagacagtaattaaatagatgccaatcgagaagcacatgtcaggtcccaggtgacaacacttacttctagcagagcatccagcgtgtatagtgtgacacgaggtgaagaaggctgggctgggccagaacctgggaagcaaatcctatgacttctcctctatgtgaattaatggcacagccttttatagtctgaccaaatatcttaaagattatacc

SEQ ID NO: 481782 - DNA, 257 bp, Homo sapiens
atgatatttttttcaattgagtttttatgatataattttttaatgttatttttaaatgaaataattttttaatgttatttttaaatgaaataattttttaatgatgaaacttgttcaatgaaattatcaattgaacaatttttcaatgaacttggtcaatgatatttttcaatttataacttgttcaatgaaattttcaattgaacaatttttcaatgaacttggtcaatgatatttttcaatttataacttgttca

SEQ ID NO: 481783 - DNA, 519 bp, Homo sapiens
  misc_feature (33)..(33): n is a, c, g, or t
  misc_feature (43)..(43): n is a, c, g, or t
gttccacccacacacccacttttgaaaccattngaagggccgntggacttcgtgtggacacccgcggacgcggccaatatggccgcgggcagacactgaacctcttttgccccggatccagcgccatggtgccctccaggaagttcttcgttgcgggaaactcgaagatgaacggtcggaagcagagcctgggggagcccatcggcactctgaacgcgcccaaggtgcacgagcgacaccgaggcggctagggctccccctactgcctatatcgacttagcccggcagaagctagatccaaagaccgctggggctgcgcagaactgctacaaagtgactaatggggccctctactggcgagacaagccctggcaggatcaaagaccgcggtgccacgagcgcgaaccccgcgcactcagagagaaccgccgtgcttcgcgcagacacgagagcctgactgcgccaccgcggcccccgctttgggcacgactactcggcgtttcacccgcttggggggcg

SEQ ID NO: 481784 - DNA, 490 bp, Homo sapiens
  misc_feature (75)..(75): n is a, c, g, or t
gagtactctagaggatctggatgaggacgtcactgcacagtatgccacaatgtgagatgatctgaatgatacacnaaaaggcctgtctcttctgcatgtggacaaaagtggtagctgaactgaactaatattaggcatgtcagcaatacaattcaggtgacgtctgcaaataactccatgtactcttcacaatggatcgacctagctactcaggaggctgaggtggaataaattgttgaggccaggagtaccagatcagcctgggcaacatcatgcgaccccatctctaaaaacatctttttaaaaatgagccaggtgtggtagcatgcacccgtagtctcagctactcaggagcctgaggcaggaggatggtttcaacataaggagatcgaggctgctgtgagctatgatcgtgctactgccctccagcctgggggacacagcaagttcctgtttccaaacaacaacaagaaaacaaaacaaaacaaaa

SEQ ID NO: 481785 - DNA, 401 bp, Homo sapiens
agataatgtattacattatcagcttaacgctttcaaacactacgggaggcattatatctgtacacatagacttaagtcaacacatatactaagctgtaactagtctgccttccattagtttggtctctcagcactataaaatgtcgacttcatatcagtctatgcagcaccagtgacccccttttcagcaggcatcggtaatcacattaggcaaatgtcttgcacacatgcattgtaaattaacataggtagaaccttgataatcaagcagtcccaaatatgtcttataacacaatgttaacattaggcaacacaatattataatcatcagatctatttcctgaaaaagttcagttgaggtaaatccgttgaggggcaaaaattcaagccgggtacagagc

SEQ ID NO: 481786 - DNA, 1566 bp, Homo sapiens
  misc_feature (35)..(35): n is a, c, g, or t
tcgtatcgttatcgatgtatttagtgtcagcaggncagtgctcatcgatatataattcatctcatgcgtcgtgtgctcgtagtgtggtatacagtcatcatttgttggtggtgtccaacattaaaatgttcgtgtggttgtataacctcgctgtgactcgttagtgcctcttttaggatactttgtataaattttcttgtggtggctgctcccctactctcttgttttgcttaataaaacgccccctagtttctccctaggagctttctcacgtggattattggaaaagtcctcctggctgttttgccaaccccttttgatggttccttcccgggttatactccccctaggtttgtttctcacatggcgaaagaatattgtgcctccccaagagggggaacgttttctttcccttgagaggccaagtggtgcgctccccgtaggtagcgtggctgaccccctctgatgtgccagcaagttttgtggctaccactcttctggcccgggggagttcacaacgtttgtcccacaaggggggctttctgcaaaggaaattgtcccacaaaaggggtgcttccgacgcaccgtgtctttaagatgatggtataacccccccccctcccccggttgagggaattgccccccgtcgagtaacacccgtttcccgttacattttcgtggatgaaaaaaacaagttgggcctatttttccccccccaatatacacggggaattttctcctatttcccccctatggggaaatcttctctctccccgagtgctcgtaaaaagtcgctctttcaaaacgtatgaacccccgacgggggaaagtctggctgtaccccctgtcgcggccccccctttttctcgtgttggcctgtttcacgccctctctttgtggggtttatcgaagctttcactgtgtactccgcgtgttgagcgccgcgcgaacacacaccccttttgtcccacactcgtgtccgcgcagggctccacgttggcccacgggtgccctttgaccccctcttagtgggagaatagcttcaccacaggtgcacacacacgaagtggggaccccgctggtacactcgcctgtgttctcgagaccccccattcgtctcgtttctcggtgtgccgcccacttgttttggtagctattataagtctctaaatcttttaatgaagggccacacgggtcctagttgttcgaactcgaagccctcacgggatcgatctcttgaccttattgcgcccaccacgatggaactcaccttgcccacacgatccgatgcggcgatcccccctacaacaagcctcaagtcacacttccaagccccctaccttgttctgtgcaattccgcgagggcaagcttctggaagcggggtctttctcggggaatctggcgccactccgccgggagatccacgagaccgccagaagcctcccccagctcatcccctggaaggacggaccggctttttatagcacacagggcttaacgatgggaacccccctcccacccacccgccaccattaagaatttgcaccacacctccaccccttcca

SEQ ID NO: 481787 - DNA, 119 bp, Homo sapiens
aggcgcccattcgatcttagcctgcgatggcccttccaccgagaagcccatcgtgcccacgtcgtccccgatagcctccgccacaaagtctgctgacttgccaacgacgacgacgacga

SEQ ID NO: 481788 - DNA, 137 bp, Homo sapiens
aatgtggcattgtgcccatttcgggtggagcctgagatctccctgatggggaccagtgacttgaatgcgctgccaggtttaaaacattgtgaccgagaaggtgctggctgctgtctacaaggtctgagtgactacaa

SEQ ID NO: 481789 - DNA, 325 bp, Homo sapiens
ccctattgttcatatggactctataaatacgattgcgctgttatcccttagcggatagacttgcttcctgtctcgcgtcaagattattaggcagtcaatctctattctagtagtctcctcttcagactggtgatttcttagcatgttctgctctcaggttgtgttctgctccaacgtcgtcccgaccgcgatttcgtatgcatgttcgttactttaggacctgtgtgattgttttctcctagaaggcttaataaattaaagctccatagggtcttctcgtcttgctgtgtcatgcccgcctcttcacgggcaggtcaatttcact

SEQ ID NO: 481790 - DNA, 206 bp, Homo sapiens
tggccatggaatatgacctcgatagtactaggcctcactttgctagaacttgggtatactgccatgctccagacactcctgcagctccagcttatcattaacagttggataccaactggcctgtacataccagggaaggttaacccacagaagtagcagggcccttagtgtgcaagatagacactatctcttggcatacaatcata

SEQ ID NO: 481791 - DNA, 836 bp, Homo sapiens
acagtaccagaacttcctcagtattcaagtaagatggaatctgttctggcaggtgtatgcatcgtgctgtacgctgtttgtgcctggatgctgtatcatagctagtgaagatgctgttaagtaacatgacttcacaaccactggtccagcaattgtgggtctacttcgtatctggatctcgatccctctatcatgggatattggtcctgtccctgctatacagttggcgcactgaacggaaagcaggactgagtcatgtaaggacatggatttggtagaggatcgaatgaatgctttttgctccccagtacttggctcttcgagacgatgtttggtatcttgacataagtataataccaatgtgaatgcgaggagccattcgctatctgggtcatcccaactagggaaggatctggatcaagaattactgcacacctggttcacgaattaaggcgtcgagtgtggaaaatatgccgttggatcagcttgcattggaggtggccaaggtattgctgtcatcattcagagcacagcctgaagagaccagtgagctcactgtgacccatccttactcataattggccaggccaccagtaaaacaagtgaccttcagagcagctgccacaactggccatgccctgccattgaaacagtgattaagtttgaactcaacgccatggtgacatcaaaaatgcattgatcatgaataggagcccatgctagaagtacattctctcagatttgaaccagtgtaatatgatgtatttctgagcgtgaactcaactatagaagacattaaaagaaatcgtattcttgcaacgtaaccaccacttctg

SEQ ID NO: 481792 - DNA, 225 bp, Homo sapiens
  misc_feature (66)..(66): n is a, c, g, or t
  misc_feature (88)..(88): n is a, c, g, or t
ccccttttttttttttcccccccggggggggaaaggaaaaaaggggcccccccccccccccttccnaggggggttttttgcgcccttnaagggttttgttttttttcccccggcccccccccccgggggtttttttaaaaattttgggggggggttttgggggttttttttttggccccccgggttttttttttttttggggatttaccccccctttttttttta

SEQ ID NO: 481793 - DNA, 282 bp, Homo sapiens
  misc_feature (274)..(274): n is a, c, g, or t
ccacacaacactgtctttctcaccacccgccaagcaaccagggcacagggctggttgctcacagattgagcgaggcagcacctccaaccagcactcaagttcaacagggccgcgttctaaacattcaactgaagttggctaagaaaccattaggtgaggctgggcacagtggctcacgcctgctatcccagcactttgggaggccgaggcaggtgggtcacttgaggtccggagttcgagaccagcttggccaacacggtgaaaccccatctcnacaaaaaa

SEQ ID NO: 481794 - DNA, 751 bp, Homo sapiens
gctgcgacgtgactggtagctgcgtgggtactggacccaagcaacgaggcagcgagcgaaggacgggagccggtaccctgggccccgttggaactccagccgtgtgcgatcgagtgacgcatacgctcgtgcgctgtgatcagtgcatataaggatatttggatttgacctgcattaatgaatcgggcatctgcatggtctcaagggatcgtgtgtctgacagtgcgtcttgcccgattcgagaactgaatgaagattgcaactttcagaagaagttccaacgcctgatatcactgacgcatgcttcacagggtaaacaacatgacctggacctaaacattccgatgcgataatcctgcaagggtcccaatcttagtcacacaagccttgcaaaagcaccggtccacacgtatccatgggtagccgacagagccactaatccttcccgtattgtcataggaatcaatcacaaagttaaaacaggggagtggtgcccagcgttaccatggctggaactaagaattttgtccgaggatccgaataaatagtacccttggcgaggcacaaccaaggtgtttacgagagaaacgactaactggcccgctcaggacgcgagaacttacgaacacacacagtgggaccggtcacaccgcgaacaggacgaacacggcttccgtcgataaaggaaaaggatggcggatgttggaaggaggatgatgcctggatacttagtggatgatggcactagcgt

SEQ ID NO: 481795 - DNA, 405 bp, Homo sapiens
cgtcgacacgacttttcccttacattttcaccagtacttaatcttggctttatttcatatattctagatgttcatcgtctgtctgcgcacagttaacaactgtgtttaccattctatcggctctctcttccggtgatattttcctttgttgtgtaggtttttaatgtcatgcaatatgtcacttcttgggatcattgcctgtgctagtgacatcttattcaaaatgtccttgactctattctttcttcaagtatgttaaattctcttttccttgaggtagttcaaattttggggggtcttttattctagttgttaaaattaatttaatgagagatgaaagacataggcctacattcattctcctacagcttgaagcactcttttccttgtatcgcttgtcgacgc

SEQ ID NO: 481796 - DNA, 326 bp, Homo sapiens
  misc_feature (43)..(43): n is a, c, g, or t
gtatctgttttatttgactgcagtctccttggtgcaaaaacanaatgggaaaaataaggataactcagaatttcaaaaggaaatcacaaattcagctagtaatagcattttcagtacttttcgtaaactaagtaaatacacaaaatgttgatttttctgaccataagacatattttatgtccttttgccgaggtggatgtgttagtctcaggccctcctggccacattgcccaagtcacacaggcttctgtattatgtatttagataaaatgtgtgaaaatatatttgaaaaaaagttcataaatatgcattgatttttgtacaaa

SEQ ID NO: 481797 - DNA, 1910 bp, Homo sapiens
atggccgccgacgtcttcatgtgctccccgcgccggcctcgcagccggggccgccaggtgctgctcaagccccaggtgtccgaggacgacgacgactcggacacggatgagccgtccccgccgcccgcctccggcgcggccaccccggcccgggcccacgcgagcgccgcgccaccgccgcctcgggccgggccgggccgcgaggaacctccgtggcctccagcagatcatccacagcggccacttcatggtgtcgtcgccgcaccgagagcacccgcccaagaagggctacgatttcgacacggtcaacaaacagacgtgccagacctacagcttcggcaagactagctcctgccacctgtccatcgacgcctcgctcaccaagctcttcgagtgcatgactttggcctacagtgggaagttggtgtctccaaagtggaagaatttcaagggcctgaagctacagtggagagacaagatccggctcaataatgccatctggcgggcctggtacatgcagtatctggagaagcgcaagaatcctgtgtgccactttgtgacacccctggacggctctgtggacgtagacgagcaccgccggccggaggccatcaccacggaagggaagtactggaagagccgcatcgagattgtgatccgggagtatcacaagtggagaacctacttcaagaaaaggctacagcagcacaaggatgaggacctctccagcctggtccaggacgatgacatgctgtattggcacaagcacggggatggatggaagacccccgtccccatggaggaggatcccctgctggacacagacatgctcatgtcggaattcagcgacaccctcttctccacactttcttcacaccagccggtggcctggcccaatccccgggaaatagcacatctgggaaatgcagacatgatccagccgggactgattcctttgcagcctaacctggacttcatggacacctttgagcctttccaggacctcttctcttctagccgctccatttttggctccatgctacctgcatctgcctcagcacctgtaccagatcccaacaacccacctgcacaggagagcatcctgccgaccacagccctccccactgtgagccttcctgacagcctcatcgcgccccctaccgccccatccctggctcacatggatgggcagggctgtgaacacacctcccggactgaggacccgtttatccagcccacggacttcggtccctcagagccgccactgagtgtcccgcagcccttcctccctgtcttcaccatgcccctgctgtctcccagccccgccccaccgcccatctcccccgtgttaccattagttcctcctcctgccactgccctgaaccccccggctccacccaccttccatcagccacagaagtttgctggagtcaacaaagcgccgtctgtcatcacccacacggcctctgccaccctcacccacgatgcccccgccaccacctttagccagagtcagggccttgtgatcaccacccatcaccctgccccgtcagcggccccttgtgggctggcactgtctcctgtcacccggcctccccagccacggttaacttttgtgcaccccaaacctgtatccttgactgggggcaggcctaagcagccccacaaaatagtgcctgctcccaaaccagagcccgtgtccttggtgttgaagaatgcccgtatcgccccaggtgagccaggcggggagactcagtgcggggctccccccgacccagagggatgttttcccatcccaaaggctttcaaacttgtgaccaccaccaccaccctggtgtgcacgtgcatgcgcacacacatacacttaaatgaaacaaaagtgtcatgaaataatacatggccatgatcta

SEQ ID NO: 481798 - DNA, 435 bp, Homo sapiens
  misc_feature (132)..(132): n is a, c, g, or t
  misc_feature (278)..(278): n is a, c, g, or t
  misc_feature (282)..(282): n is a, c, g, or t
  misc_feature (298)..(298): n is a, c, g, or t
  misc_feature (316)..(316): n is a, c, g, or t
ggcaccccccaacagtgccagaaaaatatctctttagaagatagatcctcagtctgtttctttatgcacacgatccatttccacagtggatgttgtggttggctgcatgaacactccgtgacagtccacctntcactcagttgtaacagatgacttttctaaactttctcctcagattcctttttttgaagatatgtgtaaaggcattaaagctggtgacacctgtgagaagctggtgggatattctgccgtgtatagagtctgttttggaatggctngttncttctttatcttctgnctactgaccttgaaaatnaacaacagcaaaagttgtagagctcatattcacaatgggtaagtattttagtcttcttggggatggctttctcctttcttatgttcaggacagtagtccaggatcccatctgcccacca

SEQ ID NO: 481799 - DNA, 139 bp, Homo sapiens
cacatagctgctacccagaggggcggggttgacctagggtgaatatccaccgttttgtttttgatggatggctcccttcccccattcgccttcccagaatatcctgtcaagttccacttcccagggagctctgggggag

SEQ ID NO: 481800 - DNA, 236 bp, Homo sapiens
ccggccctctcttatgtgtgccagatggggctgtcctctgatttatttgcgtcatgcaggcagatgagattatgaacaggtggtccagaatccttggttggtggagagagcaggctgctgctgcagattcagtgtctgggaataggaatatgtcaggagacttgtagacactttggtgggtttttggcaaaaaacactagaataaaaaaatgctgtagtgggcacacattatggag

SEQ ID NO: 481801 - DNA, 440 bp, Homo sapiens
  misc_feature (335)..(335): n is a, c, g, or t
tactgatccatggcctgttaggaactgggccacacagcaggaggtgagcagtgggcaagcgagcattaccacctgagcttcgcctcctgtcagatcagcagtggcattagattcttacagaagtatgaagcctattgtgagttgcacatatgagggatctaggttccatgcttcttatgagaatctaatgcctgatgatctgaggtggaacagtttcatcctgaaaccatccccccatcacccttccccatccgtggaaaaattgccttccacaaaaccagtccctggtgccaaaaaaggctggggaccaccgtcttagaagggccctaggcttnggacctcttggatgttctttgggctcccatgcaagtaggagtttgggctaagacagaattgtaaggcagccttagctaattggaatgattacgcagcttcagagt

SEQ ID NO: 481802 - DNA, 426 bp, Homo sapiens
ataacaagaaaacctgtcagactgatagcacttcatttactgacgctccggctatactccaggaaacaacacatcactgagtacacgtcttaatatcaagagcacgcttgactacagtacctgatttaaaaatagaagacatccccagtcctcatgacataccgcaaatatctgtggggtcctgttgaaaagaacaaaataaaggagcccaaggggtcattctgtctcagcaccatccagccgtggcacttctcttcccatatatccattggattttttgttttttccctaaccaaagttttaacactagagcagattcctctgtcatgatggcggttgtgcacctctggtatcctctaatttggtaagcattcataaaacaggaaaaagtaaactatcatccggatgcacaaccccggaagggat

SEQ ID NO: 481803 - DNA, 286 bp, Homo sapiens
tttctatagcgacaatcagagacaaaaatagcttacattgggtcagatttgtctctagttaaaaaaaaaaaaagttcttaacccttattgtggtcccgacatagttagggaagccagaggggggataccgatccatttattaacttacctcagaagtaacaggtccacggggctatgaacaaagaactagaggaaacttgtgccaaaacaagtcgatatctagataagacctccccaggaaacaaaggggactcctgtcccctgccactcacgctaatatgacgtt

SEQ ID NO: 481804 - DNA, 980 bp, Homo sapiens
  misc_feature (868)..(868): n is a, c, g, or t
  misc_feature (872)..(872): n is a, c, g, or t
  misc_feature (889)..(889): n is a, c, g, or t
  misc_feature (895)..(895): n is a, c, g, or t
  misc_feature (916)..(916): n is a, c, g, or t
  misc_feature (970)..(970): n is a, c, g, or t
gagcacggcgcttttttctgaggtgtcagaaaccagctgaagtgcagaggccatccctgtgagtgaagggccattgagggtatgtgagctcaacagactgtacaaggaagctctacatgactgggaccacagactgtacaaggaagctctacatgactgggaccacagactgccctcccctctctctgcccacccaatgtcatccactcaggaacactgctgaccatctgcagagtctcaggaagtgatgggaaaagggcgggggagataagcaggcaaccctgtgattgcaccgtgagggcggaaaccccaccagctccccagtggcagggctccttctagacccaccagggcatcctcctgcgggtccaggacctcctttatcctcagggtaaagtctgaacttccccgcaaggctcaaagacccttctgggtgggcacctgctgcccgacggtggcaccctcactctgcccctcctatctgaagactttactgtgcgccactccgggctgtctcctccagggcctctgctcttgacgttcctgctgctggggcatgcgccctgccagagccccttccccacccccaatacagagatgagggcctgtctgcctgcgggccggcctgtctcacctgaccctgagcgccgtagagcagaaccagctgactttgctgtcctgtcacaagatggagcaacccacccattcatttgttcatgcactcattccacatagctggggcaaagcagatcctgatgtggatgggagacgggggcagctggacaggacgcagtgagctgaactccaatgtggcagggacaacactttggacacagggaaatctgcctcttatggaggacgtctgtcngggnaggggagggcagggagnagttcncgacctgagtgtgagcggcgntcgcagtcactggctctgcatgggaagctctgtgagggcagtgggggcgctacntcgtgtgcgc

SEQ ID NO: 481805 - DNA, 299 bp, Homo sapiens
cttcaaaagaagagaattggccaaggatgcacctataatcccagcactttgggatgcctgaagcaggtggattgcttgagcctgggaatttaagaccagccttggaacatggtgaaacctcatctctaccccaaaaaacacacaaaaaatttggcttggcatggtggcgcacgactatagtcccagctgctcggaaggctaatgtgggagcatcacttgagcccaggaggttgcagtgagctgagatcgtagcactgcggctccagcctcgggcgagcggagtgtggactctctctcca

SEQ ID NO: 481806 - DNA, 100 bp, Homo sapiens
atagtgtcggtgatgatcactttatactgttgtctggctcgatgatcactatatagtgcttgtctggctggatgatccactttagactgttgtctggctg

SEQ ID NO: 481807 - DNA, 113 bp, Homo sapiens
ttccaaatgttttatataaggcaagacctttttcggcccgttttaactaacaaggactaaggaagggtttttaataaacctattatgataataaatttgtccctatttcccta

SEQ ID NO: 481808 - DNA, 105 bp, Homo sapiens
cgggtctcttccggacctcagtggatcaccggcctcggcctcccaaagtgctgagattaaaggcgtgagccaccgcaccgggcctaatactggtattttggagta

SEQ ID NO: 481809 - DNA, 318 bp, Homo sapiens
tggaatcaacctgtgtctatcagcaaatgaacagataaaatgtggtatatatacgccgtggaatactatttggccattaaaaaaacaaaattctgttattctcagcaacatgtatgatcttagaagacattatgttaagtaagccaggcacagaaagataaatactccatgtactgtacttatgtggaaggtaaaaaagatctcatagaagtagagagtggctcatgcctctaatctcggtgctttaggagtctgaggtgggaggatcacttgaggcctggagtttgagaccagcctgagcaacatctctcaaagtta

SEQ ID NO: 481810 - DNA, 919 bp, Homo sapiens
aacggtggaacctctggtgcttattacaggaaatgtcggagagagagctggcgaccggatggaatagaacttggtgaatccagtatatggcagcaaactgttcatatcatttcggtgtgcaagattgggtaccacgtgatgacttgggttcatgacgtatgtacctgaacgtgtgtgtgtgaacatatatctaccacggtaactctgggcgtacgtttagatgtcagagggtgtggatgccaactcactcaaagacgcatttgcccactgtgtaagagagtactatcgtggtttcgctatgagtgcgtactcttatgggacctgccttctgcttcctcgatgattttgccgtgctcctgggaacacgtcgcttggcacgtagaagtaggggccctaatggtggacctcccgtccagggtatccatcgacggatctggacggttgccaagactttccaccttgaagtaaactatcacgagatagagagatcgtaatgcattaatctgggcgagcgtgacatgcttcgctcatggagcttcctcactgcgtgcgatatctcactttgcctcgaattgtacgtagtgggaacaccatttaggcactgctcgatgcggaacatttggcgtctggcgatgtgggcccttattacttgcttgatggtgccacgtttctgacccgtgataaggtggtaactgtcctccctgtgtctcgcgacccacgagcgttttagccgagtgatagcctcttaaactttctctaaccgtgatctggaacacaaggggtgttccctcgtaggatactcaactgttgggtagccccattctattccgaaggatttgccaccacgtcacccctttgccgtgctcggacgggtcacggaccttgcacgcaacccttccccggcctggtccctcacgcg

SEQ ID NO: 481811 - DNA, 162 bp, Homo sapiens
accctggcgaccttggggggtcgtgactggaaaagccttggtggacagtgcacgagatggactcttcttagagcctaggagaaactactgtggcagagccacttcagcaggagaccagatcaattacccaatgtgtcaaattcttctctcagtttgaatgca

SEQ ID NO: 481812 - DNA, 324 bp, Homo sapiens
  misc_feature (129)..(129): n is a, c, g, or t
  misc_feature (165)..(166): n is a, c, g, or t
  misc_feature (175)..(175): n is a, c, g, or t
  misc_feature (177)..(177): n is a, c, g, or t
cagtccccagagcttgggggccccgaaacgggaagaacaaactggggcacggtggcccccgtgagcaaatggtctctggggcaatcagaggccaggacagacgccgccccacccactggaaatggggcngagggagggggggggggccttcggggaaggggaggnnagaggggcncntgccccccgccctccccatcccctactcccactgctcagcgcgggccattgcaagggtgccacacaatgtcttgtccaccctgggacacttctgagtataaaacggaatacaataaaaaacaacatggggaaacaggtgcaaaaaaa

SEQ ID NO: 481813 - DNA, 185 bp, Homo sapiens
agaatttgagactagcctgggcaacatagggagaccctgtctctacaaaatgaaacaataaaataaaaaaaaaataaattttcttatgctaatacaggttgagcattcttaatacggtaatctgaaatccaaaatgcttcaaaatcttaagcttttcaagaggcatcgataaacaccgggtaccg

SEQ ID NO: 481814 - DNA, 301 bp, Homo sapiens
  misc_feature (78)..(78): n is a, c, g, or t
  misc_feature (232)..(233): n is a, c, g, or t
gtgttagcatgaagtatcgtccatgcctattctgaatgtattgctagttcctctagggtttatggtttaggtcttacnacttaagtctttaatccatcttgagttaatttttgtataaggtgtaaggaagggatccagtttcagttttctgcatatggctagccagttttcccaacaccatttattaaatagggaatcctttccccatttcttgtttttctcaaggtattgnntcaaacagcagatggttgtagatgtgtggagttatttctgaggcctctgttctgttccattggtctat

SEQ ID NO: 481815 - DNA, 890 bp, Homo sapiens
gaactcttcattgtctcgtgacttaagtactccctcatgtgagagtgcagccataatagcatccggttagaatagacacgagtatctgtaatctttggcatatagcattccacacatttctctaaatgtacctttcagtagcccagaaagaagttaaaattctgggtcaaaggataaattgaatatgtcattctgatggttattaccaaatactctttctgagacaagagtcttactctgtcacccaggctggagtgcagtggcacaatctcagctcacgtgcgagctctgcgctcccggtttccaagtgatactcgtcccgtcggcttcccaggttcaagtgattcttgtccttcagatcgtcccgagtagctggagttacaaggcgatctgccaaccatgcccagctagctctttgccaattgtcagctagagacagggttacacctatgtaggccagcatggtcttgaactcctgacctcgaagtgatccggccaccgttgggcatcccaaggtgtggggattacaggtgtgagcgactgagctggccaaatattcttgtgaaccaaagtttaagttttgcattgccattcccatatatgtgtcctgtatttgctccacaggctccaatcagatacagtggtgtttatacttcgttttgcaagtgacaaggtagaagcactggttcatgctctgtcgtgaacaaggtgagcatctttacatgttacaggtcatttacatttcttggtgtatgaagtattcttaatattgggaatcctgtcaatacctggtttgctggggttatggtggggtcaatcctagctcctattaacattttactgtaggttccaatggtaaaccacacaaaagtacaacccacacaggcaaa

SEQ ID NO: 481816 - DNA, 1401 bp, Homo sapiens
  misc_feature (256)..(256): n is a, c, g, or t
cgcaaaattagccacccataataaaattaattaaccactcattgcatcgacctccccaccccatccaacatctccgcgaatgtatgaaacttcgtgctcacgtccattggcgcctgcgctgatccttccaaatcacgcgactaggactgatataccatagaccatgacacgtgactcaccgagtagcggactctcgaacgcgaccgttgtatcatcatatcgtcccagcatacactacgacagacgttaaaattantgagacgtagaaatcactcgcggcataccgcttacactgccaagtaggtcgtcacgtcgagataatctcgtctatagtcgtgtccgttctatccatagcaacagtcgaggacgacgggccctcatatttagcggggactcaatgtatacattcgtacatcaggacataccatgataacattcaggcacttatcacttccctgacttgcaagctcactagagcaagcaagccctatcattagggcgtatagctccatccacagtgaaggcctaaaattattgatattcgtgaagggggccaaccacgttaacttgagcatatacctttagatactccccgaccgattgcaccagtaacagtttgggggacctaggatccttgaggtttccaagtcgaaagtcttgacggatggcttacatcgaggtaagaaacaagatcccgagccgcttcgactacgcaatgtcatgtcaacgccttatgcacattgtgcaattcctttagcgcgcgtttcactatggttgacaagccaccttagaggaaggctggattcctagaccgtcacatagtaccaaagacgctcggaaaacggggaattcaaaaaaaaaacgcaccatagaggaaatcgaacctaccgcagtgtccccagggaattaaacaggtcaacccaatttcccacacccagtgtaactatacaacaaggctccaaaagggatagcgccggtccgaggcttaaactatactcctttccctttccgtctcccgtatagaatgaacgagttaaacacacaataatactcaagccaaggaacctccgatagggcgaacccaaggacaaataagtacgccgaggcaaaaccacattgaaaacaacacaacaccaaacgtaaagaccgaaaagaatacccagaaaaagagcaaaagaaagaagacagaaacggaccacaaaagaaaagaagggaaactgccaccgaaaaacgcacacgacaccagaaaaaaaccgcaaaaacaaagacagaagcaagagagataaggcacgaaagaacccaagaaacaccaaggaaacgcacagaaaggaagaagagaaccgacgaagccgaagaaagaaaaagaacaaataaaaacaaaaaacgaacccgaaaacaagc

SEQ ID NO: 481817 - DNA, 197 bp, Homo sapiens
attgcaggccaagcttgctgatcgagtgggacagatcataaaacatagtccagatagactcatactagggatcccaggtacgaatgctgactttggcattatctacgtaacccctatttattgtcataggtgactctcataatacacctattgttgcaaaaccagtcaaaatcctaccatattaaaaagaagtccct

SEQ ID NO: 481818 - DNA, 1074 bp, Homo sapiens
  misc_feature (705)..(705): n is a, c, g, or t
  misc_feature (881)..(881): n is a, c, g, or t
  misc_feature (915)..(915): n is a, c, g, or t
  misc_feature (920)..(920): n is a, c, g, or t
acgcgtggggcagcatagccacagccctctttatatgctaagaactattctagaattggagacttacaaatcttaccttggtaactgggactcagtctgtgaaactcctgtacatccctccacagagcaatgaccctgacctccaggatttttgtctcagctgtagtattctgaggtttagagtggcctttacttaaaaacagcaacagttgttttttttttaagttaacacataatctttagtaaaatttgtcgaaaaatactaactttgattgtgtttggtcatttatcatgagtttagaaaatgtaaagttgtaattctctgtattcatatgaccaaaaggacttcttggcaaaatctttccacactaagttctcacaaataactgagtaaatagcaatcacagtgtcaatataataaccttcctactatgaatacaaattatattttcttaacattacctatttataattataactgatgcttttaggcaagtatgaataagacaatgtcaaggaagtgaaatataaatgagtcaaatgtggcaaagaaaagggataatcagaatgagaagctgagttgtgttctgctttaaaactgaaccttggctcttcaaagtaaccctcaagcctttatccaaaatatatcaggtaggggtcattaggaaacctaatagcatcttgtaagcactaataaaggttacngttctaaaagtcattttaaaacaaccataagctggcaagactgacagaatgaactttttcagaactctggaatctaattgaaaacttacaacagcaaccaagagactgcttaatgaagaaaagggcagctgatttttggcatttaaggaaatctctgttaggtaactggctgaccngtgagatagtggaacagagacttcagtgaccaanccaanaaggaatactgcctttgcaaaacagtttggaaaagtcactaaacaaatggatgactggagcccttaggaattaacaacaggcaaacctgaggcagggcagagacatctgattacccagtggtcatggttccgatggccagttttcacacagaag

SEQ ID NO: 481819 - DNA, 1037 bp, Homo sapiens
ggcaccttctctcgcggccgggggaccgcagcgcggggctagcccggagacccggccaccgtgcctggtggctgccttcactgcctgttctctgtgatgctgtgataaattgctgtgtgatgcatggcaccacgcctgtgcagactctggctggatcttgcgcacatgcggcagtggatttgctgtgctgccctgcgggagtgccctggggcagctggctgggatcctcagcggcggccggtttgtcctggttgtggtcaagactggatgatgtaacttggctctctaggaagcctcacttggcctgtaacctcaggaaggttctctttgaccccatctcatttcgaagccacttctgaagccacttgagaaaaatgatgtgacagttcctatcaaaaaggattcagaaacatataccatctgtgaagaaagtggccctttctcccgcttgcaaaatagacattctcaaattccaaaatgccagccaagagcccaatttacctgaaagcagccaataacaagaaacggccagacatttaaactgagggacattctgtctcctgatatgatcagtcccccgcttggagcactttcggcaaaacattcacattggcaagagggccagacgaggcttcggggatatatcctatctatccacgggagcctagagcttttacctgggaaacagcggaaagggagacctgggggcaggtccctggggctaaaagggtctctccggtgccacagcgcaccgcgcgcctgggtcacagagaagcacacccgcgggggggcacaacaagagagactgcccacccgcaggccatggtgggggagacacacgagaacgagggggcgcgccagggtgacacacgggacgaaaaacgagccgacgagagacgacgacgggcggacacacggctgacgcgccgagcatgaagccgaccggacggagaaggcaagagagagaaaaccgtcgtcagttgagatattgaccgatcgaacacgacacgggaagacacgagacggcagaagagaca

SEQ ID NO: 481820 - DNA, 384 bp, Homo sapiens
  misc_feature (13)..(13): n is a, c, g, or t
cccaccctgcccncggccctccccaaagtgcctgggattaccaggcatggaacaccgcactcagccattcaaactcttttttaaggaattttagtggactgtaaaagacagttttggaattgctacctgagtaatcttcttgcatgttttgcttgataacagatattttacaattctttattatttgtcacaaggacatagaagggtttctactggaggaaaaatttttgtcaggaggatttctggtattccatagaggcaccttagtgtcttcctagggaaaaccagcggagggtgcctgaatcccaccagtgtagcaactagcactgtggtttgcgttttatctgttctatatattggaattgtgcataagactttacttgt

SEQ ID NO: 481821 - DNA, 113 bp, Homo sapiens
aagatcacgccattgcactccagcctgggtcacaagagcagaactgtctcaaaagaaaaaaataaaaagaaagaaatagaatttaaggccaggcacggtgcatgctcatcacg

SEQ ID NO: 481822 - DNA, 1041 bp, Homo sapiens
gaaggagagggcatcctctgtccttatcttggccccttgtgtctgtctcacacacatctgctcctcagcacgtcagtgtggggaggggatgctccttaaaaccccaggtggctgactcctccccacccagtccaggacattttaggaaaaaaaaaaacaaaatacaaaagcccaagtattgtattttttcttggtatagtagaggtggaaaggagtcaaatccacccactagttaggccctaacttcgtcagaacaaactgttttatagtatcacgccgttctatgcgtcaaaaaccacctaccgtaagtatatagtgggcacccagtggttggtctgaacatacgtcacaagccggagtggaaccacactatatcgagcccctggggaggcaactaatgctatctcatgtggctaagcatgacaagacattcctacacagtcccgcggagtcaaagtccattgcagatacaaagcaagacaaacacaacatagaaacctcgagctcacaacaacaaggacacaaattaataaacaaatgaaaggcgacccacgacaaatattctatcccctcactggatgaagacccaaaccacgagggcatgcacactacagggaccggggggagacgaacacctgcaaaaaggtagccccggtaaaacccgagcccgagcagattctcgggggaggagccagcaggctgcggaggcccgccaccaagaatccacgacggcacccgagtgggccaacgccgatcacgtggtacaagaggagccgcggctaccacataagcgttgcgacaaggcacgcacacaaccacttgttgcaagagggtcccgcgctccgtcgcgcctgtatctatgagccgcccgggggggctcacaaccacagtcggcccgccgacgttggccggtccagagaacaccgcggcgtggggcaccaaacacaatagtgcgcaggccgggtgtgtcaaaaccgccaccggggggggcgcaagaagggctcattgcgcgcgggaacaaacacggtggtccgttagagc

SEQ ID NO: 481823 - DNA, 129 bp, Homo sapiens
atacaagatcatccgtataacaatagtggagacaaattgataaataacaggtaaaagaaagatattctaggcaattactaggatcatattggaaaaagtgagtacagtaggatatttataactatcaca

SEQ ID NO: 481824 - DNA, 234 bp, Homo sapiens
tctctgttgtatttttatataattagttatgttgcaaaaagtcaccgtgaaactggattagcaaacactgaaccactgctctactatggtgttagattcctgaaagctgctgttcacaacatttttgtcaactgatcaagatacaaccttgttttatgtctgttgcagtttaaatacaccttatttaatatatttggttgatttattaacattgaaatcatggcctgtcgacgc

SEQ ID NO: 481825 - DNA, 413 bp, Homo sapiens
gcagagtagcatccaagatggagttgctttaacctcaataggccctttatagaagaattttcctaggctgggcgcggtggctcacgcctgtaatcccaagcacgttgggaggctgaggcgggtggatcacgaggtcaggagattgagaccatcctggctaacatggtgaaaccttgtctctactaaaaaaatacaaaaaaattagccagggatggtggtgggcgcctgtagtcccagctacttgggaggctgaggcaggagaatggcatgaacccgggaggcgtagcttgcagtgagctccaccactgcattccattcactgtgccattccattcactgagccattgcagtgagatcgcgccactgcattccagcccgggtgacagagcgagattctgtctcaaaaaaaaaaa

SEQ ID NO: 481826 - DNA, 372 bp, Homo sapiens
catttattcttaagcatgttttaagccttcatttagttcatactgaagaatataataagctttcaagtagctcatataatacttcgggagattaggctgtcaacaacttgtttaactgttaagagaacattgcagtaatgtacctctgttagtgagcaccttctcttctgtgcttatctcttcaagataaatacatggaaggatgtgaaaatcggaacaccaactatgtgtctcactgcatctaagtgaagcagccacagctgtgagagttttcaaagcagaaagatgctgatgtgacctctggaattcagacatactgagctatgggtcagaagtgttttacttaaaaagcaaacaatccccaggaaatac

SEQ ID NO: 481827 - DNA, 117 bp, Homo sapiens
cggagctgcagatttgatggcctactgtgaagcacgtgccaaggtgagacccctcctggcccctgttcggcttcagaaaacccgtttagggagaagaagtttttctgtgccatcctt

SEQ ID NO: 481828 - DNA, 255 bp, Homo sapiens
ctctactgctccagaagctaaaaagccaaaataaaggtggtgaatgttgagctgctattgaagccacttggtctggcagttagggaaagaccttcttatacatgtatatatggggccggaaggttagatgattattgccagataaattcggaaaaccgaaaggaatgattgctataaaatgcagttgcaggaatattgtgttattaagttccagaggacacagctgtgttggacccattatgaaaacatttttat

SEQ ID NO: 481829 - DNA, 549 bp, Homo sapiens
actctatcctcatgacttttattatttatgaatagcactcaaacaattatttacttcctatttttctataaattaattgattttgaaaactagaacatgtttattttaaaaggaaacacagtagccctaaggtaaatggtagactgctatcccttgccatacatttaaggtaatcctaaagataattatcacaaagagagagcaatattgtcaaattttatttagacaatattataacatttaactagacactatatctaactaaagactaattccaaggtctgcactcactttggttttgttatgtataaagggagagaagtagatgttaggtgttaaagatagcttcaaacgaagactttttcttgacaaaaccagaaagattgaaaacatttgaaaagggactaactttctcagtgtgtgactcaatgctcttgatcctttgtatccctaaaatcctcttgtcggggtacaatttgggaactaacgactgatatgaatatggagaatgctcatttgaataaggaaaaattgtatagaattgtccca

SEQ ID NO: 481830 - DNA, 284 bp, Homo sapiens
cacattatgcagtgtaggaagactgaaagtgtctatctatacatccgtgccccttgactagtcttagatactagattcactatttacacctaagatcgtgtgacctatcaatgctatgctctacaccacttcacaaagtatgttgttgcagcacctgtggtcctaggaaaagaatgtagacgacgggagtctaaagagcatgggtttgagtcatagctctttcctgatctagccatgtgactattaacaagttactccttcttctgttgtctcagagttttcat

SEQ ID NO: 481831 - DNA, 546 bp, Homo sapiens
tctggatgcgaagtgttctatacacgtagttgtaaaagaataatttcctgtagagaaacctaatctaatagagacctactcataattgggcgaaatcatactcataattccatgctactgaactgggggtgtaatacagacacacatcattcgtctattcatttaaccagcggctttattaagccaccaactatactgcccagcaacttcgcagcgcactggcaatttcacgcagataagaaaaccacagctttctgcccctcaaaactgctaggaactctacagcgctctcacacatcaccagcgtccccttcaaacccactgctcctaccagcgaacactaaaactaccctgcactcctcactcccctgcaaaccaacctctactacagtacagaacctgcttccctagccttggaaactatacacaattgaacatgaacatgacagccaaagacttctacactcaaaacggcaatgatccaatcagcccagtcaaggctgagtgggtcgaatgggcgactccacctcgcgctcaacgccttga

SEQ ID NO: 481832 - DNA, 408 bp, Homo sapiens
ctccccaaccccccttttccctagttattaagacagcgaaaagggagaaagcaaaaagctggaaaaaacagaagtaaattaaatacctagacgactttggcgccaccacctggccctggtggttaaagtaacaataatattaacccctgaccaaaactaatgttgttatcggtaaatcccagacattgtatgagaaagcactgtaaaaactttttgttctgttagctgatgtattgaccccccagtcacgtccctcaagcttccttgatctattatgactttttcacgtagaacccttagagttgtccacccttaaaagggctaggaatttctttttcagggagctcggctcttaagacacgagtctgccgacgctcctggccaaataaaaaaacttctttcttcttt

SEQ ID NO: 481833 - DNA, 277 bp, Homo sapiens
tttattggttggtcagggagaatgagccgggggtaagggtccctttccttcccatctcgtctacccagaagacaccctccaaatggactggagaagtcccagagcctgctggctcagaggaccttgtgaggcagacaaattgttgtagtgatcttccgtgtccctcgagcaggctgcggtaggtgtcaatctcctggtccaggtcgcgacttgatgtccatgagccgctgatactccttgatactgccggtcattatcaggtcgtgcatcgcccagt

SEQ ID NO: 481834 - DNA, 242 bp, Homo sapiens
ccacactctaaccgcttgtgctatctatagatcacagacaatggtatggagtaacacttgccttgctcatctcccctacctagccatgtaccccatgcttgttcaatctatcacgtccctttcatgtgtaccctttagagcttttaacgctttaaaggtccatgaactctttctctgtgacttagttcttgtgatccaagcctgccgttgctcctgtgccgaataaagcctcttcctttttt

SEQ ID NO: 481835 - DNA, 347 bp, Homo sapiens
  misc_feature (145)..(145): n is a, c, g, or t
  misc_feature (178)..(178): n is a, c, g, or t
  misc_feature (297)..(297): n is a, c, g, or t
  misc_feature (316)..(316): n is a, c, g, or t
gcctgtaatcccagcactttgggaggctgagctggatcacttgagttcaggagttggagaccaggcctgagcaacaaagcgagatcccatctctacaaaaaccaaaaagttaaaaatcagctgggtatggtggcacgtgcctgtnatcccagctacttgggaggctgaggcaggaggntcgcctgagcccaggaggtggaggttgcagtgagccatgatcgagccactgcactccagcctgggcaacagatgaagaccctatttcagaaatacaactataaaaaaaataaataaatnctccagtctggttcgtttnacgggactttcaggttcttttctggaaatcg

SEQ ID NO: 481836 - DNA, 1010 bp, Homo sapiens
cggacgcgtgggtcgaatttttttaaagtatattccattattttggcatttttgatgtgtcaaaactttgacagcttttatgtagaataaaaaaatttttaaatttgtgtattgttacatatgtttgcatcaagctagcagccaagaggttaattgtgcaactataaaaaaaaaaaaaaaaaaagaaagttggtctaaatgtttttaaagaaaaaaaattgtaggtacgcttttactttttttcaatatttttaccccttgctgggtttctgtcccagaaatggcccgttgatgtccacatgttttgttcattttggcttaaatcctttacacattttttttcaaccatacaggggcagcatcttctaaataagtttatcagctttttttttttttttgggcggcccgatgctgcttcctaacactttctttgttttcaccctcttgtttgcttcggtttgctggtaatcctcctttcccccatggggatacgatgtttaagaggcatcccttggcggggcctttttttcggtttcccccctggttctgttggtcaatgtcttaacaaacaaccggttgggcctaccttggtttttctttgtgcgcagacgctcaccttttccagggcttgtcttacggggtcaattggaagcctcggtggttctcttgtttgaaaccaatttcccggacctgcaaaaatttcggatctgcggggggcttaacaaacctgtatcacctatttaacacggcgttcattttgaaaatctgtcccacatcctgttacacttttaaccggttccatcttccagggtaaaaatggcggtaggtgaggtttccccagaagtgggccctttgtgtacaaaacggcattcggaccacatggcgctgtgtgggacacgtgaatattttgtcaaacaggggcaaatctgcgatacacttaatctaggattaagcgacagaagttgagtgttgtccacagcttatatcatatgattgttcacatcactagt

SEQ ID NO: 481837 - DNA, 283 bp, Homo sapiens
tgctctagaggatcttattggtgcggtgggtcatgcctgtaatcgtttctttgggaggcaaggcgggcagataacctgaggtcaggagtccaagacagcctggcaacatagtgaaacccgtctgtactaaaaatacaaaaaaaaaaaaaaaaaatttagccaggcttggtggcaggcgctttgtagtcccagctcactcaggaggctgaggcaggagaatcattttaccctgcgaggcaaagtttcgcagtgagccgagatagagccattgcactcgggccgg

SEQ ID NO: 481838 - DNA, 145 bp, Homo sapiens
gaaaactcgtgggctcaagccgttctccagtctcggtctcccgagtagctgggactacaggcgccccaccgtatgcttttgtaaacaaagttttattggaacatagctcatttgtttacatattgtctacagctgctatcctctt

SEQ ID NO: 481839 - DNA, 757 bp, Homo sapiens
taaggcccctttgatttttggtttccacattagggaaaaattggtattaagattaggattgtggggaataaatccggatgctacttgtccacatgatggtaaaagggtagcttacgggttgtcctccgcattcaggttaaaatgaggaggtctgcggctagagagtcaacaaagctgatatgtgcttatggggcgaaatattatagcttgttgtgttgggatatatgtcgaggatggggatatattgctaggatgaggatggataagtaatagggcaaggcacgcctcctagtttgtgtagggacggatcggaaaatttgttggttggcgaataggaaatatacatctacgggcttagatgtaggggaggggttggttacaaggggtgtgggcgggggtaaaacatcggtgctggggtcgcctaagaggtctcggtgaaacataagttgttgaagtgtcctcaaggaagaagaatgaacgaaaattatgccgagggggttctttgaattgttgtaacaggggtgggaagggtagatccttatcgcaagtgggagggtgaattcccaaagggggggttgttttgactcccctctttgtgccaacaataagaggtgggcgtgctgataagggctgcaccaatgagggggggcaataaattgttaggtgtaaaacacttgtgagggctgtgacatgttactgaaataagtcctcgaattcttgaaacatgttttcccatgtttggttcgggaaaacattg

SEQ ID NO: 481840 - DNA, 794 bp, Homo sapiens
ggtcctgcctggtgtgccatgctgctgctggtgcattgtgcatgtgtggcctgtgctgtgtgtgctgcatgatgctgtgatgcctgcctcgtgagcctgatgcctgccctgtgcccatgtgctccccctgtgccctgtgtgccctgccgcctttgtgcttgctgcctgctgctttctgcaactggtgtcctgtgctgctgcatgtacatttgtgtgctcaatgtggctacaccaatgtgcctgttgtaccctgtgtgtcctgcccttgcccctgtgctgtgttgcctgctgtgttgtgctgctcaagtgtccgtgttgtgacctttaggcttgtgcacagcggagttcttgtgtgcaatgctttgctgttgctgctgatggtttctgggggtgtagccgtgatggtgtgtgcttttgctgttccgtgtgccttgtgcctgtgcgcacaacaattgctttgcctttacgatcgtggatggacgtgtgtggtttgcgttagcatatgtgagtgcctggtgctttgctagtgcaaacccaccaaaaagtctgtttagacattagccagtggcttcattagttgtgacctagactttggcattaagcaccaattgtggagcagtggcctgagtggggtatccaagttcaaaccaagtggagcaaacccacgttgaaaacacgagcacagtacaagcatgtggatgtctttggggtgactgcccgccccctttggttagggagaaaatttggaattcccgaggtcgtttggcctttggcaaaaagcttttccctttggg

SEQ ID NO: 481841 - DNA, 114 bp, Homo sapiens
tgcctatccaagaaacgattgaagcaggagaagcaggcaggcagaatcgtaatgaggcgtgcgccgccgatatgacaccgtacattccgcaagacattgccttcttattattac

SEQ ID NO: 481842 - DNA, 315 bp, Homo sapiens
  misc_feature (124)..(124): n is a, c, g, or t
acagatcctggattaaaaattttgaatatggcttcttgtggccctgacaaaaactcgctctgtaaaaaaaaggaggatacaagatcagcttctcccccgatagaggcccaaggtaaaatgttgncaggtgtaagcatgattttaattttaaaacccgaagcaagtctataagctagtgaagtaactatcccccctagcccaaaaatgttatttaattttttttggaaaaaaattcttataaaacaattttgaaaaaaaagtttgcaaaaaaaaaatccaagtggtaactaaccatggcccccatggctttttcca

SEQ ID NO: 481843 - DNA, 245 bp, Homo sapiens
  misc_feature (149)..(150): n is a, c, g, or t
atctagagatcctaagatcctacagataagctgccgcagtacacagcagcagcggctggaaacatatgggaaaggagctgtgtcccgggagctgcagatgctgttggtgaaagagggtgtgcagaatgctaagaccgatgttgttgtcnnactccgttccttggatctcgtgcttagtagagggcctctttctaagtccctcttggaaaaagctggaccagagctccaggaggaattggacacag

SEQ ID NO: 481844 - DNA, 178 bp, Homo sapiens
tcgaacattcccaacagccactgctataggttaggtgtcacatggggaataggtccaggcctctatggctctcgcaggagtcacgtggcggcagatcagataacatatcacagaagaccagaatataagaacctgcctgggaggacggcatacatgactgcgtggcacagtacctcac

SEQ ID NO: 481845 - DNA, 209 bp, Homo sapiens
  misc_feature (6)..(6): n is a, c, g, or t
  misc_feature (26)..(26): n is a, c, g, or t
  misc_feature (63)..(64): n is a, c, g, or t
  misc_feature (84)..(84): n is a, c, g, or t
agcgancggcgctcagtggagttccngccattaagcgggttgacaacgccatcgaactggtcnncgaagacggtaaaaagggtnagttccctggtggccaaactgtaacgtatggcttgaagcaaaagggtgttgatattgcccgtgattcaatgccagaaaatgcttgggccgcaacacaagcagctaaacaagagattttagatggt

SEQ ID NO: 481846 - DNA, 243 bp, Homo sapiens
ttctccatcactatagttttgccttttccagaatgctgtaagtggagtcatacaatatttagcctttcagtctggcttctttctcttagcagaatgcatatgagatctctgttgggtttaccagcgcgctgctcatccctttttattgctgagaagtattccatcatgtggatgtactactgtttgtttatccattttccagtggggttgtttctgattatgaataaaggtgctataaacatt

SEQ ID NO: 481847 - DNA, 325 bp, Homo sapiens
  misc_feature (58)..(58): n is a, c, g, or t
  misc_feature (80)..(80): n is a, c, g, or t
tcaaatctgcaatcgcaagctgtccgagacccatgctggttgcatagttttcaagatnacttcttgttattcccaatacnctagcagttaatgctgcccaggactccacagatatggttgcaaaattaagagcttttcatcctgaggcccaggttaacccagaacgtataaatctcaactggattggtcttgattttatcaatggtacacctcgagacaacaaacaagccggggtgtttgaaccaaccatagtttaagttaagcgtttgccctttgcaaccgaagctgccatcaccattcttcgacttgatgatcatgtagcgta

SEQ ID NO: 481848 - DNA, 175 bp, Homo sapiens
  misc_feature (154)..(154): n is a, c, g, or t
  misc_feature (160)..(160): n is a, c, g, or t
cccgagagcatgccctatctggcttacacactgggatgtgaaacaacctaattgtcggtggttaacaaaattggattccactgagcacctacagccacgaagtagactatgacggacaacttggttacacggacagctcaggcgacgttaccantttaangcaacacacttgggc

SEQ ID NO: 481849 - DNA, 213 bp, Homo sapiens
  misc_feature (69)..(69): n is a, c, g, or t
  misc_feature (72)..(72): n is a, c, g, or t
atacacctatgaagattataagaacactgcggaatggcttctgtggcacaggggggcgccgacctcaanttncaataatctgtgggtctggattaggaggggtgactgataaattaactcaggcgcagatctttgactacggtgaaatccccaactttccccgaagtacagtgccaggtcatgctggccgactggtgtttgggggggggagtg

SEQ ID NO: 481850 - DNA, 269 bp, Homo sapiens
aagaccagcctggccaacatggtgaaacccatatctactaaaaatacaaagattagccaggtgtggtggcgcacgctgtaatcccagctactcgagaggctgaggcaggagaatcgcttgaacctgggagacagaggttgaagtgggccaaactcacatcactgcattccagccagggcgtcagagtaagactctgttctaaaaaaacaaacaaacacaagggtactatgagaaagcatccagcattgggtaatgtcacatccttgctt

SEQ ID NO: 481851 - DNA, 359 bp, Homo sapiens
  misc_feature (9)..(9): n is a, c, g, or t
  misc_feature (53)..(53): n is a, c, g, or t
aatcacccncccatggatccgccaagcctctgctggtttcctccagcacccgncgtactagcaatgccccttcctaccaccgacgggtgctctcttgagaaaatgcacgttcacgttagcctacccacaaaccaaacgaaccaaaattaaaactccagggggggaaaacaagacattatacaacctcgaggcaaacaacttctggcttagcccttgcttgagttatcagtacaaaggcgccgttctgttagatgggtggaacctgagagctgcccgcagtttggggttgaactggagacagagaacctctgctgggctcacaccagggccaccgggcttggtaacttactggtcagtgc

SEQ ID NO: 481852 - DNA, 551 bp, Homo sapiens
cgcgtggctcacgcctgtaatcccagctctcagggaggctaagaggcgggaggatagcttgagcccaggagttcgagacctgcctgggcaatatagcgagaccccgttctccacaaaaaaaaaaaaaaaaaaaaaaaaaaaaaatttttgggcggcttgggccttgagaaaaggtttttaaaacctttcggttgggggcgggggccccagtagtttaaggtgtcaacccttgtgggccataaaggcgtgggtcccctaaaggagaaagactccgtggcgccaatttagccaaagggggctgggggagttttcttcaccaatttaaaaaaagcgcgcccggggggaaaaccccggagcggtgtttcgttggaccaatacttttcccaaagagtgggggaggttgtctgagagcggccacaatacagggggggagcctctatatctacacaccagagggagatgtcaccagaggggaagacgctccgagattttcaaatatttaacgcccccggtcgtgtggtggggatacgagtcacgaagtcacgataaag

SEQ ID NO: 481853 - DNA, 962 bp, Homo sapiens
  misc_feature (369)..(369): n is a, c, g, or t
tgtcgataaggtccgccgcgtccgcgtttgtagacgacgtggtttccgaaagaagttaacaaaactgggggcggtatataatgaccccacgccgtctgtgagaaagcgggtgcttgtcaggccagagtggtgtgtccacaaacaaagccggcccattggggttgtaggttgggaatccccccatctggtgacattcttgtggaagagaaacaaatccgttcgtcagaggtggtcgtggagaaaaacacttttgctggggcggtctcaccaaaattgacaagcccgtgcttaagtttagtggggagcacagacaaattctctcgacaggagttagaagagaggcatcacccaataattaaggatgctttncaagagaagccggtgtttccgagtgcgctccctctagagggacagctctttgtggtacaattggccaagtactgcgccccatgagcaccgctcccttcactcctttcaagcccctctgttagtgttgatgcgcgcacgcccgctctacattgtatgaataaatttacgaccagccccacttctgttgaaaggcagcaacaatgtcagccacgcgaggttattattataaaagaggggaatgttattataaaagggctagaacactgtcgagctttacaagaaaacattagacagactcatttggtggcactcccccacagggtagtcgccaccagtaggtggaattctgttgcctgataaggacccctctgccccagacgagattgtttcttaagagacgcgcaatcctcaccagcgcatcagtcagggccctcgtgtaagatatgaagaagagggaggcaataaatatgttcggagagaagttgggggggcgtgcacttgattgaacaatgtaagaaagatctctgaaataaaaatcaagaataataccatgttcaaaaacaaaaagcagaccttctgtcccacaaaaacga

SEQ ID NO: 481854 - DNA, 282 bp, Homo sapiens
  misc_feature (176)..(176): n is a, c, g, or t
agcagtagtgtgtcttcaagcctttaccaaaaattatccctacttggagagaaaacttgggaaatgtaatcaatgtggcacaaaatttcaaccagttttttaaacagactacacatcttgaaatcataggagggaaacctaaatttctttcccaaagaggggcgtgtaatattatnacagaataactaccagacaacatttgttaaaactcaggacagtatgtattttaaaggagcaagtgcatgtgtgaaaatggctcattcagtttataaaatattacat

SEQ ID NO: 481855 - DNA, 82 bp, Homo sapiens
  misc_feature (5)..(5): n is a, c, g, or t
agccnattattgtcggctatgtgctgaagtatattttcagcgtggatgattgccagcctgacattattgatggtcgttattt

SEQ ID NO: 481856 - DNA, 974 bp, Homo sapiens
tccatcgcggctcaggctcccgaagtgctggggattactccgccatgatgaataggcctgagccacctagcgccagtctactatagaatgatgctatccatagatgcattgtgtgagctctgattatgtcagatggatataatagatcggatctcagaaatatcagcccttggatgcataaggcgtggtcgtgaatatgttttgtattaaagcagtgaactacgggtccgaatatgcaatagatcgatagagagtgggagagagaaatggggtggaaacgcaggaattgtggaaatattgggatctttaggggccatatagttgcattctaattgtaaaaattatggtgccgcaagtaaggaaatgtgatgttattgctaaaatgtaccaatcattgtttaaggaatgtggaaacatcttaaatacagggtgtacctggaaagatgtggtcattattttggttgaactaggaaattggtaccaggcctgaggtgcttgtgtcgggagcagggcgtgaatgatcatggttgtgcacgctcgatgcagtgatatagtgccttggaaaggtccttgtctatcaggaggaattgagatagtgaaggaggagggggagtcccataggtcgggactaaagattttactgtgtcatcattcccaattctcgtgtgggttttcgggccttgaggtgcaaggtaagtcttaggttggacccaggtcaatttcggtggaataatgtgaaaatgagccgctatcgcctttggtgggcaataagatggacgggtccatggggggggcattactggaccattggggttgccgggaatcgattggcgtaactgggagaggaaatcgggttaaaggggggtggaaaaaggggaaggggtttgagaacaaaaaaatagaaggaggaagagaagggccatttggagcataacagggagagaagagcatgcagaaaaaaaattggcagggat

SEQ ID NO: 481857 - DNA, 891 bp, Homo sapiens
ggaggtggtgtgtggggtaagatggtgaaggcggtgtggtagcaggtgaggaacgggtgaagtcgggatgtggcgggcgcgttgccaagtggggcggtggcgcggaggtcggtggctaggcctgtgcacgtgagtgacgcgctgggtgccggcacatcaggaggaagttgccggtggtcatgaactatgaccgtgggtgaggatcggcggagtgcctcgagcagcacggccgctgtcagccagggtgtcagcggtcgtacacggtgtggcagggtccatgtgatagggtactcgcccgttcccgcttcagcgcggtaatagccggggtattgcccacatcgcgcgcaggccggttgagtaacgggtagtcctgaccatctgtgggaaagccggtaaaggccagatagggtctaacaacgccacgatccgtcgacccacggagcccgctcgtcaacatgagcacccgcgccgggtactattgtgagtcgccaacgctgtggccccattactcatcgtggccatggatggtgttggcaaaacggtcaacgttgcaccaccccatcaacataggcaccgttctgatgctcccaaccggcataagcccccagggtatagctatcgatatgtacctttgccccgcgatcgaaaccgatatcagaatgagagtaaccaagatcaagccgcgaattgtactgctttcttcacgggagaaacggctatcgaataccgagcgtcaggcccgtcaatgtttgctcaaaccagctcccgcatcagtgtcacgttgttgcgggtgttaattgccgaactccacatcgccgtatcgtaactaacgccttttacgctaccaagacgctcacgcacgggtgtccagttctgcatcaaataccagcg

SEQ ID NO: 481858 - DNA, 225 bp, Homo sapiens
ttgatcgccggagggcgctgtacctgcgcgccacgtacgtgaaacaccggtgtttgaacgcgaactgcaacaaaaccgtcagcggatgctggacaacacgcctgctacaccagataaccgcagctatctgcaacgcactaaagccttctggatcatgctgggcctgcgtattggcgagaacggcccatcctatctgtgccagggctttatcgtgggttacgttgc

SEQ ID NO: 481859 - DNA, 936 bp, Homo sapiens
  misc_feature (9)..(9): n is a, c, g, or t
  misc_feature (32)..(32): n is a, c, g, or t
  misc_feature (86)..(86): n is a, c, g, or t
  misc_feature (124)..(124): n is a, c, g, or t
  misc_feature (167)..(167): n is a, c, g, or t
  misc_feature (184)..(184): n is a, c, g, or t
  misc_feature (237)..(237): n is a, c, g, or t
  misc_feature (252)..(252): n is a, c, g, or t
  misc_feature (357)..(357): n is a, c, g, or t
  misc_feature (522)..(522): n is a, c, g, or t
  misc_feature (525)..(525): n is a, c, g, or t
  misc_feature (528)..(528): n is a, c, g, or t
  misc_feature (542)..(542): n is a, c, g, or t
  misc_feature (628)..(628): n is a, c, g, or t
  misc_feature (770)..(770): n is a, c, g, or t
  misc_feature (801)..(801): n is a, c, g, or t
  misc_feature (921)..(921): n is a, c, g, or t
cagcacgcnccacacgcacccgcagccaagcncaccaccaacgagcgggagtacgaagagtaggaaacacagcgtcgcaggcagcngcagtacaaggaaaaacgaaaagagtaccaagacaaancacaaagagaggccaagtatccagaaaacagaaaacgaaacanaaacagagaagaaagcncaaaagaacacagtagtgtaaaacagcaaaaagcagagaaagaaaaaataaangccagtaaagtaganaaagaagaggcacaaaggagtaacaacaaaacacagggaccacaaccaaacacaagcagccaatacaggctaaaggtttggcagcagaagaccaaagcagtagtnaagcagaaccgcattgtggagaaagaaacggaaaaaagtgcacagaacaggccaacagaagaccaagagaagcagtataaagaaacaggattaagtgtgaagcacaagtcagaagaagtaaagacgaaaaaaacagaacaacaacaacaataagaaaaaatcaanagnggngaaaccagaacaanatctcactttcattatactacctggccagattttggagtccctgaatcaccagcttcatttctcaatttcttgtttaaagtgaganaatctggctccttgaaccctgaccatgggcctgcggtgatccactgtagtgcaggcattgggcgctctggcaccttctctctggtagacacttgtcttgttttgatggaaaaaggagatgatattaacataaaacaagtgtnactgaacatgagaaaataccgaatgggtctnattcagaccccagatcaactgagattctcatacatggctataatagaaggagcaaaatgtataaagggagattctagtatacagaaacgatggaaagaactttctaaggaagacttatcncctgcctttgatcat

SEQ ID NO: 481860 - DNA, 129 bp, Homo sapiens
agggccgcctgccccggccagaacgggcagggctgccactgacctgaagactccggactgggaccccactccgagggcagcgtaccgcttgccggcccaataaaggacttcagaagtgttccctgaaaa

SEQ ID NO: 481861 - DNA, 257 bp, Homo sapiens
  misc_feature (16)..(16): n is a, c, g, or t
  misc_feature (46)..(46): n is a, c, g, or t
  misc_feature (140)..(140): n is a, c, g, or t
  misc_feature (156)..(156): n is a, c, g, or t
  misc_feature (171)..(171): n is a, c, g, or t
  misc_feature (200)..(200): n is a, c, g, or t
tccaaagaaaggctgnggtggtggagtcagcgcccccattagaagntcgcgcctagagcggtctgaggtgggtgtgctgaagattcggtggcgtggagggcggctcgcgactctcttggtatccatctctgatgtggcangagcaggatgagcgcntcaaccgagatttcnctcgcggggcgatatcttatctcatggtntggtgcagccgtgatctctttctgatgcgtcaggatcccaggtaatctggtgcccca

SEQ ID NO: 481862 - DNA, 363 bp, Homo sapiens
  misc_feature (143)..(143): n is a, c, g, or t
  misc_feature (154)..(154): n is a, c, g, or t
  misc_feature (158)..(158): n is a, c, g, or t
  misc_feature (160)..(160): n is a, c, g, or t
  misc_feature (167)..(168): n is a, c, g, or t
  misc_feature (197)..(197): n is a, c, g, or t
cgctttacttgagaaccttatacgttgtgctgggaacaactgagggtgtttaacaaagaaacaccgattaacttttatgggggaaaaacttggtggcttcttctggatgatctccagtgatgctcccccatgctgaccacagnttccctgcagntgcncncagcatnnggataggctctatcatagaatttctcgantcatgtgccatagtacttacattagatccttgagggtgggcactgtggcttatctgacccctgtattccctgtagttcgggcagtgatttgcagaaataggcatttaataaacacttgccacaaaaaaacaacccagcataaaattttaaacgcaaacaaaaggtt

SEQ ID NO: 481863 - DNA, 120 bp, Homo sapiens
gttgactttcggccaccggtgccgccgatgtcgttgccggatactgaacggccactggtcgggtacctcctacctgcgtgacacggccgcgcggtgcgttgcttactcactcggggactc

SEQ ID NO: 481864 - DNA, 302 bp, Homo sapiens
  misc_feature (296)..(296): n is a, c, g, or t
aatgagccggaccagcaggctgggcccagattaagatgtcaccgaatcggagctgtagctgccggtctacgccacagccacagcaactagagatctgagccacatctgagacctacaccatggctcacagcaatgccggatccttaaccctctgagtgaggccatggatcgaacctgcaacctcatggttcctagtcggattcattaaccactgagccatgatgcaaactctggttattaattctctattgcagctatatattacgaagttttttgtcaatgtcacatttttttantccagc

SEQ ID NO: 481865 - DNA, 115 bp, Homo sapiens
gcattcgaccgacttcaaggggaaccttgcactgatgctcacgcacctgaagctggagaacttcaagatctggcgcagcaccggtcccacgcccctggcgcccatcacgctgatc

SEQ ID NO: 481866 - DNA, 280 bp, Homo sapiens
gccaaaaaacttaacagcctttgcataggccaatgggcaagttttgttaagcttttaaaatattaaaaagcagctcccaagcaaacgggtatactcccttccaaagtcctagggaggccggaggccaaagtccaagctggaaactttggaatggagggtttgcttttctctccccattatgtcaaaattcaggttttcctaactgcatggaccccttttaccttttgggatgtccccccctcctcaggaccttcagcctccccctgcccggcaacccata

SEQ ID NO: 481867 - DNA, 587 bp, Homo sapiens
cgaccaggtaccaggacccttgctagcccgcagagatagttgaatgccatgaaggaaggaaccggacttagccacttgtatggaactccgttattctaaggagaggagtctagtaggctaggcacaagaaggatggtccagcatgccttaaggcacccggatggctggcagaagcaagcaattgtgcccaaccatgtgcatgtccactgacacgcgccactgcagtgctctcaaggtcccgacgagctagcgctgaaggacacagctattgcctggagacatttctactggtaccttaccaatgagggtatccagtatctgccgtgattaccgttcgatcttgcccacgcggagattgtgcctgccacccgtacgccgtagccgtccagagacttggcgaggccatcggcctagaaggtctggagggtgagcgacctgcgagactcacaagaggggaagctgacagagatacctacagacggagtgctgtgccacctggcgccgacaagaaagccgaggctggggctgggtcagcaaccgattccagttagaggcgattggtggaaagccgtcagccacctcagtga

SEQ ID NO: 481868 - DNA, 163 bp, Homo sapiens
aagggaccccgagacgcgggacgtatgagtggggcgtgcgctccacgcggaagtcggagcctcctccccatggatagggtgtacagagatccctggactggagcccatcacctttgcggggaagatgcactacgtgacctggagttcgcgaccgatctttccg

SEQ ID NO: 481869 - DNA, 392 bp, Homo sapiens
accaaccattgcagatctcatagagcacgaaaccgaggatccaggccagttacacagacccagcaagagccaccagggagctcaccagcatcagcacagaggcccagtgtgtccgcaggcaccctaccaatatctgtagtgtgtagaagatgcacccgaatacgctgttggattgattgagaattctgtcctgtcccagcacatgctccaccagcccgaaacccctgccccactgtgaaggagaagacgcgcgaacacctgatgccggtgcccatgtcgcagagcgcgcggtaatcgcggtcccgggcgcgcgccgccttcacgtacagcgcgtagagcgagagcactaagcccgtcacgcagagagcgagccgcacacagacaggtctccc

SEQ ID NO: 481870 - DNA, 450 bp, Homo sapiens
ctcgttctgtcacccaggctggagtgcagtggcatgatctcagctcactgcaacctctgcctcccgggctcaagcaatcctcccaccttagcttcctgagtagctgggaccacacgtgcacaccaccatgcccagcctgggcgacagagcaagaccctgtccctttaaaaagaaaaaggagagagatgtgcttatatgaagagaaaggtcatctcccacaagagtacacagagcaaagagaaaagctgaagatggaaatgaccggcacattttaggactctcctaaacttcgtcagtgaagaaactgctatactatttcgaatggaacacctggagaaagatcaccagctgcttccccaccaccagctcctcaggactccaggagacagaaacctaatagcaagagatcaagtaataaacattggtgcaattaaaatattttctttcaaa

SEQ ID NO: 481871 - DNA, 191 bp, Homo sapiens
tgctgggattacaggcattgagcctaacggtccataactattcctttcaaactgatagtttcccaacttgcataccacagtttatgagattgtgttagatgtctttaaaacgattgaatctgtgtaaaacctgagtggcatacttctattatttcattctttctatctaccttccaccctactggggtctt

SEQ ID NO: 481872 - DNA, 648 bp, Homo sapiens
catggtgtcttttcaaagatataatatttgaagacatgttttctagcgatttgtgtggatgatgaggtgagctggactgaggcaaatcggaatcaagctggggggtggtgtgtaagaagacacgtggagtcgcacaataggcaactcctatatgtctagctatacgtggctgtacatttgctgcagcctcatgcttctgaggttgaaggggtgatcttcatattagacacatcgtgtgcttcagtcatagatgttaatagatggaagcgagttttacctgactgcaggattccgtgaataggagttgctgaaagagtctacttctgtgactacaggggaagtattgactgccagatctgtgtataaaggctgatggctatggggatgggacctgatcagctatgttagataggctacctgacagttagtactcccatgatggcttccagtgacacatgtgtctgagtagtaattctaaacactgtggaattgtcccctgtctggggacttctatggtcgtggactgtactgggtaacctgatggcagatgcttttgggcggtgatgagaagtatagtcgttgctggatggaggaagactgtgaggcaccagatcctgtgcttctgagggccattttcttgaagaccat

SEQ ID NO: 481873 - DNA, 451 bp, Homo sapiens
ttgagcatacacaaaaggagaggctggacacagcggctcacgcctataatcccggcactttgggaggctgaggcaggtggatgcccgagcccaggagttagaggctgctgtgatcatgccactgcattctatctagcctgggcgacagagcaagaccctgtccctttaaaaagaaaaaggagagagatgtgcttatatgaagagaaaggtcatctcccacaagagtacacagagcaaagagaaaagctgaagatggaaatgaccggcacattttaggactctcctaaacttcgtcagtgaagaaactgctatactatttcgaatggaacacctggagaaagatcaccagctgcttccccaccaccagctcctcaggactccaggagacagaaacctaatagcaagagatcaagtaataaacattggtgcaattaaaatattttctttcaaa

SEQ ID NO: 481874 - DNA, 162 bp, Homo sapiens
cccccccccccccaaaagggggggggtttttttaaaaaaaactggcctttttaaattttttgtttttaaaattaataattttcccgtttttgttctttttcccccctttttttcccccaatccctttttttttttttgtttttaaaggggccccccccccca

SEQ ID NO: 481875 - DNA, 163 bp, Homo sapiens
cagctctcaggttatctgatatttaactttgctttctctgcttgtcatatgagagttagatcttatttttacatttgctaagtgtcctgatctgctcatgaaatccttctatggcgtcaagctgtggatgcagattcctataagcgaccctttggtgacaact

SEQ ID NO: 481876 - DNA, 102 bp, Homo sapiens
atcaatcaattcgagtttaagggtctgcttaaggatttctctcccttttgccttttcttgtcttttcttttcaacatatggggtctcatgtattacccacgc

SEQ ID NO: 481877 - DNA, 434 bp, Homo sapiens
  misc_feature (27)..(28): n is a, c, g, or t
  misc_feature (52)..(52): n is a, c, g, or t
  misc_feature (159)..(159): n is a, c, g, or t
  misc_feature (164)..(164): n is a, c, g, or t
  misc_feature (174)..(174): n is a, c, g, or t
  misc_feature (310)..(310): n is a, c, g, or t
  misc_feature (325)..(325): n is a, c, g, or t
  misc_feature (329)..(329): n is a, c, g, or t
ctgcaaacagtttgatgactacgaggnnttcgatcagatcgaagcgaaacanaaagatgctcgggctatcatgaaaaggccgtatctggtgaaagcgaagacccgctcggcatgctgaaagccgggcttgatgaaatgaaaaatcaatcagtgtaaatngcatngacaatcatngatggctgagtacaatagaccacaagaaagatcgcttttcagctcggcatggatgaatagatgaaaatcaaaagcccgaaggcaaaagcaacagtccgctacaaaagttcacgatgaacaaactgcttgaagtatngatcagcaacgcgtngctngcctggggcgaaatccatcagctcttttggatggctggctaggtgtgcatcaccatcggttacgcagtagttcaactgcctgccgtagccggtaatcacccgctg

SEQ ID NO: 481878 - DNA, 113 bp, Homo sapiens
tcatgccacttccaacatctcatggccaaggtcatgatggcaggagtaatcagaggtgttcttgtgttgtgataagggatgagatgttggaaggtggcatgagatgttggaag

SEQ ID NO: 481879 - DNA, 1186 bp, Homo sapiens
gcacacacagcaggagtacagtggggatgagaaacccgtggatgtggtggctccaaccttccggacttcgtgtgactatagtaagacgattgcgagtggctacttgaaagatcgcggagtgctgacctcccatctaatcagtgtcattgatcggctggccttggcgtgagctcgtatctagaaaagcgagccctagttactcctcctacatagtcattgtatcgctgacgcctagatagagaacgggattgtccttgttccttttctaatgaactgcatccacgtatgagcctcattcattgcgctggtcctcctcatacgttcgggagagttggcacgtttcattctagtcaccacgggcagcactaagctcgacctagctcagcacgtaacggcacgttactgcgtccctaaccgtaccagagtaaccgtgcgacagtacctttaaaaggcgcaacgtagagcacggtctccgacgcagccctcaaaggtggcactattgcaaacatacgtattgtgcgcaaagcgtggctcacttgaaaaagtaactcattacctgccaacggtgcaccctctggccttttcgaggcccccacctgtgattgcgcagcacaataccgtaggaaagactccgtaccaggaacggatagtcgaagagggtgttgtcgacacacaggggaatcccccaagtccaaaaggtagcgtccgtcaagtttagcgccaccggcaaggggccccattgcgtactagaacttgctccttcggctaaggagcctggaggtaagcccaggatagcaccggacgacagggaagtaacccaaatcgttccaagggtaccctggaactgggttgcctagcggaacggcacgagaaccgggggggaaaccccccatgggatgggaaaccgctttccccctagccgggggccacgccccaaaagccaagggccctgaccccgggcgggactaacacggccgtgggtaattagcttggtggcgcgaaccgaccaaaaaaccccaaaaattggcccgttgggttggaacgccctaggaagaaacctgggccaagtttcgggacaccgaactggcgggggcaaacggcccaaagcttgaacccgttaagttcctcccattcaggaaccattggacgcgggacactggggcgtggggttttcccgagaacgacc

SEQ ID NO: 481880 - DNA, 683 bp, Homo sapiens
aacctcctaatctaagaggatccagcctacctggaaagccaatcagtcctcataatggacaagatccaccagactcctcctgtggactaacttatgtgatatgggaagtgagaaatagttaacaggctgtgcacgatcaaacgaacgaagatgaccagagtactcttaaccccagttagaactgtttttccttttgtatctgcagagtatgggatggtagttgttttcatgagcttctagtaaatttcactgtgcaagttgattttcgggttcctgtgttactgccattcctatttacagtactattggagtgaatgattatattgttaacaaaagtgacatggggctatggggtggtcctaaacttgacaaacgattccactcattgctgtttgtaactgtgattataattttgtgataatttctggcctgattgaaggaagattgagaggtctgcagttgatagtattttaaatagatttgataggtgttccaaatggcgttgtttcagtaaggtatttgtaacagttattggggttgtctgggattgtgtgaagaaaattagaaccacgctgtattacatttacctgggagttatttgtggatggcagttctgtagttaggggacggggtagtctggattgttggaactaagtgagactggtcaggataaatggaagtgg

SEQ ID NO: 481881 - DNA, 147 bp, Homo sapiens
tcgctctaaggatcccgaacggggtgatgcgtggtggtgagagcttgtactggtgggctattctgtcacgaaccctggcgcccctgcatcagctggctacgactccaccttctccctggaccagcccggtggcaccctgtgatctga

SEQ ID NO: 481882 - DNA, 144 bp, Homo sapiens
aatcttatatgtaaccatcatgctgtaagtaattaaaattgctacaactattaaaagtcaaatagtacagctcagaaaaataattcatgtactctaatattgtataagtagagatggggtatcaccatgtaggtcagcgctggt

SEQ ID NO: 481883 - DNA, 124 bp, Homo sapiens
cacgagggctgccggcactcaggcatataggaccacatgagggaacattttcagtctatcttctgaattgccttgtcaggagagcctgtcagatggccatgcgtaatggaccgaattcacatcc

SEQ ID NO: 481884 - DNA, 100 bp, Homo sapiens
actgagccgtatgatttgtagtatttgggggatcattgtctgatagctgaaacttcccattaattgtccaagaatactctgccggtgggttatatgtccg

SEQ ID NO: 481885 - DNA, 574 bp, Homo sapiens
acctgtcttcaagaaagtatggtaaagagctattaaaaaagggtcatagacagttcaaaagcaactggtctgttttcccagcccccgctaattcatctgtcctgtgatttattatttttcctgttttaaatattgtccccttttcaaatccaagccagtatttctcttcatcaatgaagaattccttgacaaccctacctcaactcttcttctccatgtggatccacttgatgtctgcccatcaatgacctttatcacacgctatcttgcactaatagttatatttgaattccaggttttcccaaatgtgcttggagacatttaaggcaagtgctttcagtaaagtttataagacctttaggtagttaccatggagcaggcattgggctgaatgtattctgttgcacttgtactggctactatcctgtgagattaataccattattatctacagtttgtagaggaagaatcttgaggctcagaaacattattccagttcacctagcataatgcctattttagatataatccttctattggcatacagaagtgcttgagcgtggtttggagaaca

SEQ ID NO: 481886 - DNA, 173 bp, Homo sapiens
agtgttatcgttaaagaaagcgtctacaggttgagcatccctgatctgaaaatctgacaattttgcatgctccaaaatcgaaaactttctcagtgccgacatgatgcctcaatgaccaattccacatacagcagttcacacaaactgtttcatgcacgatatgatcaaaatcg

SEQ ID NO: 481887 - DNA, 183 bp, Homo sapiens
tcgtagggtaaatgtttaagaaaaaaaagtgtaattggctaaagaataattcatgatctgtttatgcgataactccttttggttacaatttttttaaaaaaagctattttggttaatgtaaagtaaatatttcagagcaatttttttaaacttatgcgcactaaatacaggctctgtcacaac

SEQ ID NO: 481888 - DNA, 359 bp, Homo sapiens
cagcggtcctggagctgtgaggagattcgagccgtcacgctgcctcccctgcgttccgccatcagccgcttctgtcctctgacccattccaacactctcgtcatggtggattactatgacgctctaggcgtgcagagacatgcctaacccgaggatattagaaaggcctatactaaactggcactgaagtggcatccagatagtcctgagaatcaagactaagcacagagggacatttatgaccaatatggccatgaatgattcaatggtggaggagcatgctgaagtcattctgacagatcatttgaatagggctgcacattccgtgaccaacatgatgtcttcgggttgtctggtgg

SEQ ID NO: 481889 - DNA, 156 bp, Homo sapiens
agtggcttcactctcaacttcactcctataattctagtcccggctttgagtggtattcaacctttccaaggttctcaacccttttcacacgagtacggttacggatttgggaggatctagcccttaagactcctatggacctactagagcttgact

SEQ ID NO: 481890 - DNA, 200 bp, Homo sapiens
tgatcgcggatagcgatgtggagcctgaagtttcccgcaaactataatgattgtcccaggtcagcaaatgcctgagacctttattaaaaaaaagtttagggagtttccagcgtggctcagtggaaacgaatctgactagcatccatgaggacacaggttccgtccctgacctcagtcagtgggttgaggatctggtgttg

SEQ ID NO: 481891 - DNA, 184 bp, Homo sapiens
gaggatcccccggagagtacaagagacagctgtaaatacatagaagctatcatggtgtgtctcaggttattaaggataaacgtttaatcaattaacatctcttaacagctctgagaagtctttactgaaacgtatgagaaaaatattcaagtaaccacgtttaaaaccagttaccccaaaatct

SEQ ID NO: 481892 - DNA, 956 bp, Homo sapiens
attctagaggccgaggagggcagatcacgaggtcaggagatcgaaaccatcctggctaacacggtgaaaccccgtctctactaaaaaatacaaaaaattagctgggcgcagaggcacgggcctgtagtcccagctactcaggaggcggaggcaggagaatggcgtcaacccgggagggcggagggttgcaggtgagccaggatgtgtgcgactgcacctccagccctggggtgacaggggttgaaacgccattctcaaaaaactaaaaaaatttacaaacaatcaatacacaaaacaaccacacacacatcaaacacaacaaacaaccacacacaaaacacaacaaataaaatatataaacacacaatcattctgtgtggggcgcaatccactccccctagagaaagaagtgttctaaacacaaacccgcattggacgtgcagcggcgcccaaacattggtcatcacgacgcaacgtcgcgacacatacctagtctaaccagacagaggtaaacctctggccccaactcatgatcgggttatgggttcctccgccacagataaaaaccgaccgtcggaacacaaccagctgctgtttgcaaaacaacacaggtgagcgatacgcggagcgcgcacaacagaggcggcaccacaaacaagcgggagctcacccatgcagagcacgaaacaaaaataaacgcccgccgggggggagccacaaaacgagcaaaacaaagtgaaaacagaaagcaagaagacaagaacgagaggaacgcgatccagacaacatacagacgacagcgacagcgaagaaggagatatcacaacacgacgagcgaccgaacaaacaggcaagacaaaacacggagactgaaaaacaagaagacaagacaaaaagaaaagcatacatacatctaaacaaatcagcaacatacacaaataacgacaacgaaacca

SEQ ID NO: 481893 - DNA, 113 bp, Homo sapiens
attaataagaccggatgattccaaatgcgaggagtcctcagagcggtgctgtggacgtgtttatccgggagtcctgtatgtctgcatctggcgccttgagaccttatggaggt

SEQ ID NO: 481894 - DNA, 273 bp, Homo sapiens
ccctagcatcttcctgtactttaattcatctctggattattataatacctaatacaatgcaaatgctatgtaaatagtttttatactatattcttcagggaaaaatgacaaaaaaagtctgtacatgtttactccaattgcagtttttttttttttctgaatattttcgattctgggttggttgaatccacagatgtggaacccagtgaatatggagggctgactgtattaccaatccaggcatttctagagaggtcaggattctggtatgta

SEQ ID NO: 481895 - DNA, 365 bp, Homo sapiens
cggcgctatactactaattgcggcgtcgacagcatgcagaatcaaggaagacgttcgcatagcattgttttaaaagataaaaataaggataagtgtggtggctcacacctctaatcccagcattttgggaggctggagcaggcagatcacaaggtcaaaagatcaggaccatcatggccaatggtgaaacccatctctactaaaaacacgaaaattagcagggcatgatggtgcatgcctgtaatcccagcttctccggagactgagacaggagaatcgcttgaaccagggagtgtcagaggttgcagtgagctgagattgcgccactgcacttccagcctggtgacagagcaagaccctggctc

SEQ ID NO: 481896 - DNA, 379 bp, Homo sapiens
ccaatatattatccaataatatagagaagtgaatggactcattattatcacgtagtttccaacgattgagttcgtcattgttatatagagccagaagcctgaaaacctaagatactatttcagactatactactatattgtggcatagttcttagtgggaattattttactttgcctctctgtgcttttcctttctaagaaattgagtaataatacttaactagtaaatgtttaatattatggtaaaataatagttgtcaagtactttgaagacttaaatgatatgtatattaacttttttactctcattcattttgaaaagtatcagagcctcagattaagagtgattggatagttttcactttgttgcattttctgt

SEQ ID NO: 481897 - DNA, 650 bp, Homo sapiens
tttttttttttgaatttaaatttaaatttattttcattatgttggagaggtttttcggtttggtttggttgtgtagtgtagtggttttggagacagtctgtgctctgtcacccaggctgggacgtgcaggggcatgatctctgcaacctctacctcccaggttcaagcaattctggtgcctcagcctcccaagtaactgggactacaggtgcacgctaccacaccgtggctgatttttttggttttagtagagacagggtttcaaccatgttgcccaggtgggtctcaaactcctgagctcaggcaatccacccgcctgtggctcccaaagtgctaggattacaggtgtgagccaccacacccagctattttttactttgcgtttttataattttaaagttggggggggtctcaattggttacccgtggctggtctcgaactcccggacttaagcgatcctctggctccaagcccagtaccagtctcaggtttctttactaaaaggatcactaccgtttttttctcctaatctggcgtgcgcatgttgacgcatgtgtgcgcttgtcaagcctttccgggccatgtgagtgtgtggcaggcgcttgcccaggcccagcgttagaacgtgtgaacgtccagataaaccttc

SEQ ID NO: 481898 - DNA, 251 bp, Homo sapiens
accacacacactcatacacagacatacagacacacacactgatatatgcagcacgtacacacgatacactcagacacactgacagacaatctactcacacacatactcctaggagagcgatcctgacattcaccatagggaagtcacggggctacagtgcctatgaataagcatgctaaacaaatttccagctgtgaggtaacaaaaccatgggtcctgggtctcccatccttttaaatcctcagtatgct

SEQ ID NO: 481899 - DNA, 159 bp, Homo sapiens
gagttgctacgatggaagttaaagggaaaagcaattcacaggaaagggtacaagacagcacacgacaagacagtttctaaattagtgttctggttcttcatgctttcaccaggcagttgctatagaggtggcctcagtcacatctaggactctgagaag

SEQ ID NO: 481900 - DNA, 587 bp, Homo sapiens
cattggatgataaagcattgttaatggtgaaaagttcacagatcactaatgttctagaggttaacttcaagtgggcaagctggggtttaaggtagtcagcggcctagttcctaaagccacagtataggatctgttaaactgaatgtctgtggaaagttggttttagctgcttggaggcttccttttaagacaaagtgtatgtgatcaagtggttttgagggaactgaagaacctgatgtagcccctggccagataattgcctgatttctcagatattatttctctgggaaacattctacatagcacaggagcttaagcagtggcattatcttctcgcctaatttccagagattatttctggtactgagaatcctgggaactactattgctaggaacatttaaagctgcatggtctgtctgtgtgtccatttaacttatttgtgaataccttagaatcttcatgggtcctggatttctcctgtgcttaagtccagtctcttatctctaattgcccctttatttgatccaccatgtacctaagggaagctctgattagcaagttcagactcttaaatcctttggaggca

SEQ ID NO: 481901 - DNA, 267 bp, Homo sapiens
cccttctgtcgagacacggcattttagtagagacgagattcgctgtgttgcctgagctaggagtcgagaccagcctggacaacatgaagaaaccccgtctttattaaaatacaaaaaattagctgaatgtggtggtgcgtgcctataatcatagctacttggaaggctgaggcaggagaatcgcttgaatcccagaggcggaggttgcagtgagccaagatcgtgccactgtactccagcctgggcgacagagtgagacactgtctc

SEQ ID NO: 481902 - DNA, 116 bp, Homo sapiens
gccggtagccatttaattgattcttttgtggcaccaccagcccattgtatttcacagaagattggccacaggcaaaataaaataacccaccacaaatccccttctgtcgtcttctc

SEQ ID NO: 481903 - DNA, 1576 bp, Homo sapiens
gacagagtgaggctctgtctccaaaaaaaaaaaaaaaaaaaaaagattgtccaccccagttgcccccatccaaagggcctgctgcgtgttgaccccccatgcccttggttaacccactctcctgctcaggggccccagaaggaaatcgcgtctcttcttcttctctatctcctgtggtgcaactttccccctgtaagtttgtgaggctttaaagagaattagcaattctcccgattaaaccccagctttgtcgtgcaagcctccgtgatacgccccaacattcttccattattgcgaactcctttgtgaagcgcgaaggcgtgcagcatctccccgtgccattctcttgaatctgggcagaacccattgtttctccaccctttggccctccgttgggggccccgtgggggcccatttctcccgtggcgtgttccttgcagccccttctttctcttgccaccacacgcacgcacccctcttcagacattggcctaccacttccgtcgcggcactttccagcttccacccgtagagaacgctccctctccaggcgagggctcctctatacgcgccaccagaaacgacacccctttggacgtttcagacccaccgccagaacgaccactctgacagacagctccctaggcggctcctcgcgccttctctagcgcatctcgcgccgtcgtctcgcgcccttatctctcccaacgcacctccaacttggtccgcccaatatatctccccaagattctcgcgaactgtgcgcccccgttgcgcggcccctttctctctggcggtggccacgcgcaaccacgacggtcccaaccccttttgtgcttcccccaatattacaggcgcacgcgcggcatccccactttgcccccacccccacgaggaacccttatcacgaacctgtgcaacgccccttatggggccacagacactctctagggcagccatcactctcggcggcgcctctttcccgcgaccgcaaccactctttccaaccaccgcgcaccccgccccaccacactccccccctctcacctccgcgacacaccactcgttaaacccccccaatcaacaaacccctccccgcctacctcccccgccacctcccacacgcgccattacccaccaccttctccccccctacctccaactcccacctgcccctcactcaccaaccccacccaccgcaacacaccctctcccccccttcccctttactactaccaaaacccccaccccctcaccacccagcttcatttgactccctggcccgcaaactatggcgaacataccacaacaactctttccaccaccaatcccacaagcaaaacaccgctggcacacgaaccatctacacatccactgacgcctcagtggccaacccccctctttcaacacgaacagcccaaccacccttatccccccagactcttaccccccaagcttctaccagccacactgtggacacacccccctcgtcaacatagtctccaacaacagcgtcccctcgccccagtgatacccctcccacacaatgccaacagttatactcccaccacgctgc

SEQ ID NO: 481904 - DNA, 295 bp, Homo sapiens
gtctgacaaccaacagataataaacagggggattatagactgtgataactgctatggagaaaacagatgcagaggagtgggaggcggcctttccttcacagaagagtcagaggtggcctctctgagtaggtgaaattgagctgagccctgtagatgggaaggaagacgatgccctgggaagagcccgtggggaagaaacaggggaatgccaagtgcagaggactcagtcctgaaacaagtctgtgccttcaagtgggtatttaaggacttgtgctttcagagcagaaggtcgacg

SEQ ID NO: 481905 - DNA, 635 bp, Homo sapiens
  misc_feature (525)..(525): n is a, c, g, or t
agctggtacggtcggagtctaaggatgggagggctccgggacagcccgtcggagaaacctgcatcatcctcactaagtggatccacttgctcctcaggaataaaggctcagggaccgggagttctactctagagcccagcagcctctcagagcctccggtgactggcctgtgtcgtccgcgcctggatggacagtgtggacggcgctggtcatcctgcaagccttgttgctacccttccgtgggctgatgagtgaccaacccatgccgcctgcagcgtttgtagtcctgtggtgtgactggggtaggggtgcctccaatggccacattccatcacggactcgggatattggcacaattgcgcataggatgatcgactcaggactgtgcagcatcctggtgtgcagagcttgcatgccatgtctctaggcggacaactttctgtacgttcacgtggtgatgcccagacaatcaaatgacgacatcatggttcacaggagaccgtattagacggatctgtacttctnctgtacacgcgtcccttcgggaacatgttgcgccctggtaacgtgctagccggggaatagcgcgatgacggcagcgttggcagaatgtcatctgacccaagaattgcata

SEQ ID NO: 481906 - DNA, 941 bp, Homo sapiens
tcacagaacagaaagcagagcctcaggatgatgggaaaagtactgagtcagatgtaaaggccgatggagacagcaaaggcagcggaataggtggattctcattgcaaaaaggccctgagtcataaagagctatatgaaagagcccgagaaactgctggtatcatacgaagaggagcagtttagcgtgtgctggagaaatttacggtatttacctaaagggccattagaggccgtggtaataagcccgtcgcccacgtgtatgaatgtgtcctgcgcaagtagctcatcggcgcgttacatgcgagtaacagggaggctgtgctggatgcttttctggatgatggcttccttgtccccacatttgaacagttggcatgctttgcagatagaatatgaacgaaaaaatgtggacttgcaactgaccgtcctgagtgccaaagccgtactctcaggttctggcaggtccctgctcaggggcctgctactcccagaacttcacgcagtgccctataggagaggatgctctctgatctgccagccttggggatcagcgggatccggctacctacatcctcagagtggaccgtggaactgatcgtggcaactaccaagactggacggaatggtcgcgatttctgcaggccagtggaagcagaagggctggaggctgtgcaatgtccgctcccttgaatggccgatggctgatcttgtttggagtcaccttgctgggcaaggcccaatccttccgaatacctgcaagcatggggcagggctgccaaaaagaccaaaggtgtgcaatgtccatttcccaagtaggaaaagccggggcaagggatgagccccaaggaatcctaccaaactgttgggggacaccccacttgtgtaaacacaaaaaggttttataggaaagctccccagaatacagagaatcaaggtgcccc

SEQ ID NO: 481907 - DNA, 164 bp, Homo sapiens
ttagaggatccccaccagacaaatcgctccaccaactaagaacggccatgctaactagttactcgacccccaagcgccacaccatgagccccagcaactaataacggccatgcaccacgcgccacgtgcctcccgatgagccaccctaagtgccacccgaagcg

SEQ ID NO: 481908 - DNA, 3231 bp, Homo sapiens
  misc_feature (67)..(67): n is a, c, g, or t
gtacagcatgttactgtacggaatactgtaggcagttgtaacacaatggtaagtatttctgtatccnaacattttagacatagaaaaggtacagtaaaaatatggtataatcttatgggaccatcatggtatatgtggtccatcattgatggaatcgtttttatgcagcacatgactgtatataatcaacaaacaactctactttcttgttttcgtttgttgtgtttttgctttacacatttgatagggaacatagaagttgtgacctttcatttcagtggaaagcattgagccagaatatatttattcctaaaccatcgagccacacatgcattgatgaaccctgaaagaatccacagtaattgactaacaggcagtactgaatgaaagatgtcatatgtggtgaaaaatatttaatatatcagtttcttgggctcacatacagccctttagttccaagtgcttggttagattagaaaatgggatgaacacaatttgatgctgaagcagctgctgagcagcacccagggagtctaggtcatacgccctatattgttttcggcccacttattgttgagttgaaaagtctcatatttgtagactagagtgtatgtgtttacaggcccatgttgtatctgagttttctctggcaactaagatctctttctaaacgttctagaaagatactggtatcttactggcccattatttagtaagttttagaatacatgtacatcagtgttttcaactgcttggtggacatttcactgatgcataatcaaagtagcagattataatcatcagagtgatctgacaaggaaattctgtatttgcttccataaagaaaaataatcaaaacatatatcagatataatatatatgcagtatatcacataggaaattttattgtaggaaattagagaaggatgctactcaattcattctctagcaggaagaatacagcttaaaaatcacttgggtccctttaataaagaaaagtgtgattctgtgtgtgtgttggaactgaaacttggagaacacgtgccagtcgactgtgaaatggttgctggataaaaccacagatgtggttttatccgagaaatgtgggactgaaattattttgataagaggtacataagagagctgcagaaaagactgtagcttctgaggaggcaggagtaccttgttaatatccaaaccacccctgagttctaatgttccaactccacctaaacgaggaattggaaactttaaatggaattatctaatttaaattcttagttttttctttgtctttctcagctgatacttgtagttttgttttgttttttaaccaccaagaacacttgcaagtttgttactgaaaacatcactaaaggaaaagaagagtttcaaaatgcttgaaaagtagtatgtggttgggaattgtttttgttcaagtccctggaagtcctcttggcttagctcccttgttcctgttcccacttcatttccttacttaacattcccctattttgagcatgtcaataagtgcatgatgaatggcacagttgaatgatcatgttaactttaattgcttcctttgttgctgtaaacagtttcttgttaagtttcagccaagtctgtgacaatctcaccaaataagaatgaaatgggcggggtgtggtggctcacacttggaatcccagcactctgggaggctgtgtgggccgatcgcttgagctcatgagttcaagaccaacctgggcaacatggcaaaaccttgtctctacaaaaaatacaaaaattagccaggcatggtggtgcacacctgtagtcccagctacttgggaggcttaggtgggaggatggcttgagcacgggaggcagaggttgcactaagccaagatcgtgtcactgcactccagcccaggcaatagagccagaccctgtctcaaaaaaacaaaacaaacaaaacatgaatgaatgaaatggctcaccttccctattatgaactagaagaaaggatgaaggaaggttggcaggaccccagccttactctgtagtgacaacccagaggtacttttcccggaatgcagggtcaagtttatgtgtgaagggactctagaatagctggtaaaaatggctacatggtaaccattcttgacttagtccagtattcccataatttgtaattccataaatttattctcagctgtcccccagccatttctaatagaaggatgtgtaccccagttttgacaatgttcttgaaatcaagttagtgttacctgcattgcattataatggaactatatgtacatgttaaagggatccgtttgattcctttcggcaaggaattgcaaaaatagtttttaccaataccagttaaaataggataggttagactttgggggcagggtgagacagtgcagccttttcactctgaaatggcaaatcagctgtactctttgagtctaccagagattcctatttgagtgtgaatggggtgtgtgtgtgtgtgtgtgtgctcattcatcttcatgctttcttccatggtgttaattcaagctctcctaataaaggtatccaaagagtactgagaagtgaccataggtatttggcatgagtaaatgtagttccttttgccaaaaaaactctcaaaagttacaactggagttcttcgcgataaaaggttggggaaatcagccatggctttagccttgttcccaagtacacatcttcttatccacaaggatgaaactctgtagggctcaccctgagggctcatgtgtggcattgagagggtagcagtgaccagaacaccacaaggcccacaagatgttttgaatgagggaacatttaatgtcatttgttaggagatagaaaccaaataataaaggacaaggaccacgctcattccgtggagaagaggtgaactccctctgctgactatttggaatggactgaatgaggaggtctctccagccagaaggagtattgaggtcatcaggcctcagaaaacaatgtacacataatctcgggctgtgaacaagagaaaggagggggggaaacatgaaagtcaatcttaacaatttttgcaatacctcttatttgcagaccattggatttatgttattgcactctcggtgtgatttatcgtatgtatctgataggttttatgaattgttttgagttgtaaactcctataccctttattaaaatggacctaattaagtgaaaaaaaaaaaa

SEQ ID NO: 481909 - DNA, 257 bp, Homo sapiens
atatcgtggatcattcacttgcttatgacgctgatacaacgatatgcgctaccacggtatgatcattttaagttgccacgtgagaacatcaactacgatgactagaacaatggccatggtgtgtgcacaatgggcatgtggacataatagactcccagtctgttagctgcctggtcgccatttaacgtatctgcttttggaacaagtgcagccttgcctgtttcttatttacttacacctttggttggccttggtgc

SEQ ID NO: 481910 - DNA, 2911 bp, Homo sapiens
  misc_feature (67)..(67): n is a, c, g, or t
gtacagcatgttactgtacggaatactgtaggcagttgtaacacaatggtaagtatttctgtatccnaacattttagacatagaaaaggtacagtaaaaatatggtataatcttatgggaccatcatggtatatgtggtccatcattgatggaatcgtttttatgcagcacatgactgtatataatcaacaaacaactctactttcttgttttcgtttgttgtgtttttgctttacacatttgatagggaacatagaagttgtgacctttcattttgtagactagagtgtatgtgtttacaggcccatgttgtatctgagttttctctggcaactaagatctctttctaaacgttctagaaagatactggtatcttactggcccattatttagtaagttttagaatacatgtacatcagtgttttcaactgcttggtggacatttcactgatgcataatcaaagtagcagattataatcatcagagtgatctgacaaggaaattctgtatttgcttccataaagaaaaataatcaaaacatatatcagatataatatatatgcagtatatcacataggaaattttattgtaggaaattagagaaggatgctactcaattcattctctagcaggaagaatacagcttaaaaatcacttgggtccctttaataaagaaaagtgtgattctgtgtgtgtgttggaactgaaacttggagaacacgtgccagtcgactgtgaaatggttgctggataaaaccacagatgtggttttatccgagaaatgtgggactgaaattattttgataagaggtacataagagagctgcagaaaagactgtagcttctgaggaggcaggagtaccttgttaatatccaaaccacccctgagttctaatgttccaactccacctaaacgaggaattggaaactttaaatggaattatctaatttaaattcttagttttttctttgtctttctcagctgatacttgtagttttgttttgttttttaaccaccaagaacacttgcaagtttgttactgaaaacatcactaaaggaaaagaagagtttcaaaatgcttgaaaagtagtatgtggttgggaattgtttttgttcaagtccctggaagtcctcttggcttagctcccttgttcctgttcccacttcatttccttacttaacattcccctattttgagcatgtcaataagtgcatgatgaatggcacagttgaatgatcatgttaactttaattgcttcctttgttgctgtaaacagtttcttgttaagtttcagccaagtctgtgacaatctcaccaaataagaatgaaatgggcggggtgtggtggctcacacttggaatcccagcactctgggaggctgtgtgggccgatcgcttgagctcatgagttcaagaccaacctgggcaacatggcaaaaccttgtctctacaaaaaatacaaaaattagccaggcatggtggtgcacacctgtagtcccagctacttgggaggcttaggtgggaggatggcttgagcacgggaggcagaggttgcactaagccaagatcgtgtcactgcactccagcccaggcaatagagccagaccctgtctcaaaaaaacaaaacaaacaaaacatgaatgaatgaaatggctcaccttccctattatgaactagaagaaaggatgaaggaaggttggcaggaccccagccttactctgtagtgacaacccagaggtacttttcccggaatgcagggtcaagtttatgtgtgaagggactctagaatagctggtaaaaatggctacatggtaaccattcttgacttagtccagtattcccataatttgtaattccataaatttattctcagctgtcccccagccatttctaatagaaggatgtgtaccccagttttgacaatgttcttgaaatcaagttagtgttacctgcattgcattataatggaactatatgtacatgttaaagggatccgtttgattcctttcggcaaggaattgcaaaaatagtttttaccaataccagttaaaataggataggttagactttgggggcagggtgagacagtgcagccttttcactctgaaatggcaaatcagctgtactctttgagtctaccagagattcctatttgagtgtgaatggggtgtgtgtgtgtgtgtgtgtgctcattcatcttcatgctttcttccatggtgttaattcaagctctcctaataaaggtatccaaagagtactgagaagtgaccataggtatttggcatgagtaaatgtagttccttttgccaaaaaaactctcaaaagttacaactggagttcttcgcgataaaaggttggggaaatcagccatggctttagccttgttcccaagtacacatcttcttatccacaaggatgaaactctgtagggctcaccctgagggctcatgtgtggcattgagagggtagcagtgaccagaacaccacaaggcccacaagatgttttgaatgagggaacatttaatgtcatttgttaggagatagaaaccaaataataaaggacaaggaccacgctcattccgtggagaagaggtgaactccctctgctgactatttggaatggactgaatgaggaggtctctccagccagaaggagtattgaggtcatcaggcctcagaaaacaatgtacacataatctcgggctgtgaacaagagaaaggagggggggaaacatgaaagtcaatcttaacaatttttgcaatacctcttatttgcagaccattggatttatgttattgcactctcggtgtgatttatcgtatgtatctgataggttttatgaattgttttgagttgtaaactcctataccctttattaaaatggacctaattaagtgaaaaaaaaaaaa

SEQ ID NO: 481911 - DNA, 213 bp, Homo sapiens
acaaccatagaatggatttggagttggtagtaggtatggttctcataccagagttctcttaaaaaaaaaaaaagggccattgggaattgccttatttattttaaaaaccatggctacctagtgggtaggatccccaggccagcggcggggttgattaaataatcttgacaatgagcagcggccatctgggggaatttcattctatggggggcc

SEQ ID NO: 481912 - DNA, 365 bp, Homo sapiens
  misc_feature (360)..(360): n is a, c, g, or t
catgaggcaacaaagggaccaggaacacaaactatctactaagaggtatatgccccactacaatatataagactatcttagtgtgaggccaccggttcttactttacaatagcagacgccataattaagaccacatagcaataacagtatcaatattctcactgaaaacacgaattcactacatatataacctaacaacattctcctcagaaataatttgccacatatcccgctagccccccgagaccacatatgtattaggatacaccgcctatctataagtatcccacggcggttcattttatagtaaaaaaacatgagaaagacaaaaacaagaaacacaataaaaaggctgggtgngcggg

SEQ ID NO: 481913 - DNA, 1573 bp, Homo sapiens
gatacgaagtcgagccggtacccaacacagacactctggcaggctgaggcgggcggatcacaaggtcatgagttcaagaccaacctgggcaacatggcaaaaccttgtctctacaaaaaatacaaaaattagccaggcatggtggtgcacacctgtagtcccagctacttgggaggcttaggtgggaggatggcttgagcacgggaggcagaggttgcactaagccaagatcgtgtcactgcactccagcccaggcaatagagccagaccctgtctcaaaaaaacaaaacaaacaaaacatgaatgaatgaaatggctcaccttccctattatgaactagaagaaaggatgaaggaaggttggcaggaccccagccttactctgtagtgacaacccagaggtacttttcccggaatgcagggtcaagtttatgtgtgaagggactctagaatagctggtaaaaatggctacatggtaaccattcttgacttagtccagtattcccataatttgtaattccataaatttattctcagctgtcccccagccatttctaatagaaggatgtgtaccccagttttgacaatgttcttgaaatcaagttagtgttacctgcattgcattataatggaactatatgtacatgttaaagggatccgtttgattcctttcggcaaggaattgcaaaaatagtttttaccaataccagttaaaataggataggttagactttgggggcagggtgagacagtgcagccttttcactctgaaatggcaaatcagctgtactctttgagtctaccagagattcctatttgagtgtgaatggggtgtgtgtgtgtgtgtgtgtgctcattcatcttcatgctttcttccatggtgttaattcaagctctcctaataaaggtatccaaagagtactgagaagtgaccataggtatttggcatgagtaaatgtagttccttttgccaaaaaaactctcaaaagttacaactggagttcttcgcgataaaaggttggggaaatcagccatggctttagccttgttcccaagtacacatcttcttatccacaaggatgaaactctgtagggctcaccctgagggctcatgtgtggcattgagagggtagcagtgaccagaacaccacaaggcccacaagatgttttgaatgagggaacatttaatgtcatttgttaggagatagaaaccaaataataaaggacaaggaccacgctcattccgtggagaagaggtgaactccctctgctgactatttggaatggactgaatgaggaggtctctccagccagaaggagtattgaggtcatcaggcctcagaaaacaatgtacacataatctcgggctgtgaacaagagaaaggagggggggaaacatgaaagtcaatcttaacaatttttgcaatacctcttatttgcagaccattggatttatgttattgcactctcggtgtgatttatcgtatgtatctgataggttttatgaattgttttgagttgtaaactcctataccctttattaaaatggacctaattaagtgaaaaaaaaaaaa

SEQ ID NO: 481914 - DNA, 937 bp, Homo sapiens
  misc_feature (34)..(34): n is a, c, g, or t
atactttaatcaagctaatttaatatataaaaancttacctgaaacgatctcttattttcaccgctacagtgcatagtatgggactgggactccagtggcaagcttgacttcattggacaattcacctcgacattcaaggatatgagaggagcattgcaaggtaaacaggtgcagcgggagtgcctaattccaaaacaatgtcaagaaaaagaattacaagaccttaggcactgtgattgtagatttgtgcttgaattccattatgcttatttatttagaactacttatttgataggttctcaaatccaatgttcttaatttgttaaattctccttatctggagcgttgtcttcaattatcagatagatattttatctactttaaatctatacttttttattttattaatattatttttacagtatattatacgtaatatatattacaatctaaataagtattaattataattttatattgtttttttctacatctctatctatctcaaatttgttccttctgtaacgtagtttttattagatattattcttattcgtgttctgatctagatatcttcttaacataatttatataatgtaatataaattatattaaatatataaaataaaagtcttactaacataatatcgctttcacctattagattaacataatttattaaatgctatacaaactcttcgtattacgattgtgtaccggctgttatgcagctgttaatatttcttcaccatgcgacctgacactagacaaatcaccgtattcgtatgtagattttgataatcttctatcaacctccttctaagttagtagtattttaagaatttctcactaggagccagttcaatactttctgtttttatttggtgtttagattttgtatactattatatcggttaccatcaaaaaactataaag

SEQ ID NO: 481915 - DNA, 100 bp, Homo sapiens
cgagaagatattcggatgccatcccgagctgaaggcctccatcaagatgggggaagatttcgtgaagaccctgaagtgagccgctgtgacgagtgcccag

SEQ ID NO: 481916 - DNA, 1564 bp, Homo sapiens
ggcgactctaggatcccagaagacactctgggagctgtgttgggcgatcgctgagctcatgagttcaagaccaacctgggcaacatggcaaaaccttgtctctacaaaaaatacaaaaattagccaggcatggtggtgcacacctgtagtcccagctacttgggaggcttaggtgggaggatggcttgagcacgggaggcagaggttgcactaagccaagatcgtgtcactgcactccagcccaggcaatagagccagaccctgtctcaaaaaaacaaaacaaacaaaacatgaatgaatgaaatggctcaccttccctattatgaactagaagaaaggatgaaggaaggttggcaggaccccagccttactctgtagtgacaacccagaggtacttttcccggaatgcagggtcaagtttatgtgtgaagggactctagaatagctggtaaaaatggctacatggtaaccattcttgacttagtccagtattcccataatttgtaattccataaatttattctcagctgtcccccagccatttctaatagaaggatgtgtaccccagttttgacaatgttcttgaaatcaagttagtgttacctgcattgcattataatggaactatatgtacatgttaaagggatccgtttgattcctttcggcaaggaattgcaaaaatagtttttaccaataccagttaaaataggataggttagactttgggggcagggtgagacagtgcagccttttcactctgaaatggcaaatcagctgtactctttgagtctaccagagattcctatttgagtgtgaatggggtgtgtgtgtgtgtgtgtgtgctcattcatcttcatgctttcttccatggtgttaattcaagctctcctaataaaggtatccaaagagtactgagaagtgaccataggtatttggcatgagtaaatgtagttccttttgccaaaaaaactctcaaaagttacaactggagttcttcgcgataaaaggttggggaaatcagccatggctttagccttgttcccaagtacacatcttcttatccacaaggatgaaactctgtagggctcaccctgagggctcatgtgtggcattgagagggtagcagtgaccagaacaccacaaggcccacaagatgttttgaatgagggaacatttaatgtcatttgttaggagatagaaaccaaataataaaggacaaggaccacgctcattccgtggagaagaggtgaactccctctgctgactatttggaatggactgaatgaggaggtctctccagccagaaggagtattgaggtcatcaggcctcagaaaacaatgtacacataatctcgggctgtgaacaagagaaaggagggggggaaacatgaaagtcaatcttaacaatttttgcaatacctcttatttgcagaccattggatttatgttattgcactctcggtgtgatttatcgtatgtatctgataggttttatgaattgttttgagttgtaaactcctataccctttattaaaatggacctaattaagtgaaaaaaaaaaaa

SEQ ID NO: 481917 - DNA, 184 bp, Homo sapiens
  misc_feature (42)..(42): n is a, c, g, or t
ggaaaccgtattaattcctcattcatgtgtcggaaatacacntagccgtcagtgattgtcacttcccagagagccatgcgacgcagtatctgggtgccaaagctctccaggaactacctgaaggaaggctacatggagaagagggggcccaagacataacggaaggtgcttcccggacagcgct

SEQ ID NO: 481918 - DNA, 165 bp, Homo sapiens
ctcgtccccgtgtccaggctggtgttgaactcctgggctcaagagtgtgtgtgtgtgtgtgtgtgtgtgactgtggtggggttgtagcctagcagtgtgagtgtgggtggtgggtgccccgctctgtgtgtgttttaactatcgtggggtgtctcctcctttttc

SEQ ID NO: 481919 - DNA, 857 bp, Homo sapiens
  misc_feature (40)..(40): n is a, c, g, or t
  misc_feature (136)..(136): n is a, c, g, or t
  misc_feature (239)..(241): n is a, c, g, or t
  misc_feature (245)..(245): n is a, c, g, or t
  misc_feature (260)..(261): n is a, c, g, or t
  misc_feature (273)..(274): n is a, c, g, or t
  misc_feature (282)..(282): n is a, c, g, or t
  misc_feature (285)..(285): n is a, c, g, or t
  misc_feature (294)..(295): n is a, c, g, or t
  misc_feature (301)..(301): n is a, c, g, or t
  misc_feature (317)..(319): n is a, c, g, or t
  misc_feature (335)..(335): n is a, c, g, or t
  misc_feature (343)..(343): n is a, c, g, or t
  misc_feature (348)..(348): n is a, c, g, or t
  misc_feature (351)..(351): n is a, c, g, or t
  misc_feature (353)..(353): n is a, c, g, or t
  misc_feature (359)..(359): n is a, c, g, or t
  misc_feature (367)..(367): n is a, c, g, or t
  misc_feature (378)..(378): n is a, c, g, or t
  misc_feature (380)..(381): n is a, c, g, or t
  misc_feature (386)..(386): n is a, c, g, or t
  misc_feature (393)..(393): n is a, c, g, or t
  misc_feature (397)..(397): n is a, c, g, or t
  misc_feature (399)..(399): n is a, c, g, or t
  misc_feature (411)..(411): n is a, c, g, or t
  misc_feature (424)..(424): n is a, c, g, or t
  misc_feature (429)..(430): n is a, c, g, or t
  misc_feature (440)..(440): n is a, c, g, or t
  misc_feature (463)..(463): n is a, c, g, or t
  misc_feature (471)..(471): n is a, c, g, or t
  misc_feature (502)..(502): n is a, c, g, or t
  misc_feature (506)..(506): n is a, c, g, or t
  misc_feature (527)..(527): n is a, c, g, or t
  misc_feature (542)..(543): n is a, c, g, or t
  misc_feature (548)..(548): n is a, c, g, or t
  misc_feature (565)..(565): n is a, c, g, or t
  misc_feature (594)..(594): n is a, c, g, or t
  misc_feature (601)..(601): n is a, c, g, or t
  misc_feature (676)..(676): n is a, c, g, or t
  misc_feature (734)..(734): n is a, c, g, or t
  misc_feature (739)..(739): n is a, c, g, or t
  misc_feature (777)..(777): n is a, c, g, or t
  misc_feature (839)..(839): n is a, c, g, or t
gtgcacaaaggtcacaggtgcaggtacatgaattagaagngtgcatctaggattatggccaaactgttttaaaaatgcagaaatgtaaaattacatcttgaaaatatgaagagatggtctacacacttcaaaaatnaaatgttgcttataccagagatgtatgacaatcacgggattcaagtgacaagcagtaagatctcaaaaattaatactggtcaaagataacgggaatatttttnnntttnactgaaaatacattnnctactagaatannaaatctancangaactcatnnaaaaanattacaaaatctaaannnaattacttaatatttnttattacntaaanaanangattanattaacanaaaaatagacntnnatttnaatttcnaatntnacgttaattaanttctccaaaaatnaaatnnaaccaaaacnggttcaaactccaaatgaaagtntgcaaggntcagattaaaacatggaatgtttcagatganagtnataaaaacactattggttttnttctttattgaatgnnataanatgttgacatttctttnaaacttggaactactaaattttatttttncaaattnttctacattttttttttagtggtgcaagttgtcttaagtagcttaggaagtcaatctctacaaagtacttctgtntgttgccattctgataaaacaaaaactattcattaacttaaccatatgtgtatttttnttgcnataacacttaacacatgaacagacatctattatttctncactaaaacaaaagagtacaatagtgttggtctaactatcagtattgtatttaaaaaaggtnacattaaaaacaaaaaac

SEQ ID NO: 481920 - DNA, 183 bp, Homo sapiens
gcggccccgcattcaatatgatgaactaaatgtcgaagacaagaagagatctgtaaaatgtgatattttacttccactatataatacttgtgactgggagaggtaagtggaaattcaattatgatgaaaaacctatcttataaagtaatgtaggacaatacatggggacatatagatggcaaa

SEQ ID NO: 481921 - DNA, 1476 bp, Homo sapiens
tatttaaggtttgagggggaatgctggaaatggtaaggggtatggaaacttttcatataagtaatgctagggtgagtggtaggaagttttctactcattagagaggtgtatgagtgggctcgaataccggaatcgggggatatgctgtccagaatttccataagaaaccagggccaggttcaaactatagggtcctgtggtgccacaaccatactgtccgtgctaacagtccacggggacaaagctgcgctcatactgtagtacccctcagagcacaaacattggtcaccgctgctgtacgccacgatgtcgtactaatcaaccaaaaacaacattctgtctccgttcgtaactacccagtaactactacgaacacaaatacgaggccgatcaagaagccacacaacccgactagacaactcccaaacacgatcacacactaaaccactcgaaacaacaatctctcccacacacatctcccccattaccgaaccacaaggcgagatcacacaacaagtcgagaccatctccgacatctgtcacacacctagtgacataacatcagctatgcaacaaccacatacacatcaacaatatactcaacttgatccccatacgacgtatccctcatcacactgactccacctatgacactactacatctctcaactgtcacttgataaccatctaaagatgtcactcacaaatatactgcccacccgtccccacccacccttcatacctctactcacacatcaccacttcacctctcaactctcatctgcataaacacctcacacatacccaaaactcacaaccaccacacaaactcaatcacacctcacccaaaacatcacacaacccataccaaccacttccatcacatcctcatcccccaacacatccctcactcacatccactcttccactaacatcatttcgttcttccatgtactacagccttcccctcctctctaactttataccacacacatctacactacaactcctaatctcaacacatcgactcacacatacctaccatcataactcacacctaacgtatatcttcacttcatccttacatatacaactttaactaccctctaccttaaaaacatcatctatcactacgatcttcagtctcacatcacacctcccactatctgtaatattatataacgtagataactaacagttaaactaataaatcatatgattctaatctcattaatctaatgtacactaatctacttcaatgacatctcctaccatatatatatcttacaccacatactagtaactctgaactaaagaataaatcataactaacatatctcacatataaaaacaaaatcaaacttcaccaccaacaacactataataaatactgaaaaaacatatatcaatatataatactccacaacgaatcactctacataatcctacaaagagcaaatataacacaccatcaca

SEQ ID NO: 481922 - DNA, 119 bp, Homo sapiens
agtttttttggggggggggggggaagctcctgagccggggctatttctggcgctggcgctggctccagagaaggcagtccgcagtttgctacccccccaaaaggggggggcccccggtg

SEQ ID NO: 481923 - DNA, 88 bp, Homo sapiens
  misc_feature (34)..(34): n is a, c, g, or t
ccagctctgaaaaacaaaaaaccttttttgtttntaaggtttgcctgttttaaaattttataaaaaaaaactgtgggcttttgtgtca

SEQ ID NO: 481924 - DNA, 976 bp, Homo sapiens
  misc_feature (415)..(415): n is a, c, g, or t
  misc_feature (424)..(424): n is a, c, g, or t
  misc_feature (441)..(441): n is a, c, g, or t
  misc_feature (445)..(445): n is a, c, g, or t
  misc_feature (447)..(448): n is a, c, g, or t
  misc_feature (481)..(481): n is a, c, g, or t
  misc_feature (492)..(492): n is a, c, g, or t
  misc_feature (521)..(522): n is a, c, g, or t
  misc_feature (568)..(568): n is a, c, g, or t
  misc_feature (579)..(579): n is a, c, g, or t
  misc_feature (633)..(633): n is a, c, g, or t
  misc_feature (646)..(646): n is a, c, g, or t
  misc_feature (668)..(668): n is a, c, g, or t
  misc_feature (694)..(694): n is a, c, g, or t
  misc_feature (734)..(734): n is a, c, g, or t
  misc_feature (780)..(780): n is a, c, g, or t
  misc_feature (805)..(805): n is a, c, g, or t
  misc_feature (832)..(832): n is a, c, g, or t
  misc_feature (913)..(913): n is a, c, g, or t
ggaagggtccaatcctgcccacgcacacgctattaagtcaaccctgtcccccaggcccctgtcctccctccacccaggagctcctccatggcaatccaggctttccgcccaaggtggccccgtcatcacgtgccacagccagggtatccaggatgccaaccgttgggtccctaccctcctccatacccaccgcctgcccctggaatccctcctgtgaatcccttggctcctggcatggttggaccagcagtgatagtagacaagaagatgcagaagaaaaagaagaaagctcaataaaaagatgcacaagcaccaaaagcaccacaagtaccacaagcatggcaagcattcctcctcttcctcctcctcttccagcagtgattctgactgatacaggcgctggacccttccctcnagtctcccngttctgctctcccatcnagcntnnagatgccatgttgtactgggggaatgtagcccntgtgctccccnaccccctacctccccctgagcctcacccnngctgttgagccctgagtggctaggggaaatgggaagaggattgccntggcctggccntcttgttgctgcttggttagatcatatagctaatgaattaggcaggggagctantttgttgaagatngatgaactaaatgttgaagacnagtttgagaatctgtaaaatgtgatnttttactatccacttataatacttgtgattggggaggttngtggaaattcaattatgatgaaaaacctatcttttattgtaatgtnggcatacttggggaatttagtggcnaatacattccccagcaggccttttgtnggttgcactaactgcaaggttgctgggaagtagagtccatttggttgatgagctttgactgcggttttggaaccttacctntcctcctagccccaatgctgtcttgggtcctattccaaataaagttatttttcctggtctcca

SEQ ID NO: 481925 - DNA, 868 bp, Homo sapiens
agataagtgatcagccataaagtacattatctggtaataacgtttatggggtcggggtaaggctggtggtaggatacttctctgccatgcccaattatactggattcatggccctagaactacaaacaaaattcatgggttttcttgtatctttagatctagctggcatggaactcactgtgtgcaccagactggcctcaaactgctcttatgtaataatcacatacttaataggaatttctattacgttgaagattgagattgaaaaattaggaactcattgggagcgggagagatagctcagcagttaagagcattgcaagaggactcaggttcaattcccagatacacacacagcaacaatctaactgtctagtgactccaactcaagaagcagaggcaagtggatgtctgtgagttcaaggccaacctggactacagaaacaagttctaggacaaccaggctacacagagaaaccctgtctcgaaaaaacaaaagaacaaaagtcacttctgtccaccatatgtgttctgggtatcaaacttgggtcatcgggctttatgtaaaccaccctctgagccatctcagcgcgccctgtaatatggacttttgggtggatctaacactggtagcatgactcccacatccacttagggtacagttaaatagctccagggggttaggtactggtacttgctgttcattgtgctaatctcttgtctaagattcctctcctgatgcctgggtaagactgaaaaaggcagcgagggaacaggcattggcggccaggccttgctggaacgggaacggtcccccttggtgggcggccgcaaagcccatttcgccccttttattcacatacattaa

SEQ ID NO: 481926 - DNA, 320 bp, Homo sapiens
tccaggtgcagaaggtggagaagctcattgtggggaaaaagccgatcggagtcgctgcatcccgggctcggctgtgtgctctctcgtgccccaccgtcggtgtggtctgctacgtgccggctctttgatggttccagtacccaagacaagccccagtaaactcgagactacaccacgcgacgaaatctgtcctgcttcaagcgagcctcctggctggtcaccaaggactcttccacgaacgaagaagaactctggtgaccgtagcagcttccggacagtccttctaccttgtagcggcatgcagagtcctgcgtcttcga

SEQ ID NO: 481927 - DNA, 114 bp, Homo sapiens
  misc_feature (48)..(48): n is a, c, g, or t
gaacaggtcaaaaagaacctttattacttttaggatgccactatgctntcttgcagatgcctttggagcaggtgcttctgggctggagctttttgacccttctgtcgtcttctc

SEQ ID NO: 481928 - DNA, 158 bp, Homo sapiens
  misc_feature (43)..(43): n is a, c, g, or t
  misc_feature (52)..(52): n is a, c, g, or t
  misc_feature (59)..(59): n is a, c, g, or t
taatatcatcaactgtagcctagtgttccacactaatgcaagnttgggcatnggggaantcgtgttggagagagagatatgtgagaactctgtactttcttttcaatgtttctgtaaacataaagcagctctatttgctttacattgaaaaaaaaaaa

SEQ ID NO: 481929 - DNA, 498 bp, Homo sapiens
cccaaacataagatgaaggttttccctaaagttatctttcagaaagaaggaatgctttacaatttaaatccttacttcttgaggcagacaccaagttattttatactaaatactaacacagggcctaaaaaacaacaaaacaaacgcgtcaatgaaaagccgggacattgataaggagacattccaagtatgccgtcatgccgagggaaagggaagggggttggggatttcaaaacaggactggaaagtcccagtcccagaggcttctctccagtaagtcggtgaatgggctgaagatggctgaggtgttcatcataagtcagggacactgaggtttgaaaggatgtcaggccatctctagatatgggatacgttggtcagggttacaacaagaaagtagttttataaaagggggaggatccggtttaaaacgcagatttaatacttattgcgggagagtgattacaaatagtagctgccatgggagaagggctctga

SEQ ID NO: 481930 - DNA, 194 bp, Homo sapiens
  misc_feature (169)..(169): n is a, c, g, or t
ggggcacacaggttaaggaggcactcactcctttttaaggtggcctctgagagtgagtaccttccttaacgttgtaccttaggcacctcatatgtctcatgctggtcctagccttgcccaggtgcaaaccaccttatcagctgggtatggaatccgttcacttaatgcngctagcgcggggatccttagatcag

SEQ ID NO: 481931 - DNA, 956 bp, Homo sapiens
  misc_feature (44)..(44): n is a, c, g, or t
  misc_feature (61)..(64): n is a, c, g, or t
  misc_feature (83)..(83): n is a, c, g, or t
  misc_feature (92)..(93): n is a, c, g, or t
  misc_feature (103)..(103): n is a, c, g, or t
  misc_feature (107)..(107): n is a, c, g, or t
  misc_feature (110)..(110): n is a, c, g, or t
  misc_feature (113)..(114): n is a, c, g, or t
  misc_feature (116)..(117): n is a, c, g, or t
  misc_feature (123)..(123): n is a, c, g, or t
  misc_feature (126)..(126): n is a, c, g, or t
  misc_feature (133)..(135): n is a, c, g, or t
  misc_feature (137)..(137): n is a, c, g, or t
  misc_feature (157)..(157): n is a, c, g, or t
  misc_feature (240)..(240): n is a, c, g, or t
  misc_feature (249)..(249): n is a, c, g, or t
  misc_feature (309)..(309): n is a, c, g, or t
  misc_feature (534)..(537): n is a, c, g, or t
  misc_feature (570)..(570): n is a, c, g, or t
  misc_feature (580)..(580): n is a, c, g, or t
  misc_feature (595)..(595): n is a, c, g, or t
  misc_feature (638)..(639): n is a, c, g, or t
  misc_feature (643)..(643): n is a, c, g, or t
  misc_feature (651)..(651): n is a, c, g, or t
  misc_feature (659)..(659): n is a, c, g, or t
  misc_feature (665)..(665): n is a, c, g, or t
  misc_feature (667)..(667): n is a, c, g, or t
  misc_feature (741)..(741): n is a, c, g, or t
  misc_feature (745)..(745): n is a, c, g, or t
  misc_feature (861)..(861): n is a, c, g, or t
  misc_feature (868)..(868): n is a, c, g, or t
  misc_feature (890)..(890): n is a, c, g, or t
  misc_feature (894)..(894): n is a, c, g, or t
  misc_feature (904)..(904): n is a, c, g, or t
taccagaatttagatgttaattccccagaggaaaaatgccatgncaagttttccccgaaannnnacatgtagacagtgaagcntctgaagtnnggggtcaaangggnagnggnngnntttttnggnatcttgnnngnccctagttttaaagaaagtngaatccatctggggcatgtctgcatcacagggtatcactcaagagtcatcatcaggccaaaaagactctgaagggaaccaggngggtttggnccttgctgtggaaagacgctactgaaagtataagagaacaccctaatgcacgcgtcaggnacgaaaccgtaccatgccccgctaagacatgggaccagagaacacgtcaacgtcaggccgctccaggaaaaccatccacaaagacaacagaagctaacccgaggtcgacactgccatgaagagtgttggctgaaaccgcagttaccagtgtctttactggacgcgaacatccctaaggacacagctgtgctgcttcctaagcatacgtgaccacgatactgtctnnnnccgggtctccttagcgccatcactgcaccaggnccagcatgcntcaagtcctccaganccttctcctgagacagcactaggggccacgtcacaccccaggnngcancccttcancgtgcccntacccngnccggtctgccctgctggggccggtgggtatcatggggacccctgtgtagacacggacaccggagagcgtggganaggnggcgtctcagagctccccacccacacactcaagggtcagcgtcactcatgtttccttctgttcccatggtgcctccaaaagggtttccaaacaaagtcatcattgattaccctggngtatgtnaataagccaaacaccagcagcnaganaccaccaagntagttaccactttaaaagaagatgagctggagaacgagcagctctctgatgg

SEQ ID NO: 481932 - DNA, 314 bp, Homo sapiens
cctctagacgtctgatctgcgtgctgtaaagcttgtttgtggcctgtctatttacaccgtccgagactagtgataacctctggtgtgctagatggggacaaaacagtgactgtggagttcaagcatgacgatcggttcaatgaagagagcggagctctcctgcattgtgccctgctttataccagctgtgcagggcagcgtcgagctgggctgggcaggaagtgtttcatccgcttggtatagaagacggtgaagaatgggtagagagcactaaaagaatagacatggcacgggattggctcatttctctcttc

SEQ ID NO: 481933 - DNA, 174 bp, Homo sapiens
cacgatggtctcgatctcttgaactcatgatcctccccccatcagcgctcccaaagtgctaggattacaggtatgagccaccttgcccagccgatgatttattagtctcttacgatcatggactcctttaggaaacctagcctatagacaaaatgctcagcatatacataatat

SEQ ID NO: 481934 - DNA, 227 bp, Homo sapiens
tatccagactcacgtttattatctgtgctttctgtgggtaccgcttgttgaagggctaagaacgattcaaagtacctagtagctgggcgagcagctactgattctgcgtctgagggcttggcttcctgagcctccgttgctgcccttcccccagctcagtcgccctccaggtgcaagagagctggttggcacaatcgatggagccaggcttggtgatcttggtgagt

SEQ ID NO: 481935 - DNA, 1280 bp, Homo sapiens
ggcggcgcggcgtaaagcgccattacgcagagagaaagttacgaggttcgtggccgcggtttccccaggcagctggcgctggaggcttcggcgtcacgtgctggtctggatttttctcgatgcactggggaaagcggtggactcttatcgtgggagggctcttgatctgtgatttatagataggcacagctactcccgttcgggaacccaacggcagacaggtcctagtgcccatcagatacccgcggccgggactcggagctgtggggtgtggggaggcggaggcaccaactaagagcgacctagcatcgcaaagccgccctcggggcgctcatggcgggacgcctcctgggaaaggctttagccgcggtgtctctctctctggccttggcctctgtgactatcaggtcctcgcgctgccgcggcatccaggcgttcagaaactcgttttcatcttcttggtttcatcttaataccaacgtcatgtctggttctaatggttccaaagaaaattctcacaataaggctcggacgtctccttacccaggttcaaaagttgaacgaagccaggttcctaatgagaaagtgggctggcttgttgagtggcaagactataagcctgtggaatacactgcagtctctgtcttggctggacccaggtgggcagatcctcagatcagtgaaagtaatttttctcccaagtttaacgaaaaggatgggcatgttgagagaaagagcaagaatggcctgtatgagattgaaaatggaagaccgagaaatcctgcaggacggactggactggtgggccgggggcttttggggcgatggggcccaaatcacgctgcagatcccattataaccagatggaaaagggatagcagtggaaataaaatcatgcatcctgtttctgggaagcatatcttacaatttgttgcaataaaaaggaaagactgtggagaatgggcaatcccaggggggatggtggatccaggagagaagattagtgccacactgaaaagagaatttggtgaggaagctctcaactccttacagaaaaccagtgctgagaagagagaaatagaggaaaagttgcacaaactcttcagccaagaccacctagtgatatataagggatatgttgatgatcctcgaaacactgataatgcatggatggagacagaagctgtgaactaccatgacgaaacaggtgagataatcgctcgtcgccttaatccaagccctacagttttcacacttctagtaagcctctacctgcacga

SEQ ID NO: 481936 - DNA, 1140 bp, Homo sapiens
  misc_feature (421)..(421): n is a, c, g, or t
ggcggcgcggcgtaaagcgccattacgcagagagaaagttacgaggttcgtggccgcggtttccccaggcagctggcgctggaggcttcggcgtcacgtgctggtctggataattctcggagtgcaaatggatggttcgatgaagcacaaaacggaaaggagtacgagatcagtaaaatagatgtaaaggacatggaagcaccgcttaacaaagatgcccgaacatctaaacaggaccaaatatcccgacatagaaccggcaacccgagggatctacggtaacgtgtaggggagtggtaggggagggcgtgaggcaccagagctaagtaggcgacccgagcatgcgcgaaagccagtccacaggaatctactcataacaatattatctaccggaaaagaaggattatatgtgcagctaagnaacgacacttcgacaaggccataatcctgctaatgatgaaggcaataacctggactggaatctcattaaacataccaaagggattgaagaagcacataaaaccagacaaactattagtggccagacataataacccgatgcatacaatgaggaaatatcaaaatgaaggataccgggatgaatgacagctacaacagatagggaacacatgatcaaacgaccatgacgccagatggacagaataagagaacagggaagccaaaaaagccgaaataaagaatgagaagatcaataggaaaatgaaaaaaaatatctaatggctaattgggtggcgaaaaaggaagaaacaggggaactattacgactaattgtataaatgagaagaaccccgataatgagaatctgttatactgacaaaaaactatttattgttgtagaaaaatagacacggcgcgaatgagaaaattgaatgtacacttgggggaaatccacaaaaaataataaacgtatggacagatgcttaattaaagaaaggggcattataatgggactgatttagacatttcgagtgattttaaactcttatgggaaaaactctaacaagaaagggaagagcgaatagagcgaagagggaattttccgggggggggcagattaattgttatggggaattaagaaatttcgggaaagacaacagctgtaacaaatttactgtgcaa

SEQ ID NO: 481937 - DNA, 638 bp, Homo sapiens
aaaggcccaactatgaagatgtgttgtttcataattcacatatcaagagtggccttgcatccatgtcacagtgtccccaaatggtggacaaattggtaaaattcccagcaaaacaaagtacaatctttgcccagtttataagataattgcatccctggaaaaatcaacatgtcttaaaaccaccccaaaataactcatgtttatgtatgaaatggagttatgttatactgatgattagaagcggatttttttgtctgtgtgaatgtccagaggacaataaacagggtgagaaacggggacatgacttcattattcaagaccatcttgtgcattgcaggagacttgtcaccttctcctgggcccagtaaatgccagtagtccccccacaccccatcactgtgacaactaaaaaccctcatgccaatatccagattgcctcacctccgtgagtccagactgtgggagttacctccagaagaaccaaaacaagaaatagttaaaagaggttgcctctgggaaggaggccactgtctaggagggagggctgggggactcttgttttttatcatgatttttagccccgtgttctatttaatttttaccatatgtatgcattacatatacatataattttttaa

SEQ ID NO: 481938 - DNA, 358 bp, Homo sapiens
acctcctaccccacggaaaaaaaaaaattttaatagagacagggtctttctgtattgcccaggctggttttgaattctggggttcaagcaatctcccgccttagcctctcaaagtgctggaattacaggtgtgagctaccatgcccggcctatattagattatcttgaccagtgctgtctaacagaactttctacaatgatggaaatgttgtatagtttatgctgtccaatatggtaggcactagccacatctagctattgggcacttgaagtgtggctagtgccatcgagcaactgaattcttaatttatttaattttaataaatttaaattgccactgtggctactggctactact

SEQ ID NO: 481939 - DNA, 362 bp, Homo sapiens
ttttttctaccagaatagaaaccgtatcatcccattctctcctggactacaaggttgtctgcagagaaatctgcttcagtcttgtatatgatgacacttttctcttactgtttttagaattcttttgtctttgacttaagatagtttgactacaatgtaccttagaggggatctttttgagttgaatctatttggggacctttgagcttcttgggtctggatgttcatatttgttcccagacttgggaagttttcagctattatttaattaaacaaattttctacgccttttatcttctccttctggtattctcataaaatgcatatttggttacttaatgctatcatataaatcttgtagg

SEQ ID NO: 481940 - DNA, 396 bp, Homo sapiens
ttggggccgggcggttcatttacttcaggaatcaaaaaggcccctttgggcttcaccccccaggattcctgagttgaagggcagatgccaatttaaggaagaatttttttccccccctttgcgggatgaaaagctttccccccggggggttttttttccccaaaagagggctttttcaggccctagttgtttttggttcagcaactccaaaaaatgtcccccccgtgggggttccccagttcctgcccttggcctgaagtcccagcattgagggcgggccctctttttcaacttttgggctcccctttgcctaaaccctagggccccctgggcatttggtctccccctgtccccccacccccttccattttttaatgtttttcaaaaagggggtta

SEQ ID NO: 481941 - DNA, 567 bp, Homo sapiens
gtgcagacatataagctaaaataacaaacaagtaattcatcacaaaataaataaaagttatatctgtctatactgaaacatatataactactaaatattgtcctgctggctactgctgctctcaagtacatagtcatcctcatagctgtatcctgatgaataatgatgtcacgtgtggagaaactacaaatgtagtacaactgaacgaaagaaaacccttggagataagtttagtgaggggattgaaatccccaaaaagataacattattcttctgcttacaaaaactgaaataccctgtactagttcctaacaattctcattacatactatgccagattacaaaatacttattattaaaatgaaatctatatattgcctttcttatcaatcatcttactgtgccatcacaattagaagtacttaggttagacaacaacacttagagcctccagatacacttttaagacttatttagcttagtgagatggtatatacatgcacataagtaagggtgggtaaaatattttgtagaagtattcggtcctatattaatgctctttgtatg

SEQ ID NO: 481942 - DNA, 848 bp, Homo sapiens
  misc_feature (18)..(18): n is a, c, g, or t
  misc_feature (64)..(64): n is a, c, g, or t
  misc_feature (71)..(71): n is a, c, g, or t
  misc_feature (102)..(102): n is a, c, g, or t
  misc_feature (104)..(104): n is a, c, g, or t
  misc_feature (106)..(106): n is a, c, g, or t
  misc_feature (111)..(111): n is a, c, g, or t
  misc_feature (125)..(125): n is a, c, g, or t
  misc_feature (148)..(148): n is a, c, g, or t
  misc_feature (160)..(160): n is a, c, g, or t
  misc_feature (181)..(181): n is a, c, g, or t
  misc_feature (188)..(188): n is a, c, g, or t
  misc_feature (217)..(217): n is a, c, g, or t
  misc_feature (245)..(245): n is a, c, g, or t
  misc_feature (255)..(255): n is a, c, g, or t
  misc_feature (276)..(276): n is a, c, g, or t
  misc_feature (278)..(278): n is a, c, g, or t
  misc_feature (282)..(282): n is a, c, g, or t
  misc_feature (303)..(303): n is a, c, g, or t
  misc_feature (327)..(327): n is a, c, g, or t
  misc_feature (331)..(331): n is a, c, g, or t
  misc_feature (336)..(336): n is a, c, g, or t
  misc_feature (383)..(383): n is a, c, g, or t
  misc_feature (473)..(473): n is a, c, g, or t
  misc_feature (510)..(510): n is a, c, g, or t
  misc_feature (519)..(519): n is a, c, g, or t
  misc_feature (550)..(550): n is a, c, g, or t
  misc_feature (571)..(573): n is a, c, g, or t
  misc_feature (580)..(580): n is a, c, g, or t
  misc_feature (587)..(587): n is a, c, g, or t
  misc_feature (602)..(602): n is a, c, g, or t
  misc_feature (606)..(606): n is a, c, g, or t
  misc_feature (631)..(631): n is a, c, g, or t
  misc_feature (641)..(642): n is a, c, g, or t
  misc_feature (658)..(658): n is a, c, g, or t
  misc_feature (739)..(739): n is a, c, g, or t
  misc_feature (748)..(748): n is a, c, g, or t
  misc_feature (755)..(755): n is a, c, g, or t
  misc_feature (759)..(759): n is a, c, g, or t
  misc_feature (770)..(771): n is a, c, g, or t
  misc_feature (775)..(775): n is a, c, g, or t
  misc_feature (795)..(795): n is a, c, g, or t
cccttttttcctggcttntttatcctcctttaccgtgcattttattgggcggtttaagctaatnaggatanaggatctttctaataaatgactaacattaangngntgctntgttgttttttttngattattctttcaaacatcatanttgatttctatngatgcccaatttccttctgtngtaccantgacccgcccccctcaaaccccatacttnattgctgaggattaagaagatcctcttnttggcccgtnctttttctgatgttaatattntngtcngtttcaatacatctaactaanaagaactatgggtctagggttgtngctntcgcngccctgagttctataaccacgatggttttcctgttagatcttacganaatgttgtggacgttccccattctatttgaggagaaaacaaagaactcagttgctttctgtttttgcgaagttactatgctttgggctanagtgttgatgtctaagatagtggtagcaaatattggngttatctangaatcagatgatgctttagtgtgatgaactnaaagaggaatgtttctaggannngtctganggggtanaagggattgcaacanaaangccatttactgctgtgattgaatantgtcaatgtnnttctgtctatttcctntagttggtgaaaatatttcaatatgctgctgtcccaaaagcctggccattagagggtaaacaagactcctttacagggttnataaaggancaagatnttangggagctatannagcntaactttaatctgcttaaanaatatttctctcgaaagctgcttacagagctctgcaaatagtctgtttgtggc

SEQ ID NO: 481943 - DNA, 93 bp, Homo sapiens
acttgctgctcgacttttcttgggggtggagtttcctctgtgaggggctgcagctatccttcctgtgtatacaaatacagtattttccagggt

SEQ ID NO: 481944 - DNA, 614 bp, Homo sapiens
ggtgtggagaatactcatatgtatatagataatgtgtatgtgtacagacataagactagttcagttcctcagccattgcgatctcatctctacacttatagccaccgtaaagtcgtgtctggctcagttacatagtctgtagatcattggcatgatcatagatagcctcagacctcaacctgctcagtctcatgcagctctcgcaattcagcctctgcagtagttggtgagcataggtgtgagccatagctcagatctaacttttggaaatttagtaaatgtcatgtttcgccatgttgctcagactggtctcaaactcctgtcgtaaggtgatcagaaagccatggcctctcagtgatctgagctttatagtgtgatgtactgtgatgtattgcatcccctttgagcagctccttttatcactgcctctagagtctgagccattggcagggcgtataaatgtagtgtcttcttttcatttaaaatagcattagcacgaagagtatggtacagttataggattacaagttgtatctcacctgtaaaaggtgcactatagtttttagacctcaatatacattagcacagaatgtgaatgagtagttcaagttttg

SEQ ID NO: 481945 - DNA, 95 bp, Homo sapiens
ggcacgaggacttggcagtgaagcatttttcagttgaaggacagttggaattcagagcccttctatttgtcccacgacgtgctccttttgatccg

SEQ ID NO: 481946 - DNA, 140 bp, Homo sapiens
atgttttctcatagagtaattatatgaacagtttatatgacctccttttggtctgaacatacttttgaacagaatttctttttttaaaaaaaaaacagagatggggtcttactatgttgcccaggctggtgtcgaactcc

SEQ ID NO: 481947 - DNA, 391 bp, Homo sapiens
atattattcagcagcctgcaaggattttaatatacacttcaggctgaccgaaaagggagagtatttgctgttatagaatgggctctcctcctccggcggcgtcgaagaaggtggagttgaggttgcggactgatcgtagtatagtgatgccagcagctagtactgggagagataggagaagtaggactgctgtgattagaacggatcagacgaagaggggcgtttgctattgacatatggcaggttgttttatattgataattgttgagacgaaattgatgacccctaagatagaggagacacctgctaggtgtaaggagaagactggtagttctacggaggctccagggtgagaggagttccctgctaacggagggtagactgttcaacc

SEQ ID NO: 481948 - DNA, 191 bp, Homo sapiens
ccccgggtctgtatgtcactcaaactcctcctacatcttgcggtcacttcctttctgcccaataacgtaacggtgacggtcaaagggcacctctactttaatggtgacaggaaccaatgcctccagagcttccttggcagcctcacacttttctttccggcccgagatgatgatgatgtcacacctccttg

SEQ ID NO: 481949 - DNA, 347 bp, Homo sapiens
cgtgtctgtaatcccagctgttcaggaggctgaggcaggagaatcacttgaacctgggaggtggaggttgcagtgagccaagatcgcacagctgtactccagcctgggtgacaagagtgagaatccgtcccccccccaaaacacaccaccacacgtaacttttattatagtatattgctataattattctattttgttattaatgttgttactctctgtgcctaatttattttaactttattgtagttatgtgtggataggaatatagtgttcgtagggtttagtactatctgtggctccaggcatcacctgaggtcttgctgattcccctgcagcctgtggctccg

SEQ ID NO: 481950 - DNA, 726 bp, Homo sapiens
agcgaaatggcatttgaaccaccaaaaagaaataaagggctgagtgtggtggctcacgcctgtaatcccagcactttggggagcccaggcgggcagattgcttgaacccaggagttcaagaccagcctgggcagcatggtgaaaccctgtatctacaaaaaatacaaaaattagccaggcatggtggtgggtgcctgtagttccagctacctgggaggctgaggtgggaaaatgacttgagcccaggaggaggaggctgcagtgagctaagattgcaccactgcactccaacctgggtgacaagagtgaaactgtgtctctcaaaaaaaaaaaaaaacaaacaaaaacaaaaacaaaacaaaacaaaacaaaacgaggtagggattccccgtgttttcctctcttaaattttaaagtttatcagttccgtaaagtctcgggtaaccaaacatactgaagaacgagcaacagaagttcacgtttcagggacgggctcacacctgttaatcccagcacttggggagatggcggtaaagggatctctggagcccaggagttcaagaccagctggggcaacatagcaagactccatctcttaaaaattcaaaatagtaacatttagccaggtgtatgcagacagatctgcagcagttactcaggaggctgaggtggaaaggatcgtgggtgcaccagaagttcagaggctgcaagtgagcctatattgac

SEQ ID NO: 481951 - DNA, 139 bp, Homo sapiens
  misc_feature (19)..(19): n is a, c, g, or t
  misc_feature (22)..(22): n is a, c, g, or t
  misc_feature (122)..(122): n is a, c, g, or t
  misc_feature (126)..(126): n is a, c, g, or t
gctccacttcccacataanacnagacctctcacaaaagagttcactgatatgtgaatgcagctttctccccatggtagccaggacagggtgcacattaaggcaaccccaaaaacacctcttnctgnctgcctctgcaaa

SEQ ID NO: 481952 - DNA, 102 bp, Homo sapiens
agcggaacagcatggactgacatgcccaaggttgaagcatgaataaaagacggggctcctggtggatgagtttaaggagctgtttacccaccagattacaat

SEQ ID NO: 481953 - DNA, 171 bp, Homo sapiens
acgtctagctgttcttgtgtaacccagcatgtgagattccgtttatgatgtgcaagagtgtcatgagcatggagaagtcaagcgggcctagagcagaggtggaggagatgaatgacgcagctggaagagctggaggacgagctgcaggccaccgacagatgccaagactgc

SEQ ID NO: 481954 - DNA, 192 bp, Homo sapiens
  misc_feature (106)..(106): n is a, c, g, or t
  misc_feature (129)..(129): n is a, c, g, or t
  misc_feature (165)..(165): n is a, c, g, or t
  misc_feature (182)..(182): n is a, c, g, or t
atttatttatcaaataatttaatcccccacaatcccatgagtaagagacatttactgatccctttttatagttgaggaaacagactcagggaggggaggtgacttnccagagccacacagctggcaatntggctcctgtacttccgcatccctgaggtcactttngtgcccccgccgcatgncaggggtaaa

SEQ ID NO: 481955 - DNA, 150 bp, Homo sapiens
  misc_feature (87)..(87): n is a, c, g, or t
gctcatctatccttgagcctccattaatttatctccagggcaatggctaaactaggtccttttcttggcaacctgcactgtccaganctggagatggagatatacagggcgaggacatcaggagggcacccaggcgtatttcagctgagc

SEQ ID NO: 481956 - DNA, 354 bp, Homo sapiens
tctactggatctctccttggtgtatccgctacagtctctctgtctgtctgccaggttggcgtgctcgttggttgcagttcccagctcctgtggtggcaccgcctcctcccgggttcacgccattctcctgcctcagcctcctgagtagctgggactacaggcacctgccaccatgcgcagctaattttttgtatttttagtagagacggggtttcgccatgttagacaggatggtctccatctcctgagtttgtgatctgcccgccttggcctcccaaagtgctgggattgcaggtgtgagtcaccgcgcctggccttttttttttttttttttttaaaaatagggtctcactc

SEQ ID NO: 481957 - DNA, 862 bp, Homo sapiens
  misc_feature (14)..(14): n is a, c, g, or t
  misc_feature (118)..(118): n is a, c, g, or t
  misc_feature (181)..(181): n is a, c, g, or t
  misc_feature (219)..(220): n is a, c, g, or t
  misc_feature (235)..(235): n is a, c, g, or t
  misc_feature (237)..(237): n is a, c, g, or t
  misc_feature (307)..(307): n is a, c, g, or t
  misc_feature (313)..(314): n is a, c, g, or t
  misc_feature (317)..(319): n is a, c, g, or t
  misc_feature (322)..(322): n is a, c, g, or t
  misc_feature (445)..(445): n is a, c, g, or t
  misc_feature (519)..(519): n is a, c, g, or t
  misc_feature (549)..(549): n is a, c, g, or t
  misc_feature (575)..(575): n is a, c, g, or t
  misc_feature (609)..(609): n is a, c, g, or t
  misc_feature (612)..(612): n is a, c, g, or t
  misc_feature (631)..(631): n is a, c, g, or t
  misc_feature (635)..(635): n is a, c, g, or t
  misc_feature (650)..(650): n is a, c, g, or t
  misc_feature (662)..(662): n is a, c, g, or t
  misc_feature (668)..(669): n is a, c, g, or t
  misc_feature (689)..(689): n is a, c, g, or t
  misc_feature (756)..(756): n is a, c, g, or t
  misc_feature (842)..(842): n is a, c, g, or t
cagtgtctcacccntatcatacaacgactcactggcgctcccatcattctatatatttattgagcatttacagtgtactatggcacatatagaacatacagaaaacattgtccctgcncttgaggagcttacattctaaaagaaaaaatacaccttttttaaaatggcattgttgtttggnggtttctgcaaagtatctgaggaaatattttgtaaagnnagcattgggtaaaantnaaccccagtcattatttagagaatagaggaggaagaaagaagaaggattttaaaggcagacaatgacagnccattnnggnnnggnagggttttaaagggagataaacacagtctcatcaactaaggagagatttgctgcagtaaataggatgagggaaatagtcgtgtgggatgcaagcaaaggatagcagggtgccttagacactgngtggagccagaaagatcatgcggcgcgtttttccaagtacactggccaccaagtaagaatggttggtgacaagncagaaggctataaacacggaaggtaatgcntgtgcacctgacaaatagagagaatnaaggatcaaaattgaaggcaggctataagagtancangaaattcttaaaaaccaanaagngatttggaagcacgnaacttacagttnatgctnnccaatgtcatgatgggccangaacattgtggcttcctaagttagaaaatgccatatgccaaaattttaaatgggacacactacattnttttctaatcaatccccccctctcccagaaaaaatagggactcatttttttcagggtgggggaggaagagaggggatcatgggacntggaaacaagtagttatatt

SEQ ID NO: 481958 - DNA, 198 bp, Homo sapiens
tctagaggtccccgtctgagcaagtggggaagtagagcataaggtagaatcagggggcgtgttaagctggttttctggcaacgggatgtcccacgttgggctgtcacccctcgggaatccactgtatacgaaaattccaaatattagtggggcataggggcaagcacctgtagtctcagccacgtgggaggtggaggg

SEQ ID NO: 481959 - DNA, 379 bp, Homo sapiens
tgcaactctgctcccgggttcaagagatctcctgctcagctcccaagtagttgggactacaggatgtgcacacgcccagttatttttggaatttagtaacacgggttcaccatgttgtccaggatgtctcaatctcttgtcctcgtgatccacgtgcctcggcctcccaaagtgctggagttaacaggcgtgagccactgcgtccagccaacagcaatttcgtagtgtcaactatctagactgggttcacacctgtaatcgtaacactctgggcggctgaggtgggaagatcacttgaggccaggagttcaagaccagcctggccaacacagtgagaccccgtctctgcatctctgcatctctgcctaaaggagaaaaa

SEQ ID NO: 481960 - DNA, 374 bp, Homo sapiens
  misc_feature (43)..(43): n is a, c, g, or t
catcctttggagttcggaggtatgtgatgtccgtggacctagnaacctggtagctgacgtgtttaagagctggggcaacaggccaggcgtggtggctcgcctgtaatcccagcactttgggaggccgaggcgggtggatcatgaggtcaggagttcgagaccagcctggccaagatgttgaaaccgcatctctactaaaaatacaaaaattaactgggcgtggtggcgggtgcctgtaatcccatctactcgggaggctgaggcagagaattgcttaaacctgggaggcagaggttgcagtgagccaagatagagtcactgcattccatccagcctgggtgccagagcaagactctgtctcaaaaaaaaaaaac

SEQ ID NO: 481961 - DNA, 548 bp, Homo sapiens
gcccagtgtccgacgattcctcctccttggtcgccgcgtccttgtgctagggcgtctagcacaaacatggcctatgaaatcttcctagcacatgataagatctggttcgactaaggttcatagatatgacgactgctagaatgggagattctacgcagcgagatgacacggtgccctgtggcatgtgtgcccttgcccgtccaagggcatgaatcggcggccagcgatgatccgtccggtggagcattggcgagcaggcccagagaagaacagtccaggaagatcctctggcctggtaagccctctaaggtccctcgggggtcctccagcggacatcgcatcgggagaccacggtgagcatcggtcgtccggattgccatgtctggaaagtggagaaccagagttctgcgtggcgtggtacattgacgctgtacgcaggaccatctccaacgctggaggcccgggtgaacgtgctggacgaagagctcgactgggcaccgggccacggtacccaacagatcgcagctacgtatcatcccatgcgccat

SEQ ID NO: 481962 - DNA, 290 bp, Homo sapiens
gccatcagactgcaacaacttcgtccattctgactgttctcctctagtctggacactcggcgtgtgcatgcacacgccgaatgtccatactgagcaggtcgtgatggacgaagttgttgccaacttcgtccacaacgatatgcaacaacttcgtccactacgacctgccatcaagagtctggtgtttcggcgtgtgcaccattgggatttagaagtgttgggtccctcggcgtgtgcatgcacacgccgaatcaccatacttcttcaggtctgggtggacgaagttgttg

SEQ ID NO: 481963 - DNA, 691 bp, Homo sapiens
gagtgtgaaatcttcagagaagaatgtctctttagttctttgcaagaaggtagagataaatgacagcgtttgtcaaaaatggcaatggtatcagaattcctcaagcaggcctggtttattgaaacatgacagtagcgaagcgaatatgttcaaactagtgaaagtctagtccaataggtggtcccgagaatctagcggtgagcctccgtatccgtacgcttcatatccatcctcgggttgtcgctgccgttgcgttaaggtccataactggttaagaggtgtggatgatagcataccagtcatttgatcattcctaagcttaagcgagaacaaagtgcacacgcgtctaagctagatcaagagcgagcgatatctccaggcaaacatgtggaaagcaccctgggatgaatgatcaccttgaagataagctcccttacagggtcacctttgagagaggttgtgtaatgctctgctaaaatgctccagacgtcgatttggattgctgaatgaactatcggtgctgccatggaagggtcctcgcgtaacttgcactcaatgaactactcgtgatcgcatgcatttgacttcacgtaactgaccatagtaacactcagagagttttaacagggtctaacagagaggaactgaatgcagcagattctggcctatgacctttaaaccgtgcagtcac

SEQ ID NO: 481964 - DNA, 173 bp, Homo sapiens
tatccatgaccgtgattcgacatctcggactcccaaattgtgggattacaggtgtgaactaccacgcctggaccaatctatctagcttacatagtttctgaggagatgtcagatgtaatttatattttagctcttctgtaggcaagttgagttttttccccctctagcttcac

SEQ ID NO: 481965 - DNA, 830 bp, Homo sapiens
  misc_feature (713)..(713): n is a, c, g, or t
  misc_feature (736)..(736): n is a, c, g, or t
gcaacttaggctagtacgaggccccgtgttaatcggccgaggctgaaagggatggttgagaaagggcatcgcatctttgaactactttcatcaggctcttgatctgaagcatggggtctctgcttatcgatccctttggcagtgccacaagaccaaatcacaccaacacatcttagagacatgggtaggctggaggcactgtacacctggtctattgctgctgctttaagaaacagaatctcagggtcttctcagtaactgaaccccatggtgggaagaaagaatactaaattagaataaacccctactcccaccccaccccacctcagtgcaattcccaggagcgcttgctaatgatcgttgcccttctgaccttcactttccgaacttcattggcctggaattcaggtgtacagttgtggtggatgaagccaataccgcctgtaagctacaggataaaaagagactactactaagtgacaagaagcaggactgaatgcctttggggaaaggcgatggagtccttgctccttcccccacaccccatggggctcaccgccattgctatggccatcccagcctctgtgactgtgtccatgggagaggaaaccagtggggtcttaagagtgattttcttggtcagagcagaagtcaggtcctgaggagacaaacgtcaccagtgtgggaaagcatcccttacacctcaaggtgtnactgagtcccccacaaaaaggcncttttgttgacctgcatgctaacaagcaaatgatcctataaatccaccccaagccaatctggtgacttagcccagagaccgtgataatacacct

SEQ ID NO: 481966 - DNA, 799 bp, Homo sapiens
agaaattgaggtgccttggcccttgccttgggattaaaggggtttatatgccgccgggggtcgctacaaatgccttcgggagtgaccgtgtgaaggtttgtgaggtcgttagttgtctcgtgggactatataccccgtcgacgtttccggtgtctcgccgagccccatgcacctcgatgcggtctctgggcccttgtgcccccccggcgcaacgcctgtcttctcaggacggggtactttgttcgtacccccaaagccgaacttgcgtgaacccactaccccaagtcctcccactataacaaaggcggttttcctccaccacgggacccaacctctttgcttttattatgaacaaatgctttcccaaggagtatccccccacaaggcctattccaaattctcttgccaccagggggaaacttttcttagacgaaacaatttcgtaaccaattgcgctaaaaaacttccaattgttcaacttcaatctctgtgcaaccaagcaaatatgggcgtccccctcttaaaagatcacgaggtgagtcaattcttccctccaccgagtctcgaaaaaagttgatccaccggtgtcgcccccaagatcttcttctccgcccaaaatcaccctcgttggctttctaaaagagcggccgatcgtcccaccgctcctgtctgtgtcgttacaataaatgtttggcgacactgcacataggtacgaatgatgaaggcggccgggccaagaaaaaagaatgggggagacccaaaaaaaaaaggaataacacccggttttaaaaaaaataac

SEQ ID NO: 481967 - DNA, 586 bp, Homo sapiens
gagcggggtcgtttgaatggctgcgggcccgggccctcacctcacctgaggtccggccgcccaggggtgcgctatgccgtcggtgaggtgaccagtcgccaccgcccccgcctccccctccggcggcggcagcctcggatgaggaggaggaggacgacggctgaggcggaagacgccagcgcacgaccatgacacgagatcgcccacccactcagatccagcgagcggattcgacgagcatgtgcagcacgacatcaacactggacgaggcggcgcgggccgaggccatgggaccacggctacgcgcagccactgagacgaaagctacacgctggagggcaacatgatctatcattggtcaagacatggtgacctacatactgctggcattgcagcacacaatcgtgtatcccagacatggtagacgcaaacggggaacagctgggcacacggacaactagtgggtctctctctaacctaggaaatccctgcaactggttcccggaggccagacgcattactcgaaataggttactaactcacgactgaacgacagtgggcagaccatgcgcacactctacccccc

SEQ ID NO: 481968 - DNA, 931 bp, Homo sapiens
actagttctagatcgcgagcggccgctctttgtaaactattttcaatattgtttttcactttccttatcaagagattgtttatacatctctttcctccatgaggtaatggaaggtatatgcatcgtgtctgtaatactcagagtaggtataagatttttacacaaaatccttatgtaagatacattccatttaataaaaatagaaatgtatggttgcatctgtctttttataccctaaaaaaaaaaaaaaaaaaaaaaaaaaaaaaaaccaaacacaaaccaacaaaacaaaaacacaaaacaaaaaaaaaaacaaaaaacaaaacaacaaaaacaagcaaaagaggggggcgcgccacaacaaacactacgcagacggagaaaccaacaaaaccgacgaccacaacgccataactcgacgcgagagacaccaaccagagacagatatcaccacaaaaacacaacgcgacgcgcaccccacacacaaaaaaccgcaggcgaggagaaccaccaccccgcacagcagcgacactgcgagagaaagacaaccaaaaacgggggagcacacaaagacagagggaacaagacaaactcacacacaaccagagcaagaaacaaaaacaaccacgcacaggtccaccgccaacaacacaaccaaatacgggaggagaaaaagaaaaacagcagagaaacagcaaaaaaaacaaacaccgcgagaagaaacaaaaaaaaaaacgaaaaagacgaaaacagcacaaaacagaaaaaaagggacagaaaggagagagaacaagaaacggagacgagaaagaacgaacggacagacacgacagaagaacagagcaacacaaagcaaaacagaaagacaacgggaagaacgaaaccgcaagacgaaaaaaacaagagacaaacagatgagacagcaggagag

SEQ ID NO: 481969 - DNA, 130 bp, Homo sapiens
ccagcccgttctgcctcgacagctgtgtgcaccccagtgcctacttagaaaggggctatcagagaaggcatgtgctgtgtccctactaccgtgccctgtcctaacctcgcatctaggacccagggacagg

SEQ ID NO: 481970 - DNA, 475 bp, Homo sapiens
  misc_feature (1)..(1): n is a, c, g, or t
  misc_feature (68)..(68): n is a, c, g, or t
ntcaggcccatcttggcgagacggggtctccctctgtcgccaggctggagttcagaggctctgcttcngtggtcccaggctcttaccttcctggctccagcggtcctcccaactcagcctcctcaatagctgggcccacgggtacgggactccacacctggctaatttttgaatttttttgtagagacagggtcttgctatgttacacaggctggcaggcccatcttcttaactgagagaccagtttatgctttcctctagggccatcatatacaaagtccagaaatttagtgtgtgtaaaggtagcttttaagtcaagcaataagatgaaattgtcagtaaatgttactgggatcggccgggcgcggtgcttatgcctgtaatcacaacactttgggaggccagtgtgcgcagatcacctgaggtcaggaatttgagaccagcctagccaacatggtgaaaccctgactctact

SEQ ID NO: 481971 - DNA, 151 bp, Homo sapiens
agtgcactccacaaacagtgtatagccagtggaatgtgaatgttataattaaggagatttgtagggagattagctatagagagggagagtttttttcgtgatagtggttcactggataagtggcgttggcttgcctgtttgtgaggggtag

SEQ ID NO: 481972 - DNA, 401 bp, Homo sapiens
cagcactgctccgctgatcactgctccaaagagacccgggccttcaactgatgcccacgatggggtatggtgggctgggacagacggctcccatctcaggttgaggggcttgggcgaaccctcatgctgcacatggccaggtgtatctctgctcctgtccacgaatgtccaccacacgtcgcccatcttctggaaggttccagtcccctgcaggcctggttctcccaccgagctccgtgtcctgggtctggtcctccccatctcgcttccaggtcagtgtgatcttcgccgcgttgaaccctcagggccctgcacctcagggtggcttcatggtcatagacagcgtgctgagtcatatgcgttttgggggcgtccgtgcgctgcaccttctccttcccgtt

SEQ ID NO: 481973 - DNA, 155 bp, Homo sapiens
gaagctgaccagaggttaccctaatatccgggtgtcattcaagggactaatctcacatatttcataatgtaagatgatgggtaataaatgatttcatcaataggcctgtgtctggtatatggcctattattaattggtgacataattgtttccat

SEQ ID NO: 481974 - DNA, 406 bp, Homo sapiens
  misc_feature (34)..(34): n is a, c, g, or t
  misc_feature (88)..(88): n is a, c, g, or t
  misc_feature (103)..(103): n is a, c, g, or t
  misc_feature (112)..(112): n is a, c, g, or t
  misc_feature (128)..(128): n is a, c, g, or t
  misc_feature (139)..(139): n is a, c, g, or t
  misc_feature (152)..(152): n is a, c, g, or t
  misc_feature (160)..(160): n is a, c, g, or t
  misc_feature (169)..(169): n is a, c, g, or t
  misc_feature (196)..(196): n is a, c, g, or t
  misc_feature (201)..(201): n is a, c, g, or t
  misc_feature (214)..(214): n is a, c, g, or t
  misc_feature (239)..(240): n is a, c, g, or t
  misc_feature (297)..(297): n is a, c, g, or t
  misc_feature (318)..(318): n is a, c, g, or t
  misc_feature (322)..(322): n is a, c, g, or t
  misc_feature (363)..(364): n is a, c, g, or t
tcccattgggccttctgcgtgtaagggtttcgangggggcgggagactgcctttcaggctgcacctcctggggctgcaggcactggcngtggcagaggagctnagggtgctnctccagcgtgctgtgngcatagtgctngctgccgtgctgnctctgctntgccccttnggactttctgcccgctgtatgaccttnagtcnctgtgttcgaatntcagacaagggggcttgttttgttnncacgactgtgaagatcctgcttgagcagaagtcctactacaggtacttgaactgttnctggctctgacgttttccacntctnctgagtttctattgctgtgactgctgtgtgcgtggaccgannggccacactgcttatgactcccggcactgggtccggacgcaa

SEQ ID NO: 481975 - DNA, 228 bp, Homo sapiens
aacaaggggtatgggaagatggctccatgcttgacatcccagcattctgggaggacgagatgggaggatcacttgaggacaggagttcaagaccacactgggcaagatggcaaaaccccgtctctattaaaagtacaaaaaattcagccaggtgtggtggtgggtgcctgtaatcccagctacctggaagactcaggaacaagaaccgtttgaacccaggaggcggag

SEQ ID NO: 481976 - DNA, 385 bp, Homo sapiens
tgtcacgcctgaagtagttattgagaaagtcgtccctttccccttttctataaccaaatagacaggaatggaagattctcctcggggcctgaaagcttgcgggatgaataactcctcctcctcaggcccagtcccaaggtacaaacttgcaccagcagcaagatagcagaggcaggaagagagctggctggaagacacgtaccccctgaagatcaagagggaggtcgccctggtactacatagcagtcacgttaggctgggacaattcctgtttacagaggactataaaacccctgccccatcctcacttggggctgatgccattttaggcctcagcctgtctgcatgcaggcgctcattaaaacagcatgttgctccaaaaaaa

SEQ ID NO: 481977 - DNA, 654 bp, Homo sapiens
  misc_feature (436)..(436): n is a, c, g, or t
gctgggaagtgaagagtggcttagctatttacccgctctttggggacaggcaaactaaatgcatcccttcttacctaactcccaaccccggccctgggctgaggcatatgaatgctatagtgtgcattaaaataaatgtttttatctcctggaaaaaaaaaaaaaaaaaaaaaaaaaaaaaaaggggggggggtaaaaagtatttccttggagggggcccaacgtttacggcggtacccaggttttcttggtacaaggggggctcccttataggggaggtcgtgatatttataatgctaggagcaggagcgggtggtttaacaacgagtcgtgatggggaaaacagtggtaacgctgggaatccttcggggaaggagacccttatactttcggggggggtggtgcaaccattacttgggggagacaaaaatatacncccttacagagagagatttttaaggcgctctataggggagaaatatattaaaactttctttaacagggtgtatatactgtggtggtacaaaccctatagggcgtcgaatatatggttgtggttggtattagaagaggttttgggcgttacagggagttattggattttattgagaaaaattttttataccacgggagcgtttcttaagaaaaagatgc

SEQ ID NO: 481978 - DNA, 1404 bp, Homo sapiens
acctcgtcataaacctattctagtacccgatgcgctggggccgcgctgggtccaagtgaagttagtgatcatggtcatctcctgagaccctatggaccatcgcatgatctagctgtagtagttcgctcttgcgattcatcaacacaaagctcacagaaaacggcacccggagccgtacctgaacgatcttcgaacataattcctacagtagaggctacttgcatggtcatttactttggatctagtctaccagcgaagtcctcgaactgacctcgtattattccaccacgctcaccgtgacccagtaccacttgaacaagccaaaacaacaactcaataccacaatcaatatacaaaaacaaaaaaatcaaacaaaaacacaacaaaagcaaaataaagaaaatataacaaacatcgaccaacacaaccctcaaacaaaaaaacaactacacaaacataaaaacacaaaccatacgcacacaacacacacacaacaacagacaaacgaccaacgagctagaacaaagagcgaagcacggagatagaagaagaagcgaaaggggagagagagtacaccgacgtggccagaaccgaaggagcacgcaagcatactctgactggcgcccgtcgcacagcagcggcaacgaaatgacgaagacgcgcgcagagaacaagggcgcgacggagcgcagagccgcgccacgacgcagcgacgacccacagacaacgaacaaggagaagggatccgcaggtgacgagacgagaacgacggccgcgagcgtccgtcgccgcaacgagacacagcagcagcacgacgacgagaagacgcgaaggacgagaagcgcaggctgagcgcacaaaactcccagcgacgaccggatgacacgcagaccaggccaacaacagtggacaggacagcgaagaccgagccagaacagacacgagcagacgcacatgagcacacagacgccaccgggagaggcgacgggcacccggcaggcgcaagcggaggcgcgctgcggcgagagggcaaagcagcagcaacgcggggctgccaccgccgcgggcacactgcacgcagcggacgtaggcgcgcgcggcgcaggagacacgacgagagaagcgctccccattcccaagcactcatacaactaataccaaactacccacacaactccatcttactcgtctgtcactaacgtcatcggtgtgacttcacattatctgtaacatcgcatatcaagtcatacctactacaccgccaccacacactcaacacaacgcatcatcagctcatctcttactctcgtcatgtacggaacacacaaatcaacatccgcactaccacccctcaccacgcacgctgcacacgtaagcgttatcttcgtctacaatctaatataa

SEQ ID NO: 481979 - DNA, 740 bp, Homo sapiens
  misc_feature (39)..(39): n is a, c, g, or t
  misc_feature (73)..(73): n is a, c, g, or t
  misc_feature (76)..(76): n is a, c, g, or t
  misc_feature (81)..(81): n is a, c, g, or t
  misc_feature (156)..(156): n is a, c, g, or t
  misc_feature (182)..(182): n is a, c, g, or t
  misc_feature (220)..(220): n is a, c, g, or t
  misc_feature (222)..(222): n is a, c, g, or t
  misc_feature (229)..(229): n is a, c, g, or t
  misc_feature (233)..(233): n is a, c, g, or t
  misc_feature (236)..(236): n is a, c, g, or t
  misc_feature (240)..(240): n is a, c, g, or t
  misc_feature (266)..(266): n is a, c, g, or t
  misc_feature (286)..(286): n is a, c, g, or t
  misc_feature (305)..(305): n is a, c, g, or t
  misc_feature (345)..(345): n is a, c, g, or t
  misc_feature (359)..(359): n is a, c, g, or t
  misc_feature (365)..(365): n is a, c, g, or t
  misc_feature (373)..(373): n is a, c, g, or t
  misc_feature (383)..(383): n is a, c, g, or t
  misc_feature (400)..(400): n is a, c, g, or t
  misc_feature (407)..(407): n is a, c, g, or t
  misc_feature (431)..(431): n is a, c, g, or t
  misc_feature (434)..(434): n is a, c, g, or t
  misc_feature (443)..(443): n is a, c, g, or t
  misc_feature (460)..(460): n is a, c, g, or t
  misc_feature (467)..(467): n is a, c, g, or t
  misc_feature (503)..(503): n is a, c, g, or t
  misc_feature (584)..(584): n is a, c, g, or t
  misc_feature (588)..(588): n is a, c, g, or t
  misc_feature (593)..(593): n is a, c, g, or t
  misc_feature (610)..(611): n is a, c, g, or t
  misc_feature (614)..(616): n is a, c, g, or t
  misc_feature (739)..(739): n is a, c, g, or t
tttggggtcggggggggggggtggatggtactgtttttnaaaactatttacttaaaactgccacacgcaaaanagnaaacnaaggtggtccacaattttttctcctttccttctgagggttttacgatgctttgttatcattaaccagtctttttnctcctttccttaaatggccatttggnacaaacagttctgagaccgttcttccaccactgtttangngtggggnggcnggnattnggggtaatattcatttagccttctgngctttctgggcggacttggngaccttgccagccccagcngccttcttgtcccctgctttgatgcccccccccgcccctntctgtctcctatcncgaacngcaaagcnccccaaaggnggatagtctgacccgcnctcaccncccatgggcttgccaggccccatntcnccaatggcngcctcccccgccttccnggctttngggccatcttccagctttttaccagaccggcgatcnatcttttccttcagctcagcaaacttgcatgccatgtgggccgtgtggcaatccaatcccggggcctagccggcgcttatntggnctggntggttcaggataatcanntgnnnagtgaagccagctgcttccattggtgggtcatttttgctgtcaccagcaacgttgccacgacgaacatccttgacagacacattcttgacattgaagcccacattgtccccaggaagagcttna

SEQ ID NO: 481980 - DNA, 332 bp, Homo sapiens
cgcattccttacgtgtgggctgcatatactgacttccttccaaagagtacagtgtggaaaatagagggagaagagtaactttacagtggagaagactggcaaactacctcagccaggtgaccaaggtcaacatcaacaatgaccagtcatgttgatggtatgtatccttgatatcatgaaaatgggcactgtacctgtgatcctcctctcctaccccataatcccagtctaatgaggaaaaacattaggacaaatacaaattgatggaatatttctacaaaattacctggacccaacattccttcaaagtgttcagggtattcaaaaccggg

SEQ ID NO: 481981 - DNA, 307 bp, Homo sapiens
  misc_feature (79)..(79): n is a, c, g, or t
  misc_feature (131)..(131): n is a, c, g, or t
  misc_feature (140)..(140): n is a, c, g, or t
  misc_feature (181)..(181): n is a, c, g, or t
  misc_feature (297)..(297): n is a, c, g, or t
ccttgtctgtgattgtctgtgttgttgtgcttagatttcaggtatcaggcatgtggtcatgctgtaatccagcacttgngaggttgaggtgggaggatcacttgaggtcaggagtcgagacagcctggcancatgcaaancctgtatctactaaaatacaaaatttagcccggtgtgcggnatgtgcctattatcccagctactcaggaggctgaggcaggagaatggcttgaacctgggaacctgagaggcggaggttgcagtgagggaagatggtgccactgcactccagcctangcgacagagc

SEQ ID NO: 481982 - DNA, 135 bp, Homo sapiens
aaattggtttgttgttcaagcataaaagaagactacacttcaaaacgatagttgtgatttccgctcagctcatgaggcacccacttatcaagctttatccaagtgagcaatttctcactccttgggacggggtac

SEQ ID NO: 481983 - DNA, 480 bp, Homo sapiens
  misc_feature (44)..(44): n is a, c, g, or t
  misc_feature (49)..(49): n is a, c, g, or t
  misc_feature (76)..(76): n is a, c, g, or t
  misc_feature (469)..(469): n is a, c, g, or t
aataaaataattccaccatataatattaaagccatatgtaattngttantttaaagacctttcatttttcctcctncccccactagagccttgaaggacccagacataccttatttgtaattatcctttcctatcctcctaggatggagcatagggcctaacatatttgatggtttgttgaatttgaataatgagaaagtaaagatccaaactgggcctcagagcaggacagaaatggaaatgctactttagatagaaaaaacagtgtttggtttgaggcgggaagctatgatacagccaaggtgcaggcagctagggaaactcagttactcttagcttctaaacatcagttatatggctctgaataatgttggtcaaaagataatcatctcacaactttccaatgaccactagaaagttgaaattttaaagttctaaatgttttctgtaaaagtagtttttgtaatgnacattttttgt

SEQ ID NO: 481984 - DNA, 114 bp, Homo sapiens
tttttccaagggaaaattcccaattgttaaattttttttcctttttacccccttattggaaggctttttttttgttgttttggggggggggattggattttttatttttccgga

SEQ ID NO: 481985 - DNA, 161 bp, Homo sapiens
  misc_feature (85)..(85): n is a, c, g, or t
tcgctctagaggatctcaactacaaaacacagccataagtgcttgtaaccaggaagaacataaaaaagatgtagtgttcgaaaanctgggaatcaaaaactaaccgcggagaaggtaggaggatgttctagaatccccagagaagaagctgggggaaacat

SEQ ID NO: 481986 - DNA, 563 bp, Homo sapiens
  misc_feature (8)..(8): n is a, c, g, or t
  misc_feature (34)..(34): n is a, c, g, or t
  misc_feature (49)..(49): n is a, c, g, or t
  misc_feature (61)..(61): n is a, c, g, or t
  misc_feature (71)..(71): n is a, c, g, or t
  misc_feature (80)..(80): n is a, c, g, or t
  misc_feature (84)..(84): n is a, c, g, or t
  misc_feature (115)..(115): n is a, c, g, or t
  misc_feature (124)..(124): n is a, c, g, or t
  misc_feature (147)..(147): n is a, c, g, or t
  misc_feature (153)..(154): n is a, c, g, or t
  misc_feature (158)..(158): n is a, c, g, or t
  misc_feature (162)..(162): n is a, c, g, or t
  misc_feature (175)..(175): n is a, c, g, or t
  misc_feature (201)..(201): n is a, c, g, or t
  misc_feature (213)..(213): n is a, c, g, or t
  misc_feature (240)..(240): n is a, c, g, or t
  misc_feature (247)..(247): n is a, c, g, or t
  misc_feature (257)..(257): n is a, c, g, or t
  misc_feature (264)..(264): n is a, c, g, or t
  misc_feature (321)..(321): n is a, c, g, or t
  misc_feature (342)..(342): n is a, c, g, or t
  misc_feature (344)..(344): n is a, c, g, or t
  misc_feature (397)..(397): n is a, c, g, or t
  misc_feature (415)..(415): n is a, c, g, or t
  misc_feature (429)..(429): n is a, c, g, or t
  misc_feature (431)..(431): n is a, c, g, or t
  misc_feature (434)..(434): n is a, c, g, or t
  misc_feature (439)..(439): n is a, c, g, or t
  misc_feature (463)..(463): n is a, c, g, or t
  misc_feature (469)..(469): n is a, c, g, or t
  misc_feature (472)..(472): n is a, c, g, or t
  misc_feature (493)..(493): n is a, c, g, or t
  misc_feature (502)..(502): n is a, c, g, or t
  misc_feature (508)..(508): n is a, c, g, or t
tactttanaaactttattgaggacaaaagtgggnggctcccagtcccangggcagaccganaaaaaaaaanggctaaaangaanaagtacggcagggcaggagtggttgtctcancatggaganccctggggggcagcagaaccaantggaannaaanacanggcatcctgccantcgagtaatgtagccacagggttggngcagacccgggnggggcctgagggaggggctcggctggngtaaaangcacactcancgtccanacgagcctcgtggaagcagtggatggcggttaaacacgaattgaggcgctccctcanggctagggttcgaggggccanantgctgaggcctgcctggcctgctgggggtctcaaaaactaggagtgagcaganaggggggctggcacaaancgggtgttgggaananaanatcangctggtggttgctggagcccactnactgcngcngggtggtagactggactctanacttctatnttccanggtgcagggctctgatgcccccagctctaccctagggcagggccctgggggtcca

SEQ ID NO: 481987 - DNA, 177 bp, Homo sapiens
cccactgtaccggtagtgagatcaacaatataaatctaggcaacccaaatcgactgaatggacccttcctgtagagcaaggacataccaaagtaaactgaaaagaacagcctggccagtatggtgaagccatgtctctactaaaaatacaaaattggccgggccgaccgcgatcacg

SEQ ID NO: 481988 - DNA, 165 bp, Homo sapiens
  misc_feature (121)..(121): n is a, c, g, or t
tacacatgcaaccatgcggcgctcattttaagttatttgtagagacagggtattgctgtgttgcccagctggtcttgaacacctaggcgcaagtaatcttcccatcttttttggttgggcntttttatatcttaggcaatgaatttctattgcttttctttttag

SEQ ID NO: 481989 - DNA, 153 bp, Homo sapiens
tctgggctctctgccttctatgtgggaatgaggatcttcccaacagactctccctcttccaaaagtatgtgtatcagtatgctccttctgggcatttagagatggacagaacagggtgtgcgatctatgctgtgagaactcccagccggaatt

SEQ ID NO: 481990 - DNA, 318 bp, Homo sapiens
gtcgacatccagcgctcatagcattcgcgcaggttgcccacgaaggcctttttgtcggtctgggagtcgtgaatcagacagcacaactcacccagttcactctgttgcaggcgatggaacaccacatccagtgccgcgcgcttttcgcacacgaacagcacccgcaggccgcgaccggcatagtcagcgatcaggttggtgatggtctgggacttgccggtacccgcggcccctgaatgatgaaattgcgcccggtaccgacaggctgacggcggcattctgcgtcgcatcgccggccaccacgttccattgttccgg

SEQ ID NO: 481991 - DNA, 1439 bp, Homo sapiens
ctcttgcttcttaggcggaccgaggacgccatggccgagtgcccgacactcggtggaggcagatcacctgaccacccgtgaccgccatgtgggcctggtgagaatgttcgatgtatataggacagagaagcagccacgccatggctgccctataaccatcgagtataaaggataggttacatgttacagggtgcacttgcagtcgaggaagacgtcgtcctggggcaggcctatgaacacccacaccagataggccacaaagcctgctgacctatcatgtgtgcagctctaccctgatggacgaataacgatcctacagactaccagctattctggcgcattagtgataccaccgtcaacgacttgacggcagatggacaggacaatgactacatcgagacatgcatgcccacgactgactgagtgatcatatgggcacgaaccatgatctacctatatcagaccaaccacaaggggcacttggaagacccaatgagacacacgccataaccacaatatggggactgttctagatagtatgtcaatggtaacaacccatatcgtgctatcaacatacatgcccatggatggtccatatactctgcaaaaccacaccgaccagggtcagtcctgggagctggaaacaatgggcaccaagagaaaaagaagggaactgcagcaaataaaaccgaaagcgagaccctagcaacagcagacctggacaagggacgctcaagcaacatcaatgcacacggaccaaacagacacgaaacgccaccacccatgaccacagggagagcaaatacacacaaacgagccagcaacgtcagaaaacacagggctgccccacaggcgtaaaataccctgtgtacacctcagactaatcaataaatgactgtgcactgattgcggccataccacgaacacagtaatgtatgacaccgatgctagtatccgatctacagtaaacttagcagatgtaacagtggtgttgatagtccctaacctcattatgacggcggaacattctagaaagaacacgcgtcagcagttaacatcgtaagaagagacaatcttaaagcatcctcgtgcacctgctggagtatgacagtggtggatcacgcctgcaagttatgacacagactgtcaaagaatctacgtcggagaaacaagactggtacagggatcactccatggacaacatccctcaatcgtcagaccacgagacagtcagagcgagaagcaccaacggaccatggtactgcgcaaccaagagacgaagaaacaacggaacgagagcgagcactgctgaccaccctgccgcaggaaggcagcaacagccgcagagccaagcggagagcccaaggaagaccctcgcctgccagaccagtgaggcacacaccacaccagcaaagaagcgagcaacaaccaaacgcagc

SEQ ID NO: 481992 - DNA, 116 bp, Homo sapiens
ctctaaaatatgattagatctgtggctgtgaatgttataattcaggagatatgtagggagattagtatagagaggtagagtatataacgtgatagtggtacactacgttatgtgcg

SEQ ID NO: 481993 - DNA, 86 bp, Homo sapiens
ggatttgctggtgcagtacaactaggcttaatagggactcgaattgagctcgaattcgagcctcgaactcgaattaagcttctaac

SEQ ID NO: 481994 - DNA, 363 bp, Homo sapiens
  misc_feature (8)..(8): n is a, c, g, or t
tggcgtanaagagactctcaccacagtcatgactctgaagacttctggacccccagatatcagctcaagaccctttgggctgtgacgcacgagactcgacagcacagagaaagtgaccaagcccctgcctcaaccatgggactgcactgcatgcacgggaagggctcacctctccctcagacttcacgcccaccaacttgccgttctccatgatgatgtcatccacaggtatgtacagtatatatgtacccccatagatggcactcaatctgtggtgagagcagctccggtgaaggcccctcccaggagaaacgtgcaccaattccactgcacccttcctccaccaaagtgcaaagaaggctg

SEQ ID NO: 481995 - DNA, 91 bp, Homo sapiens
gagaagacgacagaagggaagacaaaaagaaatgaactgaggaagaaagaatggaagacaatttaaagttgtttcattaattaccatatct

SEQ ID NO: 481996 - DNA, 209 bp, Homo sapiens
tatgatgacactcgttctggcaactaggtagtgcttttattccaaggaactatacgctccataggtaagatcccatccgtctgtgttggacatctcacccccagtgctaacactgagtgtctgaacagaatagatacttaataaatgtgtatgatgtacaccatgcaggggatggcagaagcacatgggcagaggaataagaagaacat

SEQ ID NO: 481997 - DNA, 210 bp, Homo sapiens
  misc_feature (118)..(118): n is a, c, g, or t
gctagatctctccctggggagagtgcttggtctttgaaacagtcaaaggaggaaggaagaaaagagaggcagaacaattataataaagcaacttaacccattgagagacataaggatncttcaaggcgcagttcttgattgagaggacaattccttgggccaagttattggaagactttttagggagggtgacttttttaagggggtttt

SEQ ID NO: 481998 - DNA, 263 bp, Homo sapiens
ctttgacatttgatcagaccaaacagtgctgtttcccggggaggaaacacattttaataaacacatcatcccgcaggctcccacctttacctcatgtttcataccttgtttatcaaatgagcgactcaaaatgattaaaaataatgctgttctttagtagcaactaaaatgtgtcttaccgtcatttatatctttgtcaccggaaagaagcatttttgatactttactgcgagtcaaaaatcaatacgcagaatggcatttga

SEQ ID NO: 481999 - DNA, 1976 bp, Homo sapiens
  misc_feature (362)..(362): n is a, c, g, or t
  misc_feature (469)..(469): n is a, c, g, or t
  misc_feature (1976)..(1976): n is a, c, g, or t
gcggcaactcaggggcgagccgcggcaacaagacgagacgcggcgtggcagctctcacgggccacgcagcctcttcaagttgactgcagtccatcacccacggtcattattaatttgttcttcctggcctaaggtcagctgattagcaaccttagttagtctgcagtctccattctctttttgctgaatcacgtcaagtattcacaagttccagggggcaggaggtggacatctttgggggacattattccgccaccagaaaacccaggagcagccacagcccaagacgaggcagggaaggagtgctgctgtctgccggtgaagatgaactgcttctgaccctcccgagcgagatattgagnagaaagaatttgccaagatgctagtcacacaccaagtacagaggctatgttggtcggctgcggcaaaaagaccactcgcggcgtggcagctctcactggccctgctncctcttcaagttgactgcagtccatcacccacggtcattattaatttgtttttgcaaaggccaggcaggtgaatctaatggagatggaaaccaccacacctgcttccctggtctctgatgttggtgttaacctctgcaattcctcaagcaaagcactccttctatcaggctcactgtcttgctggagggaggaagttccacaggctctcacttggttctttctgccgtaacaacccttactcctccggccaaggagccaatgtgagcattcagctggcagctaagaatgtgtatcccaataaacagggcagacctacagacccactggacccactagagatggacttgggccacagtgccttccatgacttcagtaaacagaggggtgtggtgatcttgtcaaagtcctggcgtcaatgtcagtgtccggctacacaccatgttcccgtcctcgaaaagcctctctgtacccctctatgttggtgacacaaccctggcaaatggccacagactcctttggggacagagtaggagcgtaactggtgggagtggttggcatgctttgtattgggagagccgcacgccctagggcttccagcctcctcttcagtttggcagctgtgagtctgaatttcactcaaatctggaaactgggtgagagactgtggcagctgctgtccggctggcagagcctgacgtgtctctgatcatactcactgggtcagcaacaccctactgaccttgtccagaatcccacatcccagttgatatcagggcaatcagtttcctggctgttttccccaatatcaacccgggcttacagaagacagtcaccacagagctcctgccaggagttcactcattcgtgcatttcttccttttttttttcttttggagatggagtctcgctctgtcgcccaggctgagtgcagtggagcgatctcggctcatggcaacctccgcctccgtgggttcaagcgattctctgtgcctcagcctcccaggtagctgggatagcaggtgtgtgccaccacgcccagctaattttgtattttagtagagatggggtttcatcatgttgcccaggctggtctcaaattcctgacctcaggtgatctgccctcagcctcccaaagtgctgggattacaggcttcagccaccaacccagcctcattcatacatttcttatggtcgtgtttgagacagggtctttctctgtcacccaggatgggtgcagtgtggtgatcatgcctcagtgcagcgatcatggctcagtgcagcctcaaactctgtgggctcaaagcaagtgttccaaactcagactcctgagtagctaggactataggcccacagaccattgcccggtaaattttattttgacaaaaggggcccacttgttgcccagtatcttgatctgggccaagaaactccccctctgggccccaggcgtgggtaaaggggggcaccgaccggcctggggaacaaggggccaccacaatataaatn

SEQ ID NO: 482000 - DNA, 425 bp, Homo sapiens
tatggcggagattgtgcacaggatggagagtatggggccaaggatatatccgaagggatggctgcaacactgagttgagaagtgcggaggtctgcatcaccaaaggtgtaggagcaatcctgcctgctggagctgtgagtaaagggccctggaccaggcccgttgttcccactttctgtggttaaggggcgcatcgagtggcgaaggagagagcccagtgaactaaacagccctttagaaagttcgctttgcttcctgctggcgctctttctagcactaactttggtatgcatttaatctgtaaaattagtactatcaccttacgttggagtagcactttacagtttgactctagatgctcttttcattccatcctgctacctactcacatcaagtgcttttccccttgaccaacggtatgccaa

SEQ ID NO: 482001 - DNA, 275 bp, Homo sapiens
aatggaatctcgctctgttgcccaggctcaaaaagaaaaaataaaggcctgcttaacaaatgaaatgcatatggtgtctggaatgcgcttgaaagtaaaggagagtgggcgtgaggtcttataaaaaaacaaaataggccctgagttgatcattgttaaactggatagaggccattcattatgatgaaggggctcattatactatactgcacttctgtgtactgaagatttcctgaactaaaaagagtcaaagtacatgccttaaacttgaggat

SEQ ID NO: 482002 - DNA, 1338 bp, Homo sapiens
  misc_feature (67)..(67): n is a, c, g, or t
cagaatagtaagtaccacagtgccacacaagcagagacacacagtggggtaggagtgtgtgtgtttnccactaggtatatcgctgattctcttagtaattagattgtatgtgtgcttctagctagtggcttggttgtgctacacacatgctgtgttgaagtggtgtatgatcctctcgctttgttgtttgtgtataatgaaagacacacttgtagtgttgtgtttggttggtttgcgatatgctgctgtgtgataagcatcttcgtcctcctatgtttagtgtgtgacctgtcgctctctccctcctctgctccggtagttatatgtcttggtgtgctctctacgcaactagctggttgactaactgttgtggggcgacccgaccagtaggtctctgctgtgtgtccgcccctcggtcgtaggttgttgataattatctcctgtgttgggggcgtcagctctctccccccccgctgttgttctcttttgtcaggagatgttgtctatatgagacggctgtcttctttctgcaaaaataattgatgcggtggcgcgcgccgcccgttgcccgagagtaccatctaatgtggttcttctccctgtggggtcccccaaaaaaccgcccccgagaagaatttcttcccccaaagaagtttgttgggaaaaaatacacctcgccccaaaacaaagttttgtgcccataaatagcttttcccctagagcctctcatttaacaaattggaaagtatgcttataatttctctgaacataatctctctctcccctccgagaaacctctctcgcaaatttaaagccctctgtttaatagccacaagaggttctctcacagaggttcccccccttctctttcatagcgcgcgcgtcgcttgccccgcgagggggtccacatatgttcacctcggcgggtgtactccacccgcgtaaggttagttgctacatgtgtgcccatgtgagagatatacaccacgcactccgcacgtttatgtttctgtggtcaccacacttctctgatctatgatgtccccatcttactccgtgagagagatattataagtagtccacggtgggactccttctcttgtgtgaccacacactcagggccccttgcgcccacagaatgtggtcccacacaaccaccccctcttttagacccggtgagttttcttaggagctctcttccctcttgaggcgccacatgggaagaggatggccctctctctacccgcacccgcgctcgtcctccgtaggaggcccacacacacgtctcatcccacgagttctatagcgttctctcggtctaatacaaagaacaaacaa

SEQ ID NO: 482003 - DNA, 106 bp, Homo sapiens
  misc_feature (45)..(45): n is a, c, g, or t
  misc_feature (86)..(86): n is a, c, g, or t
  misc_feature (90)..(90): n is a, c, g, or t
ctagaggatccaggacaggcagacggcggcagactagtggagcanagttgctgggggaacaccacgccactcgttggagcctcgcngggnggctcaactggagccc

SEQ ID NO: 482004 - DNA, 305 bp, Homo sapiens
tcgaccagctactgcgggagagctgaggccaggagaaagtgctgtgaacccggggtggcagaggttgcagtgagctttgcagtgagccaagatcgcgccactgtactctagccttgctgacagagcgagactccgtctcaaacaaaaattttaggccgggagcagtggctcacacctgtaatcccagcactttgggaggccgaggcgggcggatcacaaggtcaggagttcgagactagtctggccaacatggtgaaaccccgtctctactaaaaatacaaaaattagccaggtgtggtggtggg

SEQ ID NO: 482005 - DNA, 329 bp, Homo sapiens
cctataatgaaatgaatgcttgcttttgccccctctccaattcatgtgttgaagccctcgtctccatgtgatggtaattggtgatggggcctttggaagatgatgaggtttgggtgaggtcatgagggttgacccaccatgatgggattaaggcccttatgagaagaggccagaacttggttatcctcttccaatgtgaggacacagcaagaaggtggctgtctgcaagctagctagagagccctcaccagacatttaatctgccagcatcttgatcttggacatctagcctccagactgtaaacaataaatgtctattattgaagcta

SEQ ID NO: 482006 - DNA, 275 bp, Homo sapiens
ataatcagccgagtaccggttcgccatgtttcccacttcgtggtgtccgttttacttagcagatactggaaccgttactttaagacgtgttttccaattcagaagttgctctacgttagagtatgatggacttttatgtctgtaacacccccgacagacactttaatgtatggcacagtgacaatgtgaatggttgagtaatgtatacgagaaatttctatgtccatttgtggacttccaagtgactaagtagaccccaagaatatgtaatacaa

SEQ ID NO: 482007 - DNA, 380 bp, Homo sapiens
  misc_feature (56)..(56): n is a, c, g, or t
cgggccatggttaaactttggggaaaggctggggctttgggctttatatcacctgntttgccccgccccgcctgggggccccccccccttgttgtgtttcccccgcaatttcaaggataagccttcctgcggggccctgggccgctctccccaccctgttttgagccaaaacaaacatgagccccctgcttggaacaaccaactgttctggttgctggtcaaagggaggggaggcttttcaaacaggtgtgggttcccccgtgggcccaaagtggccccctgggcatattcccctgggtattcctttgtgccccaggagcgattatagtgacccccgttttctgcaaaggctgttaaagtaaaggcgttgggaggtggga

SEQ ID NO: 482008 - DNA, 617 bp, Homo sapiens
  misc_feature (77)..(77): n is a, c, g, or t
  misc_feature (83)..(83): n is a, c, g, or t
  misc_feature (92)..(92): n is a, c, g, or t
  misc_feature (99)..(99): n is a, c, g, or t
  misc_feature (101)..(101): n is a, c, g, or t
  misc_feature (107)..(107): n is a, c, g, or t
  misc_feature (117)..(117): n is a, c, g, or t
  misc_feature (119)..(119): n is a, c, g, or t
  misc_feature (130)..(130): n is a, c, g, or t
  misc_feature (136)..(136): n is a, c, g, or t
  misc_feature (138)..(138): n is a, c, g, or t
  misc_feature (147)..(147): n is a, c, g, or t
  misc_feature (156)..(156): n is a, c, g, or t
  misc_feature (158)..(158): n is a, c, g, or t
  misc_feature (166)..(167): n is a, c, g, or t
  misc_feature (184)..(184): n is a, c, g, or t
  misc_feature (190)..(190): n is a, c, g, or t
  misc_feature (198)..(198): n is a, c, g, or t
  misc_feature (200)..(200): n is a, c, g, or t
  misc_feature (202)..(202): n is a, c, g, or t
  misc_feature (205)..(205): n is a, c, g, or t
  misc_feature (212)..(212): n is a, c, g, or t
  misc_feature (214)..(214): n is a, c, g, or t
  misc_feature (287)..(287): n is a, c, g, or t
  misc_feature (290)..(290): n is a, c, g, or t
  misc_feature (293)..(293): n is a, c, g, or t
  misc_feature (296)..(296): n is a, c, g, or t
  misc_feature (301)..(301): n is a, c, g, or t
  misc_feature (317)..(317): n is a, c, g, or t
  misc_feature (321)..(321): n is a, c, g, or t
  misc_feature (325)..(325): n is a, c, g, or t
  misc_feature (331)..(331): n is a, c, g, or t
  misc_feature (337)..(337): n is a, c, g, or t
  misc_feature (342)..(342): n is a, c, g, or t
  misc_feature (356)..(356): n is a, c, g, or t
  misc_feature (361)..(361): n is a, c, g, or t
  misc_feature (365)..(365): n is a, c, g, or t
  misc_feature (378)..(378): n is a, c, g, or t
  misc_feature (384)..(384): n is a, c, g, or t
  misc_feature (388)..(388): n is a, c, g, or t
  misc_feature (420)..(420): n is a, c, g, or t
  misc_feature (466)..(466): n is a, c, g, or t
  misc_feature (474)..(474): n is a, c, g, or t
cggaaattcggccattatggccgggggccagaccggggggccgtaccggaggcaggttgaagccgttgccgtggccntgaccnggggtaacnagcgtgngntggccngccagaggantntgaaaaggcanagcgantnggttaaggnaaagcgccnanatgacggnntttttgttgccgcccgnaggcanagggactngnanatnatgcagnanaagcagaaaagggcaaccgagaagaaggaggaccccaggtagcttgggggtttcgggtccaaccttttggccnttngcntgngtgcntgaagccagtccaacnaggntggngtttcntcctgnagggntaacaggtccaagnaccgntggnattcctttggccntgagtntgancgggtccctttggggcttccttcccttaaggnagcctttttccccttgggccattcccggggttaagggggttacccnttccaagngtttttaattcctgtggggctaaccccaaggttttaaaggtagctttgtaaaaaaaaaagatttataattaaatgttcccacagccctggtgattcccttcaccttggaaggattggggtcacaattcagttcccccactttc

SEQ ID NO: 482009 - DNA, 563 bp, Homo sapiens
  misc_feature (77)..(77): n is a, c, g, or t
  misc_feature (83)..(83): n is a, c, g, or t
  misc_feature (92)..(92): n is a, c, g, or t
  misc_feature (99)..(99): n is a, c, g, or t
  misc_feature (101)..(101): n is a, c, g, or t
  misc_feature (107)..(107): n is a, c, g, or t
  misc_feature (117)..(117): n is a, c, g, or t
  misc_feature (119)..(119): n is a, c, g, or t
  misc_feature (130)..(130): n is a, c, g, or t
  misc_feature (136)..(136): n is a, c, g, or t
  misc_feature (138)..(138): n is a, c, g, or t
  misc_feature (147)..(147): n is a, c, g, or t
  misc_feature (156)..(156): n is a, c, g, or t
  misc_feature (158)..(158): n is a, c, g, or t
  misc_feature (166)..(167): n is a, c, g, or t
  misc_feature (184)..(184): n is a, c, g, or t
  misc_feature (190)..(190): n is a, c, g, or t
  misc_feature (198)..(198): n is a, c, g, or t
  misc_feature (200)..(200): n is a, c, g, or t
  misc_feature (202)..(202): n is a, c, g, or t
  misc_feature (205)..(205): n is a, c, g, or t
  misc_feature (212)..(212): n is a, c, g, or t
  misc_feature (214)..(214): n is a, c, g, or t
  misc_feature (233)..(233): n is a, c, g, or t
  misc_feature (236)..(236): n is a, c, g, or t
  misc_feature (239)..(239): n is a, c, g, or t
  misc_feature (242)..(242): n is a, c, g, or t
  misc_feature (247)..(247): n is a, c, g, or t
  misc_feature (263)..(263): n is a, c, g, or t
  misc_feature (267)..(267): n is a, c, g, or t
  misc_feature (271)..(271): n is a, c, g, or t
  misc_feature (277)..(277): n is a, c, g, or t
  misc_feature (283)..(283): n is a, c, g, or t
  misc_feature (288)..(288): n is a, c, g, or t
  misc_feature (302)..(302): n is a, c, g, or t
  misc_feature (307)..(307): n is a, c, g, or t
  misc_feature (311)..(311): n is a, c, g, or t
  misc_feature (324)..(324): n is a, c, g, or t
  misc_feature (330)..(330): n is a, c, g, or t
  misc_feature (334)..(334): n is a, c, g, or t
  misc_feature (366)..(366): n is a, c, g, or t
  misc_feature (412)..(412): n is a, c, g, or t
  misc_feature (420)..(420): n is a, c, g, or t
cggaaattcggccattatggccgggggccagaccggggggccgtaccggaggcaggttgaagccgttgccgtggccntgaccnggggtaacnagcgtgngntggccngccagaggantntgaaaaggcanagcgantnggttaaggnaaagcgccnanatgacggnntttttgttgccgcccgnaggcanagggactngnanatnatgcagnanaagcagaaccttttggccnttngcntgngtgcntgaagccagtccaacnaggntggngtttcntcctgnagggntaacaggtccaagnaccgntggnattcctttggccntgagtntgancgggtccctttggggcttccttcccttaaggnagcctttttccccttgggccattcccggggttaagggggttacccnttccaagngtttttaattcctgtggggctaaccccaaggttttaaaggtagctttgtaaaaaaaaaagatttataattaaatgttcccacagccctggtgattcccttcaccttggaaggattggggtcacaattcagttcccccactttc

SEQ ID NO: 482010 - DNA, 121 bp, Homo sapiens
cccggtgcggggtcctgtggccccgttggcaccgttgggccgtttaagtcgggggcggccactggggcccggcccgtaagccggggccccagtgaatccctggtgtttttggcacgtctcc

SEQ ID NO: 482011 - DNA, 448 bp, Homo sapiens
  misc_feature (67)..(67): n is a, c, g, or t
  misc_feature (70)..(70): n is a, c, g, or t
  misc_feature (74)..(75): n is a, c, g, or t
  misc_feature (97)..(97): n is a, c, g, or t
  misc_feature (120)..(120): n is a, c, g, or t
  misc_feature (130)..(130): n is a, c, g, or t
  misc_feature (159)..(160): n is a, c, g, or t
  misc_feature (177)..(177): n is a, c, g, or t
  misc_feature (214)..(214): n is a, c, g, or t
caccgcactagccacccctcccagactgtggacgggaggatggagtcgatggccgtcgctaccgacnggngcgnncaggccgggggtcccagcggcntcaggtctgtcggcttcccagcntcgggcggantgcgtcggagaaagctgctcatgaactcnngctagcgcatcaaccgnatcatgggctttcacaggcccgggagcggctaagggncatgatttgctccatttcttactttacaacttgcgtacatgggattatacaaatattttcccaagagtgaaaagaagataaagacaacagtactaacagctgcacttctattgtccgggaattccctgcccgaagtgataaatccgatcaatggataccttatagcaaaatgggcgaagtcttcacagatctctgtgtctactttttccacttttatccttttgtcatgaactg

SEQ ID NO: 482012 - DNA, 711 bp, Homo sapiens
  misc_feature (212)..(212): n is a, c, g, or t
  misc_feature (404)..(404): n is a, c, g, or t
tttcgagtcgttttggttcgcggttgccggggccccctcccctttttttcccctcaaaaacccgggcccgcccgcctccggttcttgcttagccccgggggggttccattttccccgggcacgctttctcctctgggcctttttgggtgcccatttatccaagttgttcaaaaacggcgtggggtcggtccggattttccgggtttgtctgnccccgggtgccggcggaccaagcccaattaaggcaaaccgggtttcccccccccccccctccggggggggtggttctccgcgatttttagatccacatttttaacccccggtcccgtttgggggttttccccccggggggggggttggcgttgggattaaaaagtttccccgggatttttgggagacccctncccccccttccccccttttttggggggggtggggcccccccaggggaatttttggttccggcccagggggttttaaaaaccccccgggggttaaaaaaaccccccggccccggggcccccccttttttttttggggggggggggggtttccccccccccccctttttttttttaaagaccccccaggggggccaagggtttttttggtttcccccccccccgggggttccgggggcccccttttggggttaattttttttcccataccttccctttttttgggttttccccccccggggggggttta

SEQ ID NO: 482013 - DNA, 466 bp, Homo sapiens
aagtacaaaggccaaaagggctggtttctccaaaatggaaccccttccaaaacagtctcccaccgacccctataaagtggaagggtttccccccattttttttgcccccaatgggggcaaaaaaaaccccgtttaattttagggtggggaccaaaattttgggccttttagccagtttttaaaaaaaccttcccccaaacttagccgggcccaagaaaaacttttaaagccttaggttttccgaaagttggaagaagccaacccccctcgtggccccttgttggggggttcccccccaggcccgccaccaaaaacaggatttcggaatccctttttttttttttaaatttttaaaccttgggggttcccctcctgcctttaaaacttaaaaacccctaaaggcttaaaaattttgtccccattttttccaaggaaacctttttttttttcctttttttgggtttta

SEQ ID NO: 482014 - DNA, 517 bp, Homo sapiens
gctgcaatatagcaggctgaagagtctgagaggagaggccttttaggtaggagggaaaccagagcatgtattgccaaaggaagaagaaagtgtccatcctggctaacacagtgaaaacccgtctctagtaaaaaggcaaaaaaaaattagctgggcgtggtggcagacgccgagagtcccagatactcaggaggctgaggcaggagaatgtcgtgaacccgggaggcagtgctcgagatcgcgccactgcactccagcctgggcgaaagagcaagactccgcctcaaaaaaaaagaagaaaaaggtgcctcaagcaaaagggtgtgggctggggcgatgctcatgcctgtaatccttacactgtgcgaggccaaggccagcagatcgcttgaggccagtagtttgagactagcctgaccaacatggcaaaacctcatgtttactataaatataaaaattagctaggcatggtggtgtgcacctgtaatcccacctactctggaggctgagacaggag

SEQ ID NO: 482015 - DNA, 235 bp, Homo sapiens
agatataactgaagctttatctggactgggggaatgggggtgtaaaaacacaaaccccaaaacccctatttaaaactactccaactaactggatggggctcactccatcccatcccaccccccatctttctatatatacccaactcgaaccctatcaaacacccagcattcacatacactttgtcctttctttttaacatcactaaacacattagaacatccctgaacttctctc

SEQ ID NO: 482016 - DNA, 474 bp, Homo sapiens
gccaaacccactggagcgcactaccatgccgtcttaggcactgcaggtaccctcattaagcgtcagcgattgacatcggaagctggcgcactagacgtagttcctcatgtcttatgaatagcgaagtacctaggaagatcatggcaaggtgagccatggctgagaagcaggtgcccagacaggctaccgaggagcagctgatagagcacaccccgatgtggatcatactagtgttcgggtctacagatagagccgacaaacctaccgagactgcgatcgctggatgtccaagttagaatcactacacgaacctaagtgtgcccacagagccttgtaactcacctcggcatctaactgctagtccaaagaggcacagctcattgtgctctactgagaactcgtgtacagagcgtctaagagtcatcatcgatagcacgcgctaatgcaatcgccaatttaggtgattaagatgcc

SEQ ID NO: 482017 - DNA, 236 bp, Homo sapiens
ccagttacacagctccattacaacagctcatctaataaattaaaaaataaactgataagtgatccttgtttggtggacacttcagagcaagatgttccttggcagggatatactgacctggtttagctttggccctgtgcatgctcaggctttcaggtattctttgaggttggattcaaatggatataaattctcagaacgaactacatcaaaatagtcatagctgtcgtaactgg

SEQ ID NO: 482018 - DNA, 363 bp, Homo sapiens
gtgggcgctgcagtctctggggggctttctaaacctatgacaggacaggctggacttgcttcagaaccttctatgacagacacgggcactaaatgtgaaaaaccaataagctggtgactcatgaatacacacgaggaaaagcagaggtttattttatctgccttttcaaccacatttttccctctgatgaaggattggtcagatgtctttgagaagtgttaaactaattcacatggtagtgtagggccaacatacaagctaccagtctaatgtgtatagtagactttgggaaaagcgattttttctcatgtattcattctgaatagttgaaatgtatatttgtacagtcttttagacctattc

SEQ ID NO: 482019 - DNA, 124 bp, Homo sapiens
catcttgctcccatcagtccatcaaaccagctcattgtgtacacgtcgttagactgctgttcttaataaccaacaagagtcaatgtatagaaatccctgatgggagaagactgcggggtaccga

SEQ ID NO: 482020 - DNA, 574 bp, Homo sapiens
aatgatagaagatagtagatgcaaaatatgccatattattaaaaaaaaactatgaaaaataaaaaaagcactcccaataccccatatccataggtattaacacgctagatatatactggtggctgtgtactgtatagtgtgtgtatttcaacacaggtatatgtacatttttttacggcacttcagaccttatctcacataaacattatcgtcaatagacatccagtattttaagaagaaaaagtctgtgtgaagtttccagtacttgagatcagagattgaagtatgtctcttctatgtttttcctggatcttgcatgaccttgcatgtgcactatgcaattacagcatctcacactccccggatattcccacattttcaggtgccagattcaaagacaggtgaagtttcagatttatctcacttcctcacagttgattgtggtcagtcgtccatgcaccaccacttccatcttccctgtattatcttgtatttcataataagtgaattcaccccttacatttttcttatgtacctcaaacaccccattcacaaaacttcctttagtttgtga

SEQ ID NO: 482021 - DNA, 193 bp, Homo sapiens
ccatgtttggccagacgtgtcgcggcctgtatggcgcgtacagcgtcagccggcgtatcttctacgtgcagagcgttccggcgattgcggcgacgttgccgtgctcgtggcaccctgactagcgcgccggcttcgccgatacccacatcgatatcgtcgccttgaacaccgcctcgccctgcgggtttgctca

SEQ ID NO: 482022 - DNA, 128 bp, Homo sapiens
tgtttatcgactgccacctcagctcacaagcagcctcacaggcgctcactaccatgcccaactaattttgtattcttttttttatagagacgaggtttcaccatgttgcctaggctggtctggaactc

SEQ ID NO: 482023 - DNA, 124 bp, Homo sapiens
gatgtagtgtgaacagtgacggtctgacaccgtgtctcactctagcaacagtgcagacaacgctaaaccaagcatacacgggtcatgccaccagggtgtgtcatcgtcaccactggctcgggga

SEQ ID NO: 482024 - DNA, 234 bp, Homo sapiens
tcccttttcttcttcacctctcctcctcccgattctcctctaatacatcatccgaaaaccgtgacctcctccgagccgccagaaatccacgacgagaagatcatgattgcaacgatgcgaaagtttccaccgaacagcatccttccaccaagtaacattagactcccaccccacatcaggcaccaggaggccccctttaacacaatcccactagaaatcccctccctccgccta

SEQ ID NO: 482025 - DNA, 161 bp, Homo sapiens
  misc_feature (46)..(46): n is a, c, g, or t
gcactcaactgctactctaggaaaaagcagcctcgaggctggtggntttcagagcaggaggccgacgttttctccagcaaagaaagagcccaccacttgcaggggacaggaggaacgaacggagaccgggcccgagacacaaaaaaaagctgctggccctg

SEQ ID NO: 482026 - DNA, 1295 bp, Homo sapiens
  misc_feature (304)..(304): n is a, c, g, or t
  misc_feature (414)..(414): n is a, c, g, or t
  misc_feature (487)..(487): n is a, c, g, or t
  misc_feature (948)..(948): n is a, c, g, or t
cagggacccctttcttgtgagggggcgcccaacgagaattttccccccccacaggggttctaacacacacacgcggatttgtgatagaattgtgcgttgcgccgccctgttggagtggcgcccccctttatagaaatatgggttggcggccaacccacgaggggttcccatacgagcccctctcctgtataagggggcggcgtcctggggggggcccacatttttggcgggttttgggggcccacaacagaaatttttggggggggagactcaatatgtgcgaacgcccctcccccactccttntggcccccccactttccaaagagggcttgcgccgcccttgccaccacacgtgatctgcgcttatagagccacaccgtgttcttgtcccacgagcctctccgctcgctgtnctgcggtgttcccctcgagagagtcccccatcagggggcaccacactgtgcgccactgctcacacttggcccntctcatagagagtctctactgtcacgactcagtgtgggtgttctcgggagagagtgtggttgttgacacagcgggcccccttcggcagagagtgacccgcgcctctgtgtgggcaaccaacagcgccctcgggggcgccccaccacaggagacacacacacctcgcgagagcccccccccgtcggtagactcccctacacaccatcgccacagctgtctctcgggcgcccctcgcgagagagatttgagagggacacagaggtttgtggtctattactctgcgtgggccacacactcggggtctagagagctctcgcgcgcggtttgttgggtgtgatagtctctgagagggcacagagagagagtagagagacacacactcgcgtctatacactcgagaggggggacacactcgcgggggcgtctctatactcgagaggcgctctctctcccactcgggngggtctctctaatactctcaataagtgggcacacacacacctctttatatagagagagtggggtgcacagcctccccctcctccacccacactcttcctcttccctcgttccctcggaattttcaagggaactttggtgggccttccccttgagccctaatgtaagctgctatatataaagttaaagtgtgccctcacggcacagggaagagagggctcacacacagaagtttccttctgtaacgtggccacaggccagacacccccgtcccttcacccccaccctgctccccaaccgcccccccccatttgggtggctgtttttaaaaagtaaagtttttagagga

SEQ ID NO: 482027 - DNA, 509 bp, Homo sapiens
  misc_feature (24)..(24): n is a, c, g, or t
agaggatccccaatgaaacatggnctctagggcaagcaacatggtgtagtatagaaaacactggcctggaaatcaggtgacttggaatcaccattgagttgtacggtcccttcacttctctgggccttggttttgtcagcaataaagggtggggattagactggaagatctttaatattcagctttaatactctgattgtatgagttttaagcttcatattggactgatatgacttttgtggctgtaatgaaatccagaaaagagagcttataccactgtgtttgtagattagtagtagcttgaatactattaatgcttcccaaaaaaaaatcacttttttactcaattacttttttttttcctggaatgtcttttttccttctctacttacaaagcctcactttacccacttataattgacacttgaatggcattgttcttgtgctttgatttaggttttcatattgatttttctcctgcctcctctccctgtttcatttttcattgt

SEQ ID NO: 482028 - DNA, 601 bp, Homo sapiens
ctctataggatcccctgatgcgatgtgcgcgatgtgcagagccctgcaacgtgagcacgctaaaggcttacttcagatgctgatggctacaggggctactgagctggtcgacatgccccctagagcggtttcacctgcgtgtccccgtgcagtagggtgctactgtgaacatggaggtgcagtgcgagcatctgcccatgtggggcccgctgcagctgtgtgtccttctccatctacagtgcctggggcgagcattgtgagcatctgatcgtgagattcgatggcgttcttcggcatcttctttggggtcctgggcggcctcttgctgctgggggtcgggacgttcgtggtcctgcgcttctggggtttgctccggggccaggttctcctatttcctgaactcagctgaggccttgccttgaaggggcagctgtggcctaggctacctcaagactcacctcatccttaccgcacatttaaggcgccattgcttttgggagactggaaaagggaaggtgactgaaggctgtcaggattcttcaaggagaatgaatactgggaatccagacaagactataccttatccataggcgcaggtgca

SEQ ID NO: 482029 - DNA, 315 bp, Homo sapiens
  misc_feature (25)..(25): n is a, c, g, or t
taatagcgacgcaatatacatagtntcctctcatgctcaggttctccacaaatgaagactataaacaaggtttttttaaactgtattttagtgacagaaacctatgtgctcttgaataaaaataaagagctgttatcaccatgctactgtcacaacatttgctgtttgtaactgcttttctttcaaaagtctaaaaacttttttctatatgttgtgtttatactcatgtatctcacagaactgagggaagggacccattaatcaagacctttcttttaaatatgtgtaatatttacatatacatacacgcgtcgg

SEQ ID NO: 482030 - DNA, 182 bp, Homo sapiens
agaatcacagccctgccgaggttcaaagcccacgggttctcactaacgcttgaggcagggccaatcaataccctaagcttcaaactcatgctgtgtaaggaaacctgtaagaactgacacctctgggttgcaatgagccgaggtcacgccactgcactccagcctaggatacagtagggaga

SEQ ID NO: 482031 - DNA, 212 bp, Homo sapiens
gtgggactatacttttgatgagattgtcacattgtcgacagatgggcacgatccttaaccaaaatctctggaacattaagagatctggggactgccagtcagtgggctgtaatgttgatggccgccatctcatgacatcatcgatgacatcaaccagtggtgctgtggaattgcccagccagttaagtcccaaggaaacacatttcaataaa

SEQ ID NO: 482032 - DNA, 822 bp, Homo sapiens
  misc_feature (642)..(642): n is a, c, g, or t
  misc_feature (655)..(655): n is a, c, g, or t
  misc_feature (661)..(661): n is a, c, g, or t
  misc_feature (666)..(666): n is a, c, g, or t
  misc_feature (669)..(669): n is a, c, g, or t
  misc_feature (671)..(671): n is a, c, g, or t
  misc_feature (689)..(689): n is a, c, g, or t
  misc_feature (697)..(697): n is a, c, g, or t
  misc_feature (722)..(722): n is a, c, g, or t
  misc_feature (741)..(741): n is a, c, g, or t
  misc_feature (744)..(744): n is a, c, g, or t
  misc_feature (748)..(748): n is a, c, g, or t
  misc_feature (753)..(753): n is a, c, g, or t
  misc_feature (759)..(759): n is a, c, g, or t
ggttttctgtttcccagctctcctggggctggggttctgggaatgtgacccttgctgcagctgtgttggaggagggcaatggggctgggccagaggatgagcaaataaagggcagaaacccaggaactaggaactcttcttcagtctgcttcttttttcaggcaggacagcgagattccagaagctccgcgcccagcttgccaaggccctgggctagaggcctgccatggcacccctgaggccctttttcatactagccctggtggcatgggtttctctggctgaccaagagtcatgcaagggccgctgcactcagggtttcatggccagcaagaagtgtcagtgtgacgagctttgcacttactatcagagctgctgtgccgactacatggagcagtgcaagccccaagtaacgcggggggacgtgttcactatgccagaggatgattattggagctatgactacgtggaggagcccaagaacaataccaacaccggtgtgcaacccgagaacacctctccacccggtgacctaaatcctcggacggacggcactctaaagccgacagcttcctagatcctgaggaacagccaagcaccccagcgctaaagtggagcacaggaggagatctaagggccganacatgatcaaggncctganttccngangnagaactgtgcgtggaagnctttgagncttacggatctcagaagggtccccnttggctccagggcgactgnttnagcnaaaanaggggnggccgggttcccatttcccgatgttggggttgggggccccggggggtcgctaagtggggggac

SEQ ID NO: 482033 - DNA, 230 bp, Homo sapiens
gccggggccccccccattttccccccaattgtttcttccaaaagggagggggggggaaacccttggaacccccccttggtttacttgattacccgggcccccctttttccccccccaacccccaagcccttttttaatgccccggggtttttttttttttttttttggccccccccccttgttaaaccccaaacccggggaattttcctttaaaaatttggtttttaata

SEQ ID NO: 482034 - DNA, 382 bp, Homo sapiens
actctatcacagactgaactcacttgtagaattcattgtagtgaagcttgttacaggtttggaggtgctgcattctattgtagataattcagaacttgaatctgattctaaggtcattaactttaggaaggttctccatttttaaaatggtggaactcttctgggtttccccttcaggccatcaaattttttagtaaatttgtaatagcaaacagcatcatcacaaaagatgttctgcttcctttgcaacctgaaccagttcctgagaatagctgctattaaaataggagcttctccagcatgggctacatggtgtaaaccctgcctataccataaataccaaaattagccagacttcatatgggttccccagggtaccgag

SEQ ID NO: 482035 - DNA, 263 bp, Homo sapiens
cgagataccgaatgaaaacaaatcttaagaacacggattcagtactcggccccttatgcgttaaccactatcaaggcaataatatagctatacgttattttaaaatcagactatgtcttctgtatgaaactggagagacaataaacatcaccatgtcccagttactgtaaacgagtaatgactattttccacatcaacttttaccaatgcgtaagcattactccatgtgctgtaattacagtgtctcactcacctgaagccga

SEQ ID NO: 482036 - DNA, 1341 bp, Homo sapiens
ccctgccctctcacctctgacacccagccccaggagccagagcactcctggcctccacctctgactcttcagcagctgaagattaatgcaggagaaagagcaatagcccaatacagggatgaatagagattacaatacatcctaagatcctatcaataccaattaatgcccagaaaatcggcatgcgctgtagccctgagccatgtctaagcgagagcatcggttgcggggtgaggagtggcactccccgctgagattatcctccgaatcgcgacaggttagtgagccattctcatgtgttgttctctatcccaatgccgcgtgcatcagtcctggtaagccattagaatgagagctggcgccatacttggagcatgcacgtaggtgttctcagacacagaaaagatagagaatatacagaagactgggaaacaactgaagagaaacaatacaaagtatacatgagaagagaagaacagaagagagaataccaatccaacaggatacaacaacaagagaaggagggtgggccgtccaggataccccaaggcttcctcctttcaatgatacgcacctgaatatcggaggggtcacattccccaacatgttctacagtgataaaatggaagcgtgcgtgggcggcctgcaggtggaaaaggcaccaggactctcatattcatgttcaataaacaattagacaaagaggaggcattgggtaatttaccccttttcatatccatatcattcacacgcagtagtcagttcccacacaaagcgagcaataccttggggtggttgacatccacatttgaggcttccagctatcgcgcacctgcggagatcccatttatcagcgattcgctgcagtgagttggttaacctatttctgagacgacgaccaagagggctagattggtgctccacacacagaagtagccactgcacacgagtacttccttggagaatgtacatcgacacgatatatatcagcgacggaaggaggaccacaatgcaatggaggaacttaccataggagggtagagttaaacaaaataagtatcattggatatgagccatggtgatagttacaagtccaaagtacccccgttcccatacaacagagattcatttatgtcgaacactctaaaacgtaattccattccagtcatcctttgagcacgatttccagttatccattaccatttgagtgaatgagccaccacttgcaggtaggagagtctagcgcaacgaggatatcttgggtcccactttctgtgggaggataggagaacatcccgatgggtatagccgatcttccaccagcaaaaggagaaagtcgta

SEQ ID NO: 482037 - DNA, 147 bp, Homo sapiens
tgaggccatcccttgcagatatgccctgcggctggatggtcactgacaccctcacagacagtcattgtaatccagatctccagcaaagtcagctcccactagtctgccattgggccagcgtgagccaagcgagtgccattgggcaca

SEQ ID NO: 482038 - DNA, 174 bp, Homo sapiens
tgctgagattgcaggtgtgagccatcacgcccagcccgggttttaagacagggagtgaaatgactcaggtggtgtgactcaggtggtgtgactcaggtggtgtgactcaggtggtgtgactcaggtggtgtgactcaggtggtgtgactcaggtggtgtgactcaggtggtgtg

SEQ ID NO: 482039 - DNA, 219 bp, Homo sapiens
atggaggaacaaacgaatcacaagttccaaggccctgctttgttttcttaaaagtactttatcccaggaaatttgtttgtattgagatatttacagttttatagtaatgtacatatcgttagggtcagccatttttaatgatctcggatgagacaaagcagccttcgagagcgtactctgtcctacttctaactttacttgtggtgtgaccatatgcat

SEQ ID NO: 482040 - DNA, 453 bp, Homo sapiens
gaacctggaagacattatattaagtgaaataagccagacacagacaaatactgcaagctctcactcgtggaatttaaaaagctgatcttatagaaatacaaaatagaacagtagttaccagagactggggaggggagggaggagggtatcatggagagagattggtcagtgggtacaaagttacaattaggtaggtgggataagttctggtgtcctattgcacagtaggatgactgtagttgtatatttcaaaatagctagaagagaggattttgaatgtttttactacaaagaaaagataaatgtttgagatgatgggaatgctaattaccctgatttgatcattgcacaatgtatacatgtattgaaatatcacattgtaccccataaatatgtacaattgtgtgtcaaatttttttaaataaaataaatatttttagacctttctaaaaa

SEQ ID NO: 482041 - DNA, 282 bp, Homo sapiens
cttcaaagaggagcggtggtcctgacatggttttgggacgcagagaagaaaggatggttgaggttggggaatcacccctgttccgggctggaagcaacttgcagaccacagagatttccagtgcgaagtgatgtgtgccctcccttgctatgtcccttgctggcccctgtgctgatcagagccacagaaagtgggctcactttggggaccctctagtccccctagtgacaagagaagagaaggtggtgactggattgtcatcaggcagggacgtgtcaatcc

SEQ ID NO: 482042 - DNA, 912 bp, Homo sapiens
gagcggagtggcgggctgtggcgcggacgcggaacccggcgcggcgggtgcacgaatggtcatggcgtatttcgtcgagaatcccggggggaacacaaatagtggctttgatgtcctctaccataatatgaaaccattggacagatatcaaccaaaagaactaagcagattttgtaagggaacgagctaccatagcaggaggcatactccagtgtccatgaccaaaactagcaaacatctgcaaggcaaattgattcaccaacttggcgaaccatttttgcaaccagttatgggcactgtatttcaacaaccattctaacagaggaccattacgcaacattggccacttgggatcttgttcagaccaatttaccaagacttcactcaacaggacagttcaggaaagtaatgcgagaaggaaccaagtacaccgtctcataaacacgactagacgacgaacgtttgcaaggaactctggaacgctgtccaaagccattcagaagcataacctcaggccccttccagaaacatccacagcgcacacttaccaatggcccaaggtggtgtaggcaaccatggaagcggttctgaacaaacgtgaccggcagcttacgacaaaaggacgcaacttacgaccaacacgcgcgcaggtcggttcaacagcttcgttacaggaaagatggctcaccaggaattagccctaattaaagcgcgctccctaattggttgggcacacaacattacattcgccatttcacgccacaacaggcgtggaactttcgcggacgaccaggcacaacacttggcaccaggaaaacaccagggtctccagcaaagccttctcccaacggaactctttggcacacgacacacttccagctccttccatgtccacctttaacgcgcgacacc

SEQ ID NO: 482043 - DNA, 266 bp, Homo sapiens
ttggagtagtgggacgagagcggaggagaggggggggggctttgggggaaacggcacctacgattttactctggagttccgtaggggaggtgatggccagccaagacgatccactcggccaacggagcaggggtaccaaccaccccgggctcggaactaataggaaaagtagactctttgtgaagaaacgagccagggactggaacaccctggtggaaacctgttgacagaccttccactttctcttcagaataagtagctggggt

SEQ ID NO: 482044 - DNA, 469 bp, Homo sapiens
  misc_feature (24)..(24): n is a, c, g, or t
  misc_feature (48)..(48): n is a, c, g, or t
  misc_feature (61)..(61): n is a, c, g, or t
  misc_feature (180)..(181): n is a, c, g, or t
  misc_feature (335)..(335): n is a, c, g, or t
  misc_feature (458)..(458): n is a, c, g, or t
gttgaagacttccgcagtcggcgncgcgggaggctggctcgcacagcngcgatcacgccanagccaacactaccccagacagttttgcgaagagacggtctttcatcgttatatccaccggcgcgtgagttttaaattgttgagaatctggttcttttgctttgctagaagcgcgcgggnnatagtaccgatcaatttttcataattcaatcgtcgtgtgaagagtaattccttttaaatccgtgcgctaccccctcgtatggcctctcgctacgggctcgaagcggtttttctcacggccggaatgcgcaagttttactggttgcacgacggcncccccggacggcggaaaaaatttccgggccctgccacgaagcaggcgtgcttaatagttgaacagtgcaaagtcggggatacgcagcgaacgcggaatacccggcagttttgacagggataanagggcacgccg

SEQ ID NO: 482045 - DNA, 1671 bp, Homo sapiens
cctgtgcctctgcgtgctgtgggtggggtttcgtcatgtgcctgcctcactctcgccctgtgtgttttggtgtgatttgctgctgtttgattgttgggggcggggcgggtcgcctcctcccttgcttgtgttcacagcgtctgtgttcttgattgatcccgcttgccgtcctcttacggtggggatccccctgctgtgtgcctcgcgtcccgtttcctataatgcgttccgtgggtggatatttataagcgtcgttgtgacacactctcgttgatcgatctgtggtcgttcaacacccgctcgtacaggggtgtgtgttatacacgcccgttgttcgatttgcggtgaggggaatttttgtgtgggggttgttttccccctcttacaataagtggggtgcaatatctgggccgactgcacacaaacattgtttttttcctcctcccccctattatgatgcgccggtttgtatctcttgtgggattgtctttaggcaaatcgctcctctaaactccccctttctctaatggagttgtggtcccgtctttgtgggcccccatatattggcggggagagaacacccacaaggcccatttatcttttgggcggctactaactggagggggccttttatactcaccacaaaggaggtactgattttctgccattaaagtgctcttcgtggggggcctcctttaacacccccactcggggtcttcaagtgctacatctcctcccctctaagggggccctttttatattccctttggtgcaccacaggggcgcaaccgtccctcatcagagcgggtccctttttacccctcatggggggagccccacccttgggaggagccatttttattttcctcctgggtcgcccaacactgtcgtcccaaaacattgggggatattgttatcctctccagagagccctaaacacagtaaacccgggtccccctttgtggggccctatacacagcgaagtcttttctgtgggacacagacgccaaagagtgccacccacagggagactctgtatcccgctctgcgcacctgtgggcgccccctataaggcgcgcccctcctcgcatgggcgcgccacggagttttgttgcccttaaagtaagacctttgccgttttgcccatgtggggaagatgcgtgtctcttctgcacatgtgcgtgatattaccacacgttctttgggcaccacgggcgtgagatcgcgcccacatatgcacagaccacagaaggtttgccctcttatagaattttcccaaaagaggggatactagaatgcttcgccattccacactgttataacccgaccgcgttcacacatgaggagacccactcacggacgaggtcaccttggtttgccacaatagcacacacggctggaatatactatacctgggcgaagggaaaaaaagaccacgtgcgggtttcccactttgaaacctgggaaaccacattccaaagtacacagtaactggttgaaacctgagccacactttcagcgttgcacgggaatagaatgctcacacttggttgcacggaccattatcgggtttaacaactcaaagagaatcaacccactgggaatttttggtcacatagacctcacccgtgcttcaaataccctgatataatctgaaaggggctcagatta

SEQ ID NO: 482046 - DNA, 177 bp, Homo sapiens
  misc_feature (172)..(172): n is a, c, g, or t
atccggtctgcgaatatgtaaactcacatttttcactcatctcaggagaaaggtttcttataggcattctcaatgtcctgtagataggcagaggtgatcttcatttcatgtggatctcctttcttctgaatccccgctctggacctctgcaaggaaccactctgcaaggaanccacg

SEQ ID NO: 482047 - DNA, 185 bp, Homo sapiens
aaggaagctatatgacttcttcatgtttagaatagctagagcaagaccaagcgtggtggctcacgcctgaaatgccagcactttgggaggcggaggcgggtgaatcacttgaggccaggagttcaagaccagcctggccaacatggtgaaaccccgtatctaccaaaaaaaaaaaagggaattct

SEQ ID NO: 482048 - DNA, 145 bp, Homo sapiens
tgtatagcgaatgtagtgagatagtataggcggatgacacatggtcctctgcatcttacatcttgagtcaccaagccagagcaggatccgacctcgaatggacacattaccagtgaaaggggcatttcttgtcccaatgtcggtg

SEQ ID NO: 482049 - DNA, 174 bp, Homo sapiens
ccttggaactgcctgttgcagcttcttccctggattgactgttttcaagtcctggagtccttatttttatttatttatttgagacagagtcttgctctgtcccccaggctggagtgcagtggcgtgatctcggctcactagcaagctccgcctcccgggttcacgccattctcc

SEQ ID NO: 482050 - DNA, 330 bp, Homo sapiens
cccggcaagaaatctcccggggtgggggggggccccccccgaaaagcctttaaaaccccttttttggttgggggagaacacccccctcccttttaaaaaaagggttctcacccttttgaccccccccccaaggtgtttttcccccccaaaaaattttaaagggtgaaaaaaaaaaaaaccgtgaaaaatttcccccccccccctaataaccccctgaaaaaaaccccccaggggggcccctttcaacgactatttttacccaagttaaaaggggcccataacggtaaagcctcccccggttagggagccacttaaaagcctcagaagtca

SEQ ID NO: 482051 - DNA, 513 bp, Homo sapiens
tgatatatctttgctatgaaacctcactataaacgcatatgtgcttgtgtgagaaatggtggacaacgctatatattagtagtcacgacagagcagacttcttgaaaaggagtattactagacataaaaaggaacttttcatcatgatgaaaggacacatgtcaaaaatgggaaattctgtcatatttgaaaattaaggaacacacacttctgatttccccacagggcaaagatgaaaccacaagagaaagcataaagcagaaagaaggacaactgctatagactggatgtctggtgtgccttcaaaattatgttgaagcctcatcaccagtgtgatgacctttggatgtggggcctttgggaggtgaatggtgatgagagtaaagcccgtatgaatgaacgaatcctgtaccatgcctgagatttatgaccttataaaagagttcctagagagcatcctcatttcttccaccatggaaagtttacaatgaagacagctgtctatgaaccagg

SEQ ID NO: 482052 - DNA, 106 bp, Homo sapiens
gatgcagaaggagatcaccgcctctggcgcccagcaccatgaagatcaatgatcatcgcacccccagaagcgcaagtactcggttgtggatcggttcgctccactc

SEQ ID NO: 482053 - DNA, 111 bp, Homo sapiens
tatcagcagaatattcttggacaattattgggaagtttcagctatcagggacagcagctctttagtcccccagcattactactaagcatagcgggctctgatgcttgctct

SEQ ID NO: 482054 - DNA, 419 bp, Homo sapiens
  misc_feature (56)..(56): n is a, c, g, or t
  misc_feature (85)..(85): n is a, c, g, or t
atgttagatatttgcaccatttatatgtgcactatttggtaacatctagtactatnaattttacttgctgacttttgaaaatctnagttggggagtattagatatcctattagtgattgctgtaagtcacttacaaatattagaagttcattcaaggggttgggaagatgactcagtggtaaagtactcaatgaccaaacctggtaacctgggtttgaattcccaccccaaaactagagagagtgcatgcatgtctgtaatcccagcatactcctataggaaataggaggctgagacaaaatcataggaagtttatgggttccttagcctgcgggatacagcagtgataaaaagagaccttgtcttagacaactgctgtacaggtatgcctctactcaagcacacacatcatacacacg

SEQ ID NO: 482055 - DNA, 105 bp, Homo sapiens
tgatcaaagattgggagagggatagaatagatcatagtaatgtttattgcctctagggctttttataggaatgaggcccactgaagcctggcgagaatgctataa

SEQ ID NO: 482056 - DNA, 934 bp, Homo sapiens
tgtgaaactgagtctcactctgtgcacaggttggggtgcagtggccaatcccagctcattgaccctccacctcctgggtccaagggatcccttgtgcctcagcctcctgattactaggattacggcttgtgccataatcctactaattttaacatttttagtaaacacgaggtttggctgtgttacccaggctagtcttgaactccgtggcctcgttatccgcccacctcagcctcccgaaagtgctgggatcataggagggagccaccgtgccgttggccaaatttctcataagctttaaaatgaggtacaaatatgggctaattggtaaggtgattatgatcttgggatatacatgtcggtaaaacttttaaccctagttttctcacacacacaaataggtacctgagaaatgatacggcttgcgtgttatcggtgacgtgaacgccaggatgtttatactttggcggaaccctggttgcttggaattttaaaaaagccgccttgcattgactccaaagggcttcttaagcaatttcccctaggagtattgtatttccaccccttcaaaaaaaaaacaaccccattcttggatttgacccaaggccctgagggaaccaaaatggcgtcttaaatgcctcggggatttggcaggcggggtggcaccttaacctcctggactattattgtgacaagcgccccgctgtttggctcgcgacggacggggctaacacggaatagccgggaaccaggagagataaccgaggtggaaacagccagcgagtatcactggggaagccaaacgcagctgacaatagagagaccgcacacgactaggcgacaaccagggatagacacagatttgctgctctgcgacgataatgcatatctactcatgcctcacaccgaactaatacatattaactattacatt

SEQ ID NO: 482057 - DNA, 139 bp, Homo sapiens
gcacaagatatagccaatcaatacatttccctcaacgctatttgactctcaaaggtaacaccatgtatattatcatcaaagagaaggtcaaaggggatatatcgccactgaaattgtttacacagtgaccatgagctta

SEQ ID NO: 482058 - DNA, 334 bp, Homo sapiens
tttggggttttttttaagggggggcaaaaccccattttttttttttgggggtttttcggggggggaaaaccccccccgggggcccccgtttcttttttttgggatgttttttggcccaaccccccgggggggttttttttttttggttgggaggggtttgcctttccccccggaaagggttttttttttttttttgggagggttttttttggcccccattttttttttttttaaaggaggcccccaatttttggttttttttttttttgggggaaccttgggccccccccccccgtttttgtgtgggggaaaaaaaaagggggcccggccccca

SEQ ID NO: 482059 - DNA, 1020 bp, Homo sapiens
  misc_feature (1013)..(1013): n is a, c, g, or t
gtacgccgctgtggttgcggtccgtgcagtgtaagcgcgtgcgttccgttggtgtccctggatcatggcgctgtagttctcccgggagcccggggtatccccctgggcgggtaggccgcaaggtctgtggtcgggagcttctgctcattcgggatcgacatagtattgttatatcagacgtagggctatttgccatctgaagagcctgttacctacgtacgtggctgcacactatcggattcactcgttgctgtgtgttcctactgattccttgactctgcaatgagaatacctcatagtagatggtggtgggagccacttttggactgaatttggtttattaccaagttgttcagtccagctgcctggttgtagggtctccacagtatggataggtgtggacgggtcctgcaaatgcatggagtcgatcatgagggtgaacaagagtggcagaaagatgacgtggtgctcccttgtggaatagtctccgtaatggtgtcatccgaggtatgtcattcgcgttcggtggtccagtacagtatcaacagctgacgtgtgaactgtttcttggacacttgttggcagatggccttgtccattctgtctctgctgattttatccgggtcacaggattcggctggtcctgatactgtgggtatggggtcgtggcccggagtatgattaccgaattctgaggcatgtcgcctgcgcatggactacttgactgaccaagcttagtgccggggctacaagatgtcggtgatgccgcgggagccccgggggtcccctggactgtcaattggaacggggcttccgaaaagggtatctgtggggagatgatacacaagcgtatgtttatagtggacaccacaacgatcttgtaaggtgttgtaccccattccggagatggtacacgagcatggtattgtcgagtaatgacgagcgcgcactatctatatcaagagaaaacacgcagtagacaagtgcaggtgtggacagaactgattctccgnacccgtt

SEQ ID NO: 482060 - DNA, 411 bp, Homo sapiens
gatgcagggtcttactctgtcgcccaagctgtagggcagtggtacaatctcggctcactgcaacctcagccttctgggctcaagtgatcctcccacctcagcttcccaagtagctgggactacagaaacatgccaccatgcccgcctaatttttgtattttttgtagacacaggatttcgccatgttggccaggctggtctagaactcctggactcaagtgctatccgcccatcttggcctcctaaagtgctgggattacaggcctgtgccaccacacttgggccccaaactgtatataatttaagtcatatagattcacatataacaaatagagtaaaaaagattaaagtagaacaaaattaaggttgattaagagggcacaaagggaagttttttgttttgttttcgtc

SEQ ID NO: 482061 - DNA, 124 bp, Homo sapiens
tcacttgaacccgggagacggaggttgcagtgagctaagtaaatgccattgcactccagccttagcaacagagcaaggctctgtctcataaataaataaatgaataactgaaagaatttcatat

SEQ ID NO: 482062 - DNA, 291 bp, Homo sapiens
  misc_feature (16)..(16): n is a, c, g, or t
  misc_feature (72)..(72): n is a, c, g, or t
  misc_feature (78)..(78): n is a, c, g, or t
  misc_feature (159)..(159): n is a, c, g, or t
  misc_feature (283)..(283): n is a, c, g, or t
  misc_feature (286)..(286): n is a, c, g, or t
cagctgcagtttgggnggattgggtggagtatgtgtgtgtgtcagtgctcagctaagaactgtagggaaganggatgnccttcacgcagaactccttttgggatatacatgatgcagaaaggatcctacatggagagagacagaactctctcagctganactctcagagattcctgatgggctttctcttgaagtccaaaggcgtctgcattgtttcctttctttgcccatccatgaatgttctgttttgttttgttttttttaataagaattccggctgatntantgtga

SEQ ID NO: 482063 - DNA, 123 bp, Homo sapiens
tggtccagcctcccggctcctctggaaggagatgagattatcctacaaagtgagtggccacaaatgccaggacagcggatgtcctggagctgtggggggaccattgggagaagaacacacact

SEQ ID NO: 482064 - DNA, 158 bp, Homo sapiens
cgtacctatcaaatggaggatggaggcaatcataatgtcaccagggcccagaacctacgatgaggccactggggtgcctgcttgcctcacaggagttttgagcggagtcaataggactatgtataaccaatactttgcacagtgatgctgcacagtaa

SEQ ID NO: 482065 - DNA, 281 bp, Homo sapiens
acagagtaagggttgcgatctgctttctgtagtacaggaagcactgggcttcttgcagtgctttgggttggtcagcaaaatatatagtggggtgaaggtggactgaagaagtccagtgtgtccagttcaaacagaaataaatgacactcatcatcaacaaagacctgttgttgtgactgccttgagttttatcagaatgatgggcctagtaatccttcagaagcaccgtaattctaaataaacctcttcccatagacctttcccccataagatgtgtcttc

SEQ ID NO: 482066 - DNA, 129 bp, Homo sapiens
cggtggaaggactgggcgcaggtaggacgggcggagtcagtgtggtttgcggcgccctaggtccaggtgggtgccacctgctgctccctggaccccagtgggagggctgttggctttcagccttaccgc

SEQ ID NO: 482067 - DNA, 1338 bp, Homo sapiens
  misc_feature (544)..(544): n is a, c, g, or t
tccgcgtcgtatcctagtcggcagatgggtgcgcagcgaatgctaatcatcatgccttctggtcttgtgtggttgagtctacgttctccactgatgtgttttacgacgacgcttgttttttgcctgaccccagtcgtgttacaccacacatctgtgggggggatatatacctccccttcgtcggttatcacgccctgggtgatacatcccgccccgccaacaccaccaaatgtgtgtgagaagcccttctgcacagcttcctttttttcaaccgccacagttggggctgacgcagagtttacccaatctccttgccctccgatttgttgttcctctctttctctctttctcctctgtttcattaaaggggtttccacgcctcggcttttggttccgaacgaccctcaagaggacgaagccaactcccgtgtgcctgggggttccccgagggggaccttcctgtgctgacactgcggcccccaagagcctggcttatgggtcccccgaccattgcccagtatgagtctgggtctttgttagactntggggttcttgcctggtgttggccacagagtgacatagacaccaggtttagaggttttgttgccccaccaccccccatagcaccatcagaggccccaaaaacgggggggccctgtgcctggcccactttcacaggtccacaggccacagtggcgcccttggtatagcaccacaagtcttgtctcctcacagaaagcacagggggccacagaatgagattttccctcccctggtattgcacagcctgtttctcacaaagccccccgcattttttcccctctctctttccccactctcccacagatcgccactctcactataacaccacacatgtgcgccacaagagactatctcggagactcttctcatctcacactggtgaactctctaaatccacgtccctctgattatgtcccacagcctctgtctgaaggggcacgcggaagagcgcccttctttccttctgggcacgcgctatttctatgaataggtaaagtgggggacgcgggagaagggtgcacataagctgttttatgactgaagggaacgctggttgccgacacgtcccccaacctatgctatggctatagtcacagagtcaacacttccacgggttggtaaatgttggagtgatgataacacttcactttttacccctgtggaatgactagtgctgtatagaggttcacactgttgtaacacacacgtctgttttttatttgttaagaaaaactacagcatccttgcataatttttgatggtaataaatttgaataatccagattttcttaccca

SEQ ID NO: 482068 - DNA, 976 bp, Homo sapiens
gcttgggtatatgtggcttccttcgtgagtgtgagccaggctacaccccagcaagcatgtcaaggtgactgcagtggtattgatcttggcaccactactcttgtgtgggtgtaaccagcacggaaaagtcgagataattgccaatgatcagggaaactgaaccatccaagctatgtcgcctttacggacactgaacggttgatcggtgatgcctgcaaagaatcaagttgcattgaaccccaccaacacagaactgatgccaaacgtctgatcggacgcagatttgatgatgctgttgtccagtctgatatgaaacgattgggcctttatggtggtgaatgatgctggcaggcccaaggtccaagtagaatacaagggagagagcaaaggcttctatccagaggatgtgtctgctatggttctgacaaagatgaacgtgaaattggcagaatgcctaccttgggaagactgataccacgtgcttgtggtcacagtgccagcttacttaatgactctacagagtcatggctaccaaaagatgctggaactattgcgtggtctcaatgtacttagaataattactgagccaagtgctgtgctattgctaacggcttagacacttgaggtcggatgccgaaggcaacgtgctccctctttgaacctggggatgtgcactttgatgtgtcaatcctcgctatgaggattgcaccttggagggcaagtctacggttgtgagaccatgtgttggagagcatttgatcaccgagtgtacattaatgtggggttaaggcagcttagagggtcccagggcacagatagctgaaacgccccgaacggatgaaaaggtaaaagaaccctcttcaagaccaggcgaatgaatggcttgtgagaaagagattaaccatctgccagtgaaagagtgcttgagacgacacaacactacgaacagaattgcgggagccacacgcactgagga

SEQ ID NO: 482069 - DNA, 1016 bp, Homo sapiens
cgcttttttgtgggtcgcccccgctctcctatgtagttctcgcttcccgccatgtagccaccgcggcgtcctttggtgggcaggggtgttctctcccattgggagttctcgaggcgagcttgtggtcctggtgacactctcctggcgggagcacccaccccggtttgtttagtggcgggggccagtgacgtggcacccaaagtagtccgtgggtcgctttatggtctcgggcgggcgacacccgcccacctgggggggtattgccccccgttgtggtgaagagaggagagcgcttgcttttaattgttatgttgtttgttgttcgggtcgccgtcaatggttagacatttgtttcatatcatagaggggataggtctaagtggttgcagccggctcctccccctatgctggtgagttgggaggaagatagtcgttggccgccgaatataactatttatatgtatctgcacatcgtattcacgcaagcgggcgtttgagagagataatttctccccctctttcctggtatagaaacgcaggcgtgcttcttcttggatattctattatgtaggcacactattctgtggagagattgtgtggtgagagaacgacgagagacccatcgggagatctgccgccagaattagtggggagaaaaaaatatggggagcagacactctctcgttggggggggaagtgcagatcctcccgtgggggatgaaacatattatgtgggtgggtcttgagaatctttgaggaggaggcctctcgatctcctccccgcctgacttctctacacccgcgcttgttttctactttgctgtgcgaactgttctgcgccggcgccccattagggagaaaggaatccccgcggaagcaaccactcccttttttttaaatcccccttggggggccgcaggaaaaggttggggggtggggggccctcccgcggggggccttggggcatccccttttttttttttgaaaaccaaaaaaatgggtttcttgttgcccca

SEQ ID NO: 482070 - DNA, 726 bp, Homo sapiens
  misc_feature (550)..(550): n is a, c, g, or t
ggttttattttctaggcacaggtaagatgatccccattaacgctcttccgacggatggggtctgagggcaacatgtggggggggattcttcttacaggggaggggaaacaaaggcttccgtttttgttttctttaagacaaacagggggggatctaaaagggggggggagccagggagaaggggttgggggtacacctttttcaaaggcgaaaacgggggggctttttctctttttccgaggggttttttcgggggggcggggggcacaattggtggggggggggggaaatcaacactctttggtggggaaaccacgggggttaaaaacaacttttaacccaacggggctggggggggggggcaactttttttgaatggttggggggggaaaaaaaaaactaaaagggggttgaatgggctataggggaaaaaatttgggggtgggggagagggggtttttgggggtttgttttccacacattgtggggggaaagaaaagagggtttgggggggaattttctttttagggggggggggcctggggggggnggccccctttcaaaattcccttccccaacccccccccccccccccccccccaccccccgggggttttttggggggggggggggggggggggatttggggcccccccgggggggccggggggtttttttttttttttttttttttaaaaaaaaaggacaaaccccaaaaagggccca

SEQ ID NO: 482071 - DNA, 1547 bp, Homo sapiens
  misc_feature (1)..(1): n is a, c, g, or t
nacttgttgtgttgttttttttttctgcttgtttttggttgtctcgtgaacacgaaacaggagacagcagcgagaggcggcggcgtctgcgatgttgtttgttgttgctcgttgttctctctgttttagtttagttggacttcggctctcttcgttgtggtctgtttgtcggtgttctattccccacatattgtgttgagagcatgttcgtgtccgaccttgcagttgttagcatcccttttttgttgtgatctgtgatctgggtcatgtcctcactctccgtgttttcaggttgttggttgtctctccgcttcgattgtcgcgatatgtggcccgttgtttcatttggtcgcgggttacctctcgcggttctcacgttgtggtgggtctcagtatacccctatcgcgggtgtcctcccaggtcgggtggtcccgctccaccctcgtctgggcgtgtctggagtcaccagagggtgttcccaccaaaagtgttgctccctgtgggggggcctctacttgtgagtcctccgcggtgttagctcacctgttgggactcccacaccttcgcgtggttgcacggcgtgcacccctgggtgtgtccgcgggtggtcccactcgaaaacttttggtagacccccacatgtggccacaggggttggctcacagaaacgcgtctcaacttgtggaatgaaaagaacttcgaaaaatgtgggtgtggccccaaacgtttgtaataacccacagtgccccctggaaacttggaacacggggtttacacagggacatgtggggtagtgcttctccaccccggataaggccttgtccaaatttgtgactatcccctttgggaatttatactttgggaaaaaatccctctgccctcacctcctcttgaatttggaagaagaggcgcttccattcccgggctttttgaccccccccatacccctttgcccacaatagccttccaccggaggcccccctattcgcttaagaaattggggaacgccaccccccagaccccctttcctgtcctaaaaccttcccccgaaattggttttccaagcccttcttaatgtcgccctaggacccacaattgtggtggtggttgtgtttaaatttttgctttccaagcttctgtatgcacggaacctggccccacacgcaccacccccgtatcccctctctgttgaaggagagctcttgtggaaactgttggggtttggttttccacgcgaccacgaaagagacaatgaatggaataattttgtggcttctggggccctttctccaccccccactctcaccactaacccttgctgtaacccatctcaccaaatgggaaaagagcccatgcccaccccacactctccccccaagggcccccacactgtaaacttcccagagcccctgaagttctctagaacccctggacaccccatagactggaggcctgctggtgtcccgaacacccccgattagggtggctgtcccttccctggataactatttgccccgaatcctggaccattaatcccaattgaagt

SEQ ID NO: 482072 - DNA, 352 bp, Homo sapiens
cagaaacatcattgttttctaggaatttacagtataaaacagtagagaaaattagaaagccggctggtcacggtggctcacgcttataattccagcgctttgggaggccaaggcaggtggttcacttgtggtcaggagttcaagaccaggctagccaaacatggtgaaatcccgtctttactaaaaaaaataaaaattatctgagcgtgttggcgagcgcctgtaattccagttacttgggaggctgtggcaggagaattgcctgaactccggaggcagaggttacagtgagctgagatcatgccactgcactccagcctgggtgatggagtgagactgtctcaaaaaaaca

SEQ ID NO: 482073 - DNA, 751 bp, Homo sapiens
  misc_feature (12)..(12): n is a, c, g, or t
  misc_feature (74)..(74): n is a, c, g, or t
  misc_feature (78)..(78): n is a, c, g, or t
  misc_feature (80)..(80): n is a, c, g, or t
  misc_feature (85)..(85): n is a, c, g, or t
  misc_feature (92)..(92): n is a, c, g, or t
  misc_feature (94)..(94): n is a, c, g, or t
  misc_feature (127)..(127): n is a, c, g, or t
  misc_feature (142)..(142): n is a, c, g, or t
  misc_feature (146)..(146): n is a, c, g, or t
  misc_feature (148)..(148): n is a, c, g, or t
  misc_feature (152)..(153): n is a, c, g, or t
  misc_feature (207)..(207): n is a, c, g, or t
  misc_feature (234)..(234): n is a, c, g, or t
  misc_feature (244)..(244): n is a, c, g, or t
  misc_feature (250)..(252): n is a, c, g, or t
  misc_feature (292)..(292): n is a, c, g, or t
  misc_feature (303)..(303): n is a, c, g, or t
  misc_feature (314)..(314): n is a, c, g, or t
  misc_feature (325)..(325): n is a, c, g, or t
  misc_feature (355)..(356): n is a, c, g, or t
  misc_feature (359)..(359): n is a, c, g, or t
  misc_feature (404)..(404): n is a, c, g, or t
  misc_feature (412)..(412): n is a, c, g, or t
  misc_feature (434)..(434): n is a, c, g, or t
  misc_feature (442)..(442): n is a, c, g, or t
  misc_feature (450)..(450): n is a, c, g, or t
  misc_feature (463)..(463): n is a, c, g, or t
  misc_feature (506)..(506): n is a, c, g, or t
  misc_feature (537)..(537): n is a, c, g, or t
  misc_feature (576)..(576): n is a, c, g, or t
  misc_feature (606)..(606): n is a, c, g, or t
  misc_feature (623)..(623): n is a, c, g, or t
  misc_feature (630)..(630): n is a, c, g, or t
  misc_feature (740)..(740): n is a, c, g, or t
atagaatccgtngtttttcccatcctccttcgccctacgcctggcactccccccgccccccagtcttccctctntttntnatgtnacaaaananatgggttaagggactataatcgtgtgtcatgtnttgggtaaatatggngggntngggnnttaaagggagtagtgagtaaccgattacatgagtatagggactatactattaanggcaaactggtgtgggcattgtgtgtnatttattttnaaaagnnnttttgttagttaagattagtgttttttaagaatgagaatntgaaaattgtnacagttttttntttttaatttnggtctcttccagagagacctatatattaannggnggtgtttcttcactttatttcttgggattttgaattatggataangtaaaaanattgttttttaggaagtaaagngatcagangatgtttnagaacagcttganatttttgggataggtttttttttttttcaactgcaataaaatnagtgcagttcagaaaactcggcctttcagtntccgagaagggagctttgtaagcactttctgttgggggnactttgttaagcagctgggggggttttganccagctcttgtgttgtntggtgtngacagggcacagactgggagtcaagtggcctgggtgcttcttcactgccaccagcacttcctaataatggcaaatttacattttgttacggtgctcacagcttacaaaanacatacatgtg

SEQ ID NO: 482074 - DNA, 345 bp, Homo sapiens
tagggggaatgatggtggtcttgggatatactacagcgagggctattgaggagtatcctgaggcatgggggtcaggggttgaggtctgtggtgagtgttttagtggggttagcgatggaggtaggatgggtgctgtgggtgaaagagtatgagtgggggggggtggtggggtgggtaaactgtataactagtggtaggaagcgtgaataatttaagaaggaggagatcatcaagactttagtccaaggaaggaagagaccaagaaataaaacctcccacttgggtcgtgtacatacgggcctcgtggtgattacatagatcagccattaaaataaaacaagcctt

SEQ ID NO: 482075 - DNA, 334 bp, Homo sapiens
gaggctttctttactacagtggagcaaaaaagattagagagaaggtgggaagggaatggacgttggagattgaaaaggttagattttagattagagaatgttttaccctgaagtcagcatgttcttaggaggggcacagaatgaagttttaagttagctcagattgagggtagctcaaagttcaggagcccacgtaaaattttacttagaccactgaagacaatttagctgatttttttcccccgatggagtcttactctgtcgccagctgaagtgcagtgtcgaactctgctcactgcaaccgatccgagagctccggcgcttagtcgatacg

SEQ ID NO: 482076 - DNA, 456 bp, Homo sapiens
  misc_feature (146)..(146): n is a, c, g, or t
ccccaaggaccccattaatttggccaggattccccccataggttgaaattgaaggggaaaaatttgttaaggggcaaccccaaaaaaaaaagggccgggtttccccacaaaagggaaacccaatcagacttaacaggaggatctcncggaagaaactcctacaagccagaagaaagtgggggccaatattcaacattctttaaagaaaagaattttcaacccagaatttcatatccagccaaactaagcttcataagtgaaggagaaataaaatcctttacagacaagcaaatgctgagagattttgtcaccaccaggtctgccctaaaagagctcctgaaggaagcactgaacatggaaaggaacgaccggtaccagccgctgcaaaatcatgccaacatgtaaagaccctcgtcttcgggcgcggttcccaattcgccctcatggcgacccttt

SEQ ID NO: 482077 - DNA, 317 bp, Homo sapiens
gctaaccccggccgcttccccccctcggagcggatccgaggggtccttagggtcatcacttaggagctcccggacgtgcctttgtattacaccctggcccagcggggtgcccgggtcaaaacatttccttgcaaaaggtttaaggagggcccctgtcaacgcgggggccagtgttgctactcccccagccccccgacacccagggtttttgttgatgctgcccctggctgtccaaagacctccaaccagaccccccctgggcctgggggtgccgctgggccagggatagactgaaccaataaaaagatgtcccgtca

SEQ ID NO: 482078 - DNA, 631 bp, Homo sapiens
ccatatagcttcttaagaagcacagccctgtgagcgcctcgatgtccttctgtgtatcctatgtcccccttcccctctggaacataagctccacaaaggcagggacctgggaatcccgttcgccgtgcacttcccctagcaaaacgcctaacgaacccaagtggacccaggactgaaaattccattatccacattcggcgtattcacccgtcgtacgatcccactcggcttcatgatgagagcatcgcaggggacgtcacatgctgatgtgtcggccagggccacggccaggggagcctgcagcatcagtcttccatagtcggggacacgttcctaggccccaaggcaagcagcggggtcaaccacaggcagcaggcggtccagatatccgggtattccagcagcagcactcaggacccacatcgagacatccggggatcctataacaacccatccggagagccgacgccagaatacaatggcacatcaagagccacggaggacacaccgcaatataaacacgcggccaaaacaaagcaacggacatggcagcaacccagaacaaacaagacgacacaacccgaaggaccggcccggacggcaacccggatcacccgggccatcacccacg

SEQ ID NO: 482079 - DNA, 581 bp, Homo sapiens
  misc_feature (113)..(113): n is a, c, g, or t
atgtccggccacagctgtcacacacgatcctcaccgagaagaactggttccactacgctgcccggatctgcgatggcgtgagaaagtcctctgctctggcagagtacagccgnctgctggcctgaggccagggagagggacttgtcatgcgggtgaccttccttgggtccgcagttgtctgcgagtgagcacagatgtccattcccccgctggggtggagagccggcagctggccctgatggattagggatcgtggcttcccgtgtcccagtatgaccattgagtgttgtccaggggccagtgcccccccacccttcacgttgggggctgtttccggcggggttgacttgtgaagcgatcccaaccccaaacctgagatggggtagcccgtcctgtgtcctccacagggacaagcagtgggaggagtctgatatggtcaccaggaagcccgggctccatcttgacctcctttttcagggacaggagcaacaggcccctcttccctgactctgagcccttccctgtaaggtgaggcagggtctggagagctctttattggaacagatctggtggttcaacta

SEQ ID NO: 482080 - DNA, 1664 bp, Homo sapiens
  misc_feature (470)..(470): n is a, c, g, or t
gctctaccccctgcttgactgggcaacacaggatgtcttgtgcagcaaggtataaagggacaaaaacacaaacttttaacacttccccaggggggctcccattcaagtctccccaacccggaacagtgtgcccccttagaaccattagaaccccacagagcattaacacttgaagcacaggactcccagaattacggctctcctcccaaactttgtggtttggttatagtttataacattcgccaacctctcactgtgtgtttggctcttataagaacaccattagaaatctcaacaccagagaatgtgagagaattattacatttgtttttggagaggttggagagcgcaaatctctataagatataaggggctcacacaattgtcgccccaagagacttgtgccccaaattgtgagagccctcatgtgtctatacaccaattataacatatattattctccttataanatatattgtgcgtgtgtgctgtgtgcaaacctttctgtgtgaatttgtggggatacacagtggtggcgttctcccccaccaggggaacacaaacaatgtgaggtctcttataaacgctatttatcaaactttaagaccccatatatgtgaaatgtgtgtacacgtgttcttataggttgtatacatctctctcaggccgggtgggcgggtggactacgtctctatatatagtgtctccccacagggctatacctctcggaaggaaaggcctgtgaggcgcccagaaggagggagactctcgcttgtgtgaagcccccccagagggggagtttctccggggggccttgtggcccagtgttgtgagctgtgtgtgaatttcccacccactcagacttgtgtcgcactctccccagaagccctttgggggggggcaaaagtgggtacgccaaaggtccaccccctttaactaaatagccataataaccacgaagcacgtcttctcaatgtctccccccatgtccatctcctctctcgcatctcttttcttctaagcatcttaaccccccccagtgtaagtgtttttgtggtagtctttaagagctttttatttcccccgaggaagcaagatttctcttctcgtggttcccccccgcaaaaatttccccgatgtgtttccccaacggcgccagacggtggtgggggactgcgcccgcgcggggtttcacttctcttaaaaggcgcccaccacacccagaggcgttcttacaaccggggtggcttttgcaacgggggtaagtaccacccctccgcctgtgttgtggggggcgcaaaacatctctgccggcgggtgacaatcgacaaggcgtccttgttagttgtgggcgctttgctggtgaccccgtataagggtcgctgtgtggttcggcgtatgagatttccccccctccgtcttttgccaacaaggttcttgtgtgcctgttgtgtcccccctggtggagagggcggcgagagacgacctctgtagggggggacaccactccgctggggcgggagcccccccccgggggtgcgctccgtgtgcagaagccccgacgttcatcaacgacacagggaggcccccttcaaacggtgttcctgtcgcgacgcacgtgtaggtgaacccctctctgctgtggtccatctcctctagacaga

SEQ ID NO: 482081 - DNA, 523 bp, Homo sapiens
  misc_feature (102)..(102): n is a, c, g, or t
  misc_feature (112)..(112): n is a, c, g, or t
  misc_feature (115)..(115): n is a, c, g, or t
  misc_feature (117)..(118): n is a, c, g, or t
  misc_feature (124)..(124): n is a, c, g, or t
  misc_feature (137)..(137): n is a, c, g, or t
  misc_feature (147)..(148): n is a, c, g, or t
  misc_feature (151)..(151): n is a, c, g, or t
  misc_feature (158)..(158): n is a, c, g, or t
  misc_feature (166)..(166): n is a, c, g, or t
  misc_feature (172)..(172): n is a, c, g, or t
  misc_feature (176)..(176): n is a, c, g, or t
  misc_feature (209)..(209): n is a, c, g, or t
  misc_feature (213)..(213): n is a, c, g, or t
  misc_feature (220)..(220): n is a, c, g, or t
  misc_feature (223)..(223): n is a, c, g, or t
  misc_feature (242)..(242): n is a, c, g, or t
  misc_feature (286)..(286): n is a, c, g, or t
  misc_feature (288)..(288): n is a, c, g, or t
  misc_feature (292)..(292): n is a, c, g, or t
  misc_feature (297)..(297): n is a, c, g, or t
  misc_feature (305)..(305): n is a, c, g, or t
  misc_feature (311)..(311): n is a, c, g, or t
  misc_feature (313)..(313): n is a, c, g, or t
  misc_feature (318)..(318): n is a, c, g, or t
  misc_feature (322)..(322): n is a, c, g, or t
  misc_feature (326)..(326): n is a, c, g, or t
  misc_feature (332)..(333): n is a, c, g, or t
  misc_feature (359)..(359): n is a, c, g, or t
  misc_feature (383)..(383): n is a, c, g, or t
  misc_feature (386)..(386): n is a, c, g, or t
  misc_feature (466)..(467): n is a, c, g, or t
  misc_feature (478)..(478): n is a, c, g, or t
  misc_feature (487)..(487): n is a, c, g, or t
  misc_feature (498)..(498): n is a, c, g, or t
  misc_feature (506)..(506): n is a, c, g, or t
  misc_feature (514)..(514): n is a, c, g, or t
  misc_feature (516)..(516): n is a, c, g, or t
gtgggaatcaaacgactgggggggccccatccgttttcttcttccccccatttaatgaccggtgaaatctggaacgcctcctggggggggcccgctgaaaantttatcccanaangnncaaagncagtgaaggtggntacgccctcnnatnggggacncccagganagtgtnccanagcagggcagcaagggcagcccttcagcctcancagncccctgncgntgagcaaagcaggtttcgngaaacccaaagttttcgcctgggaagtcccccctcagggcctgngntcgnccgtnccaaaaancttcancnggggngagngttnaagggnnaagggcccccccctgctcctcagttncagcctgacccccccccatccttnggnctttgaccctttttccccagggggcccacccctattgggggcccccaggttatttttccccccccccccccccccccccnngggtttaattntggtaatgntgggggggaangaataaanaaaggggntntttgcca

SEQ ID NO: 482082 - DNA, 238 bp, Homo sapiens
  misc_feature (126)..(126): n is a, c, g, or t
  misc_feature (196)..(196): n is a, c, g, or t
  misc_feature (234)..(234): n is a, c, g, or t
ggccatcgcgatgatcgctcggtcgataacactgccgtccaacccaccgaaacgcccgcatccggtgaaccgatggctccactggacttcgatgagaaagctcttccggcaccggtgcgtgctganttgcgtggtgtcccagccgacaccgctcacatcattgagggtcatctggttgctgctgctgaacttctcnacgaggacccggctcaggcaaatgcccacgctcaggcngctc

SEQ ID NO: 482083 - DNA, 300 bp, Homo sapiens
ggacatacccatggaatcccaccacacagatgagatgcataacacactgatgagacataaactccaaagactacaccatgggctttcaaaatattaacagagtagactggatagcgtggcagagcctcttatgtctgtgtatttaatagcaagtccagcatctactaccatgttagcaaagaaatcaccatttattccaatgattttggaagacatggatgtcttagcagcattcatcaggcaatctcttcccagttcatctgtgttaacaattaggttatcattttgggcgtacgggga

SEQ ID NO: 482084 - DNA, 205 bp, Homo sapiens
cccgtcgcgacgccagtgtgatatcccatgcgaggaagacggtggtttagacacgcatgcctcctggtcggggtgggcgtcccatgcctccctctagaagagattatgatgatatagccctcgtagagtaccacctccccctcctcccggaggcagcggccggggatgctagcagagcacggaatcttccctctttcctccaaca

SEQ ID NO: 482085 - DNA, 530 bp, Homo sapiens
  misc_feature (482)..(482): n is a, c, g, or t
  misc_feature (506)..(506): n is a, c, g, or t
tccgcgggattaaatgtgtttgcctcgcttttctcagcggcggccctgctgattctgtgttcccgtatagagataacaggtcttccacaccctgtagacctttgcccctgtgttttgatatgtaaacaggatctctgctatcccacagttctcgggtcaatacccacggagtctttcatctaagatacagcacttgtctgtggtccctttatacgctacacttgccaccttggaattaaccccgcatttattgggagtgtccattccggggttcgggggccctaccccattttgtttagtgtctcagagctccgagccttgagctcttagcgtggtcacatctatccgctctaagtctccctgttgtctaggctccggggatcgcgagattcgcaagtctcgcaatggtttcactctggtcccgctttgccacattctcgtggcacccggtagttctccagcgtcctccaggcgcgcctccncggtgttttcaatgggttcaaaanccggtgtgccggtctgtccgctgg

SEQ ID NO: 482086 - DNA, 845 bp, Homo sapiens
  misc_feature (21)..(21): n is a, c, g, or t
  misc_feature (65)..(65): n is a, c, g, or t
  misc_feature (86)..(86): n is a, c, g, or t
  misc_feature (95)..(95): n is a, c, g, or t
  misc_feature (149)..(149): n is a, c, g, or t
  misc_feature (164)..(164): n is a, c, g, or t
  misc_feature (183)..(183): n is a, c, g, or t
  misc_feature (189)..(189): n is a, c, g, or t
  misc_feature (220)..(220): n is a, c, g, or t
  misc_feature (222)..(222): n is a, c, g, or t
  misc_feature (239)..(239): n is a, c, g, or t
  misc_feature (244)..(244): n is a, c, g, or t
  misc_feature (248)..(251): n is a, c, g, or t
  misc_feature (268)..(268): n is a, c, g, or t
  misc_feature (275)..(275): n is a, c, g, or t
  misc_feature (279)..(279): n is a, c, g, or t
  misc_feature (286)..(286): n is a, c, g, or t
  misc_feature (290)..(290): n is a, c, g, or t
  misc_feature (295)..(295): n is a, c, g, or t
  misc_feature (321)..(321): n is a, c, g, or t
  misc_feature (329)..(329): n is a, c, g, or t
  misc_feature (337)..(337): n is a, c, g, or t
  misc_feature (399)..(400): n is a, c, g, or t
  misc_feature (402)..(403): n is a, c, g, or t
  misc_feature (406)..(406): n is a, c, g, or t
  misc_feature (409)..(409): n is a, c, g, or t
  misc_feature (413)..(413): n is a, c, g, or t
  misc_feature (419)..(420): n is a, c, g, or t
  misc_feature (424)..(424): n is a, c, g, or t
  misc_feature (428)..(428): n is a, c, g, or t
  misc_feature (430)..(430): n is a, c, g, or t
  misc_feature (469)..(469): n is a, c, g, or t
  misc_feature (474)..(474): n is a, c, g, or t
  misc_feature (487)..(487): n is a, c, g, or t
  misc_feature (497)..(497): n is a, c, g, or t
  misc_feature (522)..(522): n is a, c, g, or t
  misc_feature (629)..(629): n is a, c, g, or t
  misc_feature (691)..(691): n is a, c, g, or t
  misc_feature (696)..(696): n is a, c, g, or t
  misc_feature (720)..(720): n is a, c, g, or t
  misc_feature (732)..(732): n is a, c, g, or t
  misc_feature (770)..(770): n is a, c, g, or t
  misc_feature (837)..(837): n is a, c, g, or t
ctgccaccatgaggtatattncagccctcagttctgcttccctttctgagttccacaaaagccanaagtggacagccttgggttcncatcccagntggctgctccttctggggctgtctatggtggaggagaggagagagggggcagtnggtcccatgctgacncctgagcactgcaggggtnaggatnctcccgtggtccctgggtgtggctctggaananactggaagtacccggcnaaggnctcnnnnaggaataggaagttganggccctngctntgggtcntaanagaantcagccgcacccttaaaactttacancaaagggnaaggaagnagcattgggatggggcttccgtggagaagtgggggatgctgcagtggtacaaagaaagcctnncnnaangcnatcntccagnngaangtantncaaggccagcactgggcgtccaagggaaagaaggaactnagccnagagggtgtgggnaggagaggcntggagttaggcctccacccacagcnccctctgggtgccaagtggagaagggtgtaggggctggcttgggaaccttacccgctgcccttccaacacctggatctgtgggcagcggtcccacaaaatccccctnggggctccctgaggaggacttgtggctgccgcttccaccagggcagagggcacaggaggggncagcnctccaaagggctctagggtgggtntttcaaggacanctgcaaagccctggtgggggaggggcggcggggctgtnccacggaggggcctgggccagaggctctttggaatcttgcacttctgagtgggggactgtacatgcngcccacaa

SEQ ID NO: 482087 - DNA, 747 bp, Homo sapiens
gtttcttgatacactatttgtagttatgctgcagccacaattggcatggccaggaaataggctccagagtgatcattcatgcctcatgggatgctcatatcagcatggtcaagatttccactagaactatacacatgtagttatagtgacttgcgtttctgacctgagatgtatgctgcctgtgtattgcagtagcacttgagtgttcagattcttgttgccagttgcaaagtagccgttataaaccagcaatgtcatctgtgaggaagcgaatgctctaagtgtctgtcatttacgttgagttcttgttatctgttgtggtcttcacccttataccctggaagagtctgtgattaccttagccaggcaagatagatggtcatggcaggcgaacagcaccagacttactggctcaccaagatgatggaaaaacggcagatgattttgtaaaaagccgtaatgactcctttagaccagccatttagcgtggtaatatgaaaggcctagctccattgcagacttccaaagggtcagctctgagactgccctccaggtgggcagttgattatttccaccagtgtttaccagagccttaaactgtcctaagttgacaactacctcagttggcaggacagagacatatagtagaacagtgcacacaatgagcacgtatctcgggcagatgctcatgggttacacgttgaagggtccaacaggaaattttactttgggaaaacctttataccc

SEQ ID NO: 482088 - DNA, 810 bp, Homo sapiens
  misc_feature (534)..(534): n is a, c, g, or t
gaccacgctcatgctgctgtcactgcgttccgaccgagggcatggtgcctcagtattacgggagcagctctcttccttcggtttgacgaatgagagtgatggggaagaagaggaggagtctcatggtatgaggatgtggaagaagaggatgactcacgagatctcagggatagagcgtggatgaatgtccttcgtatacgattgacgaatggaaggacaccttgctgcctgccggtgggcggagactcatcttgtgaaccaccgagttgtggcccttccgttccagtacagtggataaggtgtcgtttgacacgaaggtagttataggacctgctcggaggtgccactcagcctgaactcgtgcgcgaagagcatagcccagtgaaggcgtcgtggcgtcatgctctacgcatgtgcagcgtgcactaaggcgctggtcaataggcatgcccactcaggatacccaaaacacgtgcgtgccttgtgcagggcctgcgcacatggtccctgaggtccgctgcacagtccatacangtgcacaggcatggtgaacccagggaagcggggacacggaccaggatgggtgattgggccagtcgctggacggcgccctgaccaggggttgactccggtcagctagacgggacccgtcatcacttgaaggccccactggggcgccctctgctgagcatcgtgatgagcagtcgctcaaacgcgtggtgactggcagagggaaggacaggccgtgtccacggatacttgacgaaggaggcagggaagacggaaagatgatggatcaggctggaatac

SEQ ID NO: 482089 - DNA, 178 bp, Homo sapiens
  misc_feature (162)..(162): n is a, c, g, or t
  misc_feature (169)..(169): n is a, c, g, or t
agttatcgaggcagctgatgagcgcccgtggctgtgggctagtctactattctaactgtagcccttcctgtgtccctggattatcctcttctgctgttctggaaaggaaacagaccagtggtactggagctataagcaaaactagatgcacctcaagccggnatgtganaggaacgag

SEQ ID NO: 482090 - DNA, 188 bp, Homo sapiens
tgaggatcccctaacgacgttggtcagttcatcaacatcatatcagctgccagagattagagcgctgacaagtaaaggacggttgtcagcgtcataagaggtgtacctccaatgaagaaataacatcacgggaacgctgcatgaagtaatcacgttcttggtcacgtatgcaagattatgcataagca

SEQ ID NO: 482091 - DNA, 421 bp, Homo sapiens
  misc_feature (385)..(385): n is a, c, g, or t
tcccctgtctccacaaaatatatgtttaaaaattagctgggtgtggactgaagcaggaggatcacttgagcccaggagattgaggctgcagtgaactatgatggtgtcactgcactccagcttgggtgacagagtgagaccctgtctcaaaaaaacgcaaagcacaaaaaaccacaacattttggaccagactacatcagaggtgatgttttttcatggcagaggacacatgctatctggatgtcccattattagtaactctagcatggaccactggcatggttgaagggggtctgatcccaccattgtaaagtcatgttttcctcctgcagtcggagaatatccagtcccccatcaactccatttgctagtttttgacaattgntaatccttgcctgagtcaataatttagtaattgcca

SEQ ID NO: 482092 - DNA, 158 bp, Homo sapiens
gctcgcctgtgttcaggcttagtagctggactacaggtgccgccctatgccagctactttttgtattttttagtagagacggggtttcaccgtgttgtgcgggctggtctcaaactcctgtactccaggtgatcccactcactcagactcccaaagtg

SEQ ID NO: 482093 - DNA, 536 bp, Homo sapiens
ccagatgtctcagcagatgcctgcgtcagcacattcagtccatccatacgatgggatgttactcagccataaaaagtaatgaaattttgacctatgaacagcatggatggacctcgaggacattctgctgagggaaagaagccaggcacaaggacaaatcctgtacgatgtgaccgatagaagccatcgagagtagggagattcatagagacagaaagtagactggagattccctggggctgggggatggtattttgcctcatgattgtagagctttgttttgggtaatgaaaaagttttggaaatagtggtgattgtgaatgtgtttaatgccacaaaactgtataaaatgttttaaatggcaagtttggttatatattaccataacaacatttaaattcttagtctttcatattaatacacatttttccaacaacaaagtgatcacactcctcatagtaattcaactcctgcctcatgtcacattaaactttcactgttttctcattaaatattattctttgaaacacctaaaa

SEQ ID NO: 482094 - DNA, 385 bp, Homo sapiens
tacaggcgctcatccaatctcacactcatcctacaccaggcacgcacatccaatcacacatcatccaacaccaggcacgctcatccaccaggcatcacaatcacaaatcatccaacaccaatcatcaactttatccaacaccagacacactcatccaccaggcatccaatctcaacttacatccaacaccagacacactcatccaccaggcatccaatctcaacttcatcacaacaccagacacactcatccaccagcacaagaacctgctcatcctctatgacgccaattggcaccctggaccgactctgtaggccaccacctcaaacagccggaatacatccagaagctgatgcccccactgatccagaagtgcgcctgggtg

SEQ ID NO: 482095 - DNA, 486 bp, Homo sapiens
atatacctaccgtggctacctctggtccagcctcgaggcatgcatttggggatgctggcacttctacacacagtcagttgtgagcctgggtcaggaaggtttctgtccacctctaatgtcccaaccatgccagcctagggtccccaacttggtcaaggtgctggatgatatgaattcaagcgctgtgtccccctacctccatctatggacttcgctctcccctcgttcactctgctcccgccacactgggctgtctgctgttcccacaacagtttgctatcgctgtggcttcttcagcctacagcgctcttcccccaaatatctgtgtgactcacttccttcaggtcttggctcagatggcaccatccgcatgaggccttccctgacccctccattaaaattgctgcccatgagcacaggacatggtaaagaaaacaaacaaaaaaatgaaaaataaaagaaagaagaaaaatttctgctcacatc

SEQ ID NO: 482096 - DNA, 205 bp, Homo sapiens
attgcatccatacgccgctgactgcatcctacgccgctggatggaacgagaggacagctccagagataagtctggaggtacacagatgatgatggtagttgtcaccatggtgatggatgatgtcacctggtggtggtaacctcatctgataaaaggacgctgttattcaccctgaatggagccagcggggggcgttggatgcagt

SEQ ID NO: 482097 - DNA, 270 bp, Homo sapiens
cccggggggcaccaccgttgctcatggcggcacaatggttgcactcgcctctttcaggttgtttaagatgtctctgcgcttcggttgcctctcatcatcgctgttgcttccttgtcagtctgcgggtcctcttcgccgccctctccattaaacccattaacatgcagcatcctcttctgcttcacaatggtgcttttaccagattctccagcacccagcagcatcaggcggtgcgtggcccggtagacctgccgagtccgctgcattgga

SEQ ID NO: 482098 - DNA, 251 bp, Homo sapiens
  misc_feature (127)..(127): n is a, c, g, or t
  misc_feature (234)..(234): n is a, c, g, or t
gccttctatagctctagtagatacacatgcagcatccgttcagtgagtcacctctaatcacacgatcataaggacagcatcatgcactgcagcatgcagctcaaaacgcttagcctagccacacccncacgggaaacagcagtgattaacctttagcaataaacgaaagtttaactaagctatactaaccccaggtttggtcaatttcgtgccatgccacgcggtcacacgatnaacccaagtcaatagaa

SEQ ID NO: 482099 - DNA, 190 bp, Homo sapiens
gctggccagcagcatccccaggcttccctcaggcgtccgtgttcacattttcctccagcctgagaccgagccttccgcctggaaggccctgtgccagcaccaggcagagggcaagaccgagagggcagagaagaacctgcacctgtatctcacctggagtcttaatctagacatggtattccccgaggtg

SEQ ID NO: 482100 - DNA, 257 bp, Homo sapiens
acaggatctcggcactgcttcggatgcggcatgagatatacatctggatgtgggtttgaatctagcgctgaccttaagccaaccacttctcaactgtaagatctgaataatacctactactgtgcagagttgtcaacaggagtccacttacgagagggacaaatgtgcttcagtgtgtgggcctcgacacagctctgtgttccaggtaagcaagtggcttcctactctgcccctaccatccggaagcatgttgcctg

SEQ ID NO: 482101 - DNA, 387 bp, Homo sapiens
tagagttatccccgccatgctgcttcagcgatggatagatttggatcacaatgtctatgtccaggtattcatggccacgaacagagtcagacaccctggatccggccctgctatcggccaggacggctggatcgtataattgaatttccacttcctgaccgccggccgaagagattgattttctccactatcactagcaagatgaacctctctgaggaggttgacttggaagactatgtggcccggccagactagattacaggagctgatatttactccatctgtcaggacagtgcaatgtaggctgtccgtcaagaccgctacacttatcctggccacggacttccagaaagcttaccatactgccatccttcaagaacagcatgg

SEQ ID NO: 482102 - DNA, 381 bp, Homo sapiens
acattcaataacgtcatttaagttgtgaagggcaatttgaccattatgtcaggattttcacagttttctcattgattgggaatgacatgaaattggcaccaggattttcacccactcatattgggaggctcaaagatagctgccccataaatggtaatactaactttgctcatttgattgagatgaagtttggcagcttttacctttgtaatttcgcctcctctattcctaagaaacatttcatgaaagagtagaagctctgaaattcaataaaatcccactcttcatacctcttttcctcactctaagttttactagttattgtcagttaccagttacattttaagtcaaaacggccgcgaatttagtagtagtaggcgg

SEQ ID NO: 482103 - DNA, 191 bp, Homo sapiens
tctacaagaggcaagtatttccaaacagcagtaatagctccttgtgccccagccccacttcatatatctatacagtctgtctatacatttgtgctgaaccctttacttaccagtgtagccttggaaactataaacagaattgagcttttggttttctcatttccacaaaagggggttataatacttattcc

SEQ ID NO: 482104 - DNA, 840 bp, Homo sapiens
atgataggactgcgaggcagccaagaggtgagcctctcagtgcctctgtgtgccccttcctctgggaccaccactttccatcatacacacaggacacgaggtgaatgtctgggtggcctggctataggagccagagagagccagggtcaggggccaaagaggaagctgctggggtctctggacctgcaggaagaggaacgaggaggcgacgcacgggccccaggtgcccctgagccagcctccagaggatgagctggataggctgacgaagaagctggtccacgacatgaaccacccgaccagcggggagtactttggccagtgtggtggctgcgagagacagatgtggtatggggactggggctgggcgttgtggcccattgcatcagcagtcatttcacagtgggctgcttagtgtgttctacatgccgaggccagcttcgcggccagcatatctacgccgtggacgacggacggcatattgcgaagggctgctacgtggccacctggagaaatgtgccacgtgctcccagaccatcctggaccggattctgcgggctatggggaaggcctaccatccgttggatgcttcaacatgcgatggtgtgtcacccgcggactcgagggggaattccgcttcaccagggggattgctacgaagcccagatccactgcattgacggcactgtgcaccagggacaagcctcggaccccaagaatgcctcagctgtagccggacagcggccccaaacaatgagctggaacccagagtcaagaagggaaacacggcgcagaagtcgggtgcgccctgcgcacacgaaagatcgacacaatcggacg

SEQ ID NO: 482105 - DNA, 92 bp, Homo sapiens
gtaaagggttgggggttggtgggctgtcccggagcgactgtcgagatcccctagtatgttttgtgaacccaaataaaattgatttactgtct

SEQ ID NO: 482106 - DNA, 1309 bp, Homo sapiens
aaagaggaactgcacttccggtcacgccatcgttgcatgccttcttcgctcaaggcccccaggctccgctcttgccagcagggacagtcgagccatggctcataaatatgagactgtgagtgcgggtccatcctcggcttccagggtgacgcctaccgtcagaagacagcgcacttgcttatcgcagaccttgcatggaggcctcatcctagatctccacgaggcttcctaggctacataacctacgacacccgcacgctgctttgtccccgagagcttcacgagtccccaagttgtcaatgagatcggttgacgattcaggtttcaccagtctgccgataagccgtagagtcgagtccctttaaagtccaggaagtgccactccacggaacaggcctcaacactgggtgtcttagtgacttctcctgctaaggtcgtcgataatgccaaggaactgtgcaccataatgacgccagcctcaaggagcagtgccttttaagctgcccataacactgtcatacaccctagaagggttcgcaagaatggctggtcctatgaatttcttatccccaaggacaggcaaactcagcttggatgtacgcttagccctgactacatcacacggtactgagcattgtgcctttcaacggctccccacgtaactgcccacgtactaaaagctgtggtcccacatattgccagcactacgaaatttcatctcaagtactctcagatgccacattgacctgggcgcaacagatacggccataaagaactccccttttcaaagggcttgcgacatgattaccagcataatgtgtccccagatagggctgattaacccaggatccaggaatgtactactcaggcgctgttaaattgtgccacttttccccaggggttcgaccactaggaagaaccggacccaagggctatctcttgaacccttgatccgtgtgcatacttgcagcgtgaccatccaagccaggactggtctcccaaggacttcagcaattcttggaagtcccggggacaaataaggttctgctgggccaaggaagcggaaccccgcgcacagaaattaactaaaccttggaaattggttggacggccaagaagctagcacgtggaagtgtatcaacgatggtgtgtcacccccacctgtgagctggccaagggaaccatgacacaggctctcatgcgcagccacacttaaccacggtgattcacactccgcaaacgctcggtgtgtgtcaccccctcatcactgatgctctacgtcccaacacgccccatcggccatacgaca

SEQ ID NO: 482107 - DNA, 1436 bp, Homo sapiens
  misc_feature (115)..(115): n is a, c, g, or t
cgcaccccgtcgaactctcgcgagaggttgatctgcgtgtcgggacgtgcggaggctctcactttccgtcatggcgctgaaggtagcgaccgtcgccggcagcgccgagagggtnctgctcgggccagcccttctctgccgtccctgggaggttctaggcgcccacgaggtcccctcgaggaacatcttttcagaacaaacaattcctccgtccgctaagtatggcgggcggcacacggtgaccatgatcccaggggatggcatcgggccagagctcatgctgcatgtcaagtccgtcttcaggcacgcatgtgtaccagtggactttgaagaggtgcacgtgagttccaatgctgatgaagaggacattcgcaatgccatcatggccatccgccggaaccgcgtggccagagctcatgctgcatgtcaagtccgtcttcaggcacgcatgtgtaccagtggactttgaagaggtgcacgtgagttccaatgctgatgaagaggacattcgcaatgccatcatggccatccgccggaaccgcgtggccctgaagggcaacatcgaaaccaaccataacctgccaccgtcgcacaaatctcgaaacaacatccttcgcaccagcctggacctctatgccaacgtcatccactgtaagagccttccaggcgtggtgacccggcacaaggacatagacatcctcattgtccgggagaacacagagggcgagtacagcagcctggagcatgagagtgtggcgggagtggtggagagcctgaagatcatcaccagatggccaagtccctgcgcagttgccagagtatgccttcaagctggcgcagtgagagctgggcgctagagaaatgtgacggccgtgcacaaggccaacatcatgtatgtcccctgacctctctgcgagcagtccagaagcagctgcagtggcctgcttgggcctgctctgagggatttggtggtccaaaagcccagctagccacgcgaggtgcgcaccgctaggcgagtgcgcctgttgccctcgtaggccttgccgagaacccacacttaggggaggtggggtgggattctgtccattttgctggtgagggacaggttagaattcagacacccgagactccatggggcccatctgtcacgcccctgtcccgtccggctgactgttatcgatgggcaagctggtgtcctattcctaagcccccaacaggaagctgggcgatgggcttctactccagtgctgcaaggaaggtggcggggccgctagcctcagatacaccttcgagaacatgactgtggatagcaacaccatgcaggtattacgcctgtccagtgctgtacccctgacctgagtgccctgggcttctctcaaccatgcttccgaatctgctcctcagcaagacccctccttgtccgcagctggtgtccg

SEQ ID NO: 482108 - DNA, 316 bp, Homo sapiens
cactctattgctcatcgacatctcaatgtcttcttcctgagggatcctctttgctgctgataagctgtcctagggaccagtggagagggcaagggaagggggaaagctccccgccattgggcggtcaccccagcaggaactgtccggtgcaccagctccatcagtatgtggagggctttctgttgcatgggctcttgccagctcatgtcattcggttgctgcttaagcctcatgttcaggcccagcaggacttgcagctgttgctggagctgctggagaagatgggactctgttactggctcaataaacccaaggg

SEQ ID NO: 482109 - DNA, 772 bp, Homo sapiens
  misc_feature (281)..(281): n is a, c, g, or t
  misc_feature (493)..(493): n is a, c, g, or t
  misc_feature (604)..(604): n is a, c, g, or t
  misc_feature (653)..(653): n is a, c, g, or t
  misc_feature (665)..(665): n is a, c, g, or t
  misc_feature (682)..(682): n is a, c, g, or t
  misc_feature (772)..(772): n is a, c, g, or t
agaagcaccacgagaagcggaaacatcagccagtaagatgggaagggcgtgcggccgtgtggttttcagcctgatgtctcaggattggctgtcctgaggaagacacggggcatcactgcctcgtctgtatgtcctccctaccactgtgggcacaggagcagctggcgaagctagctagcatcaacgatgtgaggcacggtggctttgacttcgcagggcctgctgaatgtagtgtctgccttaatccgtacagtgacactgtcgagtataggaatcgtctncacctcagcagtgctcaagaggttagggagcttggccttggtcctatagccaggaagcaacagagccaggagttgggcccttgggcttgtccactttttactggttccattatttcatgctaccaagttgaggtagctagcaccaagccagagagttccgtggagaaaagatgataccttttttggaagaaaagacaggtcctctagactangaggtgagattggtagaaacccacatcagaggtcagtacttgagtctctctctcttctagataccgtgatacttctcttaagcccattttcagactctgtaaaacatagtnatacttaacaagactggttgcaaagcacatgagacaggggatgcagaanagccttattaantaaatgctcgtccgganaaaagattggaaccttggtctgtgcgacaatattcaagttacttaatgggggatttgatatgggagggcccttacaattaattgttacan

SEQ ID NO: 482110 - DNA, 174 bp, Homo sapiens
ttgctggtttccaacataaccctgggcgaaaatgtgagctccgtgtacccgtgtgcgaggtctgcacgtgtgtgtgtatgtacgtgcacctgtgtgtagctgtgcgtgtatgagtgtctgtgcatgtgttgaatgtgtggggggtgttatgtgtgcatgtgtgatgtatgtagc

SEQ ID NO: 482111 - DNA, 1555 bp, Homo sapiens
  misc_feature (743)..(743): n is a, c, g, or t
ctgcattgatgtgctcgtatttggttgcgtgaccttggtacctactttttgttgaatgctggcatgcttgatgtgactgacttcctgtgctgactactggccattgtggcctgaccgaaacatgcccaagtggaacgtgatcgtcaatgaacttgatgacatcaatcctgactcattactttacactctttgacactgtgttgtgctggtggtgccatgtgacttgtgttccttcgttggcttgccatggttgtacagctggaacttacacgaatgtgccattaccagcacagcgtctgagcgtacagatccttacaccttggacacagtgccctgtaattatgtgtttgacacatccgtggaccagtgtcgggcactctttgtgtcagagtttggaactggtgcaacggacttcaactgcaagttttcctcccggagctcttctttggaccctgttgttgtccaaagctccaataatttccaaaatcttggacagaagcgaggtgaagccatacagcgctcttttggctaagcaatggcgatcggtggaacgacagcttgggcgcactggtgaacttggaaggctgcaattaaagcaaaaggtttcttggaatttggtttgggtaatcccccaacaggctgaatggaccgagctgaaactggacggtggcaacggtcggctttgggataccgtataacctctttggtactacgagccacatcgtcggtctggaacagcagcnccttgttggagcgatatcctcccagtttcttctaaagcgtttaccacgagcgtggtaagctacctcgattacggtttggagctagtaccgtatcgtgttagagcaatagctagtaaagccttctaagtatagcgaacacttgtaagaccacttttctccgttcgtaaagagtgtttttcatggccaacaacaaatgacgctagatggggcgtcagaagctctctagtgtgggggggaattgttccttctagacctcgctataccagcacgtttcacacctttggagaagctggataaagccagtatcaagcacagcgggtgatctagctttaagagtggctagtagtcattagcaggtttcagcataaaggtattttccagtttatatctacgcaagagatttgttcgtccagcgcccgcccgccgttatttaccagctcacaacaggtttccgctccggttgttagtagcgtttgggctcaaccgcagctttacacaacgtggtaaaaaccgctggtgggattcagctatacttgtgcgttgggctcaaccataacgtggcccaaggtattagatttagtggtgccagcatttgatcgttctccagtgtcagctgagctaatcttaatcacataatctaccgcactcagtgatcagtgacgagccggctacccaacaacgtagtttgcgtacataactggtgatttcatagcatgaactcgatttgggctaaacccaatctttcagcaaagatctgtgtgggtgctacagatacaacgctcgtctgtacaatattgtgctagctggacgac

SEQ ID NO: 482112 - DNA, 321 bp, Homo sapiens
ataaagatagatcaaataaaagccatattctagttcatgtaaacaggccaagagaatcaacagaagtcattatcattctgataaaactagacatatgatgccaatatagcactcacaaaaatggttaaaagatcatgactaagctcgcctaccacaaacttgactggttttaaagtaagaaggtggtcaaacagaactgcatttggatctttcaatgctcgtacaatacacctgtgggcatcaactcgagcctgggaagcattgtcctctgtgtaacttccgagcaattccaccatgacttttgaagcagcaccaccagga

SEQ ID NO: 482113 - DNA, 373 bp, Homo sapiens
ccaaaatggtgggattacaggtgtgttggcccaccgtgcctggctgattaagcattttttaatcagggaaggcccaggtggcacttcccaccctccagccttttgggccctcccaattggattaatggggagagcctggcacttttgacaagagtttctcataaaataaacaatattcttataggcttagacttagattacaattaaccacaaaataaactgcttttaatcaaactcaggtttttttaaaaacctaatagatttttctccccccacttttgtcctactcctcccctaatagctttaaaaaaaaaccccccccaggagagaacattgggagagacagcaccttaggggggagaaaaggcccctt

SEQ ID NO: 482114 - DNA, 130 bp, Homo sapiens
ttactctatgagatccccgtttgctacgatcatgctaggcacttataatgctggattacaggcatgagctatcacaccctgtcctgactagcatccattcctaaacccgccttttcacctcattctttag

SEQ ID NO: 482115 - DNA, 630 bp, Homo sapiens
cgacttgggaagaatctgtccagggtgcataggagtgaggtgtggtgtgtgtggatggatagtgcacagtgtgcatagctttttttctttgttgccgtgaggcaccaggtgaatattggggccatttttctaccagaagccagtccagccttttcttccgccgctagtatgacgaggagacttgggcctcgttaaagcctctaaggcccactcacacagttatacttccacgcctggaggaggaagcctcagcccaacacagctggtggtggcctgagagggtggccactggtgggaaaatgggcacatgaggaaatataatacctcccccaattcaatctgaggcgccagcacggagaggatggtagggttgccacgggctcagaagtgcaagctgagttactcaccccaccctgcctcgccgcacctttgcctttgtttccttggggtgaatggcaggaggcaagcagtggctcgcccttcccacacctggacaatggtgtgtgtagaaaaccaccgcctggatgtttgtggtggggcctcatggtgcctaggaggagattaagatgaggaggtttttccttattcgtataaatgaatatttgtatgattcaattacacacaccccca

SEQ ID NO: 482116 - DNA, 527 bp, Homo sapiens
  misc_feature (85)..(85): n is a, c, g, or t
agacaggatagcagaagatgcgatcctaccgatgataaatcgaatgctgctgctatgtgatcatattcatcgtcagtcactcagnaagagcacgaccaggggctctccaggacgcatgacattgaatcttgttcccatcgagcagctttcagtccacatgtgcatattcgctttccggtacccagtcaaggccagagctcttttgcttccaccgaggttggaagcggacgtcgtgttctcatctcgtacatcttcctgctgtgctaaatataacgggctatcgtttttgctaatgtttccccattccgttctagagccttttgaaggtcttcatgctttctgttcacaattgcaaagtcttataagtatttcttttccaggttttggggtttttattgtgtctttttccagcctgagcctggcaatttcatcttgcatcaagcggttttcatgcagcaggtcttctttttcatcagtttcagaaacctgattggaattatttcctcctgtcttcaatcccacctctg

SEQ ID NO: 482117 - DNA, 1254 bp, Homo sapiens
gcacgcatttttcagggggcctctccaagtgtgagtagttagtaaggaaatgttgtttaacccgtgcacgtatccgtggtatatgctccataatgggggactcactgctggctccgacatcaagccgtgcctccttggaagagatgtctcattagtggctacatagctcggtgacatcattggctatcttgcgattcttggggtgatctctcgaagggttttttaagtagtagtctcttttatctaatttaagctcatgagtttattaaaagcgctttatgggggcctataacctgtggtatggcacatgataatggccttctgcgggtatactactgatattgaagaaatgggtttctcccccgttcaggggatttgtcacaggaggtgtcgccactgtggagagcttttgtgtgctccccccacttgtttgggaagaaacccctttgtgatgtaatatgggtgatacctccccctttggggtgttccatgccgcccatctgtgctccttgcgcaattactatgcaacacacacaagcgttggggggacgacctctctaatatgatattcttgtggatcaccttgttggggaaagtgtgtctcttctcccgtgaggaagtttctctctatatcgtaatctcgctccctgggtaagacccttctgttttccctatacacccaccagtgttttttctcccgagggaggatgaaatcttggaaacacacctctctcgctgggagagttttgtccctaatgtccgcggaaacctcggagagttttcttgtgagagtttgttgttcaaattccacgcccacccacgagattgagatgtctgaatatctcggagagcttgtgatcacaaatatttgaacctctacattgccgggtttctcacaaccacttattgtggggcaaatggcggtgaatggagacacctaacacccaacacatttggtccctgcccaccaacggagcaccacggccacatgggcacctaactttgtgatgaccaacacgcgtgtttccacctcgtgtcacatgaagaatcacgattcgaggttccaaaggcaagcctatgtgtccttgtgtttgaccacaacgtccacggaactgggcgcaacccctgcttgtgtccccggccggcttattctggcagcacaccacacacattcacctcgccgtgtcagcgtccccacccccagacttctgagttcatggatgtttaattgagaacctgggtccatccacaaga

SEQ ID NO: 482118 - DNA, 307 bp, Homo sapiens
ctctcaactctgacatttgacatcaggtgatagagactcttgagatgcatagctatatgggataaatcgccaggggtacacgcaatctggaagatctcccaagtatgggggaaggtttcagccatgatgaatcccatatcctctaatctgggacacgggggaggcgagtactgtctcttctgcagaccatgtccccagggacggcctggtgtcctcctggaaatgcataccagggacgtgacctgagctcaaacgtgtagagacataccagggcaattgggagcacaccaagagtagcatcttaaac

SEQ ID NO: 482119 - DNA, 963 bp, Homo sapiens
gtgcttactttattcacatattgatcaaataatctgattgctgtttacatcttgctaatgcatacgaggtcttttgaacaaatcttgcactcgtaactttaaactgcagagacagccacagcaattttatcttctcactgggaaactattttctccatatgtgctctcgatgatgacaggcctttttccatcttgcggctgttcttccttgggggaatagacaatgtaacggaataatttctgactttgatatttgctgtcctactcacgtaccactgcagtttaccaacactacctacaaacttgccaaacaatttactttctaaaacctacacttggcggaaaacaagaggcacccagcgaacgcacgaaggacgactcttaccaatactacattcgagaactactctgtgacgatatccgcacggctgtgattcactaattctcctgggtgcataacattgcataaagctacatatatgcgggcttggttaaggcccatttctaagctacaatttcatacacttctgcagcataggaagtaccatcggtaagcaacacatgtatcttctatatctcacatacattcacacgttgtcatacgtcatcactattctcgaacaccatgatgggtgtactgttcactagtttaccactgacccagtccataagaacagtagctattaacaccacttcagcaattcccagggggcttaatcgggcttggacacctataactcgtgcacgaatggtcaaacccctaacacgggctttgcccgtcaatcccgggactttttcggcaccctcacgacctaagctagcatcccccctgccctgtcaggccttataactccccaactttacttaaccgggaagcccacgcgcaacggccacaaacggctccttggtccacaggaccataaatattctacctcgcccggcacctggccctcaccgatcaca

SEQ ID NO: 482120 - DNA, 1008 bp, Homo sapiens
  misc_feature (863)..(863): n is a, c, g, or t
ggcagcggaccgggcggactgacgggcgcctccaccttgctaccctccctggctgccggcttccttttgtctttctgggcggcgatgagcgcagggccggcgcagaagctgcggcgcaccggagcgcccggcgctgcttaagtcactcctcccggccctcggcgcgctttgtcccggggcagcggccccgggccccggctagacagcccgccgccggccccccaaaactttggccctccggggaaagccggggcggaaacagacgtcctttgacccggaaccacagggccattggccccatagtgggccccaagtcacacggacgcccggaaaaccacctcccccggacaggttccgaacccaacttcccagtcatcagcccatccaggccggtggcccccgggagtggatatcgcttcgcaccgcccggaccaagccgcgcccaagtgggcgccacacacaggccacaagccacgcgcgggcgcgccccgagaagggggcctgcacgcgcaccctgccgacgcagaaccacgcggacgctctcagccgaccccagcgaagcctgcccggccgcctgcccaccacgcggcgctccactaaagcgaacctgcccccaaagcggcccacccttgaccggtgcacgcaacttcccagcaaagactctctcccgccgcacatcttcctccccccctaggcggcgcaccgcctccccagcttccgccgacgcacagtctttcccggacacctttcgacagaccacacggacgacgcgcacccaccgaccttcgcggcgaacttacatcatcgcccctgatcagtgaccttcgcggcgcaacgtgactacagcagctaacgcgtgcgcnctccagcatcttacgacctggcggcggcgtgctcatcatcaacgcgcagccagctgccgagcaccgtcgcagccatcccacgacggggcgtccctcgcgcagacgaccgggacagcacccctgagagcgcacgccattccagaga

SEQ ID NO: 482121 - DNA, 125 bp, Homo sapiens
  misc_feature (13)..(13): n is a, c, g, or t
cctgccctgtatngtggtactgtcaggaacgctattgtgttcgttgagcctggtcgtgaggaatctaccaccgtctacagcaggcagtgagccgtcgtaggaagtgaagcggtcgtaggcagtga

SEQ ID NO: 482122 - DNA, 395 bp, Homo sapiens
ggtgggtagatcacgaggtcaggagttcaagatcaacctggacaagcttgaacccgggaggcagagattgcagtgagccgagatcatgccactacactccagcctgggcgacagagtaagactccgtctcgggggcggggcaagcaaatgaaacaagatggacaaaaaaaaaaaaaccggattgatcaaaattaatgggctctaactggattcattttgccatggtttcccccaggccctcaacagtcactttagagacttcaggattgcaccacacagaactgattaaacaatataccacacagaaattgacttgtttaataccaccccttccctttgcccttctgcctccagcatactcccttaaaatagtacaggcagggtagatctaacta

SEQ ID NO: 482123 - DNA, 558 bp, Homo sapiens
  misc_feature (50)..(50): n is a, c, g, or t
  misc_feature (63)..(63): n is a, c, g, or t
  misc_feature (93)..(93): n is a, c, g, or t
  misc_feature (104)..(104): n is a, c, g, or t
ccccatttccggcattttccaaaacggggatcccaggtatagcccagatntgcattgcatatntgcccattattagccctgttttgaattccntaaagatagtncaatgcagctttaaaaaaaagaaactctacccagatctacattttgcgacagaaaaggcagacacaggtttctttgaaatgaagcttgttgtctggaatctttctttgtagaaactggtttagagaaagtcccacatctttttcttttttttttttgagatggagtctcgctctgtcacccaggctggagtgcagtggtgcgatcttggctcactgcaagctccttctcccaggttcaagccattctcctgccctcagcctcccgagtagctgggactacaggcacccgccaccacgcccggctaattttttgtatttttagtagagatggggtttcaccgtgttagccaggatggtcttgatctcctgacctgatgatctgcctgccttggcctcccaaagtgctaggattacaggcctgagccattgtgcctggccaaaagtcccacatctt

SEQ ID NO: 482124 - DNA, 823 bp, Homo sapiens
cagatctcaagggctgatacctgaggcaaggagagctaaggggagagaaattggggctgagtggaagcagatgcctgcacaaggccaatgtgtgtctctattggatctgtacaagctgatagaaggaccatctgcgtgaaatccaggggctcctgagttggtgcggtttgcgttgtcgaaagcttcgtagggacaagggcgcaagtcaggatggaacgggagagggtccaggggcttccatatagtgccgccgcgatcacctgtcgaactcgctgcagtttcaagatgacaggtggaagctgctctttagcctcgaaaagcacaaagcagaattgcgcagatttcacatgtctcaatgagctcgcaagatcctttggtctgcgtgtccttttggcaccccggtaaagctggactcgggaacaaatgttgttacagtagttttccgataggctatcaggacataggtgccatcctcagcaggcctagcatcatgtcatgtgatcaggtgctttgctggtggggatacaatgacccatgtggtctgcgtcttctgccattggcttgaactgggcaccccctgaagtctccatctcagctgtatattctagtccaaattttcctggctcccctggtccctcccaggtcctgcacactgtctttttgccaacacctcagccctgttggctatttcatgtctgcatggtacgagacacccccttcacagcatacactggccatggtatgtacatatgcatccacgtgtgtgtatgtgtagcatgtagctcattctgctcagcctctggggccgtttcacatttgtcca

SEQ ID NO: 482125 - DNA, 153 bp, Homo sapiens
cctgaatgtgtggtgtatggctcagtaaactctgtccttgttaattttataataaaaggttacaaagctctgtcaacggaccgtagctgatataatccagtggctgaatatatttccttcctttgttcgttctcaattcttgattcaatccac

SEQ ID NO: 482126 - DNA, 407 bp, Homo sapiens
taccacacggaccagatgtggtctggacacactagaggaagttaaaatcctttgccaacctaagcagtaatccattcctcagtgcagcagaagcaggaagaattcccataccccagctccacctagtctactatggtcacctttcccctacaactgcctaagcccaagttgcatctaaaggattggcccagggcccaccgcctctaggcttcttacctatgtagctctgcagttgtctctgtaggcggggaaagaaggaagatgatggtccgctccctggcctgaagcatcctgacggtaggacacgtgaatggcacccttgccaagcagagtagggttgacacgcagatgctgttgctgctcaagtcaagcttccggagccgtggttagtgagggagaacaccacc

SEQ ID NO: 482127 - DNA, 132 bp, Homo sapiens
ctatctgtctgagatgggggtggtgggcagtatctcatctttgggttccacaatgctcacgtggtcaggcagggtgtgctgggcattcaaggtgaggatcatgctgccctgggacccaactggtaagattgg

SEQ ID NO: 482128 - DNA, 713 bp, Homo sapiens
aatgctaatgcccatctgacatcagagacagggagtgctccccagacctctcacagcaagctggatggacaggcagggccagaagagtcctccagccaagcctcctccttggttcttgtacccaaaggtagagacaacgtgcaggtcttcttgggtctgagcctggggcagggcgttctggcgtggactgaatagaggggcagggaagcagcagtgagcctagatgaccacagtgctgagctggagcccacatggttcctaacggggcagacacaggctctgaggaccgatgtgaacagttggaaggctgacagtgaggtctcagcagtgtggtgcacccctccccagcacatccgagtccctggggttcccagtgctaccataggtagctgcaatgatttcccaaggagacatgcaccagttaagcctgtggcctgaccctgtacaaccggcaaaccatcaccgagccccggccagtgcttgtgagaaggacatgcgtggatcaagaccttgtcgcttgacccatctgcttctcagatggtgctcccatatcaccagaggaagttgctgtcagcccactttccagactgccccacactggggctctaagtttcaggtctgagattttatgctctgtgatcccccacttggggttcccaactcaagctcctggtcctggttcgggggcggaacaacagcggaatcggaaaggg

SEQ ID NO: 482129 - DNA, 355 bp, Homo sapiens
ccttaactgatgacattccaccattgtgatttgttcctgccccaccctaactgatcaattgaccttgtgacaatacaccttccccacccttgagaaggtgctttgtaatattctccccacccaccccacgcccgcacccccgcacccttaagaaggtattttgtaatattctctccgccattgagaatgtgctttgtaagatccaccccctgcccacaaaaaattgctcctaactccaccgcctatcccaaacctacaagaactaatgataatcccaccaccctttgctgactctttttggactcagcccacctgcacccaggtgattaaaaagctttattgttcaaaaaaaaaa

SEQ ID NO: 482130 - DNA, 185 bp, Homo sapiens
accaaaaccccttttaaaaggtaccacctggttttcccacccctgggaaattggccaaaaaaggcccccattattttttcctcccttattaaaaaagttaggttttggtttaaacccgccctttaggggccaccaaaaggtaggtttttttttttttttttggaaccttaggttcccttttctta

SEQ ID NO: 482131 - DNA, 830 bp, Homo sapiens
  misc_feature (707)..(707): n is a, c, g, or t
ggagtgccctggcagctgtcggctggaaggaactggtctgctcacacttgctggcttgcgcatcaggactggctttatctcctgactcacggtgcaaaggtgcactctgcgaacgttaagtccgtccccagcgcttggaatcctacggcccccacagccggatcccctcagccttccaggtcctcaactcccgcggacgctgaacaatggcctccatggggctacaggtaatgggcatcgcgctggccgtcctgggctggctggccgtcatgctgtgctgcgcgctgcccatgtggcgcgtgacggccttcatcggcagcaacattgtcacctcgcagaccatctgggagggcctatggatgaactgcgtggtgcagagcaccggccagatgcagtgcaaggtgtacgactcgctgctggcactgccgcaggacctgcaggcggcccgcgccctcgtcatcatcagcatcatcgtggctgctctgggcgtgctgctgtccgtggtggggggcaagtgtaccaactgcctggaggatgaaagcgccaaggccaagaccatgatcgtggcgggcgtggtgttcctgttggccggccttatggtgatagtgccggtgtcctggacggccacaacatcattccaagacttctacaatccgctggtggcctccggggcagaagcgggagatgggtggcctcgctctacgtcnggtggggccgcctccggcctgctgctccttggcggggggctgcgttgctgcaactgtcaccccgcacagacaactactccccagtattctctgccgctctgctgctgcagaatacgttaagtg

SEQ ID NO: 482132 - DNA, 277 bp, Homo sapiens
tacaaagtcatgatgggtggtgcttccaagttcacacacttacttggatatatttaatcatattcaaccactcacatggggctaggttaagtcatagctcacctggttcccttacggctcggcagcagatcaccggccggtctctttccaagtctaaagcagacaaacaaaaaacaaccaaacaacaaaaccggtcctaaactattcctcaaacggcctcagtcagtccttaaacggtgtctcacgcgatgctatagaaccaatcaacatagggtac

SEQ ID NO: 482133 - DNA, 1163 bp, Homo sapiens
  misc_feature (67)..(67): n is a, c, g, or t
  misc_feature (604)..(604): n is a, c, g, or t
  misc_feature (628)..(628): n is a, c, g, or t
agcccagtcgccgccgcccgcccacaaagccacaggcaggtgcaggcgcagccgcggcgagagcgtntggagccgagccgttagcgcgcgccgtcggtgagtcagtccgtccgtccgtccgtccgtcggggcgccgcagctcccgccaggcccagcggccccggcccctcgtctccccgcacccggagccacccggtggagcgggccttgccgcggcagccatgtccatgggcctggagatcacgggcaccgcgctggccgtgctgggctggctgggcaccatcgtgtgctgcgcgttgcccatgtggcgcgtgtcggccttcatcggcagcaacatcatcacgtcgcagaacatctgggagggcctgtggatgaactgcgtggtgcagagcaccggccagatgcagtgcaaggtgtacgactcgctgctggcactgccacaggaccttcaggcggcccgcgccctcatcgtggtggccatcctgctggccgccttcgggctgctagtggcgctggtgggcgcccagtgcaccaactgcgtgcaggacgacacggccaaggccaagatcaccatcgtggcaggcgtgctgttccttctcgccgncctgctcaccctcgtgcggtgtcntggtcggcaacaccattatccgggacttctacaaccccgtggtgcccgaggcgcaaaagccgcgagaattgggcgcggcctggtacgtgggctggagccggccgcgcgctgcagctgactgtggtgcgccactgtctgctgatcctgttccccacgcgagacgaagtaacgggcaccagggtcgcatacttcgcgacaggctcacccggccgggaaccacttgcaacagggatcagaacggcagggaactcgttcagaggtccagacccctggagacaccccccaccaccacgacaatccagagcccaattcacacaacccggaaatgctgcgacccgggcacaacacgtgaacaagtcagagcagacagccacgccgagtcacagccgcagcgacagtgaaatcacgacagacaagtgaccgacagaagttctgaggccgccagggctgagcaactcgcctgcgagtgcaacacgatccgatcgccagtcggcgtccgcatctcaagacatgagagtgataataacagcatcta

SEQ ID NO: 482134 - DNA, 338 bp, Homo sapiens
gaaatgaatcattatgctttgtttaaatgttacatgttcctaaagaactgtggtagtggagatatacttttgaagattgttaaagtggaacatgaagaaatgcctgaagccataaaatgtgatagctgtcctcgaagaattgatgcaagaagctctcgaccagaagttttgatatacgttttgagataatcgtatgatacaagttgtatatttaagtcttagtgtttgaaacttgcagttataattgttaatacagattgacattgtaagatgatttgaaactcaatggagattttctttttgtattttacaaatttaacttaaataaaaaaatatgg

SEQ ID NO: 482135 - DNA, 608 bp, Homo sapiens
  misc_feature (67)..(67): n is a, c, g, or t
agcccagtcgccgccgcccgcccacaaagccacaggcaggtgcaggcgcagccgcggcgagagcgtntggagccgagccgttagcgcgcgccgtcggtgagtcagtccgtccgtccgtccgtccgtcggggcgccgcagctcccgccaggcccagcggccccggcccctcgtctccccgcacccggagccacccggtggagcgggccttgccgcggcagccatgtccatgggcctggagatcacgggcaccgcgctggccgtgctgggctggctgggcaccatcgtgtgctgcgcgttgcccatgtggcgcgtgtcggccttcatcggcagcaacatcatcacgtcgcagaacatctgggagggcctgtggatgaactgcgtggtgcagagcaccggccagatgcagtgcaaggtgtacgactcgctgctggcactgccacaggaccttcaggcggcccgcgccctcatcgtggtggccatcctgctggccgccttcgggctgctagtggcgctggtgggcgcccagtgcaccaactgcgtgcaggacgacacggccaaggccaagatcaccatcgtggcagaagcgcgagatgggcgcgggcctgta

SEQ ID NO: 482136 - DNA, 387 bp, Homo sapiens
gagtcacgatttccgtggttcgggaaaatagctatgttgcataaaaatgtacttatagtaacacaaaacgggttaatcctggtattttaggtaaattaagacatatatttcaacgtgttctaaattttaattttctttttttttagacagggtctcactcggtcactcaggcgacagaatgcagtggcacaatctgggctcacggctgcctcgacctccctagactcaggtgattctcccacatcagccccccaagtagctgggactacaggtgcacaccaccacgccgggctaattttggtatttttggtagaaacagggtttggccacatggcccaggtgggtctcaaattcctcagctcaagcaatccaccgggactagagggg

SEQ ID NO: 482137 - DNA, 164 bp, Homo sapiens
agcttcataccacacgtcacacatcatggcatccccagccattaaccagctgcaaccagcagcacatgtgcatttttcacacattacttcagcgggcatgcatcaacagtttgtgtcagcacacctgcacaccacttcacacacattcatttcacacacacctg

SEQ ID NO: 482138 - DNA, 649 bp, Homo sapiens
  misc_feature (176)..(178): n is a, c, g, or t
  misc_feature (183)..(183): n is a, c, g, or t
  misc_feature (185)..(188): n is a, c, g, or t
  misc_feature (190)..(190): n is a, c, g, or t
  misc_feature (192)..(192): n is a, c, g, or t
  misc_feature (196)..(196): n is a, c, g, or t
  misc_feature (198)..(198): n is a, c, g, or t
  misc_feature (205)..(206): n is a, c, g, or t
  misc_feature (236)..(236): n is a, c, g, or t
  misc_feature (257)..(257): n is a, c, g, or t
  misc_feature (271)..(271): n is a, c, g, or t
  misc_feature (283)..(285): n is a, c, g, or t
  misc_feature (312)..(313): n is a, c, g, or t
  misc_feature (342)..(342): n is a, c, g, or t
  misc_feature (359)..(359): n is a, c, g, or t
  misc_feature (361)..(361): n is a, c, g, or t
  misc_feature (406)..(406): n is a, c, g, or t
  misc_feature (415)..(415): n is a, c, g, or t
  misc_feature (428)..(428): n is a, c, g, or t
  misc_feature (476)..(476): n is a, c, g, or t
  misc_feature (481)..(481): n is a, c, g, or t
  misc_feature (485)..(486): n is a, c, g, or t
  misc_feature (490)..(490): n is a, c, g, or t
  misc_feature (494)..(494): n is a, c, g, or t
  misc_feature (513)..(513): n is a, c, g, or t
  misc_feature (516)..(516): n is a, c, g, or t
  misc_feature (529)..(529): n is a, c, g, or t
  misc_feature (537)..(537): n is a, c, g, or t
  misc_feature (544)..(544): n is a, c, g, or t
  misc_feature (548)..(548): n is a, c, g, or t
  misc_feature (552)..(553): n is a, c, g, or t
  misc_feature (558)..(558): n is a, c, g, or t
  misc_feature (591)..(591): n is a, c, g, or t
ggagtgccctggcagctgtcggctggaaggaactggtctgctcacacttgctggcttgcgcatcaggactggctttatctcctgactcacggtgcaaaggtgcactctgcgaacgttaagtccgtccccagcgcttggaatcctacggcccccacagccggatcccctcagccttnnntttgntnnnnangntgtncntgattcnncccttggaaggccttttggcgactttccanttgcagtgtgtttggttgganttacttgtttggtngcctggtttgcnnngtaatgggccttttgtgtttcgttggnngccgttactgccgccaattgcggagtgcncggccggtttctttggncnatatcaatccgactgttttttgctctgcgttggcatccatgcaantgccttttncgtcgcgtgatgnttgcgatggtgctcggagtgcttgttgggtgtgggggtcgccgccgcngcganccgnnttgntggnctttgtaagctgctaggtnttnttttatatgccantacggccnactgggnatcntccnncctgnggccttggcctcagcaaccgtattgtttgtttnattaggatacttggttggaaccctttcaccaatggtttttggtttcgaatggcgccac

SEQ ID NO: 482139 - DNA, 240 bp, Homo sapiens
  misc_feature (3)..(3): n is a, c, g, or t
  misc_feature (9)..(9): n is a, c, g, or t
  misc_feature (34)..(34): n is a, c, g, or t
  misc_feature (57)..(57): n is a, c, g, or t
  misc_feature (108)..(108): n is a, c, g, or t
  misc_feature (112)..(112): n is a, c, g, or t
  misc_feature (136)..(136): n is a, c, g, or t
  misc_feature (153)..(153): n is a, c, g, or t
  misc_feature (156)..(156): n is a, c, g, or t
  misc_feature (160)..(160): n is a, c, g, or t
  misc_feature (165)..(165): n is a, c, g, or t
  misc_feature (188)..(188): n is a, c, g, or t
  misc_feature (191)..(191): n is a, c, g, or t
  misc_feature (196)..(196): n is a, c, g, or t
  misc_feature (220)..(220): n is a, c, g, or t
  misc_feature (233)..(233): n is a, c, g, or t
ttngttagntgttagagccaaaagaaagggcttntatgttagtattggagcactttnaagatagatattttcagaaaagatgtaggatttaaaagttaaattttaaantttngaaaaagatatgatggcaattggnaatagtcacaatgaagntcntcanccagnaggtgtttaacagtgttattttnccnctggnaatgtgtaaactgtgagtgatttncaataaatgattntgaattc

SEQ ID NO: 482140 - DNA, 1063 bp, Homo sapiens
gtggttgcgtctcgtgtgttctgtgggtgtcgtgtgagtctttcgtgtgcgttgctttcttctaggtgctgtcgctacgctacgtgttgttgctcgccttgtgtctgtattgtggtcctcccattccctggggccctttttttgtgtcagctggctttttgcccgtgtggcacgaccgttcttgcgggtgtttgtctcctgggctcgtgcgtgctgatccccttgtgtcggtgtgagtctgctctgggcggtggttctttgtcgtgtgctctcggttctttcctcgtctttgggtgccccttccatgggtggtgcttgttgttccgttggggctcggtgtgttgctctggatcgggagttctcgttggatattccacctttggcgcatgtttaccgttcatgttcgatgccactgattgcccaagcgggaattcttgaagtgcctattgttcctggtatttcatatggtcctcgatcgcgggagtcacaattgacagtcctacgcccataaccattggggacagatcaagtatatctgacacaagaagtctgagatagctatctggagcgtccagggtcaggcaataaacccctgactgccatgttcttggccatgctagctgtagtgtcctgtgcgtctataggatcgggtgaacgcagccaatccggctaattgaaagctgcacagcctgaaagttacctttattcaattgaatgcattaaacaaaaggggagatgttggaggtccgaaggaatgagggtcgtgaccaagctcagtataccactggagggctctgtgagcaaacagcaagactgttgctcatgaaagcaggatgttggcgaactgacaaactgctgtctgccgccagaaggaatgctgggggcagtcatgtcccaggtcccgtgtctccttgaggttatccacaggaacatccagaacctgttgaacaaagaaaggaatcatgtgggcctgtgttaaatcaaatagctgaccgacagttatcccttcctccgcgtagttcactgtagcggtaatgaatatgaagggctgtgaaagctcagg

SEQ ID NO: 482141 - DNA, 713 bp, Homo sapiens
  misc_feature (669)..(669): n is a, c, g, or t
ctgaggatcccgtcgacaaacagcctcttgcactactgagtatttgctttatcagtgcttgctccataagctcatccaaagaaataaaacaagccgaaaaacttctccaatcttttgactgtcaaaatatagagcgcgatcaggcagaccacagcagtatgaccagttatcatgaacaagtgcttgccagcagcaaacaaaaagcccaatcctatgtagaaagctatcaacatggcgatcaaatttttgacctgcccctgcccgaagtgattgaaacacagctacaaagttatacggccgcatgccaatcactaggtggggttttacccaatccccagcaaagtccttaaaatacgattagcaataaaaaagacagctcgaaagctgtcttttttatttcatatgattcgaatttaagacacagttgagtcgttgtgatagcgagtatcgacactgaaatcttgaggaaatttagcagaaatttgcgcataaaatgccataatttcagccatatctttttcataatcaccagtaggataaataattttacccactccagtttttttcttcgcatagtccatataggccaacgcaattggaacacctgcactaactgcaacatggtaaaaacctgttttccactgttcctgcttggcacgtgtccttcangggtgaccaacatcaccaacttagggtgttctttaaaagatcat

SEQ ID NO: 482142 - DNA, 1396 bp, Homo sapiens
aggtgtcaggcccgatcggagctgcctgcagcacatgcgggctcgaccataccgtgacagtggctgacaaggtgactagctgagtcagcaccttgtgcccaggagctctgctgccaggcagagctgagtggccctgtggagtccagcatcatacatacctacagttttgcacctgcactgccctcccggcaccttcctcctccccgatcacgatctcatgtcactcgaattttatcttgtggagttcctgctccgtggactgcagatcggcatgccaggaccctgacagccccgctcccacctagtgccccagactgagactctccaggacaggtgggaacggctgactgtggacatgtcattattcattattattaacatcatcatggagaccccatccatcacacccgtgcatggagcacatccatatcttccacatatctccacagaactggaaagcctgaactgaggcctatgttgtgatcaggcccatcatgcctgcactacccatggccattgcaccgtcagtgtgcatgacagacatgttaacaagaaccgacatacacagggaagcggcatgcaccggcgcatgcacacggcatgcgtcacctcatgccactcatgcattgctgacacagcgggcaggagcgttgcacctccgcacacttatacctcaaggtgacaggacccagcatctcggcatttcgggcgttggaaaccaccgtggtgcataacaggacaaccccaggccataagggggtccttgcggccacagatggagcatcgcgtgaaaatgcgactccgcacggccaactgcgggccaatgatccaattaccaatacttggtcacacattaccccaagtacgacccaagctcctcggccaaccatagttgacgtgttgcacatggtagaaatcccttgaggcaagcacacggctgcaagctctccaaggggatggggccacggctacaacatgagcacaacagaggaccggacaaacaccacaacaccaccacaagagcaacatgacacgcaagggggcaccaccggagatcggcagaagtcgccaacaatccgagggggcgacaccgagcggggtgcacacaaaacacacccacgaactaggggcccacgagcaggctcggacgatggggcccacacgagtgaaaccgaccgaaccacaccctggggagcccgcacaccgtggcaccgaccatgccacacaacctccagcacgcaaacagctgagctctctcggccaccacccacacgcgagaaacgcaaaagaccaccacttcaagagtcgagacagctgcacacaccacatcagagcggcgaagaactacagaagaacaacacagccacgacaacagaacacagatgagcagacgaca

SEQ ID NO: 482143 - DNA, 186 bp, Homo sapiens
cactggctaatgtctgtaatcccaacactttgggaggcaaggaaggaggatcacttaagcccaggagatcaaggttgcatgaggtaatatcatgccactgaatccagcatgggctacagagtaagaacatgtcaaaaagaagaagaaaagaggaagaaagagaaggtaggtattatggaggacggg

SEQ ID NO: 482144 - DNA, 221 bp, Homo sapiens
cagcacacttgttggcatctgtcccaggccctgaggctgagctctagcatggacctacgtgtgagaagggtgacaaacattccccctcactgtgctgctgaacaccccatttcatgactcgtagggtagagagcggcaagcaagaaaagctgagggcaaaggagagctagccttaataaatcaatgtgcgcattattaaaggtttctaaagacttgaaaaa

SEQ ID NO: 482145 - DNA, 953 bp, Homo sapiens
  misc_feature (199)..(199): n is a, c, g, or t
  misc_feature (234)..(234): n is a, c, g, or t
  misc_feature (237)..(237): n is a, c, g, or t
  misc_feature (274)..(274): n is a, c, g, or t
  misc_feature (299)..(299): n is a, c, g, or t
  misc_feature (303)..(303): n is a, c, g, or t
  misc_feature (308)..(309): n is a, c, g, or t
  misc_feature (314)..(314): n is a, c, g, or t
  misc_feature (317)..(317): n is a, c, g, or t
  misc_feature (325)..(325): n is a, c, g, or t
  misc_feature (337)..(339): n is a, c, g, or t
  misc_feature (350)..(350): n is a, c, g, or t
  misc_feature (358)..(358): n is a, c, g, or t
  misc_feature (370)..(370): n is a, c, g, or t
  misc_feature (375)..(375): n is a, c, g, or t
  misc_feature (381)..(381): n is a, c, g, or t
  misc_feature (383)..(383): n is a, c, g, or t
  misc_feature (385)..(385): n is a, c, g, or t
  misc_feature (416)..(416): n is a, c, g, or t
  misc_feature (418)..(418): n is a, c, g, or t
  misc_feature (420)..(420): n is a, c, g, or t
  misc_feature (427)..(428): n is a, c, g, or t
  misc_feature (442)..(442): n is a, c, g, or t
  misc_feature (466)..(466): n is a, c, g, or t
  misc_feature (469)..(469): n is a, c, g, or t
  misc_feature (478)..(478): n is a, c, g, or t
  misc_feature (484)..(485): n is a, c, g, or t
  misc_feature (491)..(491): n is a, c, g, or t
  misc_feature (493)..(493): n is a, c, g, or t
  misc_feature (512)..(512): n is a, c, g, or t
  misc_feature (519)..(519): n is a, c, g, or t
  misc_feature (528)..(528): n is a, c, g, or t
  misc_feature (530)..(530): n is a, c, g, or t
  misc_feature (540)..(540): n is a, c, g, or t
  misc_feature (546)..(547): n is a, c, g, or t
  misc_feature (571)..(571): n is a, c, g, or t
agaaacaactagaagccattaaacaactacaggaagatgctgtcaaccaggaaggcatccttcggaagaggctccaagaaaccagccaacggactggaggatgtggaggagcaggtagggtggctcatggctacattagattcaggggacatctcctcagatgccctgcaaaccatgaaataaaaatggaggaggaacnaacaacaacaaacaaaaaaaaaagcaaagaggaantgnaagttcagtccctagcgactaacagtgagcagaggangtaaagggggagtggtaagagaggnggtntcaannagccntgntgatgaangaggcgatctgnnnaaagaggcaanttgacatntcaggacttaanccgcngtaganantngctcaggcatacaagcccatgcaaacacagnantngcagacnntcaggagaggctantcacttccctgagaagaaaaacanatntgcagtttngcctgnnatcatnangagtgagcactccatggcnttacttncctggccanangtgctacaantccagnnactaagctatccatgtccagggtnaggatcgagatcgagaagcccaaactgcccgtgaaacaagctaaagatcttgtcacgtgcataaagtaagagggaagccaagttcgggaaccaaggagaagcctttcaaaacgtatatcagatacgtggacatacatcggaaccacatgtgccaaggcaccacatacaagacgaagagagcagcaggggcagacacctggaaagaaaggctcaggagaacatgaaggacgtcagccaacgacaaagagagtaccccaggaacaatggcgcagagtgagaactcaacgaagcaccgcagaaaggacaaaagtggagggccgagctagcacgcaaacacgaacagggggcaacagaaacaggaacgagaccatgcagaaacgac

SEQ ID NO: 482146 - DNA, 368 bp, Homo sapiens
tcggtaccccccgtcctgatggccatggtctgtgtagatctgagttgctcgctcatacagataactggacatcgtggtaggtcggattactagaatgctgtgccagcgatccaggaagcaagtggctgcatcgtgcttgctcgtggtagctgcaggtgcagcgtgtgcagcctggcagaacgcgttatccggcagcacctccagtgtttggccattttgaacatgtttgctgctctggcgtagatttcgcatgcttcctctattttggatgagcctccaaagaggccagagaagaaggactgcgagttcttcactttgcgctccgcctcggccaacagcgccatcgcctccgcttccttcccggaatt

SEQ ID NO: 482147 - DNA, 277 bp, Homo sapiens
ttctgggtcagcccagtacaggccccacttgtaggcagaagttaggtaagggttatgtgcaccctcctcctagccctcaattcatttgtgtcatagaggcgagacacgttgcaaggctcagctctggtttctggcacaagtgagggagctgtagcacggttacgccttggtccagcttaggcagaatgaggcccacagatgggacaataaggcacaaccctggctctggaggtcagggagtcaaaggcaaacagctggggccaaattctcagaataa

SEQ ID NO: 482148 - DNA, 210 bp, Homo sapiens
ggtggctgttctagaggatcccgagaggtggaaggcaaagcaggagcaggcgtttacagtggaggaacaggaccacgagagagaaggggaaggtgccacacacttttaaacaaccagatctcacactaactcactcactatcacaagaagagcaccgagggaatgctgctaacccattcatgaggactctgcccccgtggtcccacctct

SEQ ID NO: 482149 - DNA, 404 bp, Homo sapiens
  misc_feature (172)..(172): n is a, c, g, or t
  misc_feature (174)..(174): n is a, c, g, or t
  misc_feature (176)..(176): n is a, c, g, or t
  misc_feature (191)..(192): n is a, c, g, or t
cttcaccccccagccttccgaaacctgcctcactgaggataaagaaatttattttctcccacccccggccctcttgtttttaatataaactattaaaaaggaaaaaataaagtcactcttgctaatcccaggttttagttagaggtggaacattccttggatcaggtgtggnanancaggacccaaacccnnagcagcgaaggcggggggggttttttttttgccctggctcagttcccgcgccccgcccgtcccccctcccaggactggtctgttgtcttttcatctgttcaagaggagattgaaactgaaaacaaaatgagaacaacaaaaaaaattgtatggcagtttttactttttatcgctcgtttttaacttcacaaataaatgataacaaaaccaaa

SEQ ID NO: 482150 - DNA, 873 bp, Homo sapiens
  misc_feature (280)..(280): n is a, c, g, or t
  misc_feature (637)..(637): n is a, c, g, or t
ggtgtttgataacgtcgtccattgcctactatggtgacccatgagtgagctgcctgggaattactccataggcagcacaccaggtggtgtagtgggtgagctaagatgattcctgatagatatagcccgccagacacagctgagcctgaggctgtatcacgccattctcttgggcactacatgcgactcgagcaatgaaagtcaagcaatgccctcgcaggggctggatcgagcaagggacgggagatacacaaggctggactgacaccctggatcggtnggatgggagaggaccgtagttggatagatatgtagaagcagcgccgactggactgggctggatgtcgctcgagaggactcagtgggacctcctttcggctcacctgtcccaagacctaccttatgctgtcggattgaatttaaggcgcaacgtattccaagtgagaggatcgccaacgacgtctgttgtgctacttaggaaattttgttctggggatgctacctatatgaataaggcgactgagcctagaggtctccctgctgaggtacatccggaaggtaatctgactgtacccggtgaagaaaacctcactcaagaaccgttcattgaagctgcaatcatcaatcacatgtgacntgtttccatgcgaacgttggacagagctgagcgaaagaaatgcgcttcgctcacgtgtcatcccttatttggaacccaaccaagtatcaagcattccatttgctaggcaggtctgggagtcgttcccgagagccaggaggcttggcgtttcgcgcatgaagtccagaattggcaggtggactacagacatcatactacatggcggaaagctggaatctgggagctagggagagccg

SEQ ID NO: 482151 - DNA, 888 bp, Homo sapiens
gggtgcgcggagcggttcaccagtctatcggagcggttcggcccagcctttcgcccaggcgcccaggcccgctgtgcgcgtgcgtgagcgcgcctgcgcctgccagggcctgctgcaaggggaggagagcggccgcctcaggaggatcccttttcccccagaaattactcaatgctgagaacctctcaaagtggtacttacggatgacgctgaaaaagcacccatggacgggtttaatgatcagcaagtcccttattatggtcccacggggaaaatctcgcactctgcaggaaatgcagacgggcggacctgttgaattgacacgaacagacgggaaagatcatctgggcaacacaggatcatgggcgtcaccgagtatccctgcaagaggcatatattcaagcgaatcctcaagatacaaacgtatcaacggaggtgctttggggtttacggcctggaaaggcaagcaaatggaattccctagaattggcgtagaaaacagggcatacggtcgcccaggaaattttacaaggtccttgattaagcccctatgcaggcctaatcaataggcccccaaacgcattccgagaactcagaagaattctaaagtaacaggccggaacggaccttgacgacacagaggcgaccccccgatacccatacatgaacacacacgatggatacggggctacgatttgggaataagaacccccgagttgggaagacccaagtaggcgcgttccatagattgagtgggcaattagaaccctaaaattgagcgtggcgataacaaaacaggtttgtcgccttcacttagccagaaaaccttaaatttggtgtggaccccttacattcgagattaagaggcaaagtgctccatttacccct

SEQ ID NO: 482152 - DNA, 180 bp, Homo sapiens
  misc_feature (114)..(114): n is a, c, g, or t
tcaagcttctaacgaggtacggggacatggtttgataaatttgtttgtattcaacaaacttgaaatgcaaggaccgccattaaagtgtctcgtttatatttttggagaatattntgtattaccttacaaattaaattaataaaagtgggtttaaaaaacctttccaggaaaaaaaaaaaa

SEQ ID NO: 482153 - DNA, 273 bp, Homo sapiens
ctgaatctagtgatcttttaagttttcattaatggccatgctgactggtgtgagacagtatcttgtggttcgagtttacattaatagtgatgatgagcattttgtcagatatttgtgggctgcacgtgtgttatatgagaagtgtctgttcatgtcctttgccacgtttttaatggggttgtattatgatagtggaattaaatgccttatagagtctggatattagacctttgttggatgcatagttagtattttctctcattctatggtagt

SEQ ID NO: 482154 - DNA, 101 bp, Homo sapiens
taatatctatgtacaccaaggaaaatcctgatatggaatggtttgactaacagcaaagaataaggcacctgctatgaagtttagcacaaccataaaacaga

SEQ ID NO: 482155 - DNA, 746 bp, Homo sapiens
aggtgtccgtggaaatctgacggagggtgctgctgtgggctggcgtgacagtcacagagatggggaagagaaaacagtgtacggtgacacacacagtagagaaggaagagcagacatgaggcacagcaggatgacccccccaagcccgaggaggacagcctggggatgcagatgcacatgccggccccagtggagggaaccgatttccccggagccgtgaggcaatgcctgggtgctctccctgccctgttcctgccggtatgccgcccccagccgtcatccccatccgatcttgtcccgcatgacgtactcgcaccagtgtgggatgccaatgttgcctggatctcgcggagcgatggggccaggcataccgaggtgtgtgggggtcttggtgtgtccgtggctgagtgaggcctcccaatgataggaatgcatcgcggagtgaactcgaaacagcttcagcatctaaccagactgcacctagctggagcgggcgttcgaggcctctcactacccggatgtgtcagccgtgaggagctggctgccgaggtgcccctacctgatgtgctgcgtcgggttgtggttccgagaacctgccgggccatggtggcgccggcgtggatcggctggagtcaggctcgggggtgccgtgcggagtcggagactcgcagtgcgcgagtctgtcggtggccgggccggcatagtgttgcctgggcctggtgggccgggtcgcgggttaggttccc

SEQ ID NO: 482156 - DNA, 291 bp, Homo sapiens
cgagcgatcgcgcgcggatataaggtgtcttctcctatcattcaccaccttaatctttgagacaaagtctcatcctgaaccagatgctcacctctttctctgggaaggcaagccaggatctctcaggatctgcctgactctgccccttccttcagtctttgttctccattccttccactgcctccttcctcttttttactcctaactcttttctttctctgcgtttgctccttttcttcttacactttatctcctacgctcttctgcttttcctttgtcttccgtcgacgc

SEQ ID NO: 482157 - DNA, 421 bp, Homo sapiens
  misc_feature (260)..(260): n is a, c, g, or t
  misc_feature (279)..(279): n is a, c, g, or t
  misc_feature (289)..(289): n is a, c, g, or t
  misc_feature (312)..(312): n is a, c, g, or t
  misc_feature (344)..(344): n is a, c, g, or t
  misc_feature (394)..(394): n is a, c, g, or t
aggaggaatctctgtctccagtgcaatcctgactcaaactaacaatgatgaatttgttattgttggtggctatcagcttgaaaatcaagaatgatctgcaacatcatctctttagaggacaacaagatagaaattcgtgagatggagaccccagattggaccccagacattaagcacagcaagatatggtttggaagcaacatgggaaatggaactgtttttcttggcataccaggagacatcaagttgtttcagaaggntctattctatatgttgaangtgctgaagngatactatgaagagcagacaacnttcaccaacagtcaactcacgaagtccagggntccactcccttgagactcgagaatttgtttcgtgcgagcaatagtttgangtgagagaattgacacctataatggtg

SEQ ID NO: 482158 - DNA, 584 bp, Homo sapiens
accaaaaagaatttgttttgaagattatctttgaaagatattacaatgtagcatacatacaatcttttatagttcgagaccgagttcggacaaaaatggaacgtgatatcttggtagaggttaatcatccttttattgtcaagttgcattatggtaagtatgagccgtctcccacatcatcccttgacctcatccctcaaaatccctgaggacattcagataaactaatataaataaatatatatttgtatgtggttagcagatctatatagtaataagtcatgaaaattaagccattatttcttagacaaactttagaagcttttattgtttagtttatgttttttttaaatattataaagttagtttctgagtggtagccataggaacaggtaatgataattattgcttttttattataataataatgagtaataatatgctagccttttgtagcctatatgtgttagccaaccctaaaggccaaagagatccctaatgtcaacatcctaaaaccattgtcactgctgttcttttccccgaagccatatgctttttctcagtgggtaaaggtgtggtgattc

SEQ ID NO: 482159 - DNA, 422 bp, Homo sapiens
gttaaagcgagatgggaaacaggtacatgcacaggttgggaaggtgtctagaggaaaagctacagaaatgagggcagaaagatgagatgacaggacacattgcagagagcagaagaatgggaatcaaagagaaagcaaagtacagaaaagccagagacaaaagcaggtattgcaggcagcagacctctggagctgccctgactccatcagaattatcttagcttcttgagacacaggtggatcccattcttggacttcaacacaagtcttgcaatggggactgggatcctggtgggatctggcagcaattcaaagcggagcagggtcaggccacagccaccttcagctcgttcatagcaaactgtttcccaatgcagttccttgatcctcctgagaatggcagataagcatggctatggtga

SEQ ID NO: 482160 - DNA, 201 bp, Homo sapiens
taactcagctctgtctctgatatgagaagtcatactactgtagcttagaggctcaccatgaatgctcacagacgtcaagctcagatttttttcattctgttcatctaatatgtcctgctgatctgttcatcggatgttctttgagtctgctacaccttggtctgcagtgccacacagctaattctgtcatcctgcggccgg

SEQ ID NO: 482161 - DNA, 418 bp, Homo sapiens
  misc_feature (156)..(156): n is a, c, g, or t
  misc_feature (371)..(371): n is a, c, g, or t
  misc_feature (379)..(379): n is a, c, g, or t
ggccaggcactgtaacgcacgcatgtcatgcctgtcagacctagtactactacaaggcctcctggtattagtctagtcactctggtgggccattagtttgcacctggcactgtccggggaagtttgtcctggttgcagcattgggtgttcgggcgncccaaccatgtccagttggacaggtaggtatcaaagcggttgcgctcatagcgtaatggcggttgggcagttggtgttgtagtgttgggcagcggcctggtctggccagtgatattgcgctgtaccctctacccatggtagggtaggaaatcgcataagtgcgcggtatcctgggcagcgtttaagagtacaagaaagcactgcggtacaatggnaacattgnacacggcggtcaggcccccgatcaccgggggcttgtcgt

SEQ ID NO: 482162 - DNA, 107 bp, Homo sapiens
taattgagctgtaccgctctttaattgcagttgcattaacattgctcagctgtgtgctaccctacgccggcaggcgcgggtacccgttgagccatgttcatgccact

SEQ ID NO: 482163 - DNA, 990 bp, Homo sapiens
cgcaaagccctcggctcaagccctggtctcccgagggtgccatgtgtgcacgtgaatggcctgcgtggatgccggaatggcctgatgccctgtgtcatgcacctgatggcctccatgtctcgtgccagaaatgacctggaagcctgctggtggtgcctgagatgaatggcccctgcccatgatgtgcctgcatgctgccccctgcctgtgtggccgctgtgactctgcgacaacttcaccaatgtgctggcctgtctgtggtgatgtgctgatgctgcccctgcctgcctgcctgctgcgatgtgactgcggtggtggcactcatgtgctgtgtgctgctgcagtggcctgcgtctcgagttggcctgtgagccccatttgtctcctgcagggacggtgcttgcttgtgtgtgtgctctgtggccttcatggcttccatgtggctggtgctgcctgcgcctgcttgccccatggcctgccctcggctggcctgaggattgctgtgggcctcgcatggttgtcgcttggcgctgcctgccggaagggacctggctgctcctggtgggccactttggtgccccattgacacctcgaagcctgcctgctgcccggccctgccttttcccctgaaagttctgtgtgttgcggtgcccggtgcctccagcggctgtgcggccgtctgttggcgcccccgggagccggctgaggcccgtgctgagaactgtttaagcgttggtgacgagggaaggggggcattacggttgggggaggtgtattcgggggccgtccatttgggccgttgggccgcttgcttggggcatttgcccattccggaaggcctttttggaggccggcggatcgagggggcccgtgccgccaagtgtgcggcccgtgtctggcgtcctgtctcccgtacgtggccggccgcccgtggcggtgcgtgccgggccccagggttgggccccacgttctgcggcgtttcgcgcggtg

SEQ ID NO: 482164 - DNA, 192 bp, Homo sapiens
acctggggaacctgttgccccccccccccccaacccagtttttcctgttcccccgggggggccccgggggccttttcccctggttccccccttgaggggcaaacccatgttttaccttttttttttttccccccggggcccggccctttttttttttcccaaaatggggaaaaaaaaaaagaatttttttta

SEQ ID NO: 482165 - DNA, 200 bp, Homo sapiens
cgtctgacttctggcatacctgacttctggcatacctggaccttctggcatacctggacttctggcatacctggaccttctggcatacctggaccttctggcatacctggaccttctggcatacctggaccttctggcatacctggaccttctgcgtaatgaattaactagaaataagtttgcaaggagagccaggtatg

SEQ ID NO: 482166 - DNA, 217 bp, Homo sapiens
cccactcaagaaggctccagtgaatgctggcacgttcagcctgggtgacagagcaagactctgtctcaaaaaaagaagcgggggagtgggggattgaggccacgtgcagtggctcactactgtaattccagcactttgggaggccgaggcaggaagattgcttgaactcaggagttcaagaccagtctgggcaacatggtgagaccctctgtctcta

SEQ ID NO: 482167 - DNA, 213 bp, Homo sapiens
ttttcacttagaggtctcaatacaggaggtggccaaggaacaacacttctcagtgccaccagttcatatatccctcaaaaggctctacgttctccaccaaaccattggggtgccaactgtgatggaaaagcaagcagatgttggccacaactccaggacctcccgtggctgaggctcatgtgcatacagtcagtgtaccaggctaatgtcaaa

SEQ ID NO: 482168 - DNA, 347 bp, Homo sapiens
  misc_feature (262)..(262): n is a, c, g, or t
acgggatgtggaggaggccgaggaggaggctgaggagcatggctggactgttcctggcagctggtagaggaaggtgtaaaactctcctgtgtagccgtccatgaaggtgctgaagctgggcagggcagtgggtggcagctggtgggctgcctcggtggctggccagtgtccatgtgtgggcttgatagaactcagtgggtcagtgggtgtcgcttgccagtgtggtcactggggtcccttgactctggtgcttggtgtcccnatatttgggctatggatacatgggcatctcctggcctggctccctgctgccccgtgccctggacttggcgcccctgagtctcagt

SEQ ID NO: 482169 - DNA, 1006 bp, Homo sapiens
gcgaaaacaagtaggctaggtacgagagctggggtgatcattcacaggttgcctctctagcctgcacaaatgattgacaagagatcacccaaaggattatttctgaaggtgtaatcgttctttatttcttcttcttttattctttgtgctttttcttttttttggcacatgacagtgttggtatggaggaccttccaaggaagagggatgctgtagcagtggtgcctgggtgcctggcctccagtgtcccacctccttcaccaccccactgggctccttggccatctggatgctgaggttcccggttgggctgagactcaggtggttggtggtaaaagaaaggaaagggctctctgagggctgtgccacaagcttacctggtgggtttcagctcctgagaggccaccacgcagttcccatcagcacttgtctccaggcagcagttgcgtgggtcccaatgtccagctgcctcttgggctccaggggttccggcttccgggccccaccccgcaatgtgcaatcctcaagattggtcctgattctatttcctgggacacctccctgcctgtcctgggggatcctacttcttccggtgtggggagcccatagctgttggtctaacaggtacggaaatgacacttgcaactatgggatggccccagaaatccataaaatggtgcgacagttgtttctgtgtcctgtgaacccccattccaggtaacatacttactaatgtctggttgagccctctatatgcagcagtgtccccggtggcaaacttgccgggttttagcccttgttgtcccagccggttctgggcaccggagtgtcttcccccctggtgtgggtcgcgctgctctggggggcctgcagcatgtcacatgcgggggcccctttccacacggcccctgtttggcgctaatcccaatggtggccattttttgccgtgtgtttcccgtgggaaggcactcctgcgggagacgtcaagcgtctttcttctagtccg

SEQ ID NO: 482170 - DNA, 342 bp, Homo sapiens
  misc_feature (1)..(1): n is a, c, g, or t
ntagatggactggaaaataaaatcagaagtacgctgaacgagatctactttggaaaaacaaaggatatcgtcaatgggctgaggtctgtgcagacttttgcagacaaatcaaaacaatgaagctctgaagcaatgaccgtggtgtagtgctttgaatgagaaagcagcaagtgctaaaccttctgtttcattgctaaccatgacactgccgtggactccgttagattccgtttcgttagaaaactcgttttctggctcccattcccttcgtccctttcctctcccctgacgaggtcacattaacatgctgcatcaattgaccggcaccttaggcgcctatta

SEQ ID NO: 482171 - DNA, 170 bp, Homo sapiens
aatacatagcattttagacatcttttgaactgtgtagttggacgtataagcaggagtttattctaaaacgattccatcaattcttctgatcctttttatgtggtcatgctgcgacaccatgcaatccacagtcacaataaaattatccaaccaggggtgatcctcttaga

SEQ ID NO: 482172 - DNA, 1398 bp, Homo sapiens
gcactgaagatcctggtgtcgccatgggccgacgccccgaccgttgttaccggtatagtaagaacaagccgtacccaacagtctcgccttctgcctgagagtgtcccatgatgccaaagattcgcattatttagacctggggcggaaaaaggcaaaagtggatgagctttccgctatagctggaccacatggatgtcagatgaatatgagcagactagtactcatagaagccactgagagagactagcccagacattatgtagccaagtaaagtaccatgcgtaacacaagtaagtagcgcaaatgatcggcttcccatatccaggagtgcagagctccaaccccatataccaacgctcaatacacgcactccaaacaaagcatgatcgatccctggtcgctagcggagcctgcaacagcgactcccaaaaccacggccatagccaaaggctgccataacaggaaccacaccccccaaggggcccactgctgagcacaaggggatatcacacaataggacgaccaaaagttcacatccacttgctccccaaatccctgaccacccaacacgccataggcccgcaaaccacacgagaagccgcctacgacgacaccgacagcgaccccaatagccagccaacgacaacccacaaggaacacccacagataccacccccacggccccagacacagacaacgaatacccacaaaatctccgcacacacgaaaacgacatgcgcgggcctatccaccccaaacgcttacaacatgcactcaaccggacaataccggaccaacaccattaggctccgacccgcacacacagccgcgacctccacaccacccacccaactgccccccgccagcggcgcaccaacgataacatattccaccccagcctccgatcgcgcccccctctcctagcacccacacataatccacgaagacccctttgaaaactacaaactaaaagcactcttcaccacactgatgacatagacaaaaacattcattaaaattaacattccacccaatatacaaaaatacctaccattacccactgtccacacccacacccaccatacacaacaacacatctaacacaaatacactcattactctacaatcatcctacataacaaacaggcaacaacaacaactacgcacaccgcgacaaacacacgaccacaacccagcaaccccaccaccatctctcccaacaccagcgacaaacacatccagccccacccccaccaccaggagacccacaaaacaccgaccaccatcactgaaacacaacaccgaaataaacccacccacaccaacacaacacacacgcagacccacaacgcacacaaccacaacccccacacaaccacacacccaccccaccaccca

SEQ ID NO: 482173 - DNA, 104 bp, Homo sapiens
tatttcggtccacggatggcccagtaatgggggaaactggcaagtccttcctttggtatttatcgagggatccccaggtttagagattactttcttttttttat

SEQ ID NO: 482174 - DNA, 714 bp, Homo sapiens
gactcactcagggaccggagcagccctcaactcactcttcagactgccctgctgtgtgcagcccagccgctccatcatgtccttcagtgctgaccagatgctgaattcaaggaggcatttctcctgtgtgacagaacaggtgattccaagtatcaccttaagccaggtcggtgatgtccttcgagctctgggacatcaaagtcccatccaatgcacgaggtcgaggaacagttctgggaaaccccagcaagtgaagagctgaatgccaagaaaatgagtttgaacaatttctgcctatgatgcaagccagtttccaacaaacaaggaccaggccacctatgaagactttgtggagggtctgcgtgtctttgacaaggaaggacaatggcacagtcgtgggtgctgaactccgcatgtgctagccaccctgggtgaacagatgaaacgaggaagaagtggaagccctgcatggcatggtcaagaagactccaagtggctgcatcaactacgaagctttgtcaagcacatcatgtctatctgaattggagctctcaagaacaagcatgttaggaagactggctggaaaagttactctaatcacacccatgacagactctgcagatctgttaccatcattcaggaaaacacagcaatctggacggtcacagactgggcccagtccctgatgttatacatccttccttgctccgatcg

SEQ ID NO: 482175 - DNA, 468 bp, Homo sapiens
  misc_feature (40)..(40): n is a, c, g, or t
  misc_feature (42)..(42): n is a, c, g, or t
gatcagagatgggtttaagtgctgtggccagaagcggagncncacttttttcccccttttcatccccttcttttctcgtcccactccttcccctttccccgactattctttcgccctcgtccaatacacatctcatctccccaacctctgtctttaacctgcaatcctcaccttccctcttcccacctctctgctcaatttttttctcctagtcccagccccccttttcctccttttgcaattcttctccttccaaatgtctccccccactcttctcttactcctcccattctcctctcccttctcgcccctccacttctccctctccctaccccctctccgcacatttactcttcgccactgcacttctcgccgccttaccacttcttcctccgcccctcccaccctccttcgccctacccccgctcccactctcctattttcttccttacccctcctgtactggcg

SEQ ID NO: 482176 - DNA, 406 bp, Homo sapiens
  misc_feature (14)..(14): n is a, c, g, or t
gtgcataaagcaanagaagaataggctacagattagaaaggagaaataaattgtgcttatttgcgttcacatgtagtatcttgtgtggaaataccccagagagtctacaaaaatctcctagaacaggctgggcacggtggctcacgcctgtaatcccggcactttgggagggcaaggcaggtggatcacagggtcaggagttcgagcacagcctgaccaacatggtgaaactctgtctctacaaaaaatacaaaaaattagccgggcatggtggcaggtgcctataatcccagctactcgagaggctgaggcaggagaatcacttgaacccaggagacggaggatgcactgagccaagactgcgccactgcactccagcctgggcaatagggcaagactccgtctc

SEQ ID NO: 482177 - DNA, 468 bp, Homo sapiens
aggagtacaaccagaccctgctcaatgacagcctcagcctgtgccctgcctaattttgttttattttcaatataaaataaatttgtggaacaggtggtgcttggttacatgggtaggctctttagtggtaatttttgagattttggtgcaactgtcacctgagcagtgtacactgtactgaatgtgtagtcttttatttcatcaccccactccccccttccgcgtgagtccccaaagtcctttatatcattcttatacctttgtgtcctcatagcctagctctcacaagtgagaacatatgatatttggttttccatttctgagttacgtcacttagaataatggtccccaactccatccaggttgctgtgaatgccactatttcttctctcctctcctctcctgttctcctcttctcttctcttctgttctcctcttctcttctcttctgttctcctcttctcctct

SEQ ID NO: 482178 - DNA, 470 bp, Homo sapiens
ttttttatttttttgccaaggcttgttttgcatttttttttgttcacttaatttttttttacaatataaaaaacccctgcttttgtggggggagggcggttaatatctgggagggctgcaatactcttaccggggggggcccttttggaaaatgcgcttttttccttatggctttccgccaccgggggattgcctagaaattaaaacccccctttttttccccaaatggaacacttatccccttgtcagtccttttgtgagggctccaaaccttatgtccggggtcccccatggggtggcccgggtccaacatgggggtggcgaacccttttgggggcttagccctttaaataggggtgcggctttttccatagggtaaagaatttgtggggaaaagtttttggaacaccgaagtttttggtttcttttgtcggggaaaaaatttacatgaccttgcgggcgtatggctc

SEQ ID NO: 482179 - DNA, 244 bp, Homo sapiens
tttttcccccgggggggggggtttttttggccccaattcccccggggccaacagggtgggcccctcttttaaaaaaaaaaaaaaaaaattttgggcccccccccctttttaaaagcccccggggggggttgggttttttaaaaaattttttttttttgggggggttggcccccccccggcccctcccggggtccggtttcccccattaaaggggttttccccctgggggggggttttcccccca

SEQ ID NO: 482180 - DNA, 989 bp, Homo sapiens
  misc_feature (408)..(408): n is a, c, g, or t
tggtccgactttttgaagaggctggggggtctggcggctattctccgagtcttcgaaatgccgcctaaggacaacaaaaaaaaaaaggaccctggaaattcggccaaaaaagacaaagcacccagtgaacaatatccgggggcagggccaaaaagaagaatgtggtgtccaagggcaaatgttcgggacaagtctcaataattttagttctttgtttgcgacaaagtctcaccttatgataactcttcttgtagggaatgtccccaatttataaatctttataaccccgagctgtgtgtgggctcctctgtgggagaagaacttgaaagactgttcggagggcctcccgtggcccgaggggcaaagcccctttagaggaagctcccctttagtataaagagggcactnttattcacacactgtggtctttttcacagaagcgcacgagaaagcttcaagagtataaatttctaccacgcgagaaaattccccagagggtgtggaagaaagttgcctcccaggctgtgtcgtggtgtagaagacattgcctgtgacattaggcgctcccacacaccaggctgtgttccccattttggggcaaaacaacatatacacaacctttttattttacactctccaaaaaaaaagagacataaagaagaaacaacctctcgcggaggggaccacctcaatatgtggcagggggggcgaggcgggcaaaaacagagcggggtcgatacatagtgacaatcagtggtgcggacccaccgttgtgtgtcctcactaaagtcgtgtgtctttctcccgtctagaacccccacagagcctttttttctgttgtgtattaacccaaacggggtggtgtgaaaaaacacatcgtcgccgggggggttcccccccacaaatataagagaggaggagcccgactaattaaactttgctcgaaaaaacacccgccgggtggttaaacccgcggcggcctttatgac

SEQ ID NO: 482181 - DNA, 431 bp, Homo sapiens
ccccggggcctggccccccgggggattggttccccccggttaagaggggaaaggggggggggcaaggggccctccaagaacccaggatttcccttccgcccctcccaacccttagggcgccctgggggacccccaactgggggggtgggcgcccccctccccccccccggggtttgggggtttggggggggggcccccccccctggggggggactccccccccccccggggtttttttccttgggcttaagggggccccccctcccccccccccccccccggggggtttttggccgggcccctttgtttggggggcaatccggggcccccccggggccctttggaccccggtggggtggccccctgggggttggggtttttcggggccttttttggccggaaaaaaaaaagggaaactttggtttttttta

SEQ ID NO: 482182 - DNA, 171 bp, Homo sapiens
tacagacgcgacgcatagcaaggatacagaacaacataagatagagaaatacacacacaaagagatatatacagagacatacagaagagaacacatagaaatagttatagagagacagatatacaaaagaaacccaaagacttatagagccccaaaaacaaataggggaag

SEQ ID NO: 482183 - DNA, 403 bp, Homo sapiens
  misc_feature (335)..(335): n is a, c, g, or t
gtcaaggagtggcttactacatgtgggagcttttggtatgtgacatgcgggctgggcagctgttaaagtccaacgtggggcagcacaaagagggggccacctccccaaagggaggaaaaagaggcaaacgtgggctgggcaatggcctcacataagaaacagggtcttcctggaaatttggtgatggagatgtcaagcaggtggcctctggacgtcaccgttgccctgcatggtggccccagagcaacctctatgaacaacctcgttttcaaaccaacacccacagccggagaatccaagaagacttgcgcactcagaacaagagggtaggaatncttatacaagcttgcaaacccgccagtcgcccataaacaactgctttgaaccggccttcttgcaaacg

SEQ ID NO: 482184 - DNA, 458 bp, Homo sapiens
ctctgttatatcccagcagagagacattgtacgtgtttgctcatgaagatgcagcatatggattgtctgtgagctcagtgaatgacaacatttgctccagatcctcagatgatggccgaagatatcatttgggacattcgagaatcctactatggagagtccttatgcctggcaaactatccatcaggctttcatagcgtcatgtttaaccctgtggagcccaggatgttggccacagcccattcaaaggatggagtggcactctggtacattcgcctcagagatgtctgctgcgctatggtggaaacctgtccgttcgtgccatgagtgtactattgaacagcgaccagacccagcttctgggcctgaggcgacacctgtccgctgtgctctatgacattcagtccgctctgcctgtgtgacagcttgacaatcagtgatacttccttatgcagctg

SEQ ID NO: 482185 - DNA, 120 bp, Homo sapiens
actcttagaggatccccgtgtgggctgtcgtgcaagactctgagaattgagagaggttcaatgtgagtcaacgctcagcacgagactccacagttacacagttcccagatctctctgcta

SEQ ID NO: 482186 - DNA, 934 bp, Homo sapiens
atggcacatgcagcgcaagtaggtctacaagacagctacttccccatatcatagacagagcttaatcacctttatcattgatccacgcccttcataattacatttaacctatattcctgctatccgtagatccgtgtaattgcgccgtgttgtcattaaccacgtccacacacacaaagcgtgagcgtaagtacctaaacgattcgttcaggcacgtcatacagcggacacaatgaggaaaaaacacagactacctggacaacttaaatacccgtagggccgccgacccaaagttccaattacccgttaagcgtgcacttacaaataacagactccactacccgacgaattaccaccctttaagccgccccaggtgtcaccagtgatgtgagccgagatgaagcagccacgggaagacggaacaggggcaatacccaacacgcgggaaagattcaccgccgagtcccaccgcggctgcttaaccccacaatttccgacataggattacgacaacccatctagcgccgacgcccgaatgccgccaaagacctagggggagacttacaccccattgggggcacagaaagccaccccatataagacgggtagtaaactgggagtttgacaccacagcacaccggggtaagcacggtttatagaccgcgagtgaacccgcggggtgacaacaccgcctttacagccagagttccccctatgtcgcccgaagcggacgcgagcattccacgccaggtatgaagacgccaatacgactaccacccctatagtctggcaagtcggagcgacaccaccgaaactgtgtcagcacaactcagagcgcacccaccacttacgcgggcgtaagataagtggacgcatacaggataggggaccaccggcgaaaaaccgcccccgcgtggggagctcagggccaaag

SEQ ID NO: 482187 - DNA, 249 bp, Homo sapiens
cttaatgaaggagaaggtacatgtggatttaaacagctacgtccagtctcctggcataccattcacctcaagaagacccctttctcttcacctaggcttctcatcctcatcagcaatattcacggccaagcaagagcagcaaaggggattttgggggaagaaaggacatactggggttgggatcactggcaacaatgatatgcttctggaacctggggtcctttggagatggacccaattcccatcact

SEQ ID NO: 482188 - DNA, 821 bp, Homo sapiens
cacctcccgggttcaagcaattctcctggctcagcctcctgagtgctgggactacaggcgcgtaccttctttagtagagactgggtttcaccatgttggccaggatggtctctatctcctgaccttgtgatctgcctgcctcagcttcccaaagtgctgagatgacaggtgtgagccatcagacccagcatttttttttttttaatttaaatttaaatttttttccattttttggaaaggtttttggtttggttggtggtggtgtggttgtggttttggaaacagtcttgctctgtcacccaggctgggagtgcagtgggcatgatctctgcaacctctacctcccaggttcaagcaattcttgtgcctcagcctcccaagtaacggggactacaggtgcacgctaccacacctggctgatttttttggtttaagtagagacagggtttcaaccatgttgcccaggtgggtctcaaactcctgagctcaggcaatccacccgcctttggcctcccaaagtgtctaggattcacgggtgtgagccaccaaacccagctatttttcttcacgttttaaatttaacagtggggggggggtctcaattggttcacccgggtggggtctcgaactcccggattaagcgatcctctggttccaaagacccattaccagtctcaaggtttctttactaaaagatccataccttttctctcttatctgctgcatgtgagatgtggttttcaccttccgccaatgatgtgaaggcttccaagccagtagaactggagttcaataaacctcctttggtaaaaaaacataga

SEQ ID NO: 482189 - DNA, 651 bp, Homo sapiens
ggcggaaatcggaagcgggggcggtccgcggtgccggctggtggcggagcagtgggtgcggaggtgcgtccctgtaggtgtgtgagcccgttgatggaagcctgggcctcgtcagccagtgcagcgggggtgtcggttgccgacgtggctgccgctggggctgttggctgtcggtcggtgctggctgtggctgcgctccgccgtttggcagcaggtccggcatagggtcttgccacggacctccgtgtcggagcagcagttgctggaggtggaggacttgtcccgtgtccctcctgcagggtggagggctggggcctctgtcgatggccccggacctgccggatctggatcctgagtgccgggagctcctgctggacttcgccaacagcagcgcagaggctgacagggtgtctggtgcgcagacgcccggaccgtgcgcctctgtcagacctggtacaccccttcttccaacaggtcgacagcacgatggacaagatcagccgagaccgggggaatacttcagagagtcagagttgtgccagaagtctcttactggcagatagaatgcaatagtgtgattctctcagaattttgaataacaatggaagaggcaatgtgcaaatgtttaaaaagaaaagtgaagacttatca

SEQ ID NO: 482190 - DNA, 844 bp, Homo sapiens
agcggagtgtggacctggactcgaatcccgttgccgactcgcgctctcggcttctgctccggggcttcttccctgcgctgcccggggccctgacctgtggcttcttccccggcctgatctgcgcagcccggcgggctgccctatgaaggagccatgcgtgctgcgtgggtgcgctgctgggcggcgggaggcgtggcctggagctgcgtgcggcaatgcgggctgtggacctgctcggccgccgtcctgccctggcgatgcatgctcacgctggtgatgcctggccatgtgaaggtccaggaccctgctagtctggtcccacgacggaaacgcgacaatgtgcctctagggcttcacgcccagggtgcccaccctggggctgctgccctgatcgtgcccgtccctgatggacgacactcatgctacagcgtactgcgtacgtgggaatcatgacgaggcccgttcttccgctaccgcgacctacctggactgtcctggagcagcccttccccggggcagtgcccagccctgcggccctgctgcgccgctgcctggccggccccgctcttcggcatgcttgttcctgctctcctctcacctcttcccgctggaggcccgtgcgcgaggactcctttctacgcccggcccggttgctccgcccggcctctttctacatgattcccccgatcttcttcgcctgtccgacttgcgccttctacggtggccttggatttgcccgccgaagtgccgagctgcattgtccgaccgagctttgagtgcctaacaccgtgggccgccaaatgcccggggccggaaggccggccccggcgtccactgccctccc

SEQ ID NO: 482191 - DNA, 1060 bp, Homo sapiens
  misc_feature (367)..(367): n is a, c, g, or t
  misc_feature (458)..(458): n is a, c, g, or t
  misc_feature (480)..(480): n is a, c, g, or t
  misc_feature (549)..(550): n is a, c, g, or t
  misc_feature (589)..(589): n is a, c, g, or t
  misc_feature (604)..(604): n is a, c, g, or t
  misc_feature (610)..(610): n is a, c, g, or t
  misc_feature (872)..(872): n is a, c, g, or t
agcggcctcaagtgctgatgatgcgtcttgggttaatgcctcatattcccacactctgtgaaagctacttctccagtgaaatctactactctctatcagctgatggctacagaagctcgtgacgggacacacaactgctgatgctatgttccataacatgctccgtagttacgctcgctctgtagaaagaccgcgggcgtactcgggaatacccagatttgctgaaagtgcaagctcttagtccctcaggagcagattgccactccagaggggacgcaagttgataggtaggaaggagaagtgtgttggttcgtcggcgacagttcgtcaacattgcgtaacatatgtagcacagcatcgtgacggnagctaacccagcggagagacaccagggacactttaacagtcgcttttctcccctaggggcacagccggctgtcttggggcagcaggccggntctggctgccatgacgcacaancaattaggccagaaaatgcagataggtcctcgagggcagtatgaagaccatacaactcctctaacgagnnaagctctgcgcacgactttgaagtgtaccgtacacaaantgactagaataaggnacacanatacccacaggacacaagacttatgatttcacaagacatggaaccaccatatttcctatgcaatcgttagcataaccactagtgttaagacaagcgacaacaagccatcacatggcatgcgtatatcctcgtcgcaatacatatgaaaccttgattgcaccttgtgcgtctccggtggcgacccagaatgtatcgcatctagatggcggcaacatactactcgttgatgctgcgaaggaacacatagggcgggatatagttncacaagagagctagagacataggttaagataatccgaacatccatggatagacttccaacctgtgttcagaagcaccttcccccttcccacaacaaaccagcgaaggtggttttcacacataaacttccaggtccacttccaaggtaaccaagaaagaggtgaacccgaaagaaaccaggaataccca

SEQ ID NO: 482192 - DNA, 1031 bp, Homo sapiens
gctggattgcaagtttctgcaaagtagcatctaacccctgatagtctacaagttcagtcgttgacacgctgcccggtcgatcagaagaaactgtgtaccttaatagctagagagtccactcaatacccacactgtcgctcattccaatggagtgagctatatgcgatcggtggtcgatgcctgtgactgcagaggtagcgttctctattcatgatagaaggaactcagaacgaaacgatggatgcatgcttactgaatcaattggcattggatttgccttggtctgcttgggagtatgaaatcgatctagtgggataatatcatcagatccacgatgactgagtgaatcctgctatgcctcgcagtccaggacagccttgtatccgtcaccatgctatagtgtgattaagccaaaaatgggacacagcatcgcatttaagactgtacctgcaagaatccgactgttagggtcccatttagcatgaacgatgggtgagatgtacgactctatgcaaggcaagtaggtgcatgcattatcggcatggcgttttaactggaggcgaggaatccgagaaactgtatgatacgtagatgcaggtactgttcgcgaagtacgctgctgagtcgattaattgggggaatcgcgaatgacttcgtgatcggcaggcattcacatggtgggctgagtatctaagaaacctggagtcttagataggacctacaaatcctggtggtcaatctactgcaagaatgccagatgggctgacatcagcagaatgttcggcttgacttgtcccatattacagttcagcgaaagggcctgtcctggtttgggcatgccgcccgtcaaaggagtcttaagtaacctttgtagtcacgccgtaacagtggctatctaattatagagcgagacaaatgcagtgggtaagtgcatacgccgcacaacaagggaagttacagccctattgtggcagaaaaatgcaccaaacgggaaaaggagacaggacaaacaaaaaaaatggcacacaaga

SEQ ID NO: 482193 - DNA, 126 bp, Homo sapiens
gtcacgtaccttatatcagtatcatggagggacttactagttatccacgtgagttttcttactgttggggtacttttcttggcaggatgaagtgaagtaagataccaggctcctggctcctgaatt

SEQ ID NO: 482194 - DNA, 184 bp, Homo sapiens
ggaaataagatgtgtccattcatatgagtgggttttggtcatatatatacacatatattttaattacaagtgtgggtcccctttcagaactaaccaataaatagattccatgttttcttgtttatcacacatacaagtatctttccctatatatttgtaccacttttgagagccagttttcgat

SEQ ID NO: 482195 - DNA, 132 bp, Homo sapiens
ccctcaaaaggaaatcagtttaaaatggcacacaagttatgcatggtctctcctctccagcttctctgacttctcctgatcatctcaaccttgttccagtttgctccagccacagctgcgtttcacttccga

SEQ ID NO: 482196 - DNA, 1076 bp, Homo sapiens
ctcaatgttgcgctgcatccgctcgaatctcgtgaagatccgctctcgccgtgagtgatggcagttggagactgagaccgaaatataatggaattttacattgcttgactaccatttggaaacttgatggactgcggggactttatcaaggagtaaccccaaatatatggggtgcaggtttatcctggggactctactttttcttgtgagtagatttgggagatttaacagtattaaattacaaaaggaattattagtattcggtgattttacatgtaaatgtaaaatgataagttgaggtcatttaatcagtttctctgaattggaaggcatcaggcacagcaccaacaatggctgcattcagataatttgcattcagttcgcattcgaaaatgcgcttcatccagtgtgcattcatccagatgccatattaaatagctaatggcttcattagctattcatcagcaggccattaataataggtcctgggaagcacacatttcttaaatccagggcacacaccaggcaaacagcagcatgcagcgtagggcacatgcatacctttctaggacgcaagcccaatattcgtagtgcagcgtggcacattcaaggcgcaaagaatgcacacatcgtccactacactggcatctagccttcacttgctaacacgccttaaaagttacattaagtcaaaccatgcaaggaagccctactcagacaagtctctgcaacgcatataacaaccgaccccagctatatggaacaaacacaccaaggccaaaaaccttcccgaagggaagtacaaggtttgcaagcacaacggaaacacgtcgagcaagcggggaccccccaagtccgggcagcacacccacataacgcggtggccaataacagagctccagataagttcacaagttcacacagaaccatgaatggaacgccaatatcaacactacacgataccagaacgcatcacaaacaacaagactaccgtccacacacctaacgacacgaaacagcgccagccaacaccaacggcaccgcaccccgcacgacaaccccagcccacactagca

SEQ ID NO: 482197 - DNA, 396 bp, Homo sapiens
gtgatcgtcaccagcttctcggcggcctgggccgtggatccacagccaagcaacagggccagcagtgcggaacgtgcgacagtcatgatgggggcctcagtcatacgccaggttcacattgaggctggcgcggaaggggcccgggcgcagcgcggccgcagtgcgctcggggcggatgtagtaggtcagccgactatcgccaggcgatacgaaccaggccggggcagcactgcccaagcgcacgtcattgccctggatatcgagcaggcgaaggccgaagcattcggcgccgaccaccttgatcagcccgggcgtgtctgcatccgctaccgccttgaaagccacggcggccacgggttcgatagcgctccagaccaaggagccttgttgctcatc

SEQ ID NO: 482198 - DNA, 644 bp, Homo sapiens
ggcacgtgacaccatgcctgactaattaaaaaaaaaaaatttctttttctaagatttttgtcacgttgacgaagatttccttgtattgcccaggctggtctcaaactacctgggctcaagccagtcctcctgctttgacctcccaaagtgttgggatttacagggcatgatgctacctactgccccagcactacgatttatactttgtacgtaaatgcatttctaacagttcgacttattgtgctactagtggtgtgagatactgcctagttccttctgcattgtagatatcctgtttacccagcaccatttatcaaagcaactattctttccaaattgtttgtttctgccatttggttgaaaatcaatttaatataaatctgtggatttatttctgagttctctattctgttccattggttatgtgtctgtttttatcccaatactgtactgtttgtttactgtagctttgtggtatatttcgaaattgtctagtatgatccctccagctttattctttttgcttaagattgattgggcttttgggactcttctgtggtaccacatacattatccatttaggattgatttgatttctatgaaaagcgtcattggaatcgtatagggattgcattgtctctata

SEQ ID NO: 482199 - DNA, 399 bp, Homo sapiens
ctagaggatcccccttttctcacccaccccaccaatgtacaataaaatttaattaactccaaaaaggacccctagatcaagagagagagagagagagagagagagagcgcgagcgcgcagccccgttcagcctgagtggaatgcccacactgccgtgggttggggggcactgactcattgcgccatgggaagacctatgcagaccctgtggacccgtcaggaggtgtctgggcccaggctcaggccagaagagagacagaggcagggagggtgacgggagagccagacaaggacagagaggtatagcaggggacagagggcgactggaagaggaacgggcgcgtgggaagttggcgaaagacacagcacgctgtgaagccgtgcatggtggcgtgcggg

SEQ ID NO: 482200 - DNA, 619 bp, Homo sapiens
  misc_feature (1)..(1): n is a, c, g, or t
ntctctttccatcccttgaaccaaggcatgatagcacttggctacagcatgttgtcaacttaatgtaagtgctgactaccttcacaatttcctcatatctcttctggctgtagggtggctcagtgaaatccatttggttcacaccgacaattggttgtttcacacccagtgtgtaagccaagagggcatgctctcgggtctgcccattcttggagataccagcttcaaattcaccaactccagcagcaacactcaggtcagcacagtcagcttaaaatgtcccggtaatcatgtctttgataaagtctctgtgtcctggggcaccaatgatagccacatagtactttctggtctcaaatttccacaaggagataccaatggtaatcccacgttcacgctcagcttcctgtttatccaagacccagcgcatgcttgaaggagccctttcccatctcaccagcctccttcgcaaattttgcaatggttctttggtcaatgccaccgcatttttagaccagatggccagtagtggtggacttgcccgaatacacgtgtccaatggcgacaatgttgatatgagtcttttcctcccccattgtggctcataggggtagttctc

SEQ ID NO: 482201 - DNA, 1221 bp, Homo sapiens
gagcagctgaggcgccatggcggcggtagcggtgtcatgagtcttgtgcctgatctggagctggctgaccgcgagcggggcgggagctgctgctgatcggtgcccgggctggagtgagcgatgtgcgtggcaggccgtggctgggcagtctgccgacgctggcttttcacccgttgcctgctgcttgcactacttggaagttgagcggtttgcggcgagcttgctgctgcagcgcggggctctgcgcctgtcagcaatggcctgcctcagtgttgctcagcctcgttgctgcggactcagactgctctgtgtgtgcccgtaccttatgcccctagcttcgtgccgacttcttgcccttcgggatgctcgaacctgtcggggcaaacgccgcttggacggcgctgtcgtccgggccaaggcccttgggccctcgggtcggatgcctgcaaggggtcgcattctcggcagtcgtgctagaagctcgttcaactcgtcgagtcgggcaaacccgtgcttgccgcgaagctttgcgcaagtccgacccttggtaggcgacttgtcgggcctcacggggtccttgcgaggaggcactcgagagcttcgacactgggcagaattttgcccattagaacgttctcattttactccgcccgaaagcctcatttttcgggcccccccggtgggccggtcgtagcgcaccctttgctttccgagttgaaaccttgtcgggggttgccgttgaacgagatcgttgacccgttcgcggaaggagacctctcaaggcgcctcgcggaacaattcagtggcgcagacacatttggcgcgccttccgtccctccgaagggaaacgttgtgggagagccccttcatccggaagattcagacctccgaggctttgaaggcgaagaagtctcccttgccatggaaggccttttgcgggtggaacgtttgcccccccaagaggtcttcgaagagtggcaagcacttccacaagttgtaacccgcgatgggggagaacaccaaaggtctcttggcagttggtgaaccaaaggccgtcctcgttgcgacgcaacctagatttggggtcccaaggcggaggcctttggcccaaggaaagcgccaagtaagtcccgagtcccgttggggaagggttactcatttgcacgagcggtttagaggaagagaggccccgttttggtgtttgggccgtcgggaaactct

SEQ ID NO: 482202 - DNA, 371 bp, Homo sapiens
ggatattcagccggaggttcggggcgacgggactctccattccagaaccatggaccaatgtgtccgtgaaccttgtggagaatgaccccgggcgctggtgaacgctgtttgggagttactcgaagcgctcgatcggatcacgatttcggtgaattatcgctcgaaggtagacctggttcctcctcatcccttgctgagtatccctatagactattcaggaggcctgcaaaaaagataagtcaatagtggctcagactggtagcttcatacgagctcaaaagtttagggaagtctgtgcgtgacatggttttggtggaccagctggaggtgtttgatgtggttgtgatgatcgggatgaagattagtatggg

SEQ ID NO: 482203 - DNA, 251 bp, Homo sapiens
cctaatagagtatcttagagaactagaaaagcaagagcaaaccaaatctacagttatagaagaaaaaaatcataaagattagggcagaaaaaaaattgaacaaaaaatacaagaagatcaatgaaaaaattggcttttctgaaacagttaaacaacttgacaacaccttcaacaacactaaacaaaaagttttaaactccaacacgctaaaactaactctctaacaacacacaagtaacactactgactac

SEQ ID NO: 482204 - DNA, 244 bp, Homo sapiens
aggacagtatagagttgggccttctccatcctgatcagagataaactattaaaactgtaaaaaatactcaaagatatatgtaagtaagagggtatgagcctttagacttgctcataatgtacaacataacaacatttatttcaaatcactgaattcatggagatgtggacacgctaggttggctcttattttagttattgtgtgatagtggttctgtcatcatcattcagtgtatggaaggccg

SEQ ID NO: 482205 - DNA, 1038 bp, Homo sapiens
  misc_feature (161)..(161): n is a, c, g, or t
  misc_feature (193)..(193): n is a, c, g, or t
  misc_feature (195)..(195): n is a, c, g, or t
  misc_feature (198)..(198): n is a, c, g, or t
  misc_feature (223)..(223): n is a, c, g, or t
  misc_feature (225)..(225): n is a, c, g, or t
  misc_feature (228)..(228): n is a, c, g, or t
  misc_feature (239)..(239): n is a, c, g, or t
  misc_feature (253)..(253): n is a, c, g, or t
  misc_feature (312)..(312): n is a, c, g, or t
  misc_feature (337)..(337): n is a, c, g, or t
  misc_feature (344)..(344): n is a, c, g, or t
  misc_feature (347)..(347): n is a, c, g, or t
  misc_feature (373)..(373): n is a, c, g, or t
  misc_feature (380)..(380): n is a, c, g, or t
  misc_feature (390)..(390): n is a, c, g, or t
  misc_feature (410)..(411): n is a, c, g, or t
  misc_feature (414)..(414): n is a, c, g, or t
  misc_feature (456)..(456): n is a, c, g, or t
  misc_feature (458)..(459): n is a, c, g, or t
  misc_feature (462)..(464): n is a, c, g, or t
  misc_feature (482)..(482): n is a, c, g, or t
  misc_feature (513)..(514): n is a, c, g, or t
gcatgcatcagagagtttcctatctttgtatgttaagagattaagaaaaaaaaattctattttgtgtaatgtcctcgcggctctggggacgctaaaagaaccgggcctgccccgccctgcgcggggataacgaaagctgagtgtttttccctttttttgtncgtttttagtttattttttttaaagtcgtttncntgngttgacgaggatgatctggggtttnanttngtttcgtcgtncgttctgtttcggngggagggctgaaggaaacgttcacattttagagtttaaaaaaaacacctcgacttttanaaaatcaaccaacacaagatcaaanaggaaanggncgagagaaaaattatttttaagatanttaaccntaaaacccgnggtgcttcttacattataanngtncgttttaaagaacccacaaactattatacataagtttatgantnnacnnnaaatatcctgcactggtnaggaatacgcatatcccttcttggtggagtnnaacggaacgggacagcggcgtgcccccggcggcgttggacttgctccggccgagggtctccccggggcgccccctccctggggccaagaaaccctccatcgacacgaatacaccgaacggggtacggaggcgcgcacggggtgcacggacaacctccacacgaaacggacaatgcacacggacaagacgtccacgacgacgtctggtataccacggacgcccagcacactcagaggcaccggaaccgcaggagacagacgcagaggacacagaggaagagtgctacaagcgagcagcgccgagacagacaagacgatgtcaacagacgctccaacgacgacacgcggacaccgagcgactgcaacgcacgagagaacggacagccaggacgcaccaagccacggacgggcgagacgaggagagcgagagcggcaccaagcccagtagagacacgaagaaccaatccgagtcatccagcgagcgtggaaagcgagaagcggccagggccgacaggcgaccccgac

SEQ ID NO: 482206 - DNA, 292 bp, Homo sapiens
atatacatgtacagatggcaaagagggggctgaccgggggtctgtgtagctggcctcagagtagtagaagtggtagtccatgaccggtccagatctttgtagagcgattcctccaccacggtctagagatcctagatagatcagatcagacatacatatgtaaggcgatgagtgatgaccacatactgggacatatgtagaggagtagtactaaggtagactactaccatatgtggctctcataggcattacttgagcagctaccggcaggcatgtacgtccagtaggcata

SEQ ID NO: 482207 - DNA, 144 bp, Homo sapiens
tcgtagaaaggaggaaaatatttagtccaaaagatggcagaaacaagaaattcatcctgaaagtatagtttggtgctattctgatgagatggctcatccctgtcaacgtgctctccagctgaccaccccttctgtcgtcttctc

SEQ ID NO: 482208 - DNA, 454 bp, Homo sapiens
ttcttttctgacccgtcagaagtcaggaattagaacgacgatctgccatgatctagaggccaggtgagcggcggatggagggatgcgctgcagcacctgcaggcggaagaagaagaagatgcatctgaccatccaggcgcttgaggatgcggctggaggcggcggagagcgcccgggagaagctgtcaggtggaagaaggtgaccaccgaggcgaagctgaaaaatctggaggcggagccgatcatcctggaggacccgaactgcaagctggccaaggaaaagaaactgctggaagacagaatagctgatttcaccaccaacctcgcagaagaggaggcgaaatctaagagcctcgccaagctcaagaacaagcatgaggcactgatcactgacttggaagagcgcctccgcagggaggagaagcagcgacagggtcaggaagagcaccgcagt

SEQ ID NO: 482209 - DNA, 1164 bp, Homo sapiens
  misc_feature (1164)..(1164): n is a, c, g, or t
ataaaagatgccacaggctcagaatcaacctgttaaaattgggtatatatatgaatgggccagatatacttaatgttcagtacactgactaatatgcgtcatgaccactaagttagtttgggggatgtgacttaatagtgtttctttagggaaaacagcaacccgaagtgttttagccaaatttaagtgggtaccattgtaagctcaaaatacacaacgactgcagaatgtacggtctgtgagctgacaacaactcaaacactagtacattattgccctgaaatgaggtgggtttattgtttacgttattaactgctttcttcgtagtagtcacgagagagtctcactctgccacccaggctggaatgcagtggcaccatcatggcttcctgcagctcccaactagagctcctcctgcctcagcctcccgagtggctgggaccgcaggcgcgtgccagcacagacgggccagattacagtacggcacaaacaggaaaagatgggtctcactgtgatgcccaggctagtgatacgaaaaagagcttactgtgccttagtaaattttaaattaactactcaagagcctttccccatctcaaaacattataatggacagttacaagctcaatccacactagcaccaaacactaaacactgcttcacacagtaccataaatacaggaacgaacaaaggggaccctcctcaaaaccctttccgtggactcaacatttcaaacgggtgagataaatgcctcccacaaggcaaactaacatacacacacagaaacgggcggtgcacacgggcccggtactggcaccctaagtggacactggggcccgataaacttcttcataacattaaaatacacttggtccatcacaacagggggctacacatagaatcaggaaccaaaaagagcaattgtcacgagaaccacagcacaaggaacaaaacccccacagacaacaaacagcacgacacaagcccacaacaaaaaacaacgagaaatacggacaaaccaacaaagcaaaagggagaaccaagaaccatgacaagagacaaaacacaccacgcacagagaaaatacaacgaaacacaacacacaaacaccacacaaaaacacaagagagagacaaaagcaccacacgtcagaacagtaagtn

SEQ ID NO: 482210 - DNA, 6329 bp, Homo sapiens
  misc_feature (6318)..(6318): n is a, c, g, or t
  misc_feature (6320)..(6320): n is a, c, g, or t
cggggccaaagacctggtgtgttccaagatgtccagggccaaggatgccgtgtcctccggggtggccagcgtggtggacgtggctaagggagtggtccagggaggcctggacaccactcggtctgcacttacgggcaccaaggaggcggtgtccagcggggtcacaggggccatggacatggctaagggggccgtccaagggggtctggacacctcgaaggctgtcctcaccggcaccaaggacacggtgtccactgggctcacgggggcagtgaatgtggccaaagggaccgtacaggccggtgtggacaccaccaagactgtgctgaccggcaccaaagacacagtgactactggggtcatgggggcagtgaacttggccaaagggactgtccagactggcgtggaaacctccaaggctgtgctgaccggcaccaaagatgctgtgtccactgggctcacaggggcagtgaatgtggccagaggaagcattcagaccggtgtggacaccagtaagactgtcctaacaggtaccaaggacaccgtctgtagtggggtgaccagtgccatgaatgtggccaaaggaaccatccagaccggcgtggacaccagtaagactgtcctaacaggtaccaaggacaccgtctgtagtggggtgactggtgccatgaatgtggccaaaggaaccatccagaccggcgtggacaccagtaagactgtcctaacaggtaccaaggacaccgtctgtagtggggtgactggtgccatgaatgtggccaaaggaaccatccagaccggcgtggacaccaccaagactgtcctaactggcaccaagaacactgtctgcagtggggtgaccggtgccgtgaacttggccaaagaggccatccaggggggcctggataccaccaagtctatggtcatgggtacgaaagacacgatgtccactgggctcacgggggcagcgaatgtggccaagggggccatgcaaactgggctgaacacaacccaaaatatcgcaacaggtacaaaggacaccgtctgcagtggggtgactggtgccatgaatttggccagaggaaccatccagacaggcgtggacaccaccaagatcgttctaactggtaccaaggacactgtctgcagtggggtcaccggtgctgcgaatgtggccaaaggggccgtccaggggggcctggacactacaaagtctgtcctgactggcactaaagatgctgtgtccactgggctcacaggggctgtgaacgtggccaaagggaccgtccagaccggcgtagacaccaccaagactgtcctaaccggcaccaaggacaccgtctgcagtggggtgaccagtgctgtgaacgtggccaaaggggccgtccaggggggcctggacaccaccaagtctgtggtcataggtacaaaagacacgatgtccactgggctcacgggggcagcgaatgtggccaagggggctgtccagacaggtgtagacacagccaagaccgtgctgaccggcaccaaggacacagtgactactgggctcgtgggggcagtgaatgtcgccaaagggaccgtccagacaggcatggacaccaccaaaactgtcctaaccggtaccaaggacaccatctacagtggggtcaccagtgccgtgaacgtggccaagggggctgtgcaaactgggctgaaaacgacccaaaatatcgcgacaggtacaaagaacacctttggcagtggggtgaccggtgctgtgaatgtggccaaaggggccgtccagacaggtgtagacacagccaagaccgtgctgaccggcaccaaggacacagtcactactgggctcatgggggcagtgaatgtcgccaaagggactgtccagaccagtgtggacaccaccaagactgtcctaactggtaccaaggacaccgtctgcagtggggtgaccggtgctgcgaatgtggccaagggggccgtccagacgggtgtagacacggccaagaccgtgctgaccggtaccaaggacactgtctgcagtggggtcaccggtgctgtgaacgtggccaagggtgctgtgcaaactgggctgaaaacgacccaaaatatcgcaacaggtacaaagaacacccttggcagtggggtgaccggtgctgcgaatgtggccaaaggggccgtccaggggggcctggacactacaaagtctgtcctgactggcactaaagatgctgtgtccactgggctcacaggggctgtgaacttggccaaagggactgtccagaccggcatggacaccaccaagactgtgttaactggtaccaaggatgctgtgtgcagtggggtgaccggtgctgcgaatgtggccaagggggccgtccagacgggtgtagacacggccaagaccgtgctgaccggcaccaaggacacagtcactactgggctcatgggggcagtgaatgtcgccaaagggaccgtccagaccagtgtggacaccaccaagactgtcctaactggtaccaaggacaccgtctgcagtggggtgaccggtgctgcgaatgtggccaagggggccgtccaggggggcctggacactacaaagtctgtcctgactggcactaaagacaccgtatccactgggctcacaggggctgtgaacttggccaaagggactgtccagaccggcgtggacaccagcaagactgtcctgaccggtaccaaggacaccgtctgcagtggagtcactggtgccgtaaatgtggccaaaggcaccgtccagacaggtgtggacacagccaagacggtgctgagtggcgctaaggatgcagtgactactggagtcacgggggcagtgaatgtggccaaaggaaccgtgcagaccggcgtggacgcctccaaggctgtgcttatgggtaccaaggacactgtcttcagtggggttaccggtgccatgagcatggccaaaggggccgtccaggggggcctggacaccaccaagacagtgctgaccggaaccaaagacgcagtgtccgctgggctcatggggtcagggaacgtggcgacaggggccacccacactggcctcagcaccttccagaactggttacctagtacccccgccacctcctggggtggactcaccagttccaggaccacagacaatggtggggagcagactgccctgagcccccaagaggccccgttctctggcatctccacgcccccggatgtgctcagtgtaggcccggagcctgcctgggaagccgcagccactaccaagggccttgcgactgacgtggcgacgttcacccaaggggccgccccaggcagggaggacacggggcttttgaccaccacacacggccccgaagaagccccacgcttggcaatgctgcagaatgagttggaggggctgggggacatcttccaccccatgaatgcggaggagcaagctcagctggctgcctcccagcccgggccaaaggtgctgtcggcggaacaggggagctacttcgttcgtttaggtgacctgggtcccagcttccgccagcgggcatttgaacacgcggtgagccacctgcagcacggccagttccaagccagggacactctggcccagctccaggactgcttcaggctgattgaaaaggcccagcaggctccagaagggcagccacgtctggaccagggctcaggtgccagtgcggaggacgctgctgtccaggaggagcgggatgccggggttctgtccagggtctgcggccttctccggcagctgcacacggcctacagtggcctggtctccagcctccagggcctgcccgccgagctccagcagccagtggggcgggcgcggcacagcctctgtgagctctatggcatcgtggcctcagctggctctgtagaggagctgcccgcagagcggctggtgcagagccgcgagggtgtgcaccaggcttggcaggggttagagcagctgctggagggcctacagcacaatcccccgctcagctggctggtagggcccttcgccttgcccgctggcgggcagtagctgtaggagcctgcaggcccggcgcggggtcgccctgctctgtccagggaggagctgcctcagaactttctccccgcccccaaacctggatcggttccctaaagccctagacctttggggctgcagctggctgagcgccgaggggctgcggaggcagtgaccttcttaactgagccaccccacgccctgctccgggcctgcctgcatctcccacctcctccccagcgctgcctgcccctctcggagcctggggtcactcagaccaccagccaagagccttcccttgaagtccccaagcaagcactgcaattaggaaagagaaaaagcagcgtgcccagcctggaagggcatctgtttgccccgctagcaacccttttatatctagcagggctcttccagtcctgcagcacgggcccccagctatcagcggtgcaggcagtgctgtggcatcccaggctccgggcagctccgttctcatgctgaaagtgggtctccggccttagcacacacaccttgagggtcttaagaaccacattccctcatagtagaaagtactagaaaaagcgacactgccatcatcatcccaaggcaggctgctactgcctttgctgacccccggggtggcctcacggtggggacaaagctgccaggagccacagcagccacagctggggctttgcaccagcctggcttgagactgagcagtttgcagggggtggggggtgcaaaaaacaagcaaacaggctgctgctgcctccagctgcccaccacaggcctgccccaggcacctggggctctgaggcccctggggaggctgggcccagcagctgcccctggagaacacagacaaaggacttccccgcagggaactgtgccctatggagggatcagacagggctgggaacagccacagaggctgcgtgcctatggcacagcccttcctccgccgcacactccccctgggtcctcaggcccacccaagcgccgggctgcagaggaagcggggctggggaggctgcaggcatcagagacactggtggtggcggacccggccgccgggccccgtgctctcaggctagcccaggtcgtggaggctggcaggctcaggtcgggtgtgagacgtgccgtggctgcgctcagtccagcggggaggagccgttcagcccggcctccccaggaagccatatccccactcacccggtaagagaaccttgtcgtcccctttccatgctctcctaggacacgagcccaggaaccccagacccagggggaggaagggtggaggggccccaggggtcaccgtgtgcaccaggggccgtgaggggccggggcattcagctcagctctgaaccggggaagctggcacggcaaggactgcctcaggtgacgggccgtgagaggggacgggtcaggagccttcccaagccttctcctcagcccgacacccatggccatcggaggctaggatgccagacacagccatttgcagaaatcaggcacagtgactgcagctcacgtccagccaaccaagcatggggccgcagctcaggaagtcccttcccgccacaccacagcctaattcttactgggacggaggcaactcggctacgctgggcaggacgacaaacacgagacgccactgtggaatgagcaacttcggagcacggggtgacttgcttgggaccgtgcccacgtgacagccccttatgcagaggaggaaagagaagccccgagtgggaggggaacctgtccaaagtcacacggtgtgtgggtgacacagctggggtgagtcgaggctggcccctgaggcccatgctccctgaacgctggagaccactgtcggctagcagcggctctcagggaaggcctggtctccaccctcccagcctagcctcgcggaccctcgtcctccccacatcggacctgctcacctgcctggaccctgggctgccagatgcaggaagcatcaaaccccccagcctcgtgggtgcggggcagggcgcaggcagcacagcttagatgccctggtttgtccctcttgtctcctgggaagagcttgctcccgcccagctctcctgccactggcctttcagggttgggctgggcccagagtgccttttagtcgcttctcacggtggcctgatggctcaacccagtcccaaacgggcccagtgacactgccgactgcaccccagctcaggcccccactgcaccagcaatgctagaaaaccaagccaataaaagtgatttcttttttcattaaaaaaacnanttatagtca

SEQ ID NO: 482211 - DNA, 800 bp, Homo sapiens
ttcaagaaccttggaaaagaacaagaagaaagggaagatcttttaaactctctatgaccaccagttaacgtattagtgccaatatgccagcttggacatcagtgttcttgtcggatccgtttgaccaatttgcaccagttttatccataatgatggatttaacagcatgacaaaaattattttcatttttctggttcttggatgggagattaacgatgcctgtgaatggtctagggtggtatctggtcacttagaacagtacagacgcttctaagtacctttccctacatttccactttcttttattaaacacaggatatcttacagtttacatggcacagagaacattttactctggttggtacaatcatggtccctgggtgggttggactcggttcacaccggattatccccaaacataacaaagggatctcgggaaacgattccacatcggacggactaactgtgcccatacattatggatgccacatctggtgcctctctctatggatacagttcacaatacaaaggtctccattcagtggcacgccactatcgccaataatgtgttagctgtctggctcttaacacaggttggacccataattttgttgaccccttacaatgggttcagacaacttccctttgctcataaaaaataccccataatagtgccttacgggcacccccaaacactcttttacttaaccacctgacactggttgggagtcgctgggcggcttttcaactttatcttactcccacattagggcccctttaatccgaatcccattaggtgt

SEQ ID NO: 482212 - DNA, 166 bp, Homo sapiens
ctcacgtgcgatatacactaagatcagatgacaacaaagctttgtggaaatatgtggtggtagtatattctatggtggtctatatgtacggtttgttgtgctgtttatcactgtcagatgagagattttgtctttgtagcctgataccaggagaagcattaaaagc

SEQ ID NO: 482213 - DNA, 338 bp, Homo sapiens
ccaaaagagcaagggatgagcctgaggaggtggagtggatgtcaagctggacaagtacacgccattgtggatagaggagccacactgccctgatgacattctgggacacgccaccattatccaagagctctggtcccatatagcaattcggcattgccacagagagaacagtgccacaatcagagtgatatataagcaactcctacaggcgaaggccctgcagttcctccagattgacagttgcagactgggcagtgtcaatgagaacttctcagtattgctgatggccaaaaagtttgaaatacctgtatgcccccatgctggtggagttggcctct

SEQ ID NO: 482214 - DNA, 6323 bp, Homo sapiens
cggggccaaagacctggtgtgttccaagatgtccagggccaaggatgccgtgtcctccggggtggccagcgtggtggacgtggctaagggagtggtccagggaggcctggacaccactcggtctgcacttacgggcaccaaggaggcggtgtccagcggggtcacaggggccatggacatggctaagggggccgtccaagggggtctggacacctcgaaggctgtcctcaccggcaccaaggacacggtgtccactgggctcacgggggcagtgaatgtggccaaagggaccgtacaggccggtgtggacaccaccaagactgtgctgaccggcaccaaagacacagtgactactggggtcatgggggcagtgaacttggccaaagggactgtccagactggcgtggaaacctccaaggctgtgctgaccggcaccaaagatgctgtgtccactgggctcacaggggcagtgaatgtggccagaggaagcattcagaccggtgtggacaccagtaagactgtcctaacaggtaccaaggacaccgtctgtagtggggtgaccagtgccatgaatgtggccaaaggaaccatccagaccggcgtggacaccagtaagactgtcctaacaggtaccaaggacaccgtctgtagtggggtgactggtgccatgaatgtggccaaaggaaccatccagaccggcgtggacaccagtaagactgtcctaacaggtaccaaggacaccgtctgtagtggggtgactggtgccatgaatgtggccaaaggaaccatccagaccggcgtggacaccaccaagactgtcctaactggcaccaagaacactgtctgcagtggggtgaccggtgccgtgaacttggccaaagaggccatccaggggggcctggataccaccaagtctatggtcatgggtacgaaagacacgatgtccactgggctcacgggggcagcgaatgtggccaagggggccatgcaaactgggctgaacacaacccaaaatatcgcaacaggtacaaaggacaccgtctgcagtggggtgactggtgccatgaatttggccagaggaaccatccagacaggcgtggacaccaccaagatcgttctaactggtaccaaggacactgtctgcagtggggtcaccggtgctgcgaatgtggccaaaggggccgtccaggggggcctggacactacaaagtctgtcctgactggcactaaagatgctgtgtccactgggctcacaggggctgtgaacgtggccaaagggaccgtccagaccggcgtagacaccaccaagactgtcctaaccggcaccaaggacaccgtctgcagtggggtgaccagtgctgtgaacgtggccaaaggggccgtccaggggggcctggacaccaccaagtctgtggtcataggtacaaaagacacgatgtccactgggctcacgggggcagcgaatgtggccaagggggctgtccagacaggtgtagacacagccaagaccgtgctgaccggcaccaaggacacagtgactactgggctcgtgggggcagtgaatgtcgccaaagggaccgtccagacaggcatggacaccaccaaaactgtcctaaccggtaccaaggacaccatctacagtggggtcaccagtgccgtgaacgtggccaagggggctgtgcaaactgggctgaaaacgacccaaaatatcgcgacaggtacaaagaacacctttggcagtggggtgaccggtgctgtgaatgtggccaaaggggccgtccagacaggtgtagacacagccaagaccgtgctgaccggcaccaaggacacagtcactactgggctcatgggggcagtgaatgtcgccaaagggactgtccagaccagtgtggacaccaccaagactgtcctaactggtaccaaggacaccgtctgcagtggggtgaccggtgctgcgaatgtggccaagggggccgtccagacgggtgtagacacggccaagaccgtgctgaccggtaccaaggacactgtctgcagtggggtcaccggtgctgtgaacgtggccaagggtgctgtgcaaactgggctgaaaacgacccaaaatatcgcaacaggtacaaagaacacccttggcagtggggtgaccggtgctgcgaatgtggccaaaggggccgtccaggggggcctggacactacaaagtctgtcctgactggcactaaagatgctgtgtccactgggctcacaggggctgtgaacttggccaaagggactgtccagaccggcatggacaccaccaagactgtgttaactggtaccaaggatgctgtgtgcagtggggtgaccggtgctgcgaatgtggccaagggggccgtccagacgggtgtagacacggccaagaccgtgctgaccggcaccaaggacacagtcactactgggctcatgggggcagtgaatgtcgccaaagggaccgtccagaccagtgtggacaccaccaagactgtcctaactggtaccaaggacaccgtctgcagtggggtgaccggtgctgcgaatgtggccaagggggccgtccaggggggcctggacactacaaagtctgtcctgactggcactaaagacaccgtatccactgggctcacaggggctgtgaacttggccaaagggactgtccagaccggcgtggacaccagcaagactgtcctgaccggtaccaaggacaccgtctgcagtggagtcactggtgccgtaaatgtggccaaaggcaccgtccagacaggtgtggacacagccaagacggtgctgagtggcgctaaggatgcagtgactactggagtcacgggggcagtgaatgtggccaaaggaaccgtgcagaccggcgtggacgcctccaaggctgtgcttatgggtaccaaggacactgtcttcagtggggttaccggtgccatgagcatggccaaaggggccgtccaggggggcctggacaccaccaagacagtgctgaccggaaccaaagacgcagtgtccgctgggctcatggggtcagggaacgtggcgacaggggccacccacactggcctcagcaccttccagaactggttacctagtacccccgccacctcctggggtggactcaccagttccaggaccacagacaatggtggggagcagactgccctgagcccccaagaggccccgttctctggcatctccacgcccccggatgtgctcagtgtaggcccggagcctgcctgggaagccgcagccactaccaagggccttgcgactgacgtggcgacgttcacccaaggggccgccccaggcagggaggacacggggcttttgaccaccacacacggccccgaagaagccccacgcttggcaatgctgcagaatgagttggaggggctgggggacatcttccaccccatgaatgcggaggagcaagctcagctggctgcctcccagcccgggccaaaggtgctgtcggcggaacaggggagctacttcgttcgtttaggtgacctgggtcccagcttccgccagcgggcatttgaacacgcggtgagccacctgcagcacggccagttccaagccagggacactctggcccagctccaggactgcttcaggctgattgaaaaggcccagcaggctccagaagggcagccacgtctggaccagggctcaggtgccagtgcggaggacgctgctgtccaggaggagcgggatgccggggttctgtccagggtctgcggccttctccggcagctgcacacggcctacagtggcctggtctccagcctccagggcctgcccgccgagctccagcagccagtggggcgggcgcggcacagcctctgtgagctctatggcatcgtggcctcagctggctctgtagaggagctgcccgcagagcggctggtgcagagccgcgagggtgtgcaccaggcttggcaggggttagagcagctgctggagggcctacagcacaatcccccgctcagctggctggtagggcccttcgccttgcccgctggcgggcagtagctgtaggagcctgcaggcccggcgcggggtcgccctgctctgtccagggaggagctgcctcagaactttctccccgcccccaaacctggatcggttccctaaagccctagacctttggggctgcagctggctgagcgccgaggggctgcggaggcagtgaccttcttaactgagccaccccacgccctgctccgggcctgcctgcatctcccacctcctccccagcgctgcctgcccctctcggagcctggggtcactcagaccaccagccaagagccttcccttgaagtccccaagcaagcactgcaattaggaaagagaaaaagcagcgtgcccagcctggaagggcatctgtttgccccgctagcaacccttttatatctagcagggctcttccagtcctgcagcacgggcccccagctatcagcggtgcaggcagtgctgtggcatcccaggctccgggcagctccgttctcatgctgaaagtgggtctccggccttagcacacacaccttgagggtcttaagaaccacattccctcatagtagaaagtactagaaaaagcgacactgccatcatcatcccaaggcaggctgctactgcctttgctgacccccggggtggcctcacggtggggacaaagctgccaggagccacagcagccacagctggggctttgcaccagcctggcttgagactgagcagtttgcagggggtggggggtgcaaaaaacaagcaaacaggctgctgctgcctccagctgcccaccacaggcctgccccaggcacctggggctctgaggcccctggggaggctgggcccagcagctgcccctggagaacacagacaaaggacttccccgcagggaactgtgccctatggagggatcagacagggctgggaacagccacagaggctgcgtgcctatggcacagcccttcctccgccgcacactccccctgggtcctcaggcccacccaagcgccgggctgcagaggaagcggggctggggaggctgcaggcatcagagacactggtggtggcggacccggccgccgggccccgtgctctcaggctagcccaggtcgtggaggctggcaggctcaggtcgggtgtgagacgtgccgtggctgcgctcagtccagcggggaggagccgttcagcccggcctccccaggaagccatatccccactcacccggtaagagaaccttgtcgtcccctttccatgctctcctaggacacgagcccaggaaccccagacccagggggaggaagggtggaggggccccaggggtcaccgtgtgcaccaggggccgtgaggggccggggcattcagctcagctctgaaccggggaagctggcacggcaaggactgcctcaggtgacgggccgtgagaggggacgggtcaggagccttcccaagccttctcctcagcccgacacccatggccatcggaggctaggatgccagacacagccatttgcagaaatcaggcacagtgactgcagctcacgtccagccaaccaagcatggggccgcagctcaggaagtcccttcccgccacaccacagcctaattcttactgggacggaggcaactcggctacgctgggcaggacgacaaacacgagacgccactgtggaatgagcaacttcggagcacggggtgacttgcttgggaccgtgcccacgtgacagccccttatgcagaggaggaaagagaagccccgagtgggaggggaacctgtccaaagtcacacggtgtgtgggtgacacagctggggtgagtcgaggctggcccctgaggcccatgctccctgaacgctggagaccactgtcggctagcagcggctctcagggaaggcctggtctccaccctcccagcctagcctcgcggaccctcgtcctccccacatcggacctgctcacctgcctggaccctgggctgccagatgcaggaagcatcaaaccccccagcctcgtgggtgcggggcagggcgcaggcagcacagcttagatgccctggtttgtccctcttgtctcctgggaagagcttgctcccgcccagctctcctgccactggcctttcagggttgggctgggcccagagtgccttttagtcgcttctcacggtggcctgatggctcaacccagtcccaaacgggcccagtgacactgccgactgcaccccagctcaggcccccactgcaccagcaagatagccgacctaccaaatagattcttccggcgggggggggtggggggggggggtc

SEQ ID NO: 482215 - DNA, 270 bp, Homo sapiens
caagtgtcggatccgcagacgcagcgttcccgattgtttgtcccttacagccattgtatttcgggcttctaggcagagactttgggggattggaacccgcacagagcccgcggggcccttttgcagctgcgattttccgccctacggttttcaacggggggtacttttattggcaatttgctgggagaggattttgcaatttgttggcttcctgatactcgattgagtgaagggttttcattcatacgcggaatagccccaaatgttaca

SEQ ID NO: 482216 - DNA, 1759 bp, Homo sapiens
  misc_feature (458)..(458): n is a, c, g, or t
  misc_feature (512)..(512): n is a, c, g, or t
  misc_feature (1759)..(1759): n is a, c, g, or t
tttttttttttaccaaaacgtattaaaattccccatagtccaaaataaaatgtaaccataaaatggggagataactttagcttcaaagaccaagttaaattttacctttcttgtgcagaactctccaggcttgtagctcacgttaacaagctgtggcccacttgtttgctttaactttttgtgttacaagtgggacaaaaaaaacacaatataaagagcttataaatgtgtgtgtgctccagccattattgaacaactctcttctcttcaaaagacacagaatgaaaagtctcgatgtgaccattgtgtgtgtgggaacaagtgtgtcttattcacatttctcacacagtgaaaattctcttattctcagatgtgtggatctcgtgtgttgtgagatgtgtattgtgatctttacaaaccctatatattgtgcggctctctatagcccccaatataanatgtgtgcgtaaagtgtgcatctctcaacgctccatgtgtgtacaaagaagacncacactcttcttatatctcctctatgacaagcgctgtttacgacaacatttctctcatttatacgccacaatgtggcgcaacagcaggtgcaacgacggaaaacacggtgtgcggagtttactttacatccgactttcttcgacgctttctttagactctacacatcttgtgtgttggcccacaggcgggacaatatatacggcctgattacgacatgacacataaacacacttctacacacatcaccgacaacaaaacgacgacgttgtttacccccgaagaggtgctgacactaatgcatgatgatcgctgccacctgcttcctgttcgtaacaacatactgatcaacttcttctcctggccacgaaagttgctaccgttggaacagctctaatcttactttctcacacccacacgacgcatcaacaccatcattgaaacgcccctgctgtgcttgaagaagaggcagcaatactggggacgcccgcagccagtgggacatatatactcatccacccatctttcctcttataaacaaaccagaacgcgttgtgtcatcccccgctggcatcaaacgctgcggccctaaccagcgccaagctttttcaccaacgataacgatcggacgacgagcaccattctctccacacataaacggtttgtctatcgccgtatacacttctctagtttaccacgccacagaggcaaaaccaccaccaagacacgatcttcctgtctaccacagtacactcaccttaacaccgcccggcgcaacataacatacacgcgctgccacacacagagcaacaaacaacaagtgaacaagtatatctaccccataatggcgaggcgagctaccacacaggactacaacgcgttgatctcacaccaaagcggaaaaagctgacatttgtcgcccaagacgtctgaccaaccgaaacaagcaaatgggtgtgccgacatgtggggagctagacaaccccgacgcgcagtatcatacaacgccactaacaggcatatacactaagaacgtgtagaggagacaaaccaaaacacaacaactatgagcaactcggtcagcacaccatacattcgtaggaacagcaggcagatataccgtcgagcaggtctacagcgagacgcggcacatacgaggagcgtactgatcatggagggagccatctgacatacacataaaagctagccaccaagcagactgcagacagcagccccacacacacacgcn

SEQ ID NO: 482217 - DNA, 2998 bp, Homo sapiens
  misc_feature (2987)..(2987): n is a, c, g, or t
  misc_feature (2989)..(2989): n is a, c, g, or t
cggggccaaagacctggtgtgttccaagatgtccagggccaaggatgccgtgtcctccggggtggccagcgtggtggacgtggctaagggagtggtccagggaggcctggacaccactcggtctgcacttacgggcaccaaggaggcggtgtccagcggggtcacaggggccatggacatggctaagggggccgtccaagggggtctggacacctcgaaggctgtcctcaccggcaccaaggacacggtgtccactgggctcacgggggcagtgaatgtggccaaagggaccgtacaggccggtgtggacaccaccaagactgtgctgaccggcaccaaagacacagtgactactggggtcatgggggcagtgaacttggccaaagggactgtccagactggcgtggaaacctccaaggctgtgctgaccggcaccaaagatgctgtgtccactgggctcacaggggcagtgaatgtggccagaggaagcattcagaccggtgtggacaccagtaagactgtcctaacaggtaccaaggacaccgtctgtagtggggtgaccagtgccatgaatgtggccaaaggaaccatccagaccggcgtggacaccagtaagactgtcctaacaggtaccaaggacaccgtctgtagtggggtgactggtgccatgaatgtggccaaaggaaccatccagaccggcgtggacaccagtaagactgtcctaacaggtaccaaggacaccgtctgtagtggggtgactggtgccatgaatgtggccaaaggaaccatccagaccggcgtggacaccaccaagactgtcctaactggcaccaagaacactgtctgcagtggggtgaccggtgccgtgaacttggccaaagaggccatccaggggggcctggataccaccaagtctatggtcatgggtacgaaagacacgatgtccactgggctcacgggggcagcgaatgtggccaagggggccatgcaaactgggctgaacacaacccaaaatatcgcaacaggtacaaaggacaccgtctgcagtggggtgactggtgccatgaatttggccagaggaaccatccagacaggcgtggacaccaccaagatcgttctaactggtaccaaggacactgtctgcagtggggtcaccggtgctgcgaatgtggccaaaggggccgtccaggggggcctggacactacaaagtctgtcctgactggcactaaagatgctgtgtccactgggctcacaggggctgtgaacgtggccaaagggaccgtccagaccggcgtagacaccaccaagactgtcctaaccggcaccaaggacaccgtctgcagtggggtgaccagtgctgtgaacgtggccaaaggggccgtccaggggggcctggacaccaccaagtctgtggtcataggtacaaaagacacgatgtccactgggctcacgggggcagcgaatgtggccaagggggctgtccagacaggtgtagacacagccaagaccgtgctgaccggcaccaaggacacagtgactactgggctcgtgggggcagtgaatgtcgccaaagggaccgtccagacaggcatggacaccaccaaaactgtcctaaccggtaccaaggacaccatctacagtggggtcaccagtgccgtgaacgtggccaagggggctgtgcaaactgggctgaaaacgacccaaaatatcgcgacaggtacaaagaacacctttggcagtggggtgaccggtgctgtgaatgtggccaaaggggccgtccagacaggtgtagacacagccaagaccgtgctgaccggcaccaaggacacagtcactactgggctcatgggggcagtgaatgtcgccaaagggactgtccagaccagtgtggacaccaccaagactgtcctaactggtaccaaggacaccgtctgcagtggggtgaccggtgctgcgaatgtggccaagggggccgtccagacgggtgtagacacggccaagaccgtgctgaccggtaccaaggacactgtctgcagtggggtcaccggtgctgtgaacgtggccaagggtgctgtgcaaactgggctgaaaacgacccaaaatatcgcaacaggtacaaagaacacccttggcagtggggtgaccggtgctgcgaatgtggccaaaggggccgtccaggggggcctggacactacaaagtctgtcctgactggcactaaagatgctgtgtccactgggctcacaggggctgtgaacttggccaaagggactgtccagaccggcatggacaccaccaagactgtgttaactggtaccaaggatgctgtgtgcagtggggtgaccggtgctgcgaatgtggccaagggggccgtccagacgggtgtagacacggccaagaccgtgctgaccggcaccaaggacacagtcactactgggctcatgggggcagtgaatgtcgccaaagggaccgtccagaccagtgtggacaccaccaagactgtcctaactggtaccaaggacaccgtctgcagtggggtgaccggtgctgcgaatgtggccaagggggccgtccaggggggcctggacactacaaagtctgtcctgactggcactaaagacaccgtatccactgggctcacaggggctgtgaacttggccaaagggactgtccagaccggcgtggacaccagcaagactgtcctgaccggtaccaaggacaccgtctgcagtggagtcactggtgccgtaaatgtggccaaaggcaccgtccagacaggtgtggacacagccaagacggtgctgagtggcgctaaggatgcagtgactactggagtcacgggggcagtgaatgtggcctgatggctcaacccagtcccaaacgggcccagtgacactgccgactgcaccccagctcaggcccccactgcaccagcaatgctagaaaaccaagccaataaaagtgatttcttttttcattaaaaaaacnanttatagtca

SEQ ID NO: 482218 - DNA, 116 bp, Homo sapiens
caactcctgcccagctgagttgcccaacatcaaacgggagatctctgagaccgaggcaaaggcccttttgaaggaacggccagatagctgagcatatcatcattgcaacacgttct

SEQ ID NO: 482219 - DNA, 147 bp, Homo sapiens
cggatacgctacagcgcaggactacttatgcttactatgagtgtggactatgaacagaacgctaaaggttccaatcaaccggagaaacagggtaatgatggtggcacagaaattccaggatgctggtgacagaatctcaagcttagc

SEQ ID NO: 482220 - DNA, 88 bp, Homo sapiens
ggatttgctggtgcagtacaactaggcttaatagggacatgtgctgttttctcagctaagcagccttcttcgacccttgccaaaaaaa

SEQ ID NO: 482221 - DNA, 818 bp, Homo sapiens
tcttcttctcctgtctttttttttttattttatggttagccatgtcgtccttgatcagaagggtgatcagcaccggaaagcccagggcatggaccctacagtcaagctgtataagtcgacgaggaccatttacatttcaggacagataggcatggaccccttcaagtggacagtgtgtgtcaggaggggtagcagaagaagtaaacaagctcttaaaaaccatgggtgaaattctgaaagctgcaggtgtgacttacactaaacgtggtgaaaacaaggtgtcttctggtgacataaatgattcaaatactgtcaatgaaatctacaaacagtatttacacgagtaatttcctgttagagctgttacaagtgggtgtttacccaaaggcagcgaatggaacttgacgcagtagttatcagggaccatgacaaggttcactataaggtgggccagtgtgtgttagtctgaatgtgtaaacatttaacttttaacaattgatgtacatcttaattaacctttaatttcaacaattgtgccgtgtggatttgatgaaaattatctgaggctatatggaatacatgtaatagggcgagttggacctgatattagagaaggatcagtactttttaattaacctggtggcctgttatgattggacaggatacccttatagttttcgtacaagaacatcggtgaagcagtcatctgaaatcgacatatttcacgaggcaatggggggcggaagcagaaaaaggataacggaggacattattttggagcgaaaaaagcgggatggggaatgtgtgaacaagacagg

SEQ ID NO: 482222 - DNA, 501 bp, Homo sapiens
agagtggagcttgacagtacatagaagagtaaatcctcatagaagggccaggcgcagtggctcacgcctgtaatcccagctctttgggaggccgaggcaggtggatcattttaggccaggagctggaaaccaacatggtgaaaccctgtctctactaaaaataaaaaaaagtaccctttccacaaaaaatacaaaaattagctgggcatggtaacgcgcatgtccgtagttccagcttctcagggggctgagctgagaggatctcctgaacccaggagttcaagagcagctgggcaacataacgatatcccgtctctaccaaaaattaaaaattagctgacacaaaaaaattagccaggtgtagtggcatgcaccttatagtttcagctactccagagggtgaagtgtgaggatcactggagcctggaaggttgaggcagcagtgagttatggttgcttcactgcacttcagcctaggtgacagtgagaccctgtctcaaa

SEQ ID NO: 482223 - DNA, 296 bp, Homo sapiens
  misc_feature (86)..(86): n is a, c, g, or t
  misc_feature (162)..(162): n is a, c, g, or t
  misc_feature (233)..(233): n is a, c, g, or t
  misc_feature (283)..(283): n is a, c, g, or t
caaagtgctgggactacaggtgtgtagtccaccacactcggcctatttgttttttttgaggtggagtcttgctctgttgcccaggntggagtgcagtggtgcaatcttggctcactgcagcctctgcctcctgggctcaagcagtgctcctgccttagcctnctgagtagctgggactgcaggtgcttgcccccattcccagctagttttgtatttttagtagagagcgggtntcaccctgttggccaggctggtctcaaactcctgacctcaagtggtccanccattcttcagcc

SEQ ID NO: 482224 - DNA, 306 bp, Homo sapiens
tcgacaaagtaatacaattaaagatgcaaagaaaagcttagtagaataaaaccaaagaggccaggcacggtggctcacgcctgtaatcccagcactttggaaggctgacgtgggcggatcatttgaggtcaggagttcgagaccagactggacaacatggtgaaacctgtctctcctaaaaatacaaaaattagccaggtgtggtggtatgtgcctgtaatcccagctactgggaggctgaggtaggagaatcccttgaaccctgaggcagagtttgcagtgagctgagatcgtaccattgcactc

SEQ ID NO: 482225 - DNA, 212 bp, Homo sapiens
tctttctcctgctctctctcattttattcaggtcttttctcagctcatttcacattgaagaggcttccctgactaccctaactgaaataacacctctcactctctggctatttactttgcattgcctttcaaagataatacacccagcatatgcctaacatataataactgctcaataaatatttgttgaacaaattgatggaaaaaaaaaa

SEQ ID NO: 482226 - DNA, 509 bp, Homo sapiens
caatgtcatgctcagggagctaatatgaatcccaaaggaatattgactgttcaggctcaagttaaattacagcagatcgaaagtgaggagttgagtggcatcttcttttctcttactgtcgaccttgttaaatggggagtccacaccccttgcctactcctccctcctcaaccccgtgacagtgggcctccccccaactgtattgagcatgcactctaaaacagttactttttgagaagtcaagtctggtgacccattctcagcccctcatccctttgatctccttggcagcatcctaccctaaggccttctctatgcttctctggacttctctgctgacccttctcttcctttgaggacagtaacaaggtttttccaactctcgatctcccagtatcccaaagaaataccttctgatttcaaactgaacccatccagatgtcgtgggacctgaagcttgtataactcctgggggaacttcttaaaggaaagcaataaaaacttccaaa

SEQ ID NO: 482227 - DNA, 931 bp, Homo sapiens
gcgagtcggagaacgtgggactgaggcaggccaagtcggggagcctggcattcccagatggtgaggctgggccttcctgctcttcagacctctgacaatgctgtctcgagcttgctgaagtccaacgttctttgaggcacagtgaggatgacgctctagcagtgaggccgtgagagagacgaacgagagaaagaacagatgaggaaatgccaccgggcagggaaggcagggagtgggggtacgcgccatgtgagcgaggcagcagcaaatgacgagagacgcagtgaggcactgaaacacgatcgcaggcgtcgagagaggcaacgactgacatgacaggcaaagagaagatcgcacgatgaatgagtcggcaggaaactcgcggaaatggcacacacgacgagaggcttttggcgttgtgttgatctagaggtaacagagaagggacgagtggggatgggcggccctggattgagccggacgtgtgaaaaggacaaggtaaggaagtatagttaaaggcacaagaacggtccaggggaaaggaaattcatcgttgtgggttggtggggttacttcttgaagggggcttggggagagaaggctttttaagtaagaattggtaccacttaatccgattccactaagaagacaccgaaagcgacctggacgaagattagacgaccttacggggcaactgcggatgcgaacggataggtggcattgagtcggtggccacaatggtttccaacgcaattgggcaattgtgggggcgaatggtccaaaccccgcgggaggggcaccttcaaagcagctttcgttcgcaggaatgccccaattttcgtgggggaaacccatcgtgtcgtaattcataggacggaaacaagcaaaaggaaaatccattggtccgaaacccttgtgacggggaccaaca

SEQ ID NO: 482228 - DNA, 160 bp, Homo sapiens
ggtgggcgctgtgtctattgaggtgcttagcaataaagaaaaggcagtaagaaaaagaataaactatgaatatacaaaataacataggatgatatttaaaaaaacattatgttgagtgatagatattagactccctcaatttggattgcaggtggtcttc

SEQ ID NO: 482229 - DNA, 813 bp, Homo sapiens
tctcaggctctatggcccagtggatgggctgctggtgactggaatgaaggggagctggcctggggtcactgagtgcagattgtgtgctgctacctgttcctgtggactgtgccacatgatcccatcagatggcaccccagacacatgaaatgccatcaccaagtctgtgtgcctctcagcacctggccccccctcctgcccacccctgtggtgcccctgtgcagcgatgtcagatgctggcagatcctggagtacatgtgtgacttggacgctgagtcagcgacatatgtggtgctgcacatcttggttctgaagaccaactgtgtcccggggacttctgctacgtttggtggagcagtacttgtgtagccatggtatggctgaagtcagctgtctcgaaggaaagtgcgcagcctgcaagattgtggtgcacacgccctgcaatcgagcagctggagaagataacatttccgcatgtaagccgtcttccggtgaatcaggctccaggaatgtccagtgaggccaaacctttgtacgggaccaactggcgtacacagaacgacgccaagttgacggcacgtggtcggccacatggtgggcgacggggatttcccagcagaaagggttccaccctatccgacaggcgaaggggacgttttgtgggcgcatcccaggtgctccgttcggtgcaacgcgggggcgttccaaggccacggggtggcccgggttcagtggttgcgaggagggttcatgggagcctgctcgctgggtcctccgccgggtcatccggcgctggactcgtcccgtgcccag

SEQ ID NO: 482230 - DNA, 522 bp, Homo sapiens
ttggtgttgtgagtagatacggggtttgccgtgtggccaggctgatcttgaactccgtgaccctgaggtcacctgagtgatccatctgccttggcctcttaagtgctgggattataggcatgagccaccatgcctggccttggagttgattgtttttgaactgcatgggggcaggaggtgcttctgaccattttttgcttggcaaacatttattccttaactcactaccacaaccattgtcactcactagaaattggataaataattatcttgtttttattaatctttcttaaatgtatgtatagctcagatttattttagtgtttaatattgcaagtgtttgggtctttatttagaagtttcataatgttttggtgaccagaaatacgccagaggagcttaactcttgtttatatcaattagtctgtggcacaattggtttcctcatatgtttttacacttaaagtcagagtttccaagaacctgtcaatactgttaagtgaggacttactgatatgcata

SEQ ID NO: 482231 - DNA, 1088 bp, Homo sapiens
  misc_feature (563)..(563): n is a, c, g, or t
  misc_feature (569)..(570): n is a, c, g, or t
  misc_feature (573)..(573): n is a, c, g, or t
  misc_feature (583)..(583): n is a, c, g, or t
  misc_feature (657)..(657): n is a, c, g, or t
gcagagatgatctgacccggtgggggcagctggaaagcaacactggcccccagctgaagggcccagctgcagccagacagatggtgcttgagaaccgaggcccggtgatcctccagccacagtccagcccaaccactgccactttccatgggacttagaacttcggagttgctgccttgcaattggaggaaggacctggggccccataggcagcagccaattacagcccctttgtagccaggcgttcctatggtcaaagagtggaaatgcaggaacgcccggtgatcctccagccacagtccagcccaaccactgccactttccatgggacttagaacttcggagttgctgccttgcaattggaggaaggacctggggccccataggcagcagccaattacagcccctttgtagccaggcgttcctatggtcaaagagtggaaatgcaggaaccaacctccctttaaaaaaaaaaaatccagaaagcagataaaagtgggaatatggaaaagggcaagatgacccccaccagaggctcttgggcctgaaggtggagtctctgnctccgnnccngttctctatntctcctgtcacagactctgcctgacccctttcctcagtcccttctggtccccttcctcagctcctccggcactngtgcccttcccttccatctcctcctggtatctcagccttcccccggggctgtgggcccagcacacgagccctggcacccagcctggggtggggaggtcccgggccagtcccccaggaactctggaggagctatggggctactggcaaagcatctggccgactggccctgccccgtctgggcctcatcaggctggctgctggtaagggatgggctcactcccagcagctcccgggtcacccagcagggatggggagggtgtggcaccctggagctggaggactctggggaggcaggtctgtaattgggcagccagacaaaagccagttctggagtcacaccacagtaggggctcacagggctctgatccccagtggatggaaccctgttgccgagggtgggcagggtggtctggagtgaccctttgagcagg

SEQ ID NO: 482232 - DNA, 583 bp, Homo sapiens
gataccatagactgtgtcaaaagtcgtccgaattggagaacacccaaggttgccattggtgaagagtcagggcagatgaaccagccttcttggtggcactttataaatacatgaagaaaggtaacccgatagacgataccctatttaggttttaaacagattaacccttggactatgtttcaagctgctccaaaactgggaggatatgaaccatacagcccgccgtcagtggaaacatatttatgatgaattaggcggtaatcctgggagcaccagcgctgccacttgtacccgcagacattatgaaagattaatcctaccatatgaagatttatttaaggagaagaagataagcccctgcctcccatccaacctcgggaacagagaggaccgttcacagggaaatgaggaccaaccaaagtatctgggacccaacgcatcaacatgaatacctcaagccagaaggaaaagatatgcccccaagcccccggatgcagcagaggtttcatcagagcaagaaaaaggacaagagactttaataagccagaaagcatccctgagcctctcccagcagcagacatga

SEQ ID NO: 482233 - DNA, 420 bp, Homo sapiens
aggatccccagctcagaagtcatcaggagcatgaaaggatatgatattggctcaccttgtttccacagctgtccctgcatcctctcatcacagcctacctactggcatactctagttagcttctttcctcttagccagtgatctgccctttatgatccctgatagcacaaggtttcctttctgaggctgccatattgccactgtccaggtcgatgactgataaaggccttcctcagcagtgtctgttcccatcagctttggaagaaggaccagtcagctctgttccctgggaaccatcaaaaaatgctgtttatgttttctgtgtctgtctgtcacctgtggcattggcttctaacacctgtgcaattttcacttctctttcactccctgatatgccattcttgctggggtaccgagctc

SEQ ID NO: 482234 - DNA, 85 bp, Homo sapiens
ttttgaggagcggtgtcactcctcctcccccccagtgctttgtagtctctcctatgtcataataaagctacattttctctgaaaa

SEQ ID NO: 482235 - DNA, 497 bp, Homo sapiens
tacaaaggctttattcatgtgtgatagtgaggaatatgctgagtctataggtccaaaacctaaatggctgtggaaaatgaggatatatgcgttttttagcaaaatattcacgcgttaagtttttggcgcggcttaaaatccaaatgcacttattttattagcgaaagggggaagagggaaaagacaaactattattgttcagggagataggtaatgactgaaattgaaagcctgcctttggagccatgcctccatctaaactgatatttattcaacggtaaccactcacgaattgttggcgtgcctattctcactaacgctttttcaacactggggaaggaagaaagccggacatatcctccaaaagctgcaataaccttctagctgctctatcataaaagaggtggcttgagtcaatctgtctatgacataaaacttaaaatgtgccagccaattcaggagacttctgcatgtttgcacaaatctactctctatga

SEQ ID NO: 482236 - DNA, 189 bp, Homo sapiens
tggcaacatggcaaaaccccttccctacccccctccaaaaaagctgggcatggtggcatgccttgtggtcccagctactcgagaggctgagatgggaggatcacttgagtccaggaggcagaggttgcagtgagccaagatcacaccactgcactgcagcctgggtgacaatgagaccttcaaagaaag

SEQ ID NO: 482237 - DNA, 817 bp, Homo sapiens
aaggcaagcgcaggcctagtaacgagaaggagtagcagccccagcctcaccggcaccttcgccggcgccctcgcccagcccaggaccgtcaaggaaggagcagcgacggtggagaagtgtagagaagatggagttgagtgatcaggacagcagagaacagacatagaagcgaggcacacatacacccgagcgtcgcaacagcctgcgacagacgcaagaccgagagagaacacgactaacgcatcattacattaatagaacaatcacacgcgagggtgacaaggacgcacgccggagaacagaagcagatacgccccgcgagcgccatgatgagcctaggtaagagcacaaaagaaaggcaaaaagtaaacctagaaagaaagagatacaaaaacgttagagaacagacgaaaagagacacatcgatctagacaccaccaccaatgacaacgaaagagcaacaaacaagaacgcgggaaggacacatagacgaaaagaagtagacaatggaaaaaaatagaaacagcagagaagaaataaaacaaaagacaatcgaaaaacagggaacgaattcgaggacagcacgaagaggccagaagagacacaccgcacaagtgcaagaaaagaaccagcacagaaaaccccacatgataccgcgaaaaaatggcacagcgacaagtgcgaagggaaaaaaaacgcgaacagaaaagtgggaacacggtgagaacaaaacgagggacaagaaagacacaagaaaaagagacgagacgcaagaaactacaggtaacatacaggcaaacaaaagcgcataataaac

SEQ ID NO: 482238 - DNA, 130 bp, Homo sapiens
gacccttctttgataggaatgatcgactgtgtatgcgtcgtatttgagtttgctacggcatgaaatagtaactgaggtggacatgttaagcccgtggcgattatgagaatgactgcgccggtgaagcttc

SEQ ID NO: 482239 - DNA, 509 bp, Homo sapiens
tggtccaaaactctctttatttcaagatgatgtttctgtggtatgtgtggtatgtggttaaatctcaatctatggtcacacgaggggatttccttgttgtaagtgtagtctaaaccagtaggaaggaggtttaattgccaaaaccagcgagaactcgggcactgtggatactacagtgggcagctgaacgaggaccaaggagaatgtctaagaggcctccagccctgcgctcagtgacgacaggacaggaacaacagagcatacatcctggaagggtgtgtctgatatactcgctggaaagtctgacaggttttctccctgggaagtgcagcacatccccccaacacactggctctggccagtggtgcccactcccagaatggtggctggttcggtgttgcaacccacaccccaaaccccctgcctcccaaattgctcttcctgggtgaccaggtaggcccccccccaggaggaagttcctgaacaaaatccctcctttggggcaggac

SEQ ID NO: 482240 - DNA, 950 bp, Homo sapiens
gccgatatctgccggacacgcttctcttggagtgaatgtgggctgatgcggaaagggacagtgctactggctgacaacgtgatctgccagtgtgcgccagagttcctagcacacgtggcgctgggaggcaggcttggttctgaggtggagcacactaaccaatcgttcctgtggattcaggggaggttggtcgtgactggcctgagaggaatgagtcatctacaaagggcccaggcatggaaagcatgggccctgactagctgccccggcctctctcatcgtggctctcatctacgccaggctagtgtaacttgtaaggtagccgatgcagtgttgctcacgtgcttgtaaccttacttgggtggcatcccgtggcttgttgtcacttagaattgcaaagagcttaggatcttcagggcactggaggtccttcgctgacccttgtaaccattgccttaagctccgtcttagtagagtagggacatacaatggggattgggtagcatattctttttacacagagagcgttccaaaagttctggttggaccatttcctttggaatcgttagaagcaacgtgtgggcttagagcttgacgtattttgattcctgtagcatttaacgtaagataatcaatagttttgggaaacaaaagagttagtttagagagcccttagggaacacaacttttcggggacgaggtccctaacaaggttggttgtcatgcacattattagaactaaaacacgcaagatatatcattagcagtagacagccccgacagggattgaacccaaagtctggtgggcacatgggacaaatcagagggaggaccagtgagcaggaacctaggaaaaatcaagttgtggcacgaggatcgaagttcggaatgcccgagatacacccgagccacacatggcgccaagaagtcgccaccccacggaaggggaa

SEQ ID NO: 482241 - DNA, 147 bp, Homo sapiens
tggataccccaagagccccacaacgagccacacagaggagcctcaccaagagccacaccatgagccaccccaagcgccacacgaagagccacacaaagagccacaccaagagccccgcgacgagccgcgcgaagagccacacaaagg

SEQ ID NO: 482242 - DNA, 174 bp, Homo sapiens
ggtagaaaggagaaaggcgagttacaagatgccaactccaccattacccctcctatgagaaggctgagagaaagccacaaacattaagaagtgccggtcctgaattaaggagaggtggtgtattgagccttgaaggaggaggaaggctcaagaaaaggggggccacttcttctc

SEQ ID NO: 482243 - DNA, 267 bp, Homo sapiens
  misc_feature (24)..(24): n is a, c, g, or t
agagtgtggtatgcttttcactgntggtatgatcctttagtggcacatggaatgaacgtccccaatgtttgtgcagtagcccaccctttatctgcaggatacgttccaagaccccccagtgaatgcctgaaactgcagatagtactgaatcctatatatactgtgttttttatgatacatacatgcctatgatgaagtttaatttctaaattagacagtaaaagattaacaacaataataataaaatagaacaactttaacaataaa

SEQ ID NO: 482244 - DNA, 249 bp, Homo sapiens
accactgtaacacagttgttctgcttgttagcaagcagagcaataacgctgtgctggatgtcattgtcaatgttttctttcacaaagaagtgtcagtgtcagacaggcaagctggctcacgcctgtagtcccagtcactcgggaggctgacgcaggagaatcgcttgaaactcgaaggaggtggttgcagcaacccgagattgtgctaatgcactctagcccgggcaataacagcaaaactcccgttta

SEQ ID NO: 482245 - DNA, 252 bp, Homo sapiens
ggaggagtaggctgcccggaagagcatcctccgcaaggtggtggaccctgagacggggcgcaccaggcttattaagggagatggcgcggtcctagcggaaatcgtaagcaacgaacgacacaaagagatcaaccagcaagccacccgaggagcactgctggacttacagatgcgcgctgggttgcttccctgcagggcccccgctggccaaggcctgtgaaacgaagctggcggacccagactgggcaggtt

SEQ ID NO: 482246 - DNA, 194 bp, Homo sapiens
ttcaatttctacacgattagaggctattctaataacagttattatcatagcgaaaagtcagtagaaaagatttacacatatgaaaaggggaaaggatagaatgaaccctgttccactggattggaatagaatgtatcagtctgaacttgtggttcctaataaatatagagataggaatatgtgtagaaatagaa

SEQ ID NO: 482247 - DNA, 219 bp, Homo sapiens
agcctggacatcacttttgcgccgatggtcgacatctcccgcgatccgcgctggggccgtacctccgaaggctttggcgaagacacctacctggtctcgcgcatcgctaaggtcatggtcaaggcctaccagggccagagcccggccctgccggacagcatcatggccagcgtcaagcacttcgccctgtatggcgcggtggaaggcggtcgcgactac

SEQ ID NO: 482248 - DNA, 516 bp, Homo sapiens
catactatcgactccgcctggatagttcaccctaggggaacagtctgtaaatgtgaagagtgtggtctagggctacagtcagagtgccgtcttgcagccccatcagctagtccatcctggacaaaaccccatacgaatgtgacatatgtgataaggacttccgtctaccgtatcaggttgttacatatcatcagaacgctccatacgggtacaaggctttagaaatgagaagtgtgttaccaacttttgtctgaatgcacatcttcaagttttgggctagtccatgctggtggtaaaccctgtaaaactactgagagtggaagggggtattgttcacacttggaatctttctaacaaatccatcaagatgataacacagaaccatgaacaggacatagaactcgtatataggggagaactagggctggtggctctcttggtaagatctagtttatataaatgatcacctttcatttcgaatatatccctgaagattgttagcgtggggggtaccga

SEQ ID NO: 482249 - DNA, 228 bp, Homo sapiens
  misc_feature (37)..(37): n is a, c, g, or t
  misc_feature (76)..(76): n is a, c, g, or t
gggatgaggaacgtcactatgtttttgtggttgtgtngtttttgtgaaatggagtctcgctttctctcccaggctngagtgcagtggtgcgatctggctcactgcaacttccaccttccaggttcaagtggttctccttcctcaggagtattatgtttaaacttcttttgttttatcacaatatatatatatcttttttgagatggagtcttgctctggttgcccagg

SEQ ID NO: 482250 - DNA, 734 bp, Homo sapiens
cccacgcgtcgcggacgcgtgggaaaaagttttcagtgaaaaaaaaaaaaaaaaaaaaaaaaaaaaaaaaaaaaaaaaaaaaaaaaaaaaaaaaaaaaaaaaaaaaaaaaaaaaaaaagaaacaaaaaaaaaaaaaaaaaaaaaaaaaaaagaaaaaaaaaaaaaaaaaacaaaaaaaaaagtaagagaggggcggggcggggcgggggcacacatcgcgcggagggggagcacgggaacgaccacggcgcaaagaggaggagaagaaggagagagagcgcacagacgagaggatgagggagagacggacaatgaagaagcagaggcggggcgggagagggcagagaaagagaaagagagaagaagggagaggaaaaagtgggcgagagagggagcatgcagagagcgcgaggacgacaagggcagcgcggagaggggggaggagagcggagagaaaggcagggaggagaagaagagagagaggaacgcacagagggaagaacgagggaggagaaggacagagaaggacggggaggcagcgcgcgaggatctcgagggcggcgcgcgagccgaaaaggacggaggcggcggaagaagaggggggagccgagcgcgaagagaggcgaggcggcacggggacgggaggagcaggagacgcacgaagaggaagagaggacaaaaagaaagaaagagagcggacgagacaaagagagagagacgagaagagggcgggt

SEQ ID NO: 482251 - DNA, 380 bp, Homo sapiens
cttccttttgccccgttaaatgttcccccatctttttaactaaaaaccccggcttaaaaggcagatgcttcctgtccccccctttagtttgttccccaggtgttttttccgcttcccttgtcccgtggaaaaacaagattttctggtttgcccagcccaaaatgttttatttgattattaaaaccttaaggcggttttgaaaaaataactgaaccccaggctgaaggctgttttcctttcaggatttttttttccccccagggctatccttagtcccaaaaagcccctgtttttttttttggggcttttaaggcctgagcccatttccctataaatatttttatttttgcccccccctttaaaataaattttggtgggta

SEQ ID NO: 482252 - DNA, 177 bp, Homo sapiens
aggacactgaggaagacgacttcctcgtggaccaggtgacaccgtgaaggtgctactgatgaacgcgtttaggcatgtctaacatccagcactgtcagaagctgtccagctgggtgctgctgctgaaatacctgggcaatgccaccgcccatcattcttccatgcctgcatgacggg

SEQ ID NO: 482253 - DNA, 172 bp, Homo sapiens
tggtgactctagaggatttcgccgttgtcagtggaagtcccacagaagctacagctgccagcgtattactatagcctccagatctatgccctgattggccccatgtttcatgtggacaatgtgccatcctcttacagtggctgatcccacaagaactaatcaatgatggtct

SEQ ID NO: 482254 - DNA, 878 bp, Homo sapiens
tacaagaattgcaaaaagagaaaaaacttcgtgaaagctgaaaaaaaattcatggaaaatagggttaaaaaattaataaaactgaaaaggaaagtctgtggcaattcaaataagggtatttgtggttattaatcaaaagggaattcgaccccttttacctttagatgctctttcaaaaaaaggctatagtcgctctgcgcaagagctaaaaggagaatatatggagagcgctcgactactaagcttgtggatggggtacccctgaatagcttttgacagacctaggtcctgactgcttggaacatgcaggacttgtatatcgagtttcactttgggagaaagagacgttcaccttctattgagaaatgtaacaaccctcgtacttgtcccattatctgatacaagggacccatcataagcacacaactcactacagatcaaaagaatgcagtgacgggacgccttgagggctgtcacacaacatgctatggatgatggctgtgagtatcccaggtgctggtgacgtgaacagtggcgaaatggtagaacgccctgtattacgacattgcgccccaggtggtaaaggcggcgagggccacacggttggagtacccaaagccatttggtaagatgcattgcggccaccatataattccccaagggtactttgaccaagaaacctcagtggttttgaaccctgcaggacacacttaacgccaaaattacacggcgcaaccattccaacagtccggctccgcattatgggcttttgtggaccgtaaaacacagtgttaaaccacttgtttgtagcaaaaacatcgggtatgtgacaaacaataggcgtagacaaaagaagtgattcacctgccgcagtgaac

SEQ ID NO: 482255 - DNA, 136 bp, Homo sapiens
  misc_feature (75)..(75): n is a, c, g, or t
  misc_feature (96)..(96): n is a, c, g, or t
agaggatccggtatatgcgtctcatatacatacactcctaaagcagctcttctcccctccgtatggctgtggttngataagctgatgactctctcnacctcttcactatcactctcctaagtttcatgttcattac

SEQ ID NO: 482256 - DNA, 304 bp, Homo sapiens
ctgcctatccttcatcccatgtcgggtatgtaggagtatgctaagctagtcgcgtcgctaggtaggatacactctcacctcacaccagcttggaatgaatagatacaattgaaacgagtgaggacaaggcttacgtttcttgagggagagatttggtttatcattgagatgggggctagtgggtgtcgtgtgacgaagacgcaggccggatctcagacgtgtgtgccctggggtaacctctgggactcagaagtgaaagggggctattcctagttttattgctatagccattatgattattaat

SEQ ID NO: 482257 - DNA, 197 bp, Homo sapiens
gctgcctgtctcatatgttctgtggacctaccttgctctgacttccttggtagagagaaaaacaaaacaccgatggagttgtatgtcctataggctgaaaagtttggtgggcatagccttggctctggtgagggctttgtgctgcataacatggtgggagaaactcaacggggaagcagacaggtgcagcgtagaat

SEQ ID NO: 482258 - DNA, 1125 bp, Homo sapiens
gcggaatctccgggaactagaagaccttatcagtcgaggctgtctacactgacatcatccaggcaagctggaccagcgataaccagctgcgggaagtggcattctctgcatagggccggtgtactctccgagaagcaaggatatcgaatgaatattgctcgaagcacccgtgccatgaagtggtgtgatgcgctgtgcaagcagttctcactgggcatctgagcgagcagagttctgaggagcccagccagtacagatgagaactcgacaaagcacagaacttctaggactagacgaggtagagaagcgaagaggttaccaacaatcaggaagacactctaatagccgaccgtcagtccgtccatcgagctctacggatgatggagctaggcaagcatgcgctgtagacggggagatgtgccccctctacagcttgagccgagcaggcgaggcacaaccagagaaagatggtgccagtagatgagaacggggctagtatactccgctaggccgtccaactgagagggccggcggatggggagcaagctagggctagtcaaccccaggggccatgggggtcacgagtagggaggacggtggatcaggccgaaggggccccagtgtaccgtcgcaccattcttgcctaacttgcgaggggactgtctctcgagaaccttggcactcgggtttcccgtaaagcccacgattgttctcaccacaagccttgggtgtgggtgaacatagttgctcattggaagacgacctgggtcttgacatacgaaaggttcataaggaatacatacgaattcccttgaaccccccagggtgaggccgcacccgtttacaggaacgagccactgaggaggatccccagacgagactgtcgaggcggcgcagagaagcgaggggtgccaggaacagcgagggcgcaagggtgcagcgcacgcgagagacggttggccacgggacatagcggtgtaaaaagagggaattggtttgaaacccatcacagaggggggaaatcctctgaaggcctacccgggcgcataatattaaagctataacggctcgggggctaatagaacagaccgggtaggggcaggtggcaaaggcacagcccccagg

SEQ ID NO: 482259 - DNA, 564 bp, Homo sapiens
ctaaggatccgctgatccgcttagcactgtggagcacgttgaacactttcctggtgtgacccagtaacccaggatgggattccagcactaatgaagggctgtgggggtctccaaggcttaatcttaaaaaggttgacccagtagaagatgaagctctccagtacataggtgcacactgccctgaactggtgactttgaacttgcagacttgcttgcaaatcacagatgaaggtctcattactatatgcagagggtgccataagttacaatccctttgtgcctctggctgctccaacatcacagatgccatcctgaatgctctaggtcagaactgcccacggcttagaatattggaagtggcaagatgttctcaattaacagatgtgggctttaccactctagccaggaattgccatgaacttgaaaaagatggacctggaagagtgtgttcagataacagatagcacattaatccaactttctatacactgtcctcgacttcaagtattgagtctgtctcactgtgagctgatcacagatgatggaattcgtcacctgggaatg

SEQ ID NO: 482260 - DNA, 168 bp, Homo sapiens
agtcgtacatcacaggagatctgggtctatgctaaatgtcttcctgataggacgggccggaatttcctctaaactgcagtcaatactgtcaagataatccaacagctcaacctttcccaaaagatagatgttactcattcacaaatggaatccactcatgtgtcactg

SEQ ID NO: 482261 - DNA, 303 bp, Homo sapiens
cgtattcacaacgggtgctactttcccatgtaagaaagttctcttgctgctctggatagacacgtacttgtgcacgctatgcggatttgacggagctgcagagcatgacaggctgagaaacgcatcaatcctgggcctccccccgtcttactgcatggatcacgcattcaaagtgacttcgcaatatgagagcaccctctccaccagcatctgcttcagatcttgattgagcaccaacataaacggggccgccgagagcacaaggctctgataaagcaggacaacctaaatgccttcaacgaa

SEQ ID NO: 482262 - DNA, 147 bp, Homo sapiens
tttaaaaaaaaaaaaaaaaaaatccccggatgttgttttggggcccccccccctaaaaacccccttttttaggtggggtttgttttttgccaaaatttttcccccccttttttgttttgttttaacccataaaaggcctttgtttta

SEQ ID NO: 482263 - DNA, 323 bp, Homo sapiens
tgcctttatctggtcattagaactctttctcataaacgaacttctgaatatgcggaacattaactttgtgatagctgtggtgcgtaatgaacacacagttccaaagaggctctaacgtatgatgaggtcgtgcatctactacttaagccgtattcgcgaggatcctcttactagtcgacctgctgcgccatgccgcttgggcactgggccgctcgtggacaatcgctcgcgactgggagaaccccgggggctttgcaaacctcaagcccctcctcccatcttccaggcccacagcacagactctaactctgcctttggcacca

SEQ ID NO: 482264 - DNA, 394 bp, Homo sapiens
cgagccagttaggccttctaactaagcgaggggattctttggccttttaagggatgcaaatggggctgggaatcttgagggcagccctaggaggatttttttacatccgggattacaccttcttggtaacctgggaagctgccatctgaccagggcctgtggttgtgctggttgaagctgttgccttaattaatgagaaacgggggggtccatactgggccttgctgaggactttgttagcgctgccagttttttccacagccatggttgccttccgaatttccagttcgagggactggaacattcaagccccaattcagagtccagaggaggtcagagggttacacctatgtacctccttaatggacatgctgaaggcctggttaagaaccct

SEQ ID NO: 482265 - DNA, 176 bp, Homo sapiens
  misc_feature (17)..(17): n is a, c, g, or t
  misc_feature (149)..(149): n is a, c, g, or t
tcgagctgttccttatntggttctggtttagggccaaagggagtttgtgttttctgggtgattgatttaggtcccaaggatgctatctggtgtgtgtagtgtggccttttttaagggtggtccgagggtttgtgtttacgaggtggggntggagcttaatgtttcctaaaggtgaa

SEQ ID NO: 482266 - DNA, 547 bp, Homo sapiens
tgaatgctattttttgtagaagcactttcgcagtacaagttgaaagcagcgatccattatcagtgaagagtataaagcggctataacccttttaggaatcacagatgcacggaacatgctatgcaacatgcatgtataccccggctagatctcaggtaataatggccataccagtttaccaggaaggaacatcccaaaggataaaatccgaaccgaacctaattctaccctaaaacttactgcattcaaaaatatagaatgaaaagacaccagcgacacatacgtgtttgatctgtacatgctcatagaccatatgcactaggcaggacgaggagctgctagcgaaaagtacaacagaaacaatgatctcttaccatatgccttcaaataggactatgatccataccagtccaaagacgggctgacgtgctacctgggactcttggctctgctatgaccattgagcatattgtcaacatgcgcctactgtgtcacgacggttagaactcaacattcactcggggtggcctttccttgggctagagcg

SEQ ID NO: 482267 - DNA, 322 bp, Homo sapiens
gcacgagcggcttcctgatgatggtcgttggggtggttgtcatgtgatgggtcccctccaggttactaaagggtgcatgtcccctgcttgaacactgaagggcaggtggtggccatggccatggtccccagctgaggagcaggtgtccctgagacacccaaacttcccagagagtatgtgagaaccaaccaatgacaacagtcccatcgctcttacccggtaagtcaacagtcagacaactagcatgaaagcagtttaccactgcgaggcagctcagatccctcgacctgtcttgtcgccgcccacgactgacctgtgtgta

SEQ ID NO: 482268 - DNA, 202 bp, Homo sapiens
gtgaggtgccgccattttcatctgtcctcattctctgcgcctctcgcagagctttcagcagccggtattgttgggccagagcatccagaggttcacaaccatctgtggtccgtagggcccactatgaggagggccctggagatttgccattttcagtgaaacagtcgtcgttactagctaagatgtgtttgtacttggatct

SEQ ID NO: 482269 - DNA, 419 bp, Homo sapiens
tagtggtcttcttcctgccaacccaggaacagcagcattcagcagttctgtgcttgatccaaatgtggccaattttccccagagcacagtgtattgaaaatcataccaaggaagaaaatggaggggactagtaattgttcatgtttcagaaattacagaactgagagcttgactgcttccttcccttcctggggatttacatgggggaagcagaagtgattggggctgaggacattcacatttcctcacaactggaggcagtcattaaggatttgggcatgtcataggatttgggtgtttttctccccccttagtggcatctccacaggcagcgaaagctgtctaagcaaataggtgaggcagtgcgttagtccattttttgttgcttaaaacaacatacctgacactgagtaatttat

SEQ ID NO: 482270 - DNA, 172 bp, Homo sapiens
ctgtacataagagcaaagcacgaaagatcttgacccaagcttgcgttacacggagcgcccactccccctgggcagaagaaacacaaacaaagtagtcacaagtccactataggcgtggccagaaggagaagaggaggaattagaaggtgacgaggagggagaagacgaggat

SEQ ID NO: 482271 - DNA, 362 bp, Homo sapiens
  misc_feature (36)..(36): n is a, c, g, or t
  misc_feature (103)..(103): n is a, c, g, or t
agctctgaaaatctgaggaccattgtaggaaaggtntgttaagcatctcttaagtgccatgatgagcataacagccggccgtggtggctcacgcctgtaatcncagcactttggaggccaaggtgggaggatgacaaggtcaggggttcaagaccagcctggccaacatgctgaaacctcacctctactaaaaatacaaaaatttagctgggcatggtggcacatgcctgtaatcccagctacttgggaggctgaggcaggagaatcgcttgaacccgggaggcggaggttgcagtgagccaagacagtgccagtgcactccagcctcggtgacagcgcaaggctccgtctcaataattaaa

SEQ ID NO: 482272 - DNA, 1129 bp, Homo sapiens
cctgtttgtcacgccgtcgtgctgtgatttcaagtcgttggtctgttgctggtggggggcccacaaattgctgtcagcagtttgaggggggccccacacccaattggtgcctccgcgtggtcgagtgtctccccgcttttttttgggagaacacatcacactagtggggggcccacccatcccgtcgacacccccccactggctgttaatttccccttggtcgtgcaaggcggcggcggcggtttaccccactcctcctgtagggcctttttactctcccctcgttccactacgtgcacaccactcgtgtgccacgcagcgtggttgttttcgccgaaggaacgaaagacaaccacactctcacaaggggtgtcatttgcgaacctcgctcggtgtgcaacggcaaaacaactccccgcgccacaggttggtttcaagcggtccataaattgggcttctctacaaagtagtgggtgtctttttgaacactggagacccccaaaacatctgtggttttcacgcccccgcgatcacgcagatcacttatatgacacctccgtgacacggctttcatccttctgtatgatgtggggcccgcccttaacaattatagggagatgttgtggaaacacacccgcgggatagaactggatagagtgtcacgcatctttctcacgtgggtaagaccacactctttgtgctcactttccctgttcatataaacccgcgtggggactctcgggtgggcgtaactcctgcgggaggccacacacacatgtgttgaaaggcgctgggagaccaacaggggcaggaagagtgtctagctctgcccatattagaggccacgaacactgcctgccatgggcatcggagacttcttgtcccggaagacgctggaagactttcctttgggcgccatatacaacgagggttatgggttgaggactgcgatctggacctctgggatatttaatagggggaagaaagagcctcggcagggacctggcccgctttgttttataaaatggtaagtaatgtggttgggggaataccctagatttttttttgtatttttatttttatttcctcacatttttttccccaaatagaaaaaaaaatgatatttgta

SEQ ID NO: 482273 - DNA, 270 bp, Homo sapiens
gctgaagcctgctgttaagaatgactaacagcggatatactcggatgtgcccggatcttgacaggtattcacttgtactctcaccagtctaccaaggccgaattcttgtacacggggatgtcgagaatccagtgaggtaagtttctgggtaaacttagacgattgtaatactgaaatgcttactcccagagttgtatccccatgactctctaccctactcatcagtagagatacaaaagctaggtgatgctaggctgtagccccttgttc

SEQ ID NO: 482274 - DNA, 318 bp, Homo sapiens
  misc_feature (46)..(46): n is a, c, g, or t
  misc_feature (96)..(96): n is a, c, g, or t
gcagagggaagagaagtatagaggccgtactgctgtggagcatctncaggaaatcctgtgtggctggacgacagcacaaggcaaaaggggtacgantggtgggaggcatgaggttggaaaggaaatggctaggagatcacagggctttgtaggctattctggagtaaatggcagaaggcaggccacgttttctttgttaattagcttctagctaattcttcacgaaaaaaacacctatgtaccatcatgactatggagtcctcagacttttcaaggcaattttagttttcgtatgttaataaaatactatagtacaac

SEQ ID NO: 482275 - DNA, 190 bp, Homo sapiens
agctcagcttgaatcttttttcaaacacatgttttcattcaatcagcagttttcagtgcatttctggggcctgtcaaatcaggcatcctcatccattcaaccaacatcagtcaacacacttttacacttctcttttctcaattttcaacatctcacacttatcacacttttttttttttttttttttggg

SEQ ID NO: 482276 - DNA, 234 bp, Homo sapiens
  misc_feature (147)..(147): n is a, c, g, or t
  misc_feature (223)..(223): n is a, c, g, or t
gatgggcttcccctaaaggggcattcttattgattgagggagaagaaggttgtttctgataggccgaaggagggagtgggaaggctgagctggattagctggggagtttgattgacaggattagtgagtagttttattagccaagangcaggagggttgagtctggttgtctgagaagcaggagagagtctgattggctgagggttggaggggagttggtggngtctaattgtg

SEQ ID NO: 482277 - DNA, 1037 bp, Homo sapiens
  misc_feature (1)..(1): n is a, c, g, or t
ngtgggtggtgttgagatattgagctgacttgagtactatggatttgttctggttagttcggtgtgtcgggctctcatgtttggtccggcgttccatgtatgccgcagccctttttgcgctagtggtttacgttctactcctgcagactgtttggtgttgtcccgctcccggtttttgcaccgcgcttctagttgccgtgtgtgttcccggcactggaggaggggggtggtgcttctccgggcccgttatgtttcggagagagtttgtcttgctttgccgtgccgggtatccttggttcacaaggttctatgtcccagacgggtgatgtggtggtgctggggcagtcgctttggggggttatcggcttggatggcggagggtgggccgatttgttggtgggtacgtacgtgtttctagcttcattggtgatgtattgtaattgatttattgtgtggacgcaggtgtgcaccactctgtggtcccaacggggactccggtgttcataggttagaccctccttgcccttttgtgcgctctcgtgtgtatgctggggatgctacggtgtcgaatggcgcccgtggcccggaggttgtgttttgttttggtttgttgtttgtttttttgaaggagcgccgaggtgccacgttgtgggtgggcgcagggttttaggggcacgtggggccaatctactgggtcacattgcacaggttcgcctctcccggggttgatccgcccagtttccgtgcgctctgccgttcccaagcacgctggggccacacaggccggccctgcggcccaatggcccggccccatttttttttttttttgtgattttataaagaccgggttcaccaagctagcccggatggtttcgatttcccgacctttgatccacccgcctcagccttccaaaatgctgggattacagggcgtgagcccccgccaccggcccttttttttttttttttttttactaaccacggggtttaatataaatacaacccagcattagaaagaccccaaaactataccagga

SEQ ID NO: 482278 - DNA, 138 bp, Homo sapiens
ttgtgggtcattacgagctagccctccctgagaagcaagctggcattgcagccaccaacaacacacttaaaggtttgtctccactgtgtgtcagcatatgcctttgttacccactttgactgatctataggagtggtg

SEQ ID NO: 482279 - DNA, 560 bp, Homo sapiens
  misc_feature (19)..(19): n is a, c, g, or t
  misc_feature (56)..(56): n is a, c, g, or t
  misc_feature (99)..(99): n is a, c, g, or t
  misc_feature (128)..(128): n is a, c, g, or t
  misc_feature (315)..(315): n is a, c, g, or t
  misc_feature (374)..(374): n is a, c, g, or t
  misc_feature (437)..(437): n is a, c, g, or t
  misc_feature (439)..(439): n is a, c, g, or t
  misc_feature (447)..(447): n is a, c, g, or t
  misc_feature (484)..(487): n is a, c, g, or t
  misc_feature (497)..(497): n is a, c, g, or t
taaaactttccgctgtttntcaagttttcctgaaactctttcttcttcagttccanggggcttttttctgcaagcgcctgcggacccttgctttccagntccatgatccgtgtctggaggtccaacgntccgggagctcgcaatccagtagttgaagcccaagacgatgattgcaagccaccagggcggccagcaacgaggggcggcgaacttcaatgctgcgacgcccgtttcccaaagcccaatcatctcaaaatcagcgctgagaatctcttttcgaaggctccggccgccacttcggggattccggggccnccgcttacgtaggcaagccccgcgtctgcgatccggccggagacgccgggcaccccgcncgccgcgccatgtcggtgaacatggacgagctgcggcaccaggtcatgatcaaccagttcgtngnctggcggntgcgcggccgaccaggcgaagcagttgctgcaggcgnnnnactccttatncgagaccgcgctgagcacgttcttccaagaaaccaacattcccaacagccaccaccaccacca

SEQ ID NO: 482280 - DNA, 422 bp, Homo sapiens
ccaaatactgcatgtttactcttctaagtgtgagctaaacattgagtatgcatggacacaaagaagggaacaatagacacaaggggtagagtgtggaggatcaggatcaaaatactacttctcaggtactatgctcgttacctggattacttgataatctgtacaccaaacaccacaacacacaatttacccatgtaacaaatctgcacatgtgacccctgaacctaagatacaagttggataaaacaaagtgaagaaaaatattttatttttgttttgtaataatgtgctttgaatagtctaggtatttttctgctggcttatggatatatctatatctatctatccatctatgtatctatctatgtatctatctgtctgtctatatttttaaatcgagacagagtgagactccatctcaa

SEQ ID NO: 482281 - DNA, 226 bp, Homo sapiens
gagagcggttgagttcacgggcaatcagtgcttgggagaatccatgattgagcagagtttcaatgcagaacagagatcaaaaatttgatagttgttggtaagccattagagatggtacagcttgatgtttggtcatgatgtgccattcataatgtgcattggttgcttataagcataggtcatcatggcctttttggtctattaaattatgtgttgcacttagatt

SEQ ID NO: 482282 - DNA, 366 bp, Homo sapiens
aaaaatattgggtaggatatgtggtcaaacatgaataagctcataagtggctcacctaagtcaaatggctactcacataacagcaaaaggtgtactggtatcacatatatacattatgcaaactcattgacaaactcaatttcgatgatacgcaatagtagagcacactatcaatctaaaaagacagcgcggccagtcttcatcggaacatgttgtacatgcttcacacctgggcacgcaccttttgcagatgttcacgaagtctaggtggctcgcacctgacatacccgcattgtggcagctttacatgctcgtatcataccgtctctttatcaaaaccatgctcactcacacgcaagcattgtc

SEQ ID NO: 482283 - DNA, 250 bp, Homo sapiens
gtttctgaatgtgttcaggagtctcccaggtgaacaggggctcgtgtccaaaaggtaaggatcagcaccctttcgcagaattcaggagtgcaaagggacctagaggatgctatcgaagttacaggtgggataagcttttttctggtaggactcaatgaaggcataaggaggtgatggccctctaagggctaaattcttggaagcaaaggcccacttttgggaccaaattaagattgccctacaggacaat

SEQ ID NO: 482284 - DNA, 1307 bp, Homo sapiens
tggggttatttcatgggttttaggttatggtttatttcgaatactgaaaaagtccttggggctctggtggggtttccccagcgctcagcggctcttttctcccagcacctcacgtggccgcttcttcccacagccaacatcatatttcaaggaacacgtacttttataaaagtgcattaagtggttgagtttctcacactagcttcgtgcagaaactagaaggagcgtggttgtgcattcgtgctcgtggtgcggattggagatttcctgttaatcgtgacacccagggtctccaacccacacgtgcaaacaagggcctttatctacagcagctcaattcagaaaaccccttttcgcactatagggctaggtccacttttcctttccccgtacattacgctacgcccagattcagccaggtgtggcttacagaacaggatagtcaggaagtgttttataccaacttccaagtcccataatttcatactccttccaaataattttcacaacaacagaaaaaccatatacaaaacaaaaaacagcaaagaacaacacaagaaaaactcaaaatccaaccacaatcacacatatccacaacacaatgaaaaagaacagggacacaacaagaagaacaagaaacaaagaagaaacccacaacacaacggaaataacgagaagcaacgcacacaaaaagaagaacacatgaagaaagaccaggaaaagacacgaccacagcacaacaggcagtaacagcaacaaacaaaagcagcaagaagccagagaaacaaagcgacacagtaagaccagggacaagcgagacaacacagaaagaggccacacagcgacacagaacaaaaaggacacaagaaacggcagagcacccaccacggaccccacccacgaacagcacaaaggaggaaaaaccaagacagacgacacacccgccgcagagcgaaccacacacacgacgggagagcgggaacaaagcaacagaaacaccacaacaaacaggaaaaaacgcggagggaacacgaaaatggatcaacacgagcacaagaggaaaagcagaaagagagagcaacagcacaaaagaagcaaagaaacacgcaaagaaaggagaaccaacggaaaaacaacaagaagacaaagcgacagacggataagacgccaacgacaaagagaaggcgacagctagaaacgggagcagcaacacgcgaggacaaagacaagacaacaaccaaccagcaagcaggaggaccagaccataacaccacagaaagcaggatacagagacacgaggccacaca

SEQ ID NO: 482285 - DNA, 386 bp, Homo sapiens
gtcatcggaaaggttgtttcctgggcaaaaaggaccggcggaagtccctttgtccttgtttgcagatgtcccgagggtataaatagagaaccccatcatctcagcccaaaatctccttaagctgaagagcaactacagcaaagtctcaggatacaaaatcagtgtgcagaaatcacaagcattcctatacaccaataacagacaaacagagaaccaaatcatgagtgaactcccattcacaatagcttcaaagagaataaaattcctgggaatccagcttacaagggatgtgaaggacctcttcaagaactacaaaccactgctcaatgaaataagagaggacacaaatgggaaaatattccatgcccatggataggaagaataat

SEQ ID NO: 482286 - DNA, 567 bp, Homo sapiens
  misc_feature (82)..(82): n is a, c, g, or t
gcaagtttggtagctgaggaaagattgattcggtcttggtaaaagtggaagatggccctaaatcttaaagtctgggaaagcngccattgttgatatagttcctggcaagcccatgtgtgtgagagcctctcagactatccacctttgggtcgttttgctgttcgtaatataaaacaaacagtttcggtgggtgtcatcaaaacagtggacaaaaaggctttgtgagctggcaaggtccccaagtctgcccaaaaagctcaaaagggtaaatgaatattatccctaaaacctgcccccccccttttaatcagtggtggaagaacggtttcaaaactgtttgtttcaattggccctttaagtttaggagtaaaaggctggttaatgataacaatgcctcgttaaaccttcaaaaggaaaggaaaatgttttgtgggcccccttggtttttttttttggggggggcaggtttaaggtattaggttttaaaaacaggactttttaatggaaacaacttggccaaaaatttgtcccagaattttggggccccttaaaaaagtttaatgagga

SEQ ID NO: 482287 - DNA, 478 bp, Homo sapiens
cgagtggaccaacagttccatgcagaaggctgtgtcggtgtcggagcagattccgtctctgatgtacgcgacgtgtaatacttccactgctttggaacttctgcgggctctctggacggcgtgtttctgcattccgtgcgcgttgccctggtgggctcgcacttcttggcctgtcatcaaacgtgtgctgtgccactgcgttgcgcgaatgtgcgcagttcacggtctcgcgtggacgaggtcacgcttcctatggccggccgctataccactcatcttcaaggctctcgtctcctttgcaaaactttttgaaccaccattgcacttgcactgttcgttagcagttcctgggccaaatgcgtcgatgttgcaacgttgtctccactgctttatgacccattctgaactcgaataagaaaattactcacatctgtcttcgtctaacatcatttccatagtctaaaataaacataaacag

SEQ ID NO: 482288 - DNA, 168 bp, Homo sapiens
  misc_feature (150)..(150): n is a, c, g, or t
ctcagacatcccgtctgattctaacgctcacccttccaccgcgctggggaaaagatgtgggaagataaatgaaggggtctagatgtaaatgtcggtggaaaggagagctaccatcactaagggctgaaaacacagttaaatcactttcanaagttaaactagactatt

SEQ ID NO: 482289 - DNA, 91 bp, Homo sapiens
  misc_feature (47)..(47): n is a, c, g, or t
tcaagcttctaacgatgtacggggacatgcagtggctaagccagggntgaacactccagcctggcaacagagcgagactccttctcaaaaa

SEQ ID NO: 482290 - DNA, 470 bp, Homo sapiens
  misc_feature (16)..(16): n is a, c, g, or t
cttaagacaaggtctnactgtcacgcaggctggagttcagtggcgcaatctcggctcactgcaacctccgcctcctgggttccagcgattcttctgcctcagcctcccaagtagttgggattacaggtgcccgccaccacacccggctaatttttgtatttttaattaagatgggatttaaccatgttggccaggctagtctcgaactcctgacctcaagtgatccacccgcctctgcctcccaaagtgctgagattacaggcgtgagccaccgcgcccagcctcaaggtcattttaatttggcaggcagggtttaaaaagaaacaagaaggagaaaaaaagaaagaaactgcccatgagttcccttagtgccctttctagcaggcggttgttccttcctgccttctgctgcctgcgttgggcctcctgttgcctctctattccatttcaagtacaacctgccgtgggta

SEQ ID NO: 482291 - DNA, 603 bp, Homo sapiens
  misc_feature (570)..(570): n is a, c, g, or t
gtgatcacagcagccacctttgcatctgcatttccagccactaaaaggcagagatgctgattctctggacaatccctcttttcctactgggagcagctcaggggaaagaggtttgctatgacaaccttggatgcttttctgatgctgagccctgggcagggacagctatcaggcccctaaaacttctcccttggagccctgagaagatcaacactcgcttcctgctctacaccaatgagaacccaactgctttccagactcttcagctttctgacccatcgaccattgaggcctccaattttcaagttgccaggaagactcggttcatcatccatggcttcatagacaaaggagaggagaactgggtggttgacatgtgcaagaacatgttccaagtggaggaggtgaactgcatctgcgtggactggaagagaggctctcagactacctacacgcaggctgccaacaatgtgcgagtagtgggtgcccaggtggctcagatgattgacatccttgtgagaaacttcaactactctgcttccaaagtccacctcattggccacagcctangagcccacgtggcaggggaagcaggaagtcgga

SEQ ID NO: 482292 - DNA, 256 bp, Homo sapiens
ttcccttccaggggtccccttggggggcctggccgcttttccaccggggctttcccttttcaggaaactttttttttgggcctttttaaccgctttttcccggacccgttttttaaccccccttgaaattctgccttattatttcttactcaaacatgttttgggttggttggaaattttgcagcttgcaccccccttgttttttaccccaaatttcctttgggttttaaaaaagtggtggcaaaaggcctcctca

SEQ ID NO: 482293 - DNA, 185 bp, Homo sapiens
ggggctacgacctgtacagtgcctatcattacacaataccacctatggagacagctgttgttgaaacgggacattcagatagcgctcctttctgggtgttatggaggagtggctccacggtcaggcttggctgcaaaccactttattgatgtaggagctggtgtcatagatgaggattatagagg

SEQ ID NO: 482294 - DNA, 258 bp, Homo sapiens
ctgtccccttattggtgagttggaggtttgtgcagattttatccaagtggaggtttttccatctgtgtagccacgggcatgtctccaggcacaacgccacgtgctagttcccttactggttcctgcagcctgatttccccccaccccaggctgctttctattttacgtggggataaggctctgaccttgggccgggggctctccaggggctcttcccttgctgtctacctaaggcaagctaactcctttcgtcccccg

SEQ ID NO: 482295 - DNA, 1543 bp, Homo sapiens
  misc_feature (1543)..(1543): n is a, c, g, or t
agcagcgattcgttgatgcgggcgcgcggctgctatccaggtagcgtgcagcctgagttgcatacgtagtgtccatgagggagatcagtgttcgatgtagtacctcggtagcgcagtgggtctacatacttgacacagaacaggcgccggcgcgtggagcagaagctgtctgctcgaacgaacttcccgagcatggtggaggtgcatcgtagagtacgactcaaatgttgcggagtcctagtcagaccatcgtatgtccgacaggcaggaacccacgaaatggtcaaagttaacagccacccgtcacccatgcataggcactctagctaccatccaacaaacggattgcgaacttaacaacgcactgcatggacttattggacaaccctttaacccttagagtacccaccacaggccaacaggtgcccgcacacttcaactggccaattactaagctagcaccaacatgttacaaggaattgtccgcgttgactctattacgacacaaggactaataacctaaccatgttacgcccttacacgaagtctgggccctttacctccgcttgagtttactttatgaggggattgcaaacggccctaggctttggcgcatccttaacacgagggacgacgcgaatgcaacccacaccaagggtgccccaaatttggacgcccaccgttaacaccattttaacacgcgcatatatccatattaatatgtagacagccacggactttgtacaggccatacgtctcgcgaaaggcaaagtacccccggcagaactatttgtccgccgttacatcccaagatgacattggcctaggacagaggatgcgacgggagagagctacacagcccatagtgcggcagtgcacacaccgcagttataaggaacatacggtacacacatattcacacagattacatgccttttgtgcagctgtcacagagacacactagcggcatactccagcaaccgctcgttcgtcccgtcattatcccccccagccatcagtgccggacacatcagcgaagcgactcagtccgtcccacaggtcgcacttggtgtggtgtgcaacacgactaataaggccgcagggtatcaccgtacacaacgacggggcaaccgccaccgcacccccgttacagctctctcacacatgaaagtcacctatgcactgccgctgaacgacttatcgttgagcagcacaggcgaccaacgactccaaatagcggctgtcgtacagtcgaagccacacaccccagctacagcacaacgtccgcgcacaacaggggacgaggcgccagccccagcgaagtgcgcaaccaagtgaacaggcgagacaaaaccagagagcgcactccacggacacgaacgaatgggaccaccacgaacacagcaccaggaacatcgcgcccgcacgacaaaagacaagatcggcggcataccccctgtggcacacatctggcaaacactacgacgcgaaaccagacagaaaagcaccaaaaagagtgagacacatcagagctcaacgacan

SEQ ID NO: 482296 - DNA, 95 bp, Homo sapiens
gggttccggggttgggagttgaaaccattccccacctcagggttatatttccccttctccccttccctccccgcccaaagctttgccaggggcgg

SEQ ID NO: 482297 - DNA, 544 bp, Homo sapiens
gctaaaccatggcactggctgtatcggggaagtcgggcctattaaatcatgcaccaaggacacggtattgtgtccttgacaagagaatacatctctcctgtggccggcagcagatgctatataccacaccataaagctaatacacactctcagcctatgaccagagataaactctctcagctttaaacgtaaaacaaacacaccttattcttaaaaaaagcaggtgtcttactatgcttaccaaactagactctaacctccgtgatgagagaagatccccatctctcacttaaaagaatttgacctaactttggtgaccctttcccaagcgcatttatgagaaacgatccagcccaataataagctatctgcacatattttcacgacgcctctccacgggagaaatgactcccatttactattttggtatctggcatgaagcgaccttcattaatactaaccctactcaaagttgttccaatattaaactttaaagtcctttccgcccaaccccttttccagaataactgtaacgcggtttgcc

SEQ ID NO: 482298 - DNA, 1363 bp, Homo sapiens
ccgcggggtctcttcgcaatgatctccctttcgggtgggctgttcaatcatcctcagtacatgctagtgccgttgactgtctctgtttctctgatgctcctttccggggccgtttcgacttgagaaaggtagggggcgtcgtttctcgccgcgtgattatccccaccgcgagacgcctgtcttctagtaatgtggacctccctgtgtgctcccgtcttgttagctcccccggtccccggttgcaacctctcccggttcttcggtgccgcgtgttgctcgcgtgtggtttgcgcgtttttttgtgtggataaagggggggtgctcagctatcggccaagggccacggcccaactaccccctcggggtggggggggtcgttggtgtttcccgtggtgaaatccccctggagttggtagtctgtgtgttgcagagagacactggaggggtcctgggtccccacggagtgtggtcgtgtgtcttatagccgcgggtgtgtcgcagaggtttttgtctcgcaccttggcacgtttccctcctttccctcgcccgcggtgtagggggtgctttgtcggcccctatctcgtcgttcttttgggagaaacattttcccctgcttcctcgtttgtgcgagttttgttttaatagaaaccactctgtctcttcgaacaacattcaacgcgggtgaatttttggtgttgtccaccccctgtgtggcaccacgggtcttctctctctctctggagtgaaacgccctcttgtgttcccccccccgctcggttggggagaggggagtcgcgaatctcccgcgaacgtgggaaccacttggtgtcacactccacggtgatcccgccctcgcacgtgtgtgtcccccacttgagcgtgagttcactgggctgtcttcgcactgtttctgtgtggtgaaatagtggaggagactctgtctcgcgagtagtcctgttgacacaggcgtggttcccccacaggccctcggaaagagaggagagcctctggttggtcttgccacaggcccctcgtggtgtccccggcacacacggcctctgggcctttcccctctcgcctccacaaggcctcagggcttcctccctccctctgttgggtcgggctcacattgtgagccacctaggcctttttaacacgcaccggcctgtggcctgttcataaggcacgataccaccgaccccttgagactcccgggtggggaaggtggcccaggatgcctggaagctgaaatcacagacgcggacagtttttcaggcactttttatttcacccatcgcaattgaagcacacttggtcccaaccaaccttgcaattctttagccccccaagacacaaaaagaaa

SEQ ID NO: 482299 - DNA, 317 bp, Homo sapiens
aattgaaaattcccttattagattaatgaaatttttgctctgcttaaatggaaacgaactggaaatctgaatttttaaatttagatctttaaatccaattatttttaggcaaattttcctttaaaatagaggaaacccatcgattgaagcctttcccaaggagtgcggtgagctttttttattgaaaagagtgaattagtttttgagaagtccatctattgggaaaagtttcaaatgagattatttttttttagtctttttaaaaatccccaaaaggatttaaaaagaagccataaactaaaaagagggttttttga

SEQ ID NO: 482300 - DNA, 386 bp, Homo sapiens
caggaccactcgttctctgctgttacatgggtggctgaagcagaagcccattgtgcacataccagcatattactgagtgttatagggagggcattaagagccctatgactttcagatctatcctcaggagagacacagactgagagttcctgagtcgggataacatcatgaactgcatccttttgcactaccttcaagacaaccttggatcacgggttgctgctctaaaagagatgtacttttgacctgtgtagaactctctgggatacactgttctatttaaccaggtgaggaggttgaatcatacagtaactcacataattgatcatcacattttgatacctgccatggaacatctactactgaaaagaagtgtggtgccacgc

SEQ ID NO: 482301 - DNA, 420 bp, Homo sapiens
cccagtgctcacatgtgtcatctcccctttctgctgcagaaccagcttcagttctgcatggagcagctgcctctgagcctgtgggaggacagcagtggaggcttgaggccagtaggggcacgagcagtgtggagtgccatgctgagtgggcagcaacagcagggtgtggtcattcgcacaggggagaagggccccaccccagctgtcctctcaccgctgccctgggtgcaggcacttcctcctcacaggcagcccagccctgatggtgcgcccagctgtctgcagggactcacgcccttccgtggggttcttgctgcctgagggtcacctccagctccttgggcctcctgggtccggcgctctaagaagaatcatgtgacgagtgttattggctaacagccaccgatgactccctgagtg

SEQ ID NO: 482302 - DNA, 145 bp, Homo sapiens
accacccaggagcttgcaggggcactccccaaactcaatgaatcagaatctacaccttacaactttcccaggtgatgtacaagcaaattaccgttggtaagacaatgccctggaacacttgtttaataaaaatttgttaactgat

SEQ ID NO: 482303 - DNA, 1620 bp, Homo sapiens
  misc_feature (862)..(862): n is a, c, g, or t
  misc_feature (1118)..(1118): n is a, c, g, or t
ccccttgtttgtgtggtgttgttagtagtacatgtcttgtgaggacgcatgataaactagtattgtgctcacgacaaatagagggggggagttagataagaacagaatgtgttgtgttgaaaagagagggtggtggtggtgatagttggagtaaatagattagcggcagcaaggtgtttgtacttcgttcgtcccggtttttggtttgcctaccaccaggtgtggtggtgtgcgaccacacaggagatatgtggggcggccgcccccaactgttgtgtgctcgataactagctcctcccacagaaatagtggtgctgcctgcatagtgatgaagtgctgcccgccggtgcgaatgagtaaggggtgtgcgccccgctatgttgtgataaacaagagagatgatgtggtggttagaaacgacctccccctgcggtgtttgttattgtgtctcccacctctgttgtgagagcctgctggaagtttacttattgtgggcttgctgtctgaagacacacccccgctgtgtgaaagaaacaattttggttgtggtgtgggagagtttattgttgtggacaccccatcctctccggtggtccgccacatctgattatttggttgtcttcaataatgcccccgcccccctcgcccgaaaggtttatttttctgatacgcgccccgcgtttttcgggggaattgatgtctccacgcccaccgtggtaacgcccccccgcggggggtgtaattttgtcccccactctgtctccgtaatagccgccactcgtgatattgggtgttccctctttgtgttgtgtggcgtcgggttgtgttgtaaatagccgcccctccttcccaacataatatnttgttgccgccccacaaaatagtgtggggaagagttgttgtctcctggtgggagaaagagataagaagacaccgcggctcctctggaagtggtctgctatgaaaaaagaaaacacgatatgaccctcaccgtcccccccccccctcttttcttcgtttaagagcccacggggagaagcacacagcagtgtgggggctcttgggtgtttctctgggagagaaaacttctgtgcgcccactccagcacagagaatgtntatagttagaagataaagacacaggggtatataatacgtgttctcatatgcacatgttgtgtagaaatagtgtttttttgttttaataaattgagtgtttgcgcacacacgcacaaatggtgatacgcttttggagatattcacagagatgcacctctgtctctatttccgtgttgtgtcattaatagagacttgtctcggataggtctctctgtgtcactctcaccactctgaagtggagtccacggagatatgtgaggggtggtgaatgtgtccccacacaccccctcggcccgccacaagaggtctaaagtatggagtcttatctcgtaaagttgaaagggaggttttgtccctcaaactccactggagttgtgccaagagatgaactcgctcgcttgggtgttgagttgagctcgtcgatggagttgtggtgtggtgtattctgaaaggctattgaatgccacttaccatgcttaattcaaatctttattcttttaga

SEQ ID NO: 482304 - DNA, 632 bp, Homo sapiens
agatacgaatcgagctcggaccgaatcggcaggcacaggatgactggcgatgtgggctctgttttgggttccatatgaactttaaagtagttttttccaattctgtgaagaaagtcatggtggctgatggggatggcatttaatctatacattaccttgggcagtatggccattttcacgatattgattcttcctatccaatgagcacagaatgttcttccatttgtttgtatcctcttttatttcattgagcagtggtttgtagttctccttgaagaggtccttcacgtcccttgtaagtgggattcctaggtattttattctctttcaagcaatggtgaatgggagttcactcatgatttggctcactgtttgtctgttatgggtgtataagaatgcttgtgatttttgtacatggattttgtatcctgagactttgctgaagttgcttatcagcttaaggagatttggggctgagatgatggggtttcctagatagacaatcatgtcatctgcaaacagggacaatttgacttcctcttttcctaattgaataccctttatttccttctcctgcgtaattgccgtggcagaactccaacactatgttgaataggagggtgagagacgct

SEQ ID NO: 482305 - DNA, 930 bp, Homo sapiens
atgagagattttgtcaccaccaggacctgctctaaaagagctcctgaaggaagcgctactgatgggaaggaacaataccggtaccagtcacgtcctgccaaaatcacgtccataaatgtaaagaccactcaagactaggaatgaacactgcttctctcataacggagcggaatagtatagctagctaacatcatattgacaggatcaaattcactacgataaataacaatattactctttatagatgtaacttggatctacatatgctccaattaaaagaccactggactgtcgtacttggatatacgagtcatgtagccatcagtgtgctgatttcaggaaaagcgcaatctctagagttgcttagaggatcttactaccactaggtctcagagatatacaagggggagtggatggaaatgaatcttgatgggcttaaaaggtataggatgggataaaatcaataaacaaacatgtgtcaagggagttgcacatcctcagctctctgatttagatacgaggacgtttgaaaagtccaaaacaagaagaatctaaaattaagacgccatatgaaggtgcctagttagataaatggtactaggggatctaaatgtgcattcacaagaaagaggctaactatccttaacctatatactgcatccccaagttagcagctgaagcggcaagatggcataaaaagccaccaggtcctgtaggtgaatcttgcaaaagaggacttatgagctcctcacaacaatttagtatatgggtgaagacgtttaaatcactcgcccaactgtcgaaacattatagcaggatcaaagagacaagaaaagtccacacaaggattacccaaggaattgaatgcagggtcacggaaccaagtggacctaaatagatttctacgaaactctctatcgccaattgata

SEQ ID NO: 482306 - DNA, 450 bp, Homo sapiens
catctatgttaaaaaaaaaaaaaatcacaataggagcagactcgggccactccggtcacgtgagaggcaatttcatttcctatcctaaaacaaaccagctcaactagtgaatttttggcataataatggctgaacaaaacacacattacggggctggccgggctaagggcagtcaagcttagcccctctaggggaggacaagggatgagcaatcacaaaagcaggctcagatgggccagaacggttggaaagggagttcttatcccgggggtgggtattacagctgagcacggaaaataatatcacctccggggagctattaaaaactcgggagtgaccaagtgtccctatgagcccagaggggctacacggaacccttctccgcttcttctctcacccggaagggaagaagtgggaaatgccaagttcggagagaggacttaaagcctt

SEQ ID NO: 482307 - DNA, 361 bp, Homo sapiens
caccgccagtatattcccgtgccacgaaaaagataaccgcgactatcttagcgtagccactcacaattaattctctcactgctacgattgatagcatctggagtggtaattgcagctgtgcatgatcggctcgcgcctgtactggcccccctttgtacaggctgaggcaggtggattacctgaggtcaggagttcgagaccagcctgaccaacatggaaaaaccccgtctctactaaaaatacaaaattagccaggcgtggtggcgcatccctgtaatcccagctactcaggaggctgaagcaggagaatcacttgaacccgggaggcagaggttgtggtgagccaagattgtgccattgt

SEQ ID NO: 482308 - DNA, 662 bp, Homo sapiens
  misc_feature (22)..(22): n is a, c, g, or t
  misc_feature (162)..(162): n is a, c, g, or t
  misc_feature (164)..(164): n is a, c, g, or t
  misc_feature (171)..(171): n is a, c, g, or t
  misc_feature (181)..(181): n is a, c, g, or t
  misc_feature (207)..(207): n is a, c, g, or t
  misc_feature (232)..(232): n is a, c, g, or t
  misc_feature (245)..(245): n is a, c, g, or t
  misc_feature (247)..(247): n is a, c, g, or t
  misc_feature (255)..(256): n is a, c, g, or t
  misc_feature (334)..(334): n is a, c, g, or t
  misc_feature (390)..(390): n is a, c, g, or t
  misc_feature (392)..(392): n is a, c, g, or t
  misc_feature (411)..(411): n is a, c, g, or t
  misc_feature (461)..(461): n is a, c, g, or t
  misc_feature (469)..(469): n is a, c, g, or t
  misc_feature (542)..(542): n is a, c, g, or t
  misc_feature (597)..(597): n is a, c, g, or t
  misc_feature (642)..(642): n is a, c, g, or t
cggattcgggtgacaagcaacncccttcccaccactccccactccctcccgaagtacagacaaccgttccgtcgctgctccagttgaaggggtgacaacgattcctgaagcattctgtctgagtctaatggtggctctagccagacacagggaaatgtggcngngctggcngacgggtganccagggccgtgggagccaaggtgggnacccccgcggatgagcggggtggcncacgaaaagaagnanggagaggnnagagcggggccctctgagcgagttgccgaagacttcaggctggaggaaaaagaacagggcttgatagaagtgcaaggnggatccagcaccaactctgccattttcgaagccgagggccggagggaacacggacngncagtttacagctcaggtgngtaggcgagcgtggagggaggcaaaaccggtatggagaaagccagatatncaacacancacttggaaaacaatcaggcatgggaatgctgagtgacaggcaccatgggccacgctgagccccactcgctcntctggctgggggtcatcagagggaggcccaacccaggatctcctgtccatgggcnggggagcagcaacagttaggagcgagggcccagcccacctccccnaggaggtggagggaaggggg

SEQ ID NO: 482309 - DNA, 184 bp, Homo sapiens
ggcaacgtcctcgcaggttatccaataaagctccctaagtcccagacgcccatgggtccatttccacagaggaggcccaaggctactatccacaagccctgtggggccaaggtgcaatgtggaagatgctggagggaaccccctgggcaggctccctgattgctctcccccctggcccccgcgt

SEQ ID NO: 482310 - DNA, 212 bp, Homo sapiens
aggatcctcatgtcagaagataccttgcagctgggcacaccttgtgccctgggcacgacgcgccggacacctgccctggcaaagtaccatcctggccgagaagaagaaagaaggagctgccaaggtgacggacgctcaagccccgaagaagaacacccgcaccctgatcggcctgcgtggtgagcgacaagcgcgccaagaccgtgacggtg

SEQ ID NO: 482311 - DNA, 1220 bp, Homo sapiens
  misc_feature (41)..(41): n is a, c, g, or t
  misc_feature (213)..(213): n is a, c, g, or t
  misc_feature (220)..(220): n is a, c, g, or t
  misc_feature (250)..(250): n is a, c, g, or t
  misc_feature (271)..(271): n is a, c, g, or t
  misc_feature (287)..(287): n is a, c, g, or t
  misc_feature (326)..(326): n is a, c, g, or t
  misc_feature (336)..(336): n is a, c, g, or t
  misc_feature (344)..(344): n is a, c, g, or t
  misc_feature (351)..(351): n is a, c, g, or t
  misc_feature (500)..(500): n is a, c, g, or t
  misc_feature (745)..(745): n is a, c, g, or t
gcaagatggctgtggagctggggtgctgctcgtcggccggncggaaccgggctgggtagagtgatgcggaccctcctgctggtgctgtggctggcgacgcgcggaagcgcgctctactttcacatcggagagacggagaagaagtgctttattgaggagatcccggacgagaccatggtcataggaaactaccggacgcagctgtatgacaangcatgcngtggaggatgtaccagccggccaccccggnggcttggcatgtttgtggagngtgaaggacccagagngacactggtcatcctggcccgtgcagtatggctccgagngcaggttcantttcactncccatanccctggtgagcaccagatctgtcttcattccaattccaccaagttctccctctttgctggaggcatgctgagagttcacctggacatccaggtaggtgaacatgccaatgactatgcagaaaattgctgctaaagacaagttgagtgangttgcagctacgaagtgcgacagctggtggaacaagtggagcagatccagaaagagcagaactaccaggggtggcagagaggagcgcttccggcagaccacgtgagagcaccaaccagcgggtgctgtggtggtccattctgacagaccctcatcctcgtggtcatcggtgtctggcagatgcgggacctcaagagcttctttgaaggccaagaagcttgtgtagctgtcccaggtgtcacaatnccatcctcccaggctgggggagacaaggacctcctggaactgacttcttctgtcaggaggactggtttccagccatacctgtactggacagggagaggggctggaggcatccataggacacaagctgaaggcagcagcattggctaatactgagcaggtagtggggcaaatgcctgccctctctctctggcctctggggccgttgggtagtaatcacccaggggctggtaagagccctcctcttggcacatcagaatcacacgggtactgatcagggatgtgacggtctgatgtagcgagggtgggggggacgggcgaacgtgggctggactagcgagattttgggacaatgctgttgggaaacatacggggttatgagcacgagtcgaggaatgggggcgtcaaaaagcacatagaaacatgggaaacctcatggactctgtttaagcctagactgatgaacaagggactgtga

SEQ ID NO: 482312 - DNA, 424 bp, Homo sapiens
  misc_feature (293)..(293): n is a, c, g, or t
  misc_feature (415)..(415): n is a, c, g, or t
  misc_feature (423)..(423): n is a, c, g, or t
taaagacggagctcgctctgtcacccaggctggagtgcagtggtatgatcttggctcactgtaacctccgcctcccgggttcaagccattctcctgcctcagtctcctgagtagctgggattgcgggtgcgtgccaccatgcctggctaatttttgtgtttttggtagagacagggtttcaccatgttggtcgggctggtctcagactcctgacctcttgatccgcctgccttggcctcccaaagtgatggggattacagatgtgagccaccgtgcctagccaagggatgagnatttttaaagtatgtttcagttctgtgtcatgggttgggaagacagagtagggaaggttatgggaaaaggttcatgggggggaaggcagaggttgatttcatgggctctgtggaattttganggtgaatng

SEQ ID NO: 482313 - DNA, 948 bp, Homo sapiens
  misc_feature (10)..(10): n is a, c, g, or t
  misc_feature (63)..(64): n is a, c, g, or t
  misc_feature (67)..(67): n is a, c, g, or t
  misc_feature (71)..(71): n is a, c, g, or t
  misc_feature (75)..(75): n is a, c, g, or t
  misc_feature (77)..(77): n is a, c, g, or t
  misc_feature (87)..(87): n is a, c, g, or t
  misc_feature (129)..(129): n is a, c, g, or t
  misc_feature (132)..(132): n is a, c, g, or t
  misc_feature (138)..(138): n is a, c, g, or t
  misc_feature (142)..(143): n is a, c, g, or t
  misc_feature (146)..(146): n is a, c, g, or t
  misc_feature (148)..(149): n is a, c, g, or t
  misc_feature (160)..(160): n is a, c, g, or t
  misc_feature (783)..(783): n is a, c, g, or t
  misc_feature (873)..(873): n is a, c, g, or t
gtcttctgangggaaaaaggaaccatcagataaagctgtgaaaaaagatggaagtgcttcagnngcngcanagananagcttaaaanggtggacaagatcgaggaacttgatcaagaaaacgaagcagngtnggaaantggnnttnannatgaggaaaanacagaaccaggtgctgaatcttctgagaacgctgatgatcccaacaaagatacaagtgaaaacgcagatggtcaaagtgatgagaacaaggacgactatacaatcccagatgagtatagaattggaccatatcagcccaatgttcctgttggtatagactatgtgatacctaaaacagggttttactgtaagctgtgttcactcttttatacaaatgaagaagttgcaaagaatactcattgcagcagccttcctcattatcagaaattaaagaaatttctgaataaattggcagaagaacgcagacagaagaaggaaacttaagatgtgcaaggagatttaatgatttcaaagaaaataatggttcttgtttttaatgttaaccttttttaaatacaatactgatagttagaagaaaactattgtactcttttgtattagtggagaaataatagatgtctgttcatgtgttaagtgttatagcaaaaaaaatacacatatggttaagttaatgaatagtttggttatatcagaatggcaacagacagaaagtactttgtagagattgacttcctaaggctacttaagacaacttgcaccactaagaaaaaaatgtagaaccnattgtggaaaaatgaacatctagtagttccaagtttcaaagaaatgtcaacattttattccattcaataaagaacaaaaacaatagtgtngatttactttcatctgaaacattccatgtttaaatctgagctgtgagacttccattggggttgaacccgtaggtg

SEQ ID NO: 482314 - DNA, 306 bp, Homo sapiens
ttttaaaaaccccccccttttttttttaggggaaagggccggtttttttccaagtccccccagggggggggaaaaaattgttttttgggtaattttggaaaggaaaattttttttattttccccccaaaaccttttttttttttttttttttgaaaaaagggcccttggggcccccccttcccccttttttttccccccactttaaaggttaaaagggtttttttttccctggggggggggggggggaaccaggggtttctttttccttttttttggacccgttttataaaaggggccccctttta

SEQ ID NO: 482315 - DNA, 170 bp, Homo sapiens
ccgtcaccagctgactggctatggtcggaagtacagtgtggctgtgtgccaggagtctgagaaatctcatcttcaggattgcccttgggtccaggcgcgggactgcgggcgggtacactgcggatgggtctaagtgacgaggtcttgatctacgcaactggtacggcggg

SEQ ID NO: 482316 - DNA, 513 bp, Homo sapiens
agatccccgttctccctgacaacaaatgctgatgaggatgtggagaaaagaaaactttcactgttggtgaaagtataaattagaacaactactgtggaaaacagtatgtagatttctcaaaaacctaaaaatagaaccaccacatgatccagcaaaccaagtataaccacaggaaaagaaatcagtatatcaaagagatacttgcacttgcatatttatcacagcactattcatgataacaaagatatggaattaacctaagcatccatcagcggacacagggataaagaaaatgtttatgtacacagtggaatactatttggccataaaaaagagtaaaatgttattgctaacaacatggatggaacttgaggtcattatggtaagtgaaataagccaggcacagaaagacaaataccacatgttctcacttatatgtgggaggtgaaaaacttgacctcatggagatagggaatagaataagttatccggggctgtcaggggagaagaggg

SEQ ID NO: 482317 - DNA, 402 bp, Homo sapiens
tttttttctgccctgggacatttttaataacttttagataacaacttcaacaaaaatttacctcccaccaagagaagttgtctttattgtgagaagttgtctttattcccaagaaggggaataacttactctttaagtcagttttattacaggtaaatttgtaccagctttttcctcaacctgggttaaaacctgtttcccaaaggccttcccatttaggattgtggaaataaccaatttcattggggtctggcccccactgaaggcaaaaaactggtttatttaggccccaggcagagcccgcaggggaggcaggtaacttctcggaccaccagattatcttgatcttcagccagctttattgttgttctacattttaataaccgctacatgtttatttta

SEQ ID NO: 482318 - DNA, 264 bp, Homo sapiens
tagcctcggtgcgcaccacttgagacagtgtgcgttgtggagcaacatgtgtgtctggccggtaaatcctgcaataactcagtgcgcagacattgccaggcaaggcctttcatgggagaaatgatccaatgacggggaaaaaatacttcagcccagaagagagatgatcttcatctgttggagctggtatattagaaaataccatagactaagtggcttataaaccatgaatgctcatttcacagttctggaggcagggatgtt

SEQ ID NO: 482319 - DNA, 239 bp, Homo sapiens
cctactccgttggtgctataaacagcattggtaatgccatgtttgcaggacatgttccaaccacagctggctttcacctctgccaaagcaggattatatttgtaaacaaacagaattttatattgggaattatttggacctcctgagatttttcttttctttcttgccaggtataagcccaatgtaagaatcatcatgctcctacattatttgtaaggttgtcattttcctcctccttt

SEQ ID NO: 482320 - DNA, 134 bp, Homo sapiens
gggagctagcatgtctggttttccatcagattcccgtaatcagccactgctgcctttgagagtgcagagggggtggtgtcatctggccactgtcctgccccctgtacatgcctgttcatgctccaatgctctga

SEQ ID NO: 482321 - DNA, 123 bp, Homo sapiens
  misc_feature (3)..(4): n is a, c, g, or t
acnnccaaatataaatccctttacacctaagtacgaaactccccaatttttttagaaaataaataaagggttcccataagtaagttcaaaaaaaacaacttattgccgacctaacggtttttt

SEQ ID NO: 482322 - DNA, 263 bp, Homo sapiens
gcaaatgatacagggcttattcactctggggaaggactataagacatggcacattttcctggtatatacccaaagggctacatttttgagcgttgggcttatttgtgtttccttaagcacacacaaccactgcatgaagcaaaagaggcctctgacaacgtgaaagtcagtgcgcttcctttaaatttttttttccgtaagagccaggataccatttattcttcccgtgtgatttaagatgagacataaagagcatttgggaa

SEQ ID NO: 482323 - DNA, 118 bp, Homo sapiens
  misc_feature (84)..(84): n is a, c, g, or t
tgccagaagtgaggctgcagtgagctatgatgcatactgcactccaacctgggttgaccaggaatgagcaccctgtctcaatgnaaaaaaaaaagaagacaaatgccgcatgattggg

SEQ ID NO: 482324 - DNA, 454 bp, Homo sapiens
  misc_feature (3)..(3): n is a, c, g, or t
  misc_feature (14)..(14): n is a, c, g, or t
  misc_feature (46)..(46): n is a, c, g, or t
  misc_feature (147)..(147): n is a, c, g, or t
  misc_feature (155)..(155): n is a, c, g, or t
  misc_feature (295)..(295): n is a, c, g, or t
  misc_feature (349)..(349): n is a, c, g, or t
  misc_feature (405)..(405): n is a, c, g, or t
  misc_feature (415)..(416): n is a, c, g, or t
tantgggtcatggnccttgggcagattgtaaagagcccccagcagnagcgggtggtggcccagctggggagagcatcccttgcttgggctaggaaagctttaccttctctgagtgcctccgcctgagagattgtgtgaccccgtggnacccaggnacccacgtcttggagtggtccactgtaggccatgcgcttcatccaccccccagtcccctcataggcccctacccttgcccgggagcttctagatagaaatcagaaagagattcaaggagccaaatgagcggtcagccccnaccatgcactccttgccccgtcagagcatccagccagcttcagtcaccagcccnacatggcaccatggttggaacagaaagggtctcatggttgcactgaatgcagctcntcaaactggnnttgtacttgcatgaataaatactgttgttcttgcctta

SEQ ID NO: 482325 - DNA, 200 bp, Homo sapiens
taatagttcacaatgttctaaatttggaaggacttaaaaaaaaaacttgtttaaatttccatcatttacatatagagctagatattacaaaacagatggaaatgatgggtttgttggtatttaaaatgaatacaacttgaatgtaattaaagtgctgtttttttggaagcgataaactttaaatatacttattaaaatga

SEQ ID NO: 482326 - DNA, 100 bp, Homo sapiens
ccagtactaaggcgctgtggttacgggctgtacctcgcattatgatgctgttgaactctgcttcctccggagtactttcagctggcttaaattcaggggt

SEQ ID NO: 482327 - DNA, 987 bp, Homo sapiens
tgagttgtagagccgtctctgccggcggtcaaggtcgtgcctcttgtacaggtgcgtttgaccggaggtcttctccgggacaccatgctgggttggacactcgaggtgcaacatgcgcggtggccacaaacaagttttttttggacgccctcctgcttcctgttggcgcgcagattgttgcccgtccccgttccacgccgttgggtacgggttgctccaccccaaaggtatttggcggcgaaacccctgctccatggtattgtgcaacccctcttgcttggggtgggaatatccaatacaccggaacttgggaataccagtcttgggggggggccctgtgtgccgctccgcgccaacgccctggtggtgttggtgtttctaaccccgggggccccggccccactcgtttaagctcgaaggccaaaccccaatctggccctctttcccaaagctgtcttgggtagtctcgtccgtgctttgtttcctcgcgctccccggtaggtgtcccaaacgggacgaggttcccccatcgggggcgccaaaagggtcccccgcgttagggtcgagctcttgattgggccctggcatgacattggcgccccaaagggcgccccacattgttttaggcaacgctccctggcgccccctaggtcacaacatggggagcaccaatgagctccgtgccgactgcgcacacaccccatcggtgggagaacacttcgcacctggtgccgacagagatgaggcaccaaaataccgacttgcccttgtaactcgaggagaaccgacggggcccgcacgcggtttcctctcttggcacagcccctcccgaagcctcgcgcccaccacgccaggagagacctcggctgcggagtctgaaaacgccaccacactagagacacacctgcggagagacgcaccccccacttaaggggccctcggggaaaaaccaaaacccctcaaatattttttgggtttaacaaaaca

SEQ ID NO: 482328 - DNA, 232 bp, Homo sapiens
caatcctgaataattcactccttcaatctcggcagtcaggctccggtgcacaccactcggcaccgtgcattcctgaagataacatgaacggcctcttagtcaccaccccaccggcctctcctcggtactcatgctggcattcatttctctaaaatctaaacggggccaggcaggggggctcatgccggtaatcccagggcttggggaggtcaaggaggcgggatcacttgag

SEQ ID NO: 482329 - DNA, 110 bp, Homo sapiens
tctctagctcggtaccccagagtcaaacagtgccaatgatctggacactgtctcaaccgtgagctcagtgaaattgtagtatcggtgaagatgccgattacccgcgatgg

SEQ ID NO: 482330 - DNA, 179 bp, Homo sapiens
atccctaaccagagggaaagcctcctgctcccaaaccagccagtcccaagaagaacatttaaactaggagtgccagaagagaacaaaccgaaaagagtgtgagctaactagtttccaagcggagattccgacttcttacaggataagctggattgctggacaactatgtatgcatgtgc

SEQ ID NO: 482331 - DNA, 221 bp, Homo sapiens
agatctcatagcacgatcccccatgagggctcctgttagtcaatgctgagatcatcggagccttcaggcagtgtcctactgaatattcagtgtcagcatcagatccctcatgttttagtactcagagtgctgcgtgtgacatgttccagataccacctaccagagacctctatgttgggtaccgcagcctcgaatttcgctaatcagtcgttcactagcct

SEQ ID NO: 482332 - DNA, 452 bp, Homo sapiens
tttttttttctttcctatttagggctgttcatcccagggcatttaagagctgatttaaggcaaagtatgtaagccagtaatgagcttttggaatgccaccccccactcaggcaagggatcagagaagatgcatgcagggctgtaggagagaggcggagaatgcttgctttgatttcttgtgagcccctctaagccctggcccagcaggcgttcccgcctccaagcaagagccaaatccagctctgagctggggataaggagcccctagattggaacgaatctcttggggcagtctgaagaatttcttgcaatgccagagaatctagcagagataggtgtggaccagagtcctaggggaggtttgttacatggggagatgcattaactcatggctttgcatggctgtgcagcaagatggtatcacagtgaagcaatgcacatgatgctaaaaa

SEQ ID NO: 482333 - DNA, 568 bp, Homo sapiens
tgggtgctgggggagggggactgggaagttcgtgtttaatggggacagagtttcggctcgggaagataaaacatctggaaattgacagttacagttaatatgaatgtatttcatgccaccaagctgtagattcaaaaacagttaagacggtagggtttgttatatatatatacacatattacacaagttaaaaagtaatttttacaacacatacaacatgaccccagcgatgtgaggacacacataaacagacgtgtttgtacgcacagagagacacacacagacatgtggcttaaaattctgaaagaaatgcccggaaggctgacgtggtctttgggtggggagatagcgcagcccagagataagacccctcccccatggcgttgtttccctgctggagacttgctgtgatttccaagttttctaaaaggggcaggcagtcctctcacagtggactgaagttatgaaatgtgcttctttccctgcccgtcccacttggcctttcggcctcactccacacaatggggtcgttcagccgccctgccacgctgccacgcacttgcggccg

SEQ ID NO: 482334 - DNA, 909 bp, Homo sapiens
  misc_feature (31)..(31): n is a, c, g, or t
  misc_feature (72)..(72): n is a, c, g, or t
  misc_feature (74)..(74): n is a, c, g, or t
  misc_feature (112)..(112): n is a, c, g, or t
  misc_feature (132)..(132): n is a, c, g, or t
  misc_feature (139)..(140): n is a, c, g, or t
  misc_feature (143)..(143): n is a, c, g, or t
  misc_feature (145)..(145): n is a, c, g, or t
  misc_feature (147)..(148): n is a, c, g, or t
  misc_feature (150)..(150): n is a, c, g, or t
  misc_feature (167)..(167): n is a, c, g, or t
  misc_feature (226)..(228): n is a, c, g, or t
  misc_feature (230)..(231): n is a, c, g, or t
  misc_feature (258)..(258): n is a, c, g, or t
  misc_feature (265)..(265): n is a, c, g, or t
  misc_feature (288)..(288): n is a, c, g, or t
  misc_feature (292)..(292): n is a, c, g, or t
  misc_feature (295)..(295): n is a, c, g, or t
  misc_feature (352)..(352): n is a, c, g, or t
  misc_feature (391)..(391): n is a, c, g, or t
  misc_feature (408)..(408): n is a, c, g, or t
  misc_feature (410)..(410): n is a, c, g, or t
  misc_feature (437)..(437): n is a, c, g, or t
  misc_feature (497)..(497): n is a, c, g, or t
  misc_feature (600)..(600): n is a, c, g, or t
  misc_feature (621)..(621): n is a, c, g, or t
  misc_feature (844)..(844): n is a, c, g, or t
attctcaccatttgtctcacacccacaaaanccacttcacgggcattaacgatctcccaaaactcatcactntnccccaagtcaaccatgtcaaaccaaaaaaacccttgtncacttgctcagtctaaaggntattaanntcnancnnanaaagcccattactagangtagaaatacaggcaatatactattacggcaacaaccatcaattacagttaagaatatnnnanntaacaaccaaatggataatcaaatatngcaacanctcaagaaaaaaaaaaaaaaaanaaantcnaaagaattcagtgttgctattcagttttctaacttaaaacagcctatgataactggnagcaaagaaggtccttgcaatagactgcctctgcttganaacttatgatgtaattntngcatgctgctaatatactatctaaacnttaaagatactcctaaaatatttgatggtagagctatgattaagacattacactacaaangaaccttatgcagaaggaaatcctaactgacgtgcttctgctttaaatattgtgaaaacattacagcggaatgaattttcgcagtggttaggtcaaatgcagntacatcatagcaacagtatgntttgcacaatttaaggctttggctggttctttagtcagcttcttcctctgattcttcttcttcagcagtttctaaccaggttagccactgattcacctggaacaaagccttgccttttcccggaaactcttgggttatatcttctttccaagccaagaaagcttcttcttcaataatttccatgtcatagaagtgcacaaaaaagcgaagtaacatgcctttngggaagttgctgttatagcagtgcacctggagagcatacagggcactgacctgtagatcacgtga

SEQ ID NO: 482335 - DNA, 1149 bp, Homo sapiens
gatggctgcagacgcagtgtcacccggagtgaaagtctgttactactacgacggtggatgtatggaaattactatatatgtgacaatggccagccaatgaatgcctcacctgaatcctgcatgactcataatttgctgctcaactatggtctctacctgaaaaatggaaatctatcgccctcacaaatgccaatgctgaggagatgaccaagtaccacagcgatgactacattaaacttcttgctgctccatccgtccagataacattgtctggagtacagcaagcagatgcagagattcaacgtaggtgaggactgtccagtcttccgatggcctgttatgagttcttgtcagtatgtctcacttggttggtatcttgtggcaagttgcttgtgaacactgtaatcaacgccagcatgcacggcaccatctgctggtgacatatgggctaggtgggcctagcacccatggcacaagaacgtccctgagtggcatcttggctatctagtatacctgtcaaatgcatatacgtcttgtgcacatacctgtggaacttgctacacgtatacaccgagagtggtgcttgtacaatacgcacatttgatcattcaccattggtgaccggcgttggacgaggccttcatacaccactggaccggggtcatgactgggtcctctccatcacttcatggaagagtaacttcccagtgaactggggaaccttacgggatatcggcggcctgtgcaagggccagtataattgctggtacctaaccgctctgagacggcattgatgacacaatcccatgaggcaattacaaggccggaaccatgtcccaaagaaatggccaatgtcccagcgaagtgcgagggcatacaccagtgtgcgtaaacatcccgatatctgctgccgaaatctggatacaggattgggacaacaccctaaccatattccaacacgagccacgccacacatcgttgcactagacaacgtgcacgtacacggcttaagaccaggcacaatgataggcacctattaaagctaggtgtgtcacaccaacacttggaacggatctgacaggcgcagcgtgcacaacatcaagagaccaaagttgcgccgtggaaaaacgtgactaccacaagatggct

SEQ ID NO: 482336 - DNA, 148 bp, Homo sapiens
tgcagctatagagaagagcaggccggtatcagaggggtagcttgagtaccctctgggactcagaagtgaaagggggctatacctagtatgagtactatagccattatgattattaatgatgattattgataggcagtattgggtgtgc

SEQ ID NO: 482337 - DNA, 115 bp, Homo sapiens
ggtgctctagaggatccggatgaggaacgtcactgatatcttctccactagaatgtaagctccatgaaggcagggtttgcgtatactcactgtggtatccccagtggccgaatca

SEQ ID NO: 482338 - DNA, 101 bp, Homo sapiens
cccgactagccgacaggaggctgataaaattataaacatcacactacagaatactatagtgatttggccgggcacaggggctcatgcctgtaataccagca

SEQ ID NO: 482339 - DNA, 382 bp, Homo sapiens
cagagcaccccccccccccagatggtattcaaaacaaaggccctgatagcctgggtttcccagtttgttcccttttacccaggggatgtcatcctaactgggacccccccaggggtcggggtattcaggaaaccccctgtttttttcaaaaagggggatgaagtccagtgtgagatttaaaaactaggggtcatcatccccaaggtggtgtgatggctcctgcccaggccccccataggatgagggcatttgctccccctcagcctagcccagggaaaggcccagtggcaggggtgggcaggggccacccctccaaacccccttttttcggtaaaagggaaaaggccaaagcttttttcaataaatggggcgggtcaaacca

SEQ ID NO: 482340 - DNA, 531 bp, Homo sapiens
  misc_feature (22)..(22): n is a, c, g, or t
  misc_feature (337)..(337): n is a, c, g, or t
  misc_feature (380)..(380): n is a, c, g, or t
  misc_feature (448)..(448): n is a, c, g, or t
  misc_feature (476)..(476): n is a, c, g, or t
  misc_feature (489)..(489): n is a, c, g, or t
  misc_feature (509)..(509): n is a, c, g, or t
  misc_feature (523)..(523): n is a, c, g, or t
  misc_feature (531)..(531): n is a, c, g, or t
atgaaaaaacattacaggaggnatttagcaatttccagcttaaagaacttgcccaccaacataaccaatttatgaaagtgaatttctattatataaggtatagaacctcttgttagtggcatgataggcaagggacaaagctacaacttggcctgtgcctttggaagctgaggcgaggaggaccatctgagcgcaggagcctgacaccagcctgggcaacatagagaatccgtctcaacaaaaaaaaaattttagccaggtgtactgtgagcggtagttccagcggacaagtgtgggaggattgcttaggcctgggtgattgaggatgctatgagcngtgattgtcccaccacactccagcctgggcaatacagcgagantgtttcaaaaaaaaaaaaaaaaacccaaaaaaactcaagaatgtaatgaatgagacccaatgtgcctnttctagaaaaagttgccaaatatatctnttggatctgctgngcatgttctctgatacatanggcaagcgtgtttntacacccn

SEQ ID NO: 482341 - DNA, 404 bp, Homo sapiens
  misc_feature (13)..(13): n is a, c, g, or t
ccataaaggcctnccctaaaataaaggccccatttcctaaagtaaattagtatcccctaaacaaattttaaagttagctctgccttctcccagtgacattttggtttaaagaatcaaggggaggctgggcgcagtggctcatccctgtaatcccagcactttgcaaggccgaggtgggcagatcacttgaaccccaggagttcaagacaagcctcggcaacatgacaaaacctcatctctacaaaaaatacaaaaattagccaggcccagtggcatgtgcctgtaatcccaactactcaggaggctgaggtgggaggattgtttgaacttgggaggctgaggtaggagtgagcccagatcacgccactgcactcctgcctaggcaaacagagctagaccctgtc

SEQ ID NO: 482342 - DNA, 209 bp, Homo sapiens
actattcagctctcctcatttgaaggacctgcgtttaaggaactctgacccacgcgagatgctatttaaaagagtcccccccccgaggatggcagtgaccaagaatgataccctggtgactatgtagatatgtacactgccatccggaatctacggagaaggcacatgcccagaagccccacacagatgacatgcaagccctgtgaagt

SEQ ID NO: 482343 - DNA, 476 bp, Homo sapiens
  misc_feature (160)..(160): n is a, c, g, or t
cagtactataaggggccttatggtagcgaggcctgggtggcgtgagccgtcggcgtcttctggtgcctgtggagtttcttgtgacatgtggtgcctgctggggctcagtgacggcgcccttagcgacaccatggcccgaaatgcagaaaaggccatgacngccttagcaagatttcgccaggctcagctggaagagggaaaagtgaaggaacgaagaccctttctggcctcagaatgtactgaactgcctaaagctgagaagtggagacgacagatcattggagagatctctaaaaaagtggctcagattcagaatgctggtttaggtgaatttcgaattcgtgacctgaatgatgaaattacaagcttcctaagggagaaaggacactgggaggcccgaataaaggagctgggaggccctcattatggattgccctaaatgctggatcatgaaggaaagagctccacgacaccag

SEQ ID NO: 482344 - DNA, 319 bp, Homo sapiens
  misc_feature (36)..(36): n is a, c, g, or t
  misc_feature (63)..(64): n is a, c, g, or t
  misc_feature (74)..(74): n is a, c, g, or t
  misc_feature (83)..(83): n is a, c, g, or t
  misc_feature (87)..(87): n is a, c, g, or t
  misc_feature (94)..(94): n is a, c, g, or t
  misc_feature (102)..(102): n is a, c, g, or t
  misc_feature (106)..(106): n is a, c, g, or t
  misc_feature (164)..(164): n is a, c, g, or t
cctggccctcctcttcctcgggagaacctgggattnaatctgtgaggtgggaagcctacaacnnggagaactcnggctctgcngagnccctgtncccctttntctncctttacacccaataaaaccctgccttacccttcaaattgtctgcgagcctaatcttncctggcgtgtgacaaggacctccaccgtctttagctgaactaaggaaaagtcccgcaacattttcatgtgtgcctttgtatttttattacatatatggatgtccctaaacaacatacattattgttttgctttatatattaaaaaggcattctgc

SEQ ID NO: 482345 - DNA, 502 bp, Homo sapiens
gaggatcccctatgtctcgatcgttatttctactggctgtgcagaagcagtcattggttaggtcccatgttatttattttcattggcttccggtcattttcctgagccaggaatgaaattaaaaattcctttctttagatttatagcagacaacagtgatttatttatttatttagaaacagagttcactctggtggcccaggctgaagtacaagggcacgatctcggctcactgcaacctccgccttcaaatctaattaaccttctcaaaagccttcctatttaaccattctcttccatcttcagggccacaaccttagtccatgcggccatgatttcttcccgggacaactgcaacacttcctcactgtttcccggtttccactctggccctcctataatggattctctacatggcagtgatgataatatatatacatatttttttggagacggagtcttgctcggtcgcccaggctggagtgcaggggcgcgatctcgg

SEQ ID NO: 482346 - DNA, 268 bp, Homo sapiens
  misc_feature (24)..(24): n is a, c, g, or t
  misc_feature (26)..(26): n is a, c, g, or t
  misc_feature (28)..(28): n is a, c, g, or t
  misc_feature (153)..(153): n is a, c, g, or t
ggaccaccacccggccgcacgggncntntttgtcccccgcccgccgcttctgtccgagagccgcccgcgagggcaatcctgaccgcgagcgtcgggtcccagagccgggcgcggtggggcccgaggctagcatctctcgggagccgcaagtgnatgcctgcaaagatgtaaaagtcaagagaagactctaaaaatagcaaagatgcttttgagccagaatgccttcatcttcagatcacttaatttggttctcatggtgtatatcagc

SEQ ID NO: 482347 - DNA, 497 bp, Homo sapiens
  misc_feature (79)..(79): n is a, c, g, or t
  misc_feature (171)..(171): n is a, c, g, or t
  misc_feature (173)..(173): n is a, c, g, or t
  misc_feature (175)..(175): n is a, c, g, or t
  misc_feature (180)..(180): n is a, c, g, or t
  misc_feature (190)..(190): n is a, c, g, or t
  misc_feature (265)..(265): n is a, c, g, or t
  misc_feature (340)..(340): n is a, c, g, or t
  misc_feature (343)..(343): n is a, c, g, or t
gtaccaatctgaagtgggtcctaaactaggggtcacaaagtcaacttctcctcccgtgctatccaaggtgtcctccggncgtgataggcaggaagtgtggatgcatttcagtgtcctggacaagattctctcgacctttccttttcccataggttgttcacatcaggaccngntntctcnagtctctggnagtcgaagggcaatcaggccacccccaaccagagaagcagcagccagaaggatgggggaccactttggttatccnaacaaaagaagcaaagatggtgttttccaaggaatggcgccaaatttgcaataattccatttgaagaatggccgnagnggttttgctctctgggttgggtggggatacagcttccactggtggatcacatccaggaagcattccaaggctgcaatgcttggtcccacagaacaggcactgccagccgattcattgcagactcactgttgccaaaaaacaggaagaagcagca

SEQ ID NO: 482348 - DNA, 150 bp, Homo sapiens
ggccactgaagatcctggtgtcgccatgggcgccgcccgccagttgttacggattgtaagaacaagccgtacccaaagtctcgcttctgccgaggtgtccctaaagccaagattcgcaattttgacctgggcggaaaaaggcaaaagtga

SEQ ID NO: 482349 - DNA, 883 bp, Homo sapiens
ggcagcacgtgaaattgagcggcatgccatctgcgtgagtgacagggagtgaagaagagtggggattgaagagaaatgagtgcccccacgtgggagagagaagagtgccaagccgctctggaggaagagtaagtgtgctgtgcgtgtgcggcgtgctgcattggcttctgcctgtccctggcccagggcacatatcggccgctacgtgcgcttcttccacgacatcctgcacaccaagtaccgcgcagccaccgacgtctatgccctcatgttcctggctgatgtttgtcgacttcatcatcatcatttttggcttctgggcctttggggtgagccaggccctgggacccaaacccagtgtacgcagatgctcagcagccaccgcaacatcccctgtgcttggctccccctgacctgtgctctcctggccacagaagcactcggctggccacaagacatcacgtcctccctatcagacgagcaggtacccgagggctttcctggtcattgctgctgatccagtttcatgtaccatggtggttgaccgcgcccatctacctggcggcaagaaccgtgctgtgcaaggctggccttccagtgtggcgctggtgctggccatccacctatgggatgttcttcatcctggccgccgtcgactgagaggattgttcaagcagaatgttggtggcccagcatctggtagcttcgtgaagttgcttctactttcggccttgtccggctagcagatccgcttgtgggtacccgacccggattccttcggaacgttcctcaccaagaaagtacaagtcattttcagcctcttccttcttccaggggttacgggctgttagcgttccttgttggacttcgggcagttatggat

SEQ ID NO: 482350 - DNA, 945 bp, Homo sapiens
ccacgcgtccgcggacggccgtgggtcaggctccacttctaattctagttctcttgcagttttcacaacatcagtagttacttcctccactgaaatcttcaacccctcagtcatccatgagggtggaatcaactttttcccaattcctgttaatgctgatattttgacgttcttccatgaatcactaatgttcttaatttcatctagaatggtgattattttctaaaatgttttcaatttacttgcccagattcatcaaagcaatcgctatctatggccgctatagccttataaaatgtatttcttaaataataagacttcaaagtggcattactccttgattatgggctgcacgaatggatgtgtgttagcagccataagaacaacactaatcttgtacatctccatcagaggtctggatgaccaggtgcactgtcaatgagcagtaacatttgagagggatcttttgtctgagcaataggtctcgacaaatgggctcacatattcagtaaaccatgttgtcaacagatgtactgtcatcgggcttgttgcttcattatagagcaataagcagagtagatttagcataattcttaagggccctaggatcgttgacatggtacgtgagtacttggcttcaccttgagcacaggttgccaccaacaccttcacttgtacacacaatgccttatcagcaagtgcagtccagtcagaatgagacacgcctgtatttttaaaaatctcaattctggtaaatgtggcagatttatgaatgcatcgttagctattcatctggttctgcacctagcaaagtctatttagcctagggccactgaatgtacagaattacagaatacattttggcaaaggaggagacaaacacacctcgataaaaaaacaaaacagaaacaacgggagaaaaaagaaacaaagacaagacaacaa

SEQ ID NO: 482351 - DNA, 416 bp, Homo sapiens
  misc_feature (131)..(131): n is a, c, g, or t
ttttaattgtggaatcctgtataatcaaaattgacattttaataaataactgacagcaaggcagattaagaagttgagttaagaagagaataataccattggcaaggagtctaatcagaaagctttacagncctggtgctgtggctcttgcctataatcccaacattttgggaggccaaggtgggacgattgatcgcttcagccccaggagttggagaccagcctgggcaacatagtgagaccctgtttctaccaaaaaattttaattagccagacgtggtggttcacaccagtagtcccagctacttgggaggctgaggcaggaagattgctttagcccagtaagtccaggctgtggtgagccatgatcatgccactgcacttcagcctgggcaacaaagtgaaaccctgtctcc

SEQ ID NO: 482352 - DNA, 236 bp, Homo sapiens
cagccactgcgctctggatccgacgataaattttctcattgaaaatactccttttaagtccatatatggaaatttgaaaactgtgaaacgaataaataattagtcatgcagattatgaacagaaccatatttaaaatagcaaaaacataaagattgcgcatctttttcaagtaaaagagcagcatgatgtataaaacgactatgaatgatgtgcctaaaacctttacatcaacaat

SEQ ID NO: 482353 - DNA, 343 bp, Homo sapiens
ccaccttcctgtacgtgtggcttggtcgcttcgtggctaccgtagaacgtgcttgtggaagacaagtctgctggcttggtgagtctgtgtggccagcagcctctgatctgtgcatggtattaatcgtgtctagggctgaggtgttctgggatttctctagaggctggcgagaaccagttgttttgtcttgcgggtctgtcagggttggaaagtccaagccgtaggacccagtttcctttcttagctgactgtctttggccagacacaccgtgggctgttacttgctttgagttggaagcggtttgcatttacgcctgtaaatgtattcattcttaatttatgt

SEQ ID NO: 482354 - DNA, 1719 bp, Homo sapiens
agcgggcggagcggcgccggagcgggcgtacatggcgcggctacctactaggttagctaccgagggcctagaccctacggaactagcgcctacggcagggcggtagcggggccaagctgggcggctggccgtggccctggtcacctgggcacggggactagggtggacggcaggggtactctatagcaactgtagtagacgctagccgtctatagccacagtcagctgccagtaggccacacacagcacaacgtcaaccccccgtgccagcgagtatcttcacggatcgcaccagagcaagcacaacacgggcacactgggcacacccggcccgtatatcctcagctagcgtgcaatacataaactcgttggcaccattctaactcacaggtgccacaggcccaagatgcacattagttcattccaattataggcaagctagatacgtctcaggctggccaccgcaggagttccgcccgagcgttacatatataccacaggctctttcgcctatggcaaggccaagaacagcaaccacgcttaaacctttagggcgatacactttaagtatgcccagcaacgattaggcggcggactaggatgaccagcgataatgacagaggcatgatgtattatatacaccaggggcaacgacggcctttaccctacatgtagggtggcttaaactcggcgtatacccctatagtgaggaacgccgtcacccgttgggacacatgtacgcgaatcacagaccggaccgacccaaaagcgaacagccgaactggcggggcggagacattaacgcccatttagggcaacggtcggaacgcccgggattacccataggggtgcgcaaagttaacacacacactttcacccggcgtatatatacatcggcgggacactcataccctaacggggtccatttaacctgcgatcgaccatcccctactcgaccaacgcggtcgcgttatcctggagtgaccctcttatgggtccccacactacctgctcgcgacaccgtctagagaggtaggggcgacacactcgagacctttatccgacgagttactcccttaacacggggtgcgattgataccgacacccggggtttcacgggttgaatgattgaactcagcccatttatagggaacaattttacagggatctgcacaacgcatcacccatatacaagactagggacggcacctccgcccatccgcagagacaactcttcacggtgtgggcatagaccccaaacacgacacataccgagacgagggtctgcaatacgttcagatgacgggagaccgcaagatattataacccactaacccgacatcctacacaccagatacaacgtagtcagagtacgcagacccttaccattcgctgcggcaccacacacgtgggactttcccgcccaaagtagagataacgtgcccgcccgcacatgagatgaggagggaggtacacaatacgcaagccgatccacagcccaccctatgtgagtcaacatgcgtcgccgcccacaacattacaccagtattatattacgccacaacaacatcggtgcacaacggggactattcacccggcccacgtggtgacgtcttcatctacacacgctcccagatgatatatggggatcgcgcacctaacatgccatccgctccccgatgtttattgacgcaccgcacgtcctttttgggtcaccga

SEQ ID NO: 482355 - DNA, 169 bp, Homo sapiens
gcgagctggcctaatgtggtggcctgcaagccaggcattccctgggcgccacaagacgagctccgagccaggtcaagggttcggagggccacaaagcttagccttcaggcccagggaacttattttgggcaaaggggcccttacccaaggtttagctaggcccaagacc

SEQ ID NO: 482356 - DNA, 1238 bp, Homo sapiens
gtgatggcgggtccgtgtaggcgcacaatgctgctcggcccttccacgagatggcgtccgttcgcctgtcggggctcgggagagcttgatcgtccacgctgtcatgctcatgtggtcaaggagctgcgactcatggacggacgcgctgctccaagaggccggtccaacggcacctaggcctggctgggaagtaccgctgtgtctgtacactgaggtacacatttagtggcgcgtatgtgttcgcaccaaggtcggggactctgagaagagttcgaagaatgacagtgatggttggatagcggcatggctgatgacccacttagtagacgaaaatgaatgtcgatcggagggtacgtaggcggcacttgttgtgctagagaagtgaagacaatgggtcagacgggctgccaggaatgcatggcacagggaagagatcttcgtcttgcgataatagtcatgtgatgcaatggatagaagcgtggtcagcttgtagagaacgtgggtgagtacaaatctacattaacgaaacgtgggctttgtacccgaagatactgggaaagataatatgagacagggacttgaagggatagggcaaaagcagaagttaccactcgtggggcactcgtggagacttccctcaacagttaaacgcagggaacaggtcacgttggccgagatgttccatgagctggaagctaggctttgggtcgccacaagccccacggattgggccggacgtgggaattccggtcatgtgggcccacgaaccgtgacacgggcctccaacccttggagttggtgagcggaataccaaggcgttgacaagccgcgagaagccattgtggatgaggagcagacagccttgcctggggaccgatggggccacgagttcacggggggcgaccttgtggaaggaacgcctgggtagcggcctgctggaaacactaatgatagctgggcgttcacccgtacgcatgctggaggttgggacaggttgaatacgagcgcgggagagttgcccaagggtaaacaacagggggacacggcaatggtgggggtaaaccgaggaggtcgggttggggcaagaaaaattagagagaaggagtgggggccgagttataggaaccaaggggcaggtccctcggaataagggcagtggcctggtagttgagaacaaatggggatttagatatgggggcaaggctgtcttgtgggagtaaaggggtgggagaaaagag

SEQ ID NO: 482357 - DNA, 569 bp, Homo sapiens
catccgtgaaatagactattggaacacctataagctcgtctgatagattgactagtgcattcatactagacacgttaaagcccaaatatgataagttataaaaagctagtaaaagatgctaattaacactggaataaagtgtgctgaaattgatgttcgtctgtgtgatgtaagtgaggccatccaagaagttatggcagtcctaaacaaattgaaatagatgggaagacatatcacgtgaaaccaatccgtaatctaaatggacattcaatagggcaatatagaatacatgctggaaaaacagtgccgaatagtgaaaggaggggaggcaacaagaatggaggcaggagaagtatatgcactagaaacctttggtagtaccggaaaaggtgtagaacatgatgatatggaatgtacacatatacatgaaaaataatgatgtcggacatgtgccaataaggcttccaaaaacaaaacacttgtaaaatgtcctcaaagaaaactttggaacccttgcattctgccgcagatggctggatcgcatggaagaaagtaaatactagatggct

SEQ ID NO: 482358 - DNA, 141 bp, Homo sapiens
tgtggaaaagcacgttggcggcttttggtcctaagcttgggtcagatgacgagagagagttgtgatgcctcacagggtggggaggcctctctgctcagcgccccctggggaagcccccctttggtggaggacttgctctgt

SEQ ID NO: 482359 - DNA, 248 bp, Homo sapiens
gattcggctattgagtggcatgtcacataaaatctccagaatctgggcctacagttccttatcacaatttccactaactagtggaggtagcaagcagccgacatggccagttgtctccaaaccagtatttggtcttcagtaaacaggtataaacataaaacactgctccacccagccagacttcagcaactactgtgcacagcaggtgaacgactcctaagtcccactgaacaccttccacaggagga

SEQ ID NO: 482360 - DNA, 651 bp, Homo sapiens
  misc_feature (510)..(510): n is a, c, g, or t
  misc_feature (585)..(585): n is a, c, g, or t
gagcagtgtctcacacctctaatcccagcactttgggaggccgaggtggacagataacctgaggtcaggagttcaagaccagcatggccaacatggtgaaaccccgtctctactaaaaatataaaaattagctacgcatgggccgggtgcggtggctcatgcctgtaatcccagcactttgggaggctgaggcgggcagatcatgaggtcaggagatcgagaccatcctggttaacatggtgaaaccccatctctactaaaaatataaaaaattagccaggcatggtggtgggcgcctgtagtcccagctactcgggaggctgaggtaggagaatggcatgaacccgggaggtagagcttgcagtgagctgagatagcaccactgcactccagcctgggtgacagagcgaaactccgtctcaaaaaaaaaaaaattaacttggcgtggtggtgggcgcctgtaatcccagctactcaggaggctgaggcaggagaatcactagaagctgngaggcagaggttgcagtgagctgagattgtgccagtgcccttctgggcaacaagagtgaaactctgtctcaaaanaaacataatataaaataagtgctctttaatatgtcgctgggatttggtcaggccaccaatattttg

SEQ ID NO: 482361 - DNA, 405 bp, Homo sapiens
  misc_feature (2)..(2): n is a, c, g, or t
  misc_feature (62)..(62): n is a, c, g, or t
  misc_feature (77)..(77): n is a, c, g, or t
  misc_feature (100)..(101): n is a, c, g, or t
  misc_feature (135)..(135): n is a, c, g, or t
  misc_feature (137)..(137): n is a, c, g, or t
  misc_feature (149)..(149): n is a, c, g, or t
  misc_feature (200)..(200): n is a, c, g, or t
  misc_feature (271)..(271): n is a, c, g, or t
  misc_feature (338)..(338): n is a, c, g, or t
tntcttttgggaatgaccataaaatagtgctatgctctgaatgcttgtatccctcccaaccncacaattgtgtgcgntgattcctaacatacgataattnntgggtcgagccttgtgaaaaatgactaggtcaananggtaagggcctnatgagtgggattagtacctctaaagaggcccaagagtttcccttgcttctnctaccatgtgaggaaagtgagaaggtgcccccaccagacaccagacctgccagcacttggatcttggactncccgggcttcagaactgtgggaagtaaatttatattgtctataagctatcagcttatggtatttggntatatatagcagcctgaatgggtgaatacaaacagggagagaggaactattgcaatagggtcaggga

SEQ ID NO: 482362 - DNA, 557 bp, Homo sapiens
ggcagtcgcagctccaggtctcgtcttcactgctctatgtcctctgctcctagaggtccagcttctgtggccccggttacctgcaggtattgggagatccacagctaagatcgccaggatctccctggaagcctagaaatgggaccactgacatttagggatgtggccagtagaattctctctggcaggagtggcaagtgcctgaggcacttgcacagctacgacactttgttatacggacatgctgatgtgtcagatacactagcagatagacctggttgcttacctggtgtattgctggtactctaaggtccagatcctgatcacttgtctggagcaacggatacatacgagccctgcaatatgaagagacagtgctgatggtagccaaatcccccaggttggagtgcagtggcgtgatcttgggttactgcaagctctgcccctcgggattcaagtgattctactggctcaggctcccgagtagctgggattataggcgacgtgccatcatgcctggctaatttccggtagtttagtagaagtgagggtttcac

SEQ ID NO: 482363 - DNA, 831 bp, Homo sapiens
  misc_feature (9)..(9): n is a, c, g, or t
  misc_feature (70)..(70): n is a, c, g, or t
  misc_feature (118)..(118): n is a, c, g, or t
  misc_feature (128)..(128): n is a, c, g, or t
  misc_feature (130)..(130): n is a, c, g, or t
  misc_feature (138)..(138): n is a, c, g, or t
  misc_feature (140)..(140): n is a, c, g, or t
  misc_feature (161)..(161): n is a, c, g, or t
  misc_feature (171)..(171): n is a, c, g, or t
  misc_feature (199)..(199): n is a, c, g, or t
  misc_feature (226)..(226): n is a, c, g, or t
  misc_feature (232)..(234): n is a, c, g, or t
  misc_feature (256)..(256): n is a, c, g, or t
  misc_feature (268)..(269): n is a, c, g, or t
  misc_feature (272)..(273): n is a, c, g, or t
  misc_feature (276)..(276): n is a, c, g, or t
  misc_feature (285)..(286): n is a, c, g, or t
  misc_feature (290)..(290): n is a, c, g, or t
  misc_feature (296)..(299): n is a, c, g, or t
  misc_feature (306)..(306): n is a, c, g, or t
  misc_feature (310)..(310): n is a, c, g, or t
  misc_feature (350)..(350): n is a, c, g, or t
  misc_feature (384)..(384): n is a, c, g, or t
  misc_feature (388)..(388): n is a, c, g, or t
  misc_feature (413)..(413): n is a, c, g, or t
  misc_feature (426)..(427): n is a, c, g, or t
  misc_feature (452)..(452): n is a, c, g, or t
  misc_feature (457)..(457): n is a, c, g, or t
  misc_feature (470)..(470): n is a, c, g, or t
  misc_feature (496)..(496): n is a, c, g, or t
  misc_feature (499)..(499): n is a, c, g, or t
  misc_feature (820)..(820): n is a, c, g, or t
ccgcgctcncgctctgatacacaaacttggttgtaaaaataatgcagaaacatatacgtcaatctaagtntctgaaatatggccaactctacctcgccgtatatccaacattaaaaanaaaaaaaaangntgtttaanantagaactcattcccggtttcnaccaaattanttccctaattcttaaatcctcaaataantccttaatctccaaagtctcggttgtnggaaannnattaatttgtgcagtccaacanttacatactttnntgnnggngggggaatnntgtncctttnnnnttaatgngggnagcggccaggtccttctgggttcccgtataattgcttagnacttaacatttagttttcatagttcttggtttanagangggtccgacagttagatacttttanttcctcctctttnntcctgggcgctgtcctccttttttnttgcnacccaagctaggnggcccagaattcatcttgcctcccangcnccctttcctcttccctccctggctgggcgggccccctttcctcttgcccccaggcccctgccggcctccctttctcttgcccttctggctcattttcctcctcttggcgggctcctcctggtcctcctccctcatctgcttattggtggccctagtcacatccagctgaggcttcttgctgttcatgacacgaagcagctccaactggttctttttctcggctgcaaagtccccgaaaaggggttgaaacttccttttcttgccggagccccggggcaccttcctccttgggggaggcgctcctgaaagcgccccacagangcggtggagac

SEQ ID NO: 482364 - DNA, 327 bp, Homo sapiens
  misc_feature (27)..(27): n is a, c, g, or t
  misc_feature (41)..(42): n is a, c, g, or t
  misc_feature (45)..(45): n is a, c, g, or t
  misc_feature (47)..(48): n is a, c, g, or t
  misc_feature (57)..(57): n is a, c, g, or t
  misc_feature (59)..(59): n is a, c, g, or t
  misc_feature (77)..(77): n is a, c, g, or t
  misc_feature (86)..(86): n is a, c, g, or t
  misc_feature (89)..(89): n is a, c, g, or t
  misc_feature (159)..(159): n is a, c, g, or t
  misc_feature (174)..(174): n is a, c, g, or t
  misc_feature (179)..(179): n is a, c, g, or t
agccatgactcctttttggcgcccccnccaactgcaaaatnngtncnnggcattaancncttttttctttggcaatncggtttttnttnaggggccccatgaatgctttcttctcctccatggccgggaagcggccatggccaaactgggggggggggncaatgaacttaaggncaatnttctccagagcccgccgtttcgtttgcaccagcaaggacttgcggggggggaccacccgcttttgggttcccaccacacagcctttcagcatgacaaagtcatgtggcacttcaccataggggacaaagccacccagagggttgatgc

SEQ ID NO: 482365 - DNA, 1230 bp, Homo sapiens
  misc_feature (1230)..(1230): n is a, c, g, or t
tggtaaagctctgccataaacttctagcgggtcaaggtatggaaccgggctaacggcaagctggaaagaccaaccactattgggccacacagggctatctggaacacggggactggtgctctccagatgggatccctctggtggcttctgggaggcaaggatgggccaggccatggttatgggagatctcaacagaaggcaaacaccttttacacgctaaagtgggtggggacattcattcaacgcccgtgtgtgccttcagccctataaccgcttacgtggcgtggtgtgtgcgtgccacaggccccagcattcaagactcgtgggattttagagggaaagaatcagtgggtaaagtgaacgtgaagcaagaaagtttatcagtaccagcagcaagggcagaaaccaccccagggacacctcccgggccggggtcgtgcgtgagtggccagaactcgggttgggcgggctacagggacaaccggggtgcgagtgtggtggcagggtgaccattgggcacacgctagaaagtttagtggcagagctttacaaattaaaaaaaaaaggggcaaaaaaaaaaaaaaaaaaaaaaaacaatgacacaaaaaaaaaacaacagcggggggggcgacacaaaaataaccccgagaggggaccacatatatagcagacaccaacgtatttgtagacacaacgagagcccaaaaaaggcgcgcaaataaaagcaacgaaaagagcgcagggtaacacccccgcgcgccgcgcagacacacaccgacagccagacgagaaccacagcgaagacagcaacgccaccacgcgcgggcagcacaccatctgcggacacaccacacccaacaaacgaataaacacgcaccagggagacaaaaaaacacgccagcgactgctaacgggcgtcaccaccacgcgcataagccgccgaccacaacaaaaatctaggccaccgcacgaggcagacaaacaggaacaaataaaggggggaagccgaggacaacaacacaagagacccacacacacaccaacccaccgcagacaaccacaccagcgaagagccaaccgacagacgacgcacgacaggcccaagcacacaagacaacaaacacaacccagacagagcccacaatacccagccaaccagcaccacgacgaaacacaacaagcacaacgagaacgccgagacacgcaacacaacgcaaccccaagccgtan

SEQ ID NO: 482366 - DNA, 130 bp, Homo sapiens
cctgaagctgttaatgtgcataaaatgaattctaattgattcaatgaggctctatagtgaataagaatcactcttctaagtttttccccgttatttgttaaaagtgtggtactctcttgcgagaacgttt

SEQ ID NO: 482367 - DNA, 329 bp, Homo sapiens
taccctgatctggccacgcccctgctccagcaatcgccggacctgcatcgatggaagcaaaacagcggacgcagattgatatctccctcaatgcactcaccggtagtgagatgagcgccggggaaaccatctttgaatatcccaattgtcattcccttacttgcgaatgcataagaatgtagagcgtaaagaatcaatacctcgcaatcatgtaggagatttttcttttctttgacaggtacttcccgttcgcggttaagcatcttgtagttaatcggaggaataggaaaagtacgccatgcgccactaccggcgaacgatcagacaag

SEQ ID NO: 482368 - DNA, 290 bp, Homo sapiens
  misc_feature (226)..(226): n is a, c, g, or t
agctgaggttcttggggtggcgtcgcgttggctcgggctcccgtcttcatgtcagtccctgtgggtttgtccctgttggtctgtggtccgtctcctcttcttcgctcgagcccggtcatggcctgacggcccaagtctaatccagcatgacctcatctctgtcatcattccaaataaggtcacattcaggggtttcaggtggacatgaatttcgggggaacacaanctcaaccccctgtttaaaaccccccctttttccccctcccccgtaacagatggttctctgggat

SEQ ID NO: 482369 - DNA, 147 bp, Homo sapiens
catcatacttgagctcctccctacacagttacaacctactctactgactgtcaagcgctgttgctacacagaggctctcctgtgtgctggggggaagggggcagctggaaaagtacttggcagaaagccaaagggggtcccgcggtt

SEQ ID NO: 482370 - DNA, 320 bp, Homo sapiens
tgggctagaccagtttactcccttcaccccggctatcgggggctttttcttaacttttcccccccttccgtctatgttttatgatgagacttctggaaagaaaaccattttccgtttgaacacccggaaaggtttgtggtcacctcatgcttcctctaatgcctgtttaaaacattaatcattaatcctgaagcaaaaaaaaattgagcgcgcctggggatcccaagaaaccggttgtgaaggtccagcccgctattgacctctcacttgcctcctgctgtgaagacagttttttaattaaacaggatttgctcgttaaa

SEQ ID NO: 482371 - DNA, 1371 bp, Homo sapiens
  misc_feature (1350)..(1350): n is a, c, g, or t
  misc_feature (1371)..(1371): n is a, c, g, or t
gacgaagggtaatatagtgccaagagtggtggtctccaagaaggggttcatatgatgtcttgatcctatagtgtcgtaacgcactatactggagacttgcctgaaatcagccctctttctccgtgatctcaggctgggagaacgtcgagtggcacgtgagctggttgtgcgcgaggggagcgatcggacatggtcatggtgagcgtggcacatccgcgagaggcaccgagtgtgtagtcaaaagcgcgtgcgttggtcattgcgagggatcggcgctgcgagatgctcaacgcctgacataagccacgaggaacgctcgaacatggtggagaccccttggtaaccacgtgtaggacaggttgttcgaagggacgaaggagtatgtgctaattggtcgtagggtcttagaatgccgacgaacttgcgcgtactctcgctccaattcgactaggcgcgaatcgtacaactcagaacgcaacgttgcgggagaagcataggttgggacacgcaacccacatgatgcaacacgctgagacctttagtgatccacgttccacatgggggcacgaaaccaggacaccatatgggtaggccctccatatacacagttaggcgtactgaggatctctttcgcgtttgccctgcaagggaccagtgagggcagtgcgtggaagtggaattacaccgtgagttagccatgggggtacaagggcccaagccgctcgactctgtcgttacccggaagaataacgcgtggcaccaccttacaatgggcagggaactggggggcaaagaagtccccgacagcaaaagccacgccacggcagagaaatgactgggcgggacagctaggtacaagggcgcgaaacacactcagcaccagcaaggaggagaccaccagagagagggaggcaccggcgtgagaacacggccacccaataactgggagaccggcgcaagacaataattcacgtcggcacgcggagtaacacacactacacgacggaggaaccgccccggcaaagcgggggcccacaacgacgcgaggaacagcgcaagggctacagataccatccagagagaagaaccggggaacagacgataggcacatggcgcgacggaagacgacaccactatcaacttaggccgctgaccggactaggggcagagcaaagggcaacatcgcaccatggagcacggcgagcaggatgatcacaaatgtcagacaaccgggccagaaccactacggcagcattgggacgagagcgcaccacacgaaggagtacgcacctaacgggccacgtagcaccacaggtggagcagccctagagacagaaacaagatcacgangcagcacgaccagacgagcgn

SEQ ID NO: 482372 - DNA, 1652 bp, Homo sapiens
  misc_feature (215)..(215): n is a, c, g, or t
cgacgttgttctggcattcccgtagtcatatcttacagggaaattatatcacaatgtcccgtgacccccattagatgtcctgcgacatgaagcgagcgacgcgatgtcctcaatgtcctcgttagtcgagcgacgaacccacttagtgtggcaccaaactcttggacattgccagtatggaacaggtacgatcgtaataagagaggaatagatangtgattggctatacatactatcagtaaagtctccacagacggatcctaggagaccaaagcattcttgctgggtcatgctccgatgctaactctgcttggccacttcgcaagacgcgctgcatgacttgtcatgctgttcatagtccgtctcgaggaattacatgaccgatcagggcgtgttgcgtgaagagtgttgtgctgacatgccacactgtggtagacccactacctgaatgtcgacgtgagcctagtcgtgtcacctcgcatgcgaacactcttatcaactgaaaacgcgagcatcgcaagagacaattcacattacccgtggaagcaccattgcgcgtaaagtatgctggttgttaacatgagaccctccacagggagtgtggactaccaccacatgtaccatacttcaagcggcatcgagcagttgcttaatagattccaatccctaacactaacgcaataatgtgggcctagctagtagacaagcaggaaattactcgctatcatggcgggcctactagtaggaggcaatttgcccagttccacaaatgccgagaaaacaaaccaggggaagccaccacgccaggcgagggaatacagagaagtgaaggtcggaagaagacctgagcatccgaggcgaaagcgtgccagacgacagacgcggtcagtcaccaaattcccacgagtagaaccagacccatctgggggaagggaccaaatgcgccggaaacctgggaagacccatacagaaaggaatccccttgtaagagttttcttaaccgatcccttgtacatcttaggggaaaacccgccaaaaattcttcgaacaggcaaagatgcgacaggcttgactagggggtaacacaccgtccagagtgaccctagacggcccacggaatttccaagagcgctcggaatgagtgccgtgttcatcgaggcaccataaaggatcgacagccaagaaaacctcgagagtattgacagggggggcctacaatcataaaaagatgagcacacatgataccatatataacacatccctattcaaaaaaaggacgaccatacaccgcccacaaaaaatatatttaccccaccaacaaaacaaacaatagtgatgcagacaaccaacgagatatcaaaagagcgatgattataagagaggcatacgacctgcagggagcagtcagtgcgacgaagaaaggagatgaacatcaagcagcggccatactaagattaaacctgtacaacagcacacagaacgaatatacatgaacgatactacatctagtctttcgtactctgacgctggtcgcgcgcagcgatcgagcagacaacaggaataaaagcaatgacagcatgattgatagccataactaatacacgaaacaaagaaagaacaaaaccatagataaggcgtatagaaccgaagcc

SEQ ID NO: 482373 - DNA, 193 bp, Homo sapiens
cccttcctatggaggtggaaaagaataacaccccctctgagcccggctctggccggcggcctccccaagaggaagaagaagacgaggatgaagaggaagagggcctaccaagaagatgctgaggccccaggcatcagagaacatgagagcctgtagccacccaatgtttcaagaggagcccccaccctgttcc

SEQ ID NO: 482374 - DNA, 100 bp, Homo sapiens
ttttgctactactctttcatgcaaaggcagacacgtcaggcatggaggcatttccagttccactatgtgccagccaggttctcccaggtagggaggaggt

SEQ ID NO: 482375 - DNA, 749 bp, Homo sapiens
  misc_feature (3)..(3): n is a, c, g, or t
  misc_feature (11)..(11): n is a, c, g, or t
  misc_feature (16)..(16): n is a, c, g, or t
  misc_feature (18)..(18): n is a, c, g, or t
  misc_feature (25)..(25): n is a, c, g, or t
  misc_feature (40)..(40): n is a, c, g, or t
  misc_feature (45)..(46): n is a, c, g, or t
  misc_feature (54)..(54): n is a, c, g, or t
  misc_feature (67)..(67): n is a, c, g, or t
  misc_feature (73)..(74): n is a, c, g, or t
  misc_feature (91)..(91): n is a, c, g, or t
  misc_feature (94)..(94): n is a, c, g, or t
  misc_feature (100)..(100): n is a, c, g, or t
  misc_feature (108)..(108): n is a, c, g, or t
  misc_feature (119)..(119): n is a, c, g, or t
  misc_feature (132)..(132): n is a, c, g, or t
  misc_feature (134)..(134): n is a, c, g, or t
  misc_feature (139)..(139): n is a, c, g, or t
  misc_feature (188)..(188): n is a, c, g, or t
  misc_feature (190)..(190): n is a, c, g, or t
  misc_feature (194)..(194): n is a, c, g, or t
  misc_feature (200)..(200): n is a, c, g, or t
  misc_feature (206)..(206): n is a, c, g, or t
  misc_feature (229)..(229): n is a, c, g, or t
  misc_feature (235)..(235): n is a, c, g, or t
  misc_feature (238)..(238): n is a, c, g, or t
  misc_feature (242)..(242): n is a, c, g, or t
  misc_feature (247)..(247): n is a, c, g, or t
  misc_feature (253)..(253): n is a, c, g, or t
  misc_feature (255)..(255): n is a, c, g, or t
  misc_feature (265)..(265): n is a, c, g, or t
  misc_feature (272)..(272): n is a, c, g, or t
  misc_feature (317)..(317): n is a, c, g, or t
  misc_feature (330)..(330): n is a, c, g, or t
  misc_feature (346)..(346): n is a, c, g, or t
  misc_feature (351)..(351): n is a, c, g, or t
  misc_feature (357)..(357): n is a, c, g, or t
  misc_feature (365)..(365): n is a, c, g, or t
  misc_feature (367)..(367): n is a, c, g, or t
  misc_feature (369)..(369): n is a, c, g, or t
  misc_feature (390)..(390): n is a, c, g, or t
  misc_feature (393)..(393): n is a, c, g, or t
  misc_feature (413)..(413): n is a, c, g, or t
  misc_feature (424)..(424): n is a, c, g, or t
  misc_feature (426)..(426): n is a, c, g, or t
  misc_feature (435)..(435): n is a, c, g, or t
  misc_feature (437)..(437): n is a, c, g, or t
  misc_feature (441)..(441): n is a, c, g, or t
  misc_feature (453)..(453): n is a, c, g, or t
  misc_feature (466)..(466): n is a, c, g, or t
  misc_feature (496)..(496): n is a, c, g, or t
  misc_feature (516)..(516): n is a, c, g, or t
  misc_feature (518)..(518): n is a, c, g, or t
  misc_feature (522)..(522): n is a, c, g, or t
  misc_feature (537)..(537): n is a, c, g, or t
  misc_feature (546)..(546): n is a, c, g, or t
  misc_feature (548)..(548): n is a, c, g, or t
  misc_feature (559)..(559): n is a, c, g, or t
  misc_feature (561)..(561): n is a, c, g, or t
  misc_feature (567)..(567): n is a, c, g, or t
  misc_feature (571)..(571): n is a, c, g, or t
  misc_feature (587)..(587): n is a, c, g, or t
  misc_feature (607)..(607): n is a, c, g, or t
  misc_feature (609)..(609): n is a, c, g, or t
  misc_feature (665)..(665): n is a, c, g, or t
  misc_feature (687)..(687): n is a, c, g, or t
  misc_feature (707)..(707): n is a, c, g, or t
tangtttccantatcnancttttanttattttttaacaanaaaannaaaaaaantttgccaggttanaaaaannagggctttcttgaaaanaanttaaantttccganttgaatggcanaacgcacgtagananaactnaaggtggatggctgtatctcccaatactggaccgggttgctgaaaaaantnaaanccgaanaaaaancctttttggtgttgtgtccaggngggcanaantaanttganccaacnanaaaaaaattnttgtaanaaaggaaaaaaacctggatgtacttatgccctgccaacccaccangaactctggaaancttgttgttgtccaantaaancccccncaaaagangngngtgggccaaaaaaccaatatnaanaacaaaaaagccgttgaaanccaaacccaantnaaccaaaanantcantcctttcaggcnaaccgcaacaacnctgccgaatttgttgccaacaaaaagtaantccgtaagggaaggaggaanancttnaggaatgctggtganattggtatnancaatgcggatntnggagancttnttcattccctggaaanccccattttcaattcctgancncttcagcggattggtgcccagttctatgaaaataatctggttcagtccattgaaantaacttttcgcactttggtganctcattttcatgggcacgcngctcctgaagagttttgggcattttttctggcaattccttca

SEQ ID NO: 482376 - DNA, 216 bp, Homo sapiens
cattgggtttcaatgggccggaagatggcacccgggatattcgctttacttggagacttagattcacttgggccatcgcaatgagaaagggtctgagattccttatattcaggccttcttcatgctccgtaaccacccttctctctgccactcctgctctactctccaaatcctactcaccagctcaaaagctgactcatctcccatcaccccacc

SEQ ID NO: 482377 - DNA, 147 bp, Homo sapiens
  misc_feature (42)..(44): n is a, c, g, or t
ggtgactctagcagttccatctagtagcaggcagctgttggnnnttcggtgctcagtggttgcgccaccttgaaaggcgcagacaggcgtttatggacctggtggggccctcgacccagtcccgggttcagggccattacgtggata

SEQ ID NO: 482378 - DNA, 958 bp, Homo sapiens
  misc_feature (73)..(73): n is a, c, g, or t
gatcatgtcaacagatgaggcgggtggcagcgacagagccaaaatcagagctggaacctgaggagagagtgtncaagaaggaagtgtatcttcatacatcaccacacctgaaagcagatgtgctttgccagacgtgatccaactgcagagatggcagctgagtcattggcctttctcctttgggacactgtccagctggtgagctggaagcctggtatgaggacctgcaagaggtcctgtcttcagatgaaaatgggggtaactatgtatcacctcctggaaattgaacgatggaagaatcaaagaatcttcaagcaatcttgaccctgcattctcatggcttggctgacatgaggaggagacagaagcagcagaggtcacaagacgaccgtcccagaagccctcactctccagattccagtcagagctccctggctcaggaggacagcaggaggaccgacaagggagaaccaggaaacggaaacagcagtggtcgatacccaagccgggctggaaaggcagcgcatgagaggcgaaagaacaaggagcaatgaccgggcaagtggcaccaactagctgcaacagactgaccggatccacgccggcaaatcgcagcgccgtgagcacgggacagagaggcgaacacgccgaactctgcatcgacccgacatggtgacaactggagccaacgcatcgaccaatcgcgaagcaaagagtcccccgaactagagaccacacataccacacacattaccccagaacgagggctactggaacaccgcactccacaaatggacaatgcttgtgaccctcaaatccaccatccgcagagaaaagcgcatgcagaagacacaaaaaggacaaaggcacaaatgcgttagcagaaaggcacccagcctacatacagagcaccaacaaacacaacaagaacgagatcataaaaaaatagataaccaca

SEQ ID NO: 482379 - DNA, 1266 bp, Homo sapiens
ccttcactgatgcaataattccattggagatcgaggtgttggtggacgccgaccctgcttgtggacgtctctcagaatcgctaccgggccgccagttgccttcttcacctacgtgtcgctgagccacgagaggcaggtcgatgcctgattccccatcctgtctgcccgagattcgtagggacgagcagagaaaccgcgtctttgcagcgaaggcatataaggtgctggtatccctgactagtatgaatagtgctgtaagccgatcgagtgccacggcgtacgcctcagtccctagaactccctcctcctgtcaattggttgacttctcgcatgttagccgatggataacacgggccccaacgatgtcacaggttcaactttcatgaatttccccactcttggacacatacaacatccaaattgctaacattgagaagctggatgttgtcatgtgagtttatcagtagtctacaggtgattaaccttgatagcgtctcttccttgcaaataactacgacatccaaaatgcgtcttagtttaatattctattccaagttatctaatagctaatcacaagtagttttgttccacgacgacgcccgtgagaggcgcggtttaggagcattaaagccctccgggcaattgctttcctgagccatctgctagtaatggttattggggaacgaagcctcagcaccactgaataaaagcttgcgtgctttgtgctttggcatgatatttccaacatcaacaaaaaacctaactactaattttaaagcgtatcactaacgttgtaaaaattcggcgcggactaattgatgagaaagaacccgcgtgcgacgtcgccccataaataaggacaaagcacgcctttcttctctaaggaacaccaaagtgtgccccccactaagagtggacgagctcaattcattaataaacacctgaatagaaccgagagcaacctagcatgtatccaataaattggccagtaaagcaagtcaaacaaataatcgttatctgggataagaaaccctccgagtactagaccatagacctatgtttaacccccgaaggcaagagactatgataaggtagttgtgcccatacttaccacagaagaacttaaaaacagacctcaaagggctacaatgtataccaggtaatatggccaatacagtgggtattcaccacaaaatgtattataaagtttggcatttgagaaaattgtgtgactacgaccatgttatcgagaacaaattatcagag

SEQ ID NO: 482380 - DNA, 121 bp, Homo sapiens
agctcggtacccgtccaaacagagcccagctaatttttgtggaaagagatctagtatttgctgaatcataatcacatcagtactactttggctggcttaagtacaaatgaataaaaccagt

SEQ ID NO: 482381 - DNA, 157 bp, Homo sapiens
gatgcaatattaatgagcatctgctctctatcaggcttggggggatatgttcagctcttggtgagagtgaacatgatacataagatcctttctctcatgtagcattctctccattctttttttttttttttttttggaagggaacaacttcagcccc

SEQ ID NO: 482382 - DNA, 276 bp, Homo sapiens
ggccacagtctgctagtaagacaggtgtaggagcatggaagccacactggctcggattttcagacttatacattgagttaggagcgaagtctcgactgaggttttatttgtccaaagtcagggcctgctggagcccgacaggttgcgtgcttggcctgtggagcagctttctccagagccactctataccctctggcttgtgccgaggcccagcagggactgagggtagaataatgacaggcacaggtcctcccctcaaggagtccactatctggg

SEQ ID NO: 482383 - DNA, 912 bp, Homo sapiens
  misc_feature (764)..(764): n is a, c, g, or t
  misc_feature (777)..(777): n is a, c, g, or t
  misc_feature (780)..(780): n is a, c, g, or t
  misc_feature (782)..(782): n is a, c, g, or t
  misc_feature (790)..(790): n is a, c, g, or t
  misc_feature (795)..(795): n is a, c, g, or t
gtaatcgttgattattctcaaccaatcacaaagatatcggaaccctctatctactattcggagcctgagcgggaatagtgggtactgcactaagtattttaattcgagcagaattaggtcaaccaggtgcacttttaggagatgaccaaatttacaatgttatcgtaactgcccatgcttttgttataattttcttcatagtaataccaataataattggaggctttggaaactgacttgtcccactaataatcggagccccagatatagcattcccacgaataaataatataagtttttgactcctaccaccatcatttctccttctcctagcatcatcaatagtagaagcaggagcaggaacaggatgaacagtctacccacctctagccggaaatctagcccatgcaggagcatcagtagacctaacaattttctcccttcatttagctggagtgtcatctattttaggtgcaattaattttattaccactattatcaacatgaaacccccagccataacacagtatcaaactccactatttgtctgatccgtacttattacagccgtactgctcctattatcactaccagtgctagccgcaggcattactatactactaacagaccggaaactaaacacaatttcttgtgatcccgctggaggaggggacccaattctctaacagcatctgttctgattcttgggcaccagaagttatatcttatctcccaggattggattatttcctgtgttcttacantccggaaaaaagnacntncggttttnggatnggttgcgcccaatgtgtatgggttctaaggtatggatgagcccccatattccgtggttttgtgaacgcggttttattgcacgtaatatggaccacgggtggtttgggttggccacgg

SEQ ID NO: 482384 - DNA, 559 bp, Homo sapiens
agcggaggaggaagttgcggctggtttgaaagcggcagtttcctggcagcttgggcaggcgttggtctccggctacagctccgcagcggcacgatcgatcccgcgacgggtctacgcgcgcttctgcgcgcaccccaggattcccgtcccggtcttcccccttactcaccgcccccgctacttacccgccgctcgggcgctgagaccaggaccagccggaggcagtgaccccgcacgaagccccttctggaacctcctggggacaataccctttaccttaactgcagcctaacccgcggtggccctcgcggatccggtcagccccggggagcgcagccgggaggggcgtcaagggcgtctcgcgttctgggaacggcggggccccaaacgaactgtggtcgcagggtgagggccggaacgagaggccccactcaacggggctgagcgggccgaccaggacccccgggcctgaaaggggccggaacggggagccccggacgccgcgcgggattgccccatggtgcaggggggttcggatgtcaagacgcggacgaacaaa

SEQ ID NO: 482385 - DNA, 370 bp, Homo sapiens
tcctaacttcctgtctgctgtagctgttcctgcatgtaagaattaagatcaaagtgaggggagagagaaacccactagcataaacaatgcactagtgatcactagaactgtttaaacatttccacttgccagttttatttctatgaagactgttgcttgtgcggaatgtttcttgtcactgattttatggttgcatctggtaatatactaaaggcttcagtcccctcccaccaccagaaattaacaaaaagcattttaccttaaaatacaccagcataatgtactcagcttcaatcacaaatacgtctgcttcaaactgcagaaattacctcattactcagcctatatcactcagctggattttttcctt

SEQ ID NO: 482386 - DNA, 746 bp, Homo sapiens
  misc_feature (395)..(395): n is a, c, g, or t
  misc_feature (441)..(441): n is a, c, g, or t
tctttaaaatgaagctttaatacttagcttcccccttttgtccaagcagctcttaaggcaagaaaagttaatcccaaatttataaacccagtggaggctctacagattatacggagtttcacccccagtgtattaaatctggaggtaacagctatctgggaggctcagccttagcactgagtgggagggaaaatattaacgcccaagatgtaaatattcttcactattctggaaatatatatagtggggcaaacactatacacactcctgggactggcggggaatataaatattggaagaggggcacatggattcaagaatgtaaacacttctctaagatatctctactaaactgctcccagggtgtctctacaatattggtgtcaccacactgnggttggcacaacttcccatgatgtcacaccagtctatccactactncaaatgttttggataaagaagaaaaagatgagcacccaacagggacgcacgcctgtgctggtgctgtgaaggattggtgtcaacatcttggaaatgagcttgcggatcagttctggggcggaagtccaccgtgggcccctttcacgagggccaagctatcagagtcaaccaccattcttgccccaccctgttcaaataccctgtcgccggggttgatacctgtccccgtgacattgttgggaacccggggtccctccctccattgcgcctgagattttgccttcgggattccaaagctcggagca

SEQ ID NO: 482387 - DNA, 355 bp, Homo sapiens
  misc_feature (53)..(53): n is a, c, g, or t
  misc_feature (71)..(71): n is a, c, g, or t
  misc_feature (96)..(96): n is a, c, g, or t
  misc_feature (98)..(98): n is a, c, g, or t
  misc_feature (113)..(113): n is a, c, g, or t
  misc_feature (119)..(119): n is a, c, g, or t
  misc_feature (174)..(174): n is a, c, g, or t
  misc_feature (193)..(193): n is a, c, g, or t
  misc_feature (197)..(197): n is a, c, g, or t
  misc_feature (202)..(202): n is a, c, g, or t
  misc_feature (217)..(217): n is a, c, g, or t
  misc_feature (221)..(221): n is a, c, g, or t
  misc_feature (238)..(238): n is a, c, g, or t
  misc_feature (241)..(241): n is a, c, g, or t
  misc_feature (259)..(259): n is a, c, g, or t
  misc_feature (274)..(274): n is a, c, g, or t
  misc_feature (279)..(279): n is a, c, g, or t
  misc_feature (329)..(329): n is a, c, g, or t
  misc_feature (348)..(348): n is a, c, g, or t
ttacaagggggagggaaggggggcaaagtccttgaacattttttttggctcgngccatgttatgatcatancccttttaaataaggggaaatagtntntttaaagttaatgtntagccnagagtttagtaaacgaaaaattaaactgccctgttgatcggggctttgggtaaanacatctttaacatttgggngganagggnccctaaaaaggcccnttcnttgtaggaaagcaattntgnacatgagtttaagcattnttgttgcattgtttntgcanattttatttttgtttccaatattaaaatgtatgttagcaaaatggggggnttttcaaataaaatgcagnttcccca

SEQ ID NO: 482388 - DNA, 421 bp, Homo sapiens
  misc_feature (10)..(10): n is a, c, g, or t
cgaggcgtantaccaatagcctaggaagacaggcagaaatgcaggattcgcaatgtcagctggtaatacagcaacagaagtgcacagcgtgcagaggaggggcaaactgcagtaggtcaaggactgaatctggatctcttagaaaatcttgcactctacttctgagaaacattgtttcttggcaacacattctgctgccctaaaccccagggatccaagcccaaaacagaggcattgccagagcagcattccccatcagatagggattaacaaactcagtaaggtcattcctccttggttagagtgcagaggccgtgagagacaagtagagaaggtagccagtttctgggttaccaaagggtccaaagagcttcccaattctaatctatcattaacttcacaataattgggcccttatcga

SEQ ID NO: 482389 - DNA, 108 bp, Homo sapiens
cttaggacgtgaagacgacagaagggaaggccaggggtatgatcagctatggctcttcttacagtagaaaatccacaccacacggcatagtgcactgtaagctctcag

SEQ ID NO: 482390 - DNA, 216 bp, Homo sapiens
  misc_feature (106)..(106): n is a, c, g, or t
tctagacggatcccttcgtaatatgtaacaactatagctacttgtaaaaacgtactccacctaaagctaacatgattcatttttttttccaggaacagaaatgtcnggtctgtattaatatcaaagaattaactttaaaactgatcccaataagcatggcccttacacagttcatgaccaatatttagttatatgaaaatggttacatattacggg

SEQ ID NO: 482391 - DNA, 682 bp, Homo sapiens
ccatttattttcacccgcgggcgattgtgttggttctgctctatccaggcgtccgcggggggacagcagggtctcgctcggggtcctacaggttcgctcgcttaactgtcgtgtctggtcggccggcaacgtgttataatggcctttaaccttacggcactcgtctgcttgactctaacctgttaagggcctcttgggactctcacacgcgcctgatcctcccggacttttttcttaggcgacttagcttttacgctccgcaaactctacgccatctgctgaagattgataagttcgtatgaggggccaagggtttactacttgtcgctcgcactaacttagcctatggggtttcggccgctttcccgaaattctaacggtcgcactgaagttaggggtgggcccctcgctacgttcaatgctctcacgccggctttaggcagtaaccgccccccggcgcctatttgtgtctcgctactgaagtagtgcctcgactggctctctcgagttattatcttatcgctatcgcgcgcgactatatggggtttgttagagtgttgccatatgttggtcatgacacgctcgtggcttacgggctacctactttaaattcttctacgacgcgatgatgcaagatagtaatccaccgtctgccccgcctcactaacgcgaggatagaaca

SEQ ID NO: 482392 - DNA, 105 bp, Homo sapiens
gttgggaagaaaggtgttttcctaactcaaaaagttgatgagtcctctggtagcagaacctaaggaagatttaagacacattaattctgactaccataaaaaggt

SEQ ID NO: 482393 - DNA, 166 bp, Homo sapiens
gctgagaggagcgtggctgtctcctctctccgccatggcgtgtgctcggccactgaatatcggtgtactcccgaaaagggggagtcatcttcgcaaaaatcgtcaattctggctccctgtattcaaggcttctattcgaccagatcattgtaaaactttgttcaca

SEQ ID NO: 482394 - DNA, 567 bp, Homo sapiens
tgataggacgggctggagactatatttttagatcgatcaatagcacatgcctgggattatcatggccgtcttggacaaggccctaaaggttatatctggtctggaactgagagaattgttcgggttcatctggctcgtataggacttgccactaacggatataactggcctagaactgagcgagttgttcttaatgctctggctgcatcaggcttctcaacatacatgtagccttatcatatgacccagcctgatatcctgcatgcacaaacctgatattactcacccagacggacggcgctttaggatttgacccaggcttaaagactgggtgtaccatccaaattgtatttaccctgaggtactgtagtatatcctggatgatggaatctggatcgggcgtgccttataagctgactcttctctgagtggcataggcctctgatgcatgcttggttctggcatggtacctgattttctgggcctcacaactttttttgggaaagccctttgaccccagcttgctagttgcataataataaattttctgttcctaaaaaaaaaaaa

SEQ ID NO: 482395 - DNA, 118 bp, Homo sapiens
atttaagtatagtgcatgtagtgaatgcagatcaaaatgttctataacatatctgtacagatttttttctaagacgggagtcttgccatgttgtccaggctggtcttgaactctgggg

SEQ ID NO: 482396 - DNA, 131 bp, Homo sapiens
gctatctttatactagacatcgtactacacgacacgtactacgctgtagctcacttccactatgtcctatctaattaggagctgtatttgccatcatacgaggcttcattcactgatttcccctattctca

SEQ ID NO: 482397 - DNA, 459 bp, Homo sapiens
aaggccacgtggagctgtctgcctacgttcactctgtggtctgtgccttctccctccacaggggagactgtgcacggtgggccaggtggtttcagggagtggcaacccaggggcagtggaaatagcgtaggctttggagtcaaaaagacctgagtttgaatatggctccacatatccctgtgtgttgccttggaatgacttcgtctttctgagtttcacttattttataaaaggggaataatgtccactgtgaagtttgctgtcatgtttaaaaggaggtaatgtttggccaggcgtggtggctcacgcctataatcccagcactttgtgatcaccaggtcacaagttcgagaccagcccgaccaacatggcaaaacccctcccctactaaaaatataaaaattagctgggcgtggtagtgcacacctgtattcccagctattctggaggctgaggcag

SEQ ID NO: 482398 - DNA, 1752 bp, Homo sapiens
ggcgcagccgggagcgcgctcggaggcgacggggaactggatcgggtatgctggccaggcggagatgaggcttcggccgcattattacaagaggtccagctcgcgctgtatcacagggagcagcgagtacgcgtttcccgcaagccgataccatcggacaggatgtctccgcctcagcccaaaggagagatctctggaagtatggctacagaacatgttaatggaacatggtactgaatagcccatggatactacgttctgcggttgtccattcagaaaattttcagacattgcttgatgctggttataccacagaaagtggctgaaagaactagatgaactgttacgtggcagggctagtggcacactagggatcagatgaaagagctattgatgcttgcctacgagttcactgaccacggtgcatggcaggttcttcaacagctttaaagacagtggatctactctcatgtccagaatcatgatagtgccttttatgtggagtcctgaagacttacaggcgagagcaacaccacgggacgaaagtagcagattctagtaaagggaccaaatgacgtcaaaaatcaagcggatctgggcaagaacaggctacacactgcagtgaccactggacaggaagcagcaggtggacactccagatccggcgatcagtcgcagcctcgtcggccgaaatttggggagacccagacacttggggccactgtcacatgagacggccaaagatcgcaaaagggcaccgacaaaggttctgtcttgtcaaccagcgatgtaatacataccgctgccctcatttgtctatttcacgaggtagtacttgctgtccagacacacatagatacatgcacacacccccacatacaccaaccacaccacgatccaccaccacccacacccgcaacaccacacaacacgcacgacaacacacacactccaatgcagacccctcccacctcccagcagcccccacccccacccaacaaacgagaacagcaatgacctagaaactgcatggagaacgagccagctatacagctatatagagagaagaggaaaagaaacaaaagacaatgaccacatacgcaaactaaaaaaacagacaatcgtcagacgagctacttcaagtgcggcaactaataacggactgaccaggcagcataacacaactacggcgaacaaacaacgaagatacaacggctgataatcacacgatagtcaagaagataggtacgtacacggacgtagacagacccgctggcagaaacagagagcgacgagactagagtgaataagatctgcgagggaacaacagatgaagacaaacagacatgacaacaggagcaagatcaagaaaggacagagcaccgcagcgggaagctcaggcgataaacaccataacagagagtagatgctaaggctctcgagaacattacgcaagtgatttacttctggcgtggcactagctcgagcgtagactgatgactactatcagtatcgatgaagacgaagcatatagatagtaaagcagaacatagttggagtgaacgattcgcgatagcatagctacagcactcaaaatatgctaccgttcagcgcgagagctaaatgtatatgaactgatagtgagtgcattgacgaagaaagtcaagtttcaaacaggatgaagcaagaaaaaaagagtatggaagtgaaaagaagatatgatagggataaacgagatagacacggacacag

SEQ ID NO: 482399 - DNA, 519 bp, Homo sapiens
gatacactgagagacgatgatataaccaggagaagaattgtgactgtcatgaatatctcaactgcagaatcactgattccacctggccagagaaacactgacagtgtagtaccttaccagtcaaataatctccagttcgtaagacgagatgcatcgctggttcaatttccaaaagtaaataaaggctcatcgtaacgtgaaaacattttgcatcccgtagctctctaaaggtagattaaaaagaaaattacaaagagaatgacctctaaggcttctgaacagcccacgtgtaggttacataaagtactttctgtcccaacactctctctaattcaaaagatatatacttcctaagtacacgacaaagtcttcatttcaaaccattcactcagtttccatggtaacattgcgggcttccttggctaccataagtcgcattagttgactgtggaatttctcaatcttctttacatcttgagcttggtctgttttatacaccaaacaaactaaatcatctgt

SEQ ID NO: 482400 - DNA, 150 bp, Homo sapiens
acagagtttcagtttgtggtgataaaaaatgcatgtaagccgggtgtgtgtgtcacgcctgtaatgccagcattttgggagccaaggtggccggatcatttgaggttgggagtttgagaccagcctggccaacatggtgaaaccctgtct

SEQ ID NO: 482401 - DNA, 1222 bp, Homo sapiens
ggatgcgttgttggtcgtgtccgtgtttcggctgccttcgctgtcctgtctttattcgcttttctccatgtatttttttcctatcactcggctctcccaaggggttctctctgttactggctttccctctacagttgcctctagagcatcaccgtggcccccattgtgaatgtctcgcgtcaaataatttaatacggcatcattccaccatcttcttccactaccactttctctgctaaaggggttgatattccgggtacttgcacagtacgggattcgtctgtgtgcacttgcgtctcatctacgcatccttgggtcttgtccatcatttgtgaatgtctctattctcttgcttccatgtgctcgacccccatgtgccctacgatcgtcctgcacttacgggcacgggaatcatttaccaggatcaccaatgttgaccaactgatcgatgtgccccatggggtactaggatgaactattgtgtcgtgctacaaggccccgctactgcgtggcattggtactagacaggtctcaacacgtggatcccatggggatgtcgaagtcagtacgtgaccgttgggtcttggatcacttgttgactcagcttagcaatcatggttggtagccacccgaatatactctgtaactcatccctgaatgtccctcgataattacctgtttagaccatggccggaaggctttcttgatactgtgtatgagacatatgcacaaacgtaccaagggcctgagattctctcgtgaacagtctgtgtgaacgctgctatgtaccctagcatagtgttaaactagtatagcctcggcaccttacgatcgcactgagccacattagtaacatgtgctctatctgctgttgagcatacgctgacaacatcagaatcttgggagtggtgagacatctgcaccagaagacagtcagcaagtgtgctggcctctctgacactatgctaacccccatatactgctgaatttcggagtctgactgtgcccaagtgggtcacaagtcgcgctgctgacatcgtacgtatggctccacacctccaatgctgcactgggaagccagggtgagagtctgggtccaggccatggccatgtggccctccagtgcatgagagggtcctgcctgactgcagtcttattactagttgccgccatccaccgacagcttcccttactcccctatcccattctccctctcaagcca

SEQ ID NO: 482402 - DNA, 682 bp, Homo sapiens
cagctcgctactaagcccgctcgtaagagcgctctggctaccgacggtgtcaagaagcctcaacggtacaaggcacggaacagtgtctctgcgagagatccgccgctaccagtagtgcactgagctgctgatccgtaaactgcccttccagcgtctggtccgagaaatcgctcagaatttcaagacggatctgcgcttccagagctccgccgtcatggctcttcaggagtccagcgaggcttatctggtcggtctgttcgaggacaccaacctgtgcgccatccacgccaagagggtcaccatcatgcccaaagacatccagctggcacgccgcatccgcggagagcgcgcttaacttattcgttaacttgatttaaacacaaaggctctattcagacgcacctcagtcatcaaaaaagtgcaatttcttacattttcaggtttattatcccctatattcgttatcaagatgtatattatattaaatggtataactttttgtgagctgtagtgaccgagtacgggtttacaggtagtatcaagtaaaagtattaatacactttaaccactgattgtatgaaaacaaaactagtggtattaaaaatattttgtcggaaggctgtagggttgcttttaaatatttgtcaatataactgccataacatcaaattaaaaaaaaaaa

SEQ ID NO: 482403 - DNA, 334 bp, Homo sapiens
tacagcccataactcctgcacccaacccatcctccaacctcagcctccacgagatagactaggatatacaggcgcacaccatcaatgcctgaataatataaatgtatttttagtagagatggggagggggtgggtgggtggtgtgtgcttcaccatgttggccagagtgatttcgacctgacctcaggtgatctgcccaactaggcctcccaaagtgctgggattacaggtgtgtgccaccacacccagctgcacccaattgttagcatctaattttaatctaatctcaaaaatggtcttttaataggtgatttttgccttttaattggaggtt

SEQ ID NO: 482404 - DNA, 303 bp, Homo sapiens
gatcgagccggtccctagtttagaagttcaatagcatgacgatcggtgccttaaagacatgctcctgctgcagttgaactagcccaagctattcctttaattcagcccatcccttcatttcccataaggaatacttttagttaatttaatatctatagaagcaatcctaatgactggttggctgttcataaatatgtgggtaaatctccattcagggctcttagctctgcaggctgtgagacccctgatttcccaattcacacctctatatttctgtgtgtgtgtgctattgaaacttctaaa

SEQ ID NO: 482405 - DNA, 1189 bp, Homo sapiens
  misc_feature (45)..(45): n is a, c, g, or t
  misc_feature (613)..(613): n is a, c, g, or t
  misc_feature (616)..(616): n is a, c, g, or t
cagctagacatgatacgatcgagctcgtactcagagctgttggantgcaaaaagttaactctccttccccacgccagccccatcttgaaccactcagcatggagttaggggaagagaactgatatttagtgagcatcattttatgaaacactttgcctttataatgtcatttaatcactgcaacaactcttgaggtaggtattcattatccttgtttttccaaaaaatgaaactaagactcagggagtttgtgtcctacacatgctctgatatttttattgttgatttgattgttttgtttactgtatccccacaccatattgtaagcttttaaaggatagagatcttgtcactgcttgatcctccatgcatagaatagtttctggcgtatagtagaaaccgggtatctgtttgtggaatgtgtagagtggcagagctgggatttaccctgagtacctctagttacagactctactttctttcacattatgctgtctccttggcattctagaacaggaaatcggcagctattttctcctttctcactagttcctgtttctctggacaattacctggacccaaaaccttaaaagatgtgtccagattttcttgntgnaacccacttgcctcttacctctttaaacccttccatgttcatgctggctgaccttctcttattatgaggaattatcttaaaaattaaaatgctgggagcaacctccttctattcccattctgaaaaagataagtaggacaatatcagcagcacgtgagccactgagccagctatcatgtagaatgataattctgtctttttgtttggttggttagtggtggtgtgtggtggttttttgagacagagtctccttttatcccccaagctggagtgcggtggcacgatttcatctcactggaaactctgctccctggttcaagtgattctcctgggctcagctcccgagtagctaggattaaggacctggcaacagggctggtaatttgtttttagtagagatgagattcccatgttgtcagctggtctcaaatcctgggcccaaatattgggcgctcagagccccaaggtggattcggggtgagcccagccactcgaaaatgtgtatataaatgggtggggcccccaaattggggtgggtgcagatccccaaaggtcggagagcgagggctctta

SEQ ID NO: 482406 - DNA, 1225 bp, Homo sapiens
  misc_feature (328)..(328): n is a, c, g, or t
  misc_feature (489)..(489): n is a, c, g, or t
  misc_feature (563)..(563): n is a, c, g, or t
  misc_feature (667)..(667): n is a, c, g, or t
agcggatgtgacgcggaactacgccattaacattagtcaatgaagtgtgtgtcctttacgacaaacgtgtctgccaggtgtctggctagatacgattcgtcggactagcatgccaggacatccggttgagcgttgttgcatcacaaggtagtacagcagaaattatcgtgcgttatccgtgtatagtggtcgcacacactgttgtaggtggattgggctcaacagtcacactgtacactcgcgagtctgaaggcgcaggttgtagggtgttggctggcatgatctgactggatatacagtcggagtaactgaccctgagatatcacancacaagacaagacttctctggctagaggggtgggcccagagatgcatgggacttgtcggacggtggtccagaacggacataagccaaatgctaccgtctgacttcggtgtcagcgcaaactggggtaccattctatacataaataggattggcgcagggcnatcgagtgattaaattctaggtatgtgatctgccctatcgaacaggaaggatactacgaacttctccgtcttantctttggttcataacggctagctgcggaactatcgagaacttgcacgggcaaactgctctgtcgggggcactgaacttgaatcgattgctgctcagtcgaaacnggggaagccgcaaacacagtccccacggcaatggacggggcccgctaggggtggtctacttccgaagaggcattgaattttggtggacgaaagcggtgttacaaaccaacttcctagccggtctattggcgcccggcaagttttctgaataaccgggtaaggcggttaattccggggtaacagacgagttcaccgtgaggctcttgagttgagtgtgtggggcaagactattgcccacggggattaacgaacggcgtaaaggggaatacttggggcaaggggctgtccttacaaaaaccactgcccttctatggcctttggttagctcacacgaacgtttgcccgaagggcttagggccaaacacacacaaaggtttcccacactttgggtgggccctataggcacaaaggaaacctcgaggggcagcacacacaagcattttgtgcgaggagcgacacactcatatcactcacacacacatcgtgaggcgggcgcggcgcgcggcgcgctcagcagatcaatatctatcacacaactacacacgcagtttctctggg

SEQ ID NO: 482407 - DNA, 872 bp, Homo sapiens
aagaggtgacccgcgaaagataataaatcatcattgtgatcaagatgtcttcggcacctgagcctccacacattcacaaaaggaaccaccacaaagaaaaagagtttcaaagcaccagggctcagaggggtgcgcagaacaaccttattgtacgtgctgtgaatccagaagctcttcattaaagcctaaaaaagctgtaatggcttatcggattggtaactgtttcactttgcgtggatatattggttatcatacaatgcaatacaagagaataaaaaggacctcatatgaagctattgatagtgaggggcacagattatatgaaggcggaaaagaatccaaatgggattagacagtgctggttcagtgcagatggaactttattaaggttctgaagatcttccaaatgacagacccttgtgagtgtgaccagaatacattgttgaacttgttgctagaagatgctaaatgaagagagaagatagcaggtgcaaagcagaagaactgtcgaaacattttgtgctttccacaaggttggagacgagctatcatcattacttttgtaccaaacaggaagtgagacgtcaatcaaaattagggaccgacaccttaacctcttaatacaaaagtgcctggcgcaatgggcagtgtacgtcggtcaatcatctcacacgccgtataacaacgaggaacccatgctggcaaatcagcaatgaacgctcgacacactcaagacgactctgcagtcgaactggcagcaccagtacaggggttgcaacagcgcaggcaacgcacattcactccggaacacaccatgaggaagaaccaacaagaacaagccgagccaacacagccacaacaccaaacaccag

SEQ ID NO: 482408 - DNA, 383 bp, Homo sapiens
caaagccgtcaaaatacgacggttttgtcaattatttcgttacattgaatgactgttcaacaatgatggccatatggcatcattcaaatcaaaaagtatgcaagagggtgaggcacacaacacaatccgcagcgcatcaagagcctggcgccttaccggtgttccggcctttccgtccaagctcctgaggcctgcacgccaccgtcaaggagcattccatgcagttacggaatatgtagatcggcattcgcgctgccagcgtattcgccctgttgggcatcctggtcctgttcatgggccttatcgcactctacgaagcccgccagatggacacggctaccgacgagatccgggtcacctggatgcccgccgtggtggcgttg

SEQ ID NO: 482409 - DNA, 883 bp, Homo sapiens
agcggtttctcgtcgggcggtcgccgtccctcgcggccagtcgtactcggcgcacccagactcgcggctagccgacatcattctaggaggacaggaggagaggcgaaggctcccccatcccctatgatcgcgtccgcagctctcttctaagctaaacggccttcgcgccctcacgtctcacgttacctcgaccagctaaggccgacaggattcgtcagtctaccatgtttccacgtgctctatagaggcgaataacgaacaatcacgcagctcagtaatggacgacatgcgttccaccagaagaagagtgtcgtaagcgcaactaggcagtcgtcagcgtttatatatactccaggaagacagcgctgcgctactgttgggactttgcaaagcctcgcccagatcaatgttcacccgagaaattcgagtgaataacacaggtttgagatgttcaacatctgataggtggtcaggtgaaggtcaggtctagcgaaagatcgtagctcgtcagtgaaacagacctcattgccgtgacactcgatctgtcacccaggagaagagtcataccgtggagcagcgaggagaaagaatcggagaagtaactgtaccagaattagaggcttcaaagctgtcggaaattgaacgtagcgaggaggtcagagctacgtcctgactagtcggtagatacccctgggctatggtgacgctatcgaactgcgagcagattgtggtgaagacaattatctcctatattgatgagcaaatttgagaggtacctgcatgacgagagcgctttgaacaggcaggcacatcattgataactagggtgcattgtggcttaacttaatttcacgctttggacctggccttaagccttagatgt

SEQ ID NO: 482410 - DNA, 193 bp, Homo sapiens
cggcaggggtctgtagctactgcccacagtcgggagaggagaaggactctggtagtttctctgggcagacgagctcggctgtcccaggctgcctgagcgtgagccagactccaacagaggctgtgtgtgcgtccggggaccctggacactgctctctcccgacgggaaactccccactgaagtgctgtcagca

SEQ ID NO: 482411 - DNA, 211 bp, Homo sapiens
cggctccacggcacccccttctcagtacaacagccaagaactgggaactcacagcatcacgcctcccaccagccgccaagtgtgtatccacagggcctacagcagtacaccactgttggctatctccacgctccactagtctctgactgctgtgggcgtgagctgctgatgtcgtctcctggtcatgtcctacctcaaggtcgaagctcac

SEQ ID NO: 482412 - DNA, 297 bp, Homo sapiens
gagactgaggccgatgagttgcgcctcctccactggattgtgagggccagagatgaactccctcattttccggtccccagcattggcaggttctgggactggtggctgtggtggctcgttggtctttgtctcttagaaggtggggaataatcatcatcttgaaaaatcggatggttgccgtgtctgtgtagaaagaagtagacatgggagacttttcattttgttctgcactaagaaaaattcctctgccttgggatcctgttgatctgtgaccttacccccaaccctgtgctctct

SEQ ID NO: 482413 - DNA, 414 bp, Homo sapiens
acaatgtgtcactcagcgatatgagatgtatgtaatagaagcatctgagcagaagagtggaatcagaaacacatttacagacgttgatatatgaagatgaccaacattttgcaaacacaagattggacactactagcgcaactgctctctgcacaggattcaaacttcgatgtgacaaattccgttcctgaagactataagtctagcacagtatctaatcaatcagacactacattatagcacgagatagctcaaaacctcagggtataacacattttgaccctttgaacagttggagtgaactgacatctccacttaattcctcagcgagcatcaacatagatagttatacctctgaagatagttcgcctacaggcgagtggactattctggcactgggaactcagcattact

SEQ ID NO: 482414 - DNA, 201 bp, Homo sapiens
catacgcctcatttctataaagcaaatgtaatatcctttatcttgacacgcggagaattcagatagacccgaaggcgagtctagtaggacgtggcctatcaggttgactaccaggaaataggtaggcatgcaacatgaattatttatgatgatagcaagacatgaacatgttccagagtactcacaacttcttgtaggtgc

SEQ ID NO: 482415 - DNA, 224 bp, Homo sapiens
tgctgagacatgtgcggctgacgccggcgcagacgacacgtggactgtctggcagaaaatgggcacaatgtgtgggccctgagacctgctgtgggccagtgtctggagctacagcgcagtgcagtgacatcccacgcgcgccgaaaccctcgcgctggtgccctaccgcctcgctggatcgaagccaccacagcgcacgcaacctgggacatgcctcgtgccag

SEQ ID NO: 482416 - DNA, 619 bp, Homo sapiens
aggcgcagtaaggacttggactcctaggtccagcttttaacaatctacgttactccctctgatcggtcacactagattcagatctgctctccagcatcttctgtttcctgtgaagtgtttcctgcttctgtggataggacacgatgtgctggagctgccttgtgacatgggtcttagggcttgtgtgtcagaggatctcccgcctggcagtggaagagaatgaactggacgatatcacgacctttgtcaaggccttcagaccagaattgaaagaggaattttctaagctccagaacaggaccaagctgactgtccttgaaggagacattctgcatgagccattccttgaaagagcctgccatgacgtcttggaagatatccacaccgactgtcttaatgatgagtttggaggcactcacagagagtccattttggatggcaatgttataggcacccaattactgggaaggggcccttgaccaacccaagtgccaacctatatctacaaccggaggattaaggggttcgggcccaacttctaaaaggaaaattatccagaacggcccccaatgagagggcccgggggaacaccatgggccctacatacccccccttaaaa

SEQ ID NO: 482417 - DNA, 815 bp, Homo sapiens
tataaaaaattaagcctttatttccttgttttggcaaataaaatgggctaagtgggttgcttttgggtgattcagtcaaaaaaaccaaatcccatatcctgcgtccgaatcctcgcgattcttccttgtggttttacaaccttagctttggggctgcagccatcagccaggaagccagttgttgtttgttggcagatatcccacaggggtcagcaacccacacaaggcagaatggaatcagccaagaaaaggccattgaccttttttacagcaaagtgtgtggacaggttgattaactcgcgtcctccaccaaacagagggccaggatcctcgctttgtgtccccgttagatggatcagacatggggtgtatcttgattggcaacctgttgggtgtaccgccacatcctggcaagacagacttctgggcaaactattcgcggaaacaccccaggagattatacaatgtggtgcccctggaagatttcaacggggtagatcacctaaacgccttggaacaaaaggacggtctttctcgggcccagaaaccagcgtgtacgtgggcgtggcacagatgatcttcacagtggggcaatttggcccccatgcacagggcaaggccagtttggcccctttattgggccagacaacattgtccctgaatctacaagggaaggacctcctttgttgaaccccaaaggcccatttttcccccggatatgagcgacaagtttctccaaagctggtattgtttcccaggcgcctcgagattgcctgcaccatataggtgttcttgccattaaacccagtatccca

SEQ ID NO: 482418 - DNA, 722 bp, Homo sapiens
gagcgggccggccttcgtgtgcagtctgtcactcgctgttggctaccagctccccgctgccctgagctcggctgggctggcattcggcccggcggaaaagccgggagcagtgtctgcgagtgctaagtgtctccgcggcgcacctcgcggcgagaatccggaggagaacggatgactgcaaggataggcccagaaaaacaaccagaaaaaacaaaatctcatcatggcaaatatacaccacggaaaacgaaggagatggagcacgcctatgcagaatggagaggacagaacacgccctatcgaggacggagggtgaaggccacaagacctgccagggcaaatcgagcggcggaccaggctacgaccgaacatgagcccctacatacaaccgaccgggccaaaacccaacaaggcacgactcacagcgaccgcggatcgggctggagcatgcacgaactgcactcatggtgcacaatatcccactcgcgaccgcagacattggagcagttgaagtttccagaacggcgagcaaacctttaagtgtaagactctggacaagtatgcacggccaattctgcccgcggacggaaattccctttcaatgcgtgtggggaaacactcctcactaattcgacccatgtgcacccaatccatgtagtgcaaatcattgggagctctattgcccgtggggaatccttgccgacatacatttccctgacgca

SEQ ID NO: 482419 - DNA, 290 bp, Homo sapiens
tcctgtcggtcttcggcaagcctgaatgacggcccagctccggccattccagggactcctaggtgcctcgggggtcatgaatggtgtcagccaacaggcatccctgggcaggttgaggaactgaaaccgaggcagaaggcaaatccggccgacctcattactgaacggcaactgtgcggccttcacagttctgcgcctgagacgtgctggtggccgaaaggcctcgcgcacctttgagcaggaccctacggcttcggggcgcgtatggagtggcctgctttcagaggtcc

SEQ ID NO: 482420 - DNA, 320 bp, Homo sapiens
tcgtcgaagaacaacggcaggctcatgtccacctactgatcatcgttggcaggtggggacacggaaggccatgccattgagcttcccgttcagctcaggtggataccttgcccagcgccttgtgccgctgcctagtcgaggcagcggcatcatgttcttgcgtcagccccgtcggccgtcacgccacagtttccctggaggggccctcccacagtccttctgggtggcactcgactggaattggacctgtcgcgtctatcagctccttccacgtataccaatagttgtccctggatgcccgctttttctctcgcacgaaa

SEQ ID NO: 482421 - DNA, 449 bp, Homo sapiens
cagactagcattgctaccagtgatctggaccagcgcactgaatgaacctcatgtcccttctggaggtggaaaagtttgggtaagaataaatgacaaattgagaaaaggagaaataacagctgagagtaaagaaatgaatagatgggttacattaacaccttaaaataggctcagagccggagatgacattgtctcttagctcaattacacaatgcctgaaagagtgaagctctatgtttgccaagaccactcctgcttttggaacttaacaagattaaaaggaaacctgggccaggtgcagtgactcacacctgtaatcccagcatttgggtagctgaggcaggaagatcgcttgaggccaggagtttgagtccacgcggccaataagcaagactacatttctattaaaaaaaaaaagttaaaataataaaaaagaaaaagaaacctgc

SEQ ID NO: 482422 - DNA, 1599 bp, Homo sapiens
  misc_feature (516)..(516): n is a, c, g, or t
  misc_feature (566)..(566): n is a, c, g, or t
gtgcgaacgtgggagagcacggccttgaaggcttcgggaacgcatacgatagtacacggtagaggtgtccgatgacctgtctaccatccacagatgccgacaacgctcagcctccttcatcacactggcatgctgcattcttatgcagacctcacatctatgtcagtacgccaaagtcccgcgttcatggtcacttcgtaatctctagtaaaaagtaagatgacagacagtctatccagtggggcacggattggtcttaacttgctgtgcgtcaagtgctaggtggttggaaggacaagttcacacacctcctagacagggtgatggacacgcatagcattttccggggactaccttgggcgtaggccgcgttaatggacctacacacgagaatgcctgcgataactcgcaaacgaaccaaactgcttaacgccgcgagtacaattatccctgagcgtaactcctagaccactatcaccgtcaaggtgaccgcttgggttctaccctctatgatgnccttactccgcaagaccatttggtgctagcacaacgagcaaaccgcagangacccctgattgccactctaaccttccccattgtccaagactactagtagacaacgtgttggggcacgggtaaagaattcatgcgagtggcccaatgctacacggatggacctgacgcggcgcagggagactgtgtcccaagagcaaacgctctcctaacgaggacctctcgagacgaatcaagagcgttacccttagcgtaggcctcacgatccgcggaggtgccctttggcaagcccaggttcgagataacaagaaggcgcaaagcgggctttccatctcagagcccaacattgaatgtgctctccaatcaagccccttggtctttacttaacggaggtagggcaatggtggagtcccttacggttacacggggagggttggttggcccccccaacataaattaaaaatcctttctaagggaaaagcggacacccccagggggttggatagaacacggcaatatacacttcccaccccatatggacaaaccttccattaatccacgaaacaccaacttaaatttcctacagttgacgacccccaagaaggaaaagcccgcttaaacactatgatcgtggaaacacccttccccacatagggggagcgtctctacatcgaacaagttttccggagaagcagaggcagcactaagcccacactcatggaattattgcccggacgagaggggaggcccaaacattcaaataacaggagcgttcccctaatggtaaatatagagcgtgtccgtgaagcgaggatgaccgcactaaggacaagcgcacgggctcacttctggaaggcaggaacacccgcgtacgcccgggtgggagacacctccgaggagagggtgccagcccccgttaacaaaacgcagtgtgaggagggcagcaacatactagcggaggcgaaacaagcacacacaaacccgcagcaactgacaagccaccgagcggggggcgtgacaaacacaaaccaccccgaagtagcgcgaccaggagggtgagaaagaacaaccagaacatgggcggcg

SEQ ID NO: 482423 - DNA, 391 bp, Homo sapiens
cgtggggcctggatgcgtggggcacctggatggtcatgttgaaatatagaaatagaaggaatgggagaagatatttagtactgactatgggtaggagatggataaaggtctcttctgattgctttagttgtctcagtaaaataggaaacaagattagctgagggtgaggatgggaaagatgctggaggttagaagacagggaaaaaggcacctgcagagtggaaagtgaatggactagggaaacacagtaggactgccacacagtactaaagacccactggaggttggtggtcatgaatttaaagcaagaccactcagcatggttgtgtgatcttctgtagccaagttcagctgcacgaataaaagctcaaagtagacagagaacacaatt

SEQ ID NO: 482424 - DNA, 419 bp, Homo sapiens
tcttctcccctgacatctggaatacaacaaatatgcctagcatttaccactgttattctgccatactatggaaatactagcgagagcaatcacgtgaagagagaaagaaataaagggcatccagagtaggaaatgaagaagacaaactctcctttattgcagatggtatgatcttatatttggaaaaatctaaagattccacaccacaaaaactattagaactgataaacaaaaataagatctgttattagcaagaacgtggaactcgaggtcatcatgctaaatgaaataagccaggcacagaaagaaaaccattgcatgttctcacttattggtgggattagaaaatcaaaacaatggaatccatgaagatggagagtagaaggatggttgtcaggagagaagagggtaccgaggct

SEQ ID NO: 482425 - DNA, 169 bp, Homo sapiens
ccaaatggaatccccaaatggaatccctacgagttgatcgttgaaggcttttcggcagactatgtctggggtggcatggagccgggtttcgtattattgggtaaagcgttattgtctgtttcagactcaggcgtcatcgcagtgagggtgctcagctttctgatttttg

SEQ ID NO: 482426 - DNA, 247 bp, Homo sapiens
tttttttttttgacttaacagaattaagggttctgcacacttttagtctaagggaagccagcacaaaattgcaaaggagagacacatctgcacagctctgggcacattcccaagagagggcatccaaagcgcaagtctgagagcacttgtgaggtctacagtgctggtgatatgtctatgtgcacgcacaggttcctaaacacagtggcacgtgtcacaggaacacttaaggagcaggcgctctctc

SEQ ID NO: 482427 - DNA, 1101 bp, Homo sapiens
agcggagtcgtcgccgcagcggcgatgggagcggtggggacgaggcggcgtgcggcggcaggagggggagcaggtgctggcacaagagcagcggcttgtggggagcctggcagcatgcagtaacagcatgcagcagccgccgccgcctgccgccagtaaacgcggactggtaccccaggggactacccagcctggccgtgcctggaagccgcgctcgggtcccgccgcagtcggcggtgggggatgggcaggcagttggctggtcccgcctgccgagggttaaccgcccgtctgggtcccggtcctgagctgggaccaggagcccctccgtccagaaaaccccactgctgtccggccacgggcacagggttaaattgtgaaaggcaacccccttggggaacttggattgcctggtgtagcttgtttctaccattatcagtgtatctgcgaatgacagtgggcggggaggcagagcaaggccggatattcctggaagtggttgggaaatcccttaagtgaaacggcaacacggatggggaacagtgttgcggagaacaagcggatttgggagagagactggggcggcggaccttattgggcgaacgagaagacatttttaacgtgaagtggcacctttgtgtcaagaattgagagttcaaacagtagatgtgaaacacaatgggtttgcgccacttgggaaccaggtttgtggaacaattacagtcgtttcgaacgtccaacgcgatcataatgatagttttcattggaaaacacttgtgggaccagaattgggatatggttgtcatgcgaagaaaaaacttgagcttgcgaaagaggggggcacatagttacccgcaagtggattagccgtccgacgacccatcctcaatcttggggcacttagtatgggagcaaacgccaaactccaacgctccgcactttcgccacagtcacgatgtcgggcgctccccttggcgaacacatgtcaccaggctgcttcggatgacacatcctgggggcgccaaaacactttccgccccggaatcaccccgcgatctcaccggcacggcaaccaattgcgcccaatcgcgcagccacccc

SEQ ID NO: 482428 - DNA, 272 bp, Homo sapiens
acggcttctgtgcttgtggctatcgcaactctctgttgccttcatgggcctgtgacgtcgccctcgcctgcagaggacaggcccaggctctcccccgtgagtacccagagtatgcggtggtcctcttaggacaaatccctctaccagccacgccctctgcaccaggcctgtcactggtgctgatgtccggttgtgacctagtgaggaagggggttcttgacagccctccctgtggctcatgcacaccctgcctgcgaactccccccgacact

SEQ ID NO: 482429 - DNA, 1751 bp, Homo sapiens
  misc_feature (318)..(318): n is a, c, g, or t
ccatacgtacaactatcacactcctgatgccaactacctgaagtctagactaagtctttaatagaactagcttacataagtagacattattaccgtcttaaacggatacctcctatttcagtgactcccttataatggactactgcttgaaagccccacgatcgaagggtccaatcagttaggtgtgccagcagtactcgtctggaaagctagtgctgggatatgtagatcaatactagtcgcttcataactacagtcctcaacacctccactgaactcacagagacaccactgaagcacataaccaccattacgctncgtataccactattcccctagtgtaggacaataaactatatgtacgcgacagtaaatctcatacatgacacgtactcgcacatacagcacgataccgtaacacaatgcaggcatcactatagacattacgctctctcattcaaggtacatagccctcacttcattaaagtcccacgtccgcatacagtaagagcacgctccaatatgctacagtacgcacacagtctcctccatgtacacgacattcaccccgggaccggcacgttttcattcgcgtcagtaagtcgttcccagcaggtaactttcggcactacccgtgcagtttatactagttccctgactctaagggtaattaacgtgcacacatacgtacacggaaacgtcggaccagacttccaccgggaatccggcagtttacatacagttctcgttcatttctcccatggcgtgacgctttctcacataacacattgcgtaacctttcccacaacatttaacatacacgcctctcctcacgtgaatatgaacgtgttcgttgatgcgataagcactttccgtctagaccacctgcccgtgctgtttaaaacacctgcgggaactttatatcaagccctaaacttggatggaagacacttcattctgggtgagcgtaaacgttcatactccggagggtgtacatgctcatgcaatacgataattatccttagattctcacgataataggtttaacatgtgtacccttacaatgtcaataagcgtaaaggtttcagaacagagtcccgtaaagtatcatccggatccgtaaaatatagttttcactccatcacaaataatctaaatgcggggcctccacatacaacgcggggcccacaatattaagccacagcaataaatataacccctctactattcacagcaggacggcaaatatcagacccggttaatagtgtacacaatccgtacctgagttccaccaaaactgaatgttcccagaatagattgcaaaagccacaggaagcattaataacccggggggggttatcccacccgggaggggagaaacaccatctagagagacgaagcaacgaagacagcgaagacacagccagcaaaacaaacaacagacacaaaacaaacagggcgcggctcgcaataaaggactgccccactaacgaacacacgcacgaggagacacaacaaaaagctgaactcaacgccggccaccaccgcagccaacaagacgaacaagtacggactgacagccaacagaaagaaagaagagacagagttgaggacccaaaggaagcgatctgagacaccgaaccaacaccaccaccagaatgaataggagtcggttcagcagcagacagacgagcaaacacacacaaacaaccccgcctaggaagtaagaaaacagcagcagacgagacgac

SEQ ID NO: 482430 - DNA, 101 bp, Homo sapiens
attcatttctgccccttcccttctccttctccttcaggaagcagaaagcgggaatcaggaaagcttaaaattaaacctaccagagaggagaggagagggag

SEQ ID NO: 482431 - DNA, 135 bp, Homo sapiens
acggcctgcgggcggagagtcgctacctacgtgcgtcttaggcaatcgagactggactggctcgcttgctgagccggtctgagcggcgtggtgactgcgtgctgcaccactctcgctcttctaggatgacctcgt

SEQ ID NO: 482432 - DNA, 360 bp, Homo sapiens
ggacccgaccagtttcaggttgtcggtgtatacagaagtcgctaccagctccaggccacgcaagctgatttccccgatctggctagagacgatgttctgggagacagaaacgttttgctggagcagatcaaacacaccagcggtcagcagggttttgatacctaccggatgatacttcacgcccacttcagtttgtttaccttgggtcggtttgaacgactcggtggcactggcactggcgccagccgttggctggaacgactcggtgtaggagatgtacggggtaatgcccgaatcaaacacgtagctcaggccagcgttaccgctgaaggctttatcgcgcgggtgttgggtcgacgc

SEQ ID NO: 482433 - DNA, 642 bp, Homo sapiens
ccccccccaaaatcataaaaatgttttttggggttaaaaaaaatcacggttgggggaacctttaaccaataggtccccaagaaatgcccctgggggctttcattagaaaaaacagactcttgtttgtttttttccaggggctttgtttggggataataaagggttgggaaatgggggaaatttgttccgggaaagggcattagccggggaaccccgtttgtttttagagtccgggccattcgggggggcttaccccccctggggggggttttggggctgaaaacccctaaaaatgcctgttttccttggggtaagggtttgtaattttgccccttttgtaaagcctttaaagcaaaagttttttgagggattttttttttaaaaaacaccataccctttatgggcctaaaaggggccccctgggttttggtgaattgtttttgcgccctcccttgatgatgaaggaggccccaataatggtgccccccaaacccaaatgtgggcccggggcacccccccagttttttttatttttggggaagggctttgggaaataaacctccagtgttgggaagagggttacacaaccccaggtgtcccccttgaggggaaacgttctcatttggggccgaaagggaattt

SEQ ID NO: 482434 - DNA, 333 bp, Homo sapiens
  misc_feature (2)..(2): n is a, c, g, or t
  misc_feature (15)..(15): n is a, c, g, or t
  misc_feature (74)..(74): n is a, c, g, or t
  misc_feature (115)..(115): n is a, c, g, or t
  misc_feature (239)..(239): n is a, c, g, or t
  misc_feature (296)..(296): n is a, c, g, or t
gnattcggacgaggnagagccatgtcaattttagtaaaagcatacaatgacaatcatttatcttgtggcttgtnattagtggtaactgactgatttaagaagagaaaggccagtnttgttgtaggaagaataatttagtaataaccgactgatttaagaagagaaaggccagtgttgttgtaggaagaataatttagtaataaccgactgatttaagaagagaaaggccagtgtagttntaggaagaataatttagtggaatctaaagttaagtttgttgttttctgttacaagangtctgatacaacccgacagggttgctttccgattgtg

SEQ ID NO: 482435 - DNA, 854 bp, Homo sapiens
  misc_feature (429)..(429): n is a, c, g, or t
gcggccgcaatcgccgctctctcaacccagatggccccggcgccccactagccatccgtatccccagtgcagctgcggcggcggcggcgaaagccgacgggacgagggcgccaggaaagaagcagcagacggaggcggcaccacggctctgagaagcaatgacattccctctctagcccgccgcccgcccagccgaaaggagcagggggaggagccccctggagtccgggcggagctcaagcaacctctgactccgcctccggcccgacaggaactggcccctccgcctgtcacaaagcgacaggtccgttagggggcgggcccagaaccgctgcgcccaccaataggggcgcgagctggggcggagcttgacccaaccgtctccccctcccccccaccatcccggcctcgcgccgattcgcccggagnggccgagctgcgcggctacggcttcattgtcagttgaaagacgcggtttcgcgcgcctgtgcggtcggcgagaaagggtactaggcggctccgctaggttcatggagctgagctgggccgaggggcgggaactgcggagcggcctcggtcaaactcgtcttaaaggacgcggaaagcgccgcaccgaccagcaggacgctcgcgggctctccgcggtcgtgacttttaacccgctttgcgcggagccctcaccacgtgacggccgcgcaggcgcattatcctagccctcggcgcgtgggtcgggccgaggggttcagcagcccgtggcgctcctcggctggcgctgcgagtgagcccgcggcggcagtgacacagcctaccttgctcattgcccttcacgtcccgcctccggcttctcgcgtcgc

SEQ ID NO: 482436 - DNA, 797 bp, Homo sapiens
ggagcagcggcgccgagctctgcttcggcttcggccttcggctccggtccgctgttggtgccgacagacctagagccgcccgacgatagggcatcagccggtgccttggctccttcaatccgcatcggtcctcagaccgggcgtgtgcttgcctccggtcgtcggcgggcagtaggtccggagtggtgtcgaaggtgccgcaagccgtttgctccctcggtcgcgcgggtgacatgggtgctgctcagcctcctggcgtttcctctggctgctgtggtggtcaccgaatttgcagagtatgatcgtgaggggatagccgcactatggtacgaatcgtgcgattcccatgtggaaatgttcccttatatggagaaatgaagtgctagtatcgacatctgggacttcaagtacaggtgtgcgtaagcgtgggtaacttaacgggagtgctaggcaggatggtcctgtcgttgatcgcccagtctgactgcaaggtaaccgggatgttgtcacatgagaaactccctttctgtgacgaccaggtcccatgatacgcatggcataactgacgttgtacgatctagctctaatcgactgcttggtcgcctcatacgaaagccccaagtgagcaacttaggtatctagtaactcagatgcgcaacagtctggtttgtgcacgtcaaccggggtgtggtcagatcgttggatccccctccgattggccggttccaagaacccctacaggaggcccccgaacaatctctttggaccgtccgcaaccgttgcggcaggaacttggc

SEQ ID NO: 482437 - DNA, 212 bp, Homo sapiens
tttagcagtgttgttcaagtgattttctctttgactgaacactactctgttactcgccatggtatcctaagcgtaagttaatgactacagcttctccattcacataggaggtcacagtgactagtgatggatgcaagacacaattatctatgacaattacagctaccgatgtgtgtgagattggtactcgaggctcgatatctcgtaaatct

SEQ ID NO: 482438 - DNA, 165 bp, Homo sapiens
taaattcaacagactgggcaccgtggctcacacctgtaatctcagcactttgggaggccgaggtgggcgaaatcctaagtgtcgagaaatatgagaaaccatctggcttacaccagatggaaaccccgtgttttactaaaaattcaaaaaaaaaacaaaaggggg

SEQ ID NO: 482439 - DNA, 2069 bp, Homo sapiens
aaatgaaaatgtcacccgtaagggatgtgcaatgcgcagttggatccacgctgcgttgagcgctctggactgcatcctaccaccaaatcgtccaacatgataaagccacttgcgaccttgcgtctccagggatgtctcactacaattggggggatatttggatacttgtatccgtgttgccagagtgaaagcacttggctgttctcaaagcaggttgatgggtggtcaccgtattgtctcccagtcgaactgttcagcaacacgtgaccaggtcaatcgtctgtccgaaattgcaccaatgaaatgtttttgcgctgaagcttcttccgtgggggaccaatgtagggctatcaatgtcaatgcactgtgtactagtctacgggggatggtacagtcggtgggcgaaccgttaggcatggttgaccatgcaaccatttgaccccacccaaatgggacagccagctagggcttacaactgctccaggtgatacatcctgagaaccaattccagggacaaataaagcaggccggataatgcccactgatcattgggacttggccaccaccggcagtcacaaagtttgcgagtggcaacggtattgcatcgaacccatgagaaagggaccaaagactttgactctgcccgcccatggtacaaccagccttggaagattggcccttaaaatttcttgaccgtcttggtagaacagcatgccaatttgcttgattctgggtcccctgggcaacgccccattgtgttgtcgaggacgtcctcaaggagtatcaaccctttggggtcacgcattaggacggacgtgtcattcatacacaaccaacagatgtgtggcggtggcgtgtcacacagcagcgggtgccacacaaggtgggtgcactggcagttcaacaggttgtcacaaagttcaagggtaaaggataatatccctagacgtcgcaccccgctataaggggtgaaacctcacccgtagtcatgactatacctaccaagctgaccatcactacacacatgagtgttgtttgtcgtatgtctattcttcacatctactacctatatctcggtaagcgtagatacaacatcgatagcattgagatacacgatcaactgtacacacccagcgcaactatacgcacacagagacacagcaaaggcaaagagcagcaagcaagaagccgagacaccaagacagaggcaggatgacagacagaagacagacacacaaccgaaggcagacgaaagaacgaagaccacaacgagacagcaaaaactgaacgacaagagaacaacacgacgaaacacaagacagacgcagacaaaaacgaaaagaagagcagaaaacacacagaacaacacagacagcacaacagcacacacaacacagacgaaacgaagagcacaaacagaacggcgacaagcaagagagaaagaacagacgaagaacagaacacgaagcagaaaacagacataaggagcagaagagaaccgaccaggaaaaacccagtagaaaagaaaccagcagactagagaagacacgatcgatgaagaatgacagaacacagagcacacgagacaagaagagaacgacatcgcacaacatacacgaaaataactaataacactgagcgacacagcactaacataaacacgaagaatcgaaacgagagatctggtcggacagacagcatcaacgataagcgagaaaacacagagcaaaagcagagcaagaccaacgacgaacgaagacgcactgcacgccaggaagaagagagagggagacagcgaagaagaacgagagagcagacagcgcacacagagagagaaacagaagccaacagagacgcgccgaggcgaaaacagcaagcaaaaaggagaacaacaggaaagcagaacggaggagagaggaagaagcagaaagcgagaagaagagagaagcagaagaacaaagcaggagaggagacagcaagaggaagcacgcaggcgccaacgagaacagagacagaggcagacaaggagcacacgaggcacagagagcgagcaacaacgaaggaacaag

SEQ ID NO: 482440 - DNA, 211 bp, Homo sapiens
aattgtagtccacgcttcaaactaatttctggatacgaaattttcccatatgaaaataaggagagaacactgtgcctctgttgaacaatggcagttctgaaataatagtattactcaaactagcactgaagtgtatacacataccagcaggtctattatccagtgacccggatgtagtagcattagccaagccagtgacactaaaattcca

SEQ ID NO: 482441 - DNA, 100 bp, Homo sapiens
cgagtgaatgacggcagtatagctgttctgagtgtacacggacggcagtgtacgctgtttcttgattgtacacggagggccagtatcgctgtttcctgga

SEQ ID NO: 482442 - DNA, 102 bp, Homo sapiens
tgagctggcccggttatcttatgctccaaggctatggatcgcaacactaaaggatcctcattaggaaccccagtaaatcttgcagtattgaaactcagtgag

SEQ ID NO: 482443 - DNA, 234 bp, Homo sapiens
  misc_feature (15)..(15): n is a, c, g, or t
  misc_feature (234)..(234): n is a, c, g, or t
atgactctgcgccgnataatttaccggggctaagcatgacaccgaagctatggacaggaatgtggtaggggagcattgcatgcagcggagaagcatgaccgagagggcatgtggagcgcatggaagagagaatgccggcgtgagtagcggcacgtgggtgagaatcccacgcaccgatggcccaaggtctccagaggaaggctcgtcctctctgggatagtcgggacctaaggn

SEQ ID NO: 482444 - DNA, 740 bp, Homo sapiens
tgctgtctcaagagtgacagaggcaaaataaaattcatctaaaaatggactcatgatgttccaactcatgttgttcaagcatcaacagtaccttgtttcatataactgataaggcttttcagaaacatgggttatttgtagatttcaataatccatggacagtacacagaatagattacagtatgttcaaagtcaaatataaccacaattcacattgaatcagagattttctctcgttttaaattagatgttttagaaagttgtattaatttttatactcaagctaatttttattagtcaagctactatttagtaactttagtgttcttacagaaaataaagtgttaatgtaactcccaggttttcctgattttcaaataattacagcttaagactgtatataataagtgatagctacaagtgatggctaaaattttaaatttgaaacaaagaaacagatttctctgtgtttcttaacaagaagcataacattattttcttttaaaaatgtacacttagaaggcattctgcagttgggcatgggtgtctcataccctgtaatcccagccacttggaggctgaagtggggaggatagttgaacccaggagttcaggaccagctgggaaacatagtgacgacacatcttacaaaacctaaagattagccacgcatggatgggcctatctggggtcccagtacctcggggccagggacaaatgctgcccaggagtaggctctg

SEQ ID NO: 482445 - DNA, 146 bp, Homo sapiens
ggcagtgtgcagtattagaaatcccaactgtctctgatacaccgctgctgtagaactaattttccaagctctgaatgtatattgacaattattcgggccagtgtgaaatgcctgaatatttcagagacagccactagcagtcgggt

SEQ ID NO: 482446 - DNA, 879 bp, Homo sapiens
  misc_feature (552)..(552): n is a, c, g, or t
atgaagtgcaaacagcaaaagaatttataaagatgtacgaagctgcacgaaaatgaataccagactgccatcagtgagaattatcagacaatgtcggacactactttcaaagccttacgtcgacagttgccagttacacgcactaagattgatgggaacaagatccttagctacaagatgtggcagagagagatgcagaatgcttaagatgaacatgtgcatgaccggatcattgtgtagtgtctttgcgttataaaaatcattgcaaaagtattctgaacgtgtcaagctgcccagtcagatgggctgttgccatttaaaagtcactgtaattaattaagttctgatgagagcacaagagcttagctaatcaaccattattttgcatcttgttggttctaagaggatgaaaagtcagttccagtttaaatgtctttctgttaggcctttctttcttacaaatgaagagatgattcttctagtggactggttaaccagttttgaagtgtctcaaaaatattttactaactgtaaccctaaaatgatgtctgnggcttatgaaatcagtgaattcggatcatctccccagctgcttttgacgtgggggtcattctggccattctagtttacggtggttgatggcttagccatatatgctggttacagaaattgctacccttttcttcctcccctgttccttgttgtgcacgtgcgcatgagggggaaccctttcttgtcactgggtgtaccctgcagaaggtttcgccgtagggggactacactttttcacaggccgcggatgccggggaccggacaacggaaccccttcgaacggtggggcttcgtgagacgcccgggccttccggttttaagccgctg

SEQ ID NO: 482447 - DNA, 192 bp, Homo sapiens
agacttatgcatactcctcaaccgataatgagtgtgtctgtggctgagcacttctctgtagaacactttcttactgtgcatcctctgaagacttatggtatgctccatcttcatggcggtcataaccatgagggaatctcccgctttcactttgtctccagctttgacgaacacctttttcaatggttccag

SEQ ID NO: 482448 - DNA, 807 bp, Homo sapiens
cacgccccccccccgcccgtagccggcctcagccccagcctcgctagcccaagcatgcatgatagccgtggttgagaaccgtagagctcgagatgcatcatacacaaagtattccgttttgctcttgaagcggctgcagctgtgttatggcatctgttcccgcctggccggcactagctgcgctccctgaggaggagcggacgcccactcccgtgcactataggcctcatggggccaagttcaagatcaacccgaagagaacgggcagcgggaggctgtgtgtaggacgtgcccattcccagtcgtactttccccccgaatcccagcgtcggttgaggggcggcgagggctggatcctgggcagatatatgccaacaacgacaagctctccaagaggctgaagaaagtgtggaagccacagcgtgtttgaggcgagagattctacagtgagtatcctggacaagaagttcacagtagactgtgaccatgcggaccctgtgacctcatcgatgaggcttagcgggctcgacttttacatcctcaatgaccccgaaggaggacctgtgctccaagtttgggatggacctgaagcgatgggatgctgctgcggctaagcccggataggagcccctcagcgtgcacccccgagggatccctgagcggggtgcagccatctacgacagagtacaaggaattttgccatccccagagggaggaggcagagtgggtgggcctcacgcttggaggaggacattgataagcaggagactttggaagaaaaagacctttagccctgtcaggatctat

SEQ ID NO: 482449 - DNA, 106 bp, Homo sapiens
gcgccatttcatctgtcctcattctcttctcctttcgcagagcttccagcagcggtatcttgggccagagcatccggaggttcacaacctcgtttgctccatagag

SEQ ID NO: 482450 - DNA, 266 bp, Homo sapiens
ctcccggatttaactccggcccaccccaaatgcaagcatgctatttcagaaatatcaggcagatggacagcatgataaaatatgaccggtataataggataaggagcccctttttattttctctcccccaattcctggccaggtggctcaaaataacctgataagaatcacggataaataatcacaaaaaataccaggttaaaataccattggtgcggctgggtgcagcggctcaggcctgtaatcccagcacggggctcgtgcgg

SEQ ID NO: 482451 - DNA, 788 bp, Homo sapiens
  misc_feature (233)..(233): n is a, c, g, or t
ggcgcactctggccgtggctgcccgcgaagaatgctggatgggagagctggaggagctgataggctcagatggcctctgcctggcctagggcaaggaggaggcggtgaagcagcttcgcaagatgcacggcccaggatgaaggagcctatggctgggacggtggaggcagacacggcacctgtcccggtgaggagtatcgttctcccagcaagtcggcgaaaggtgaagagcngcctcaaggagcctgagaggtctgagtgctgctgcggtctgcagtgaggaactgggccgttctcggagccgtcctcgtgcgtgcaggctccgcagcacggaccgtggatgagcatggctagatgaaggtggtcacaatgagtaagccttagacagaggcatgccacttcttggatcgagaaagcgtcaggctggaggggcgcctggggctagttgggaggggaacgagcctggaggaggacgacatgagcgaaactcatgaactgcgtcagtgtaccgtgtacctgcttgacttggtccatgcgcgttagagtcatcgtgatgcaactgagctgtcagactgagcgcagtttctcagccaaggcagatgagcgggctggcaggcagctggaatcggcagatccatggagctacggggacgcctgggtgaggaggatgcgtggggcccgtgcccgacactaagatgagccattgctgtcccttgagatctaagttggaccaggctgaaggagacagtctagagcaagagtaccagatagcgcatcctctctggaaa

SEQ ID NO: 482452 - DNA, 390 bp, Homo sapiens
gaaggtctgactgggcgtaccggatcagcatggtcatttacagctcatggcatatgcgtgataagagaatgggcgcacaggcccgattccagtatcccacggtagtagaaggaacgtgtagatgagatgcgtgggcccatctcaggggtcacacattccggggccaaggagtagctctcataagagcttaaaataaatgcactggcggtcgtctgggaagaacacacaggcacagaactcttgtaccgcttctcaaagctgcccaaagctgcgaccttccccctcagacacccacaattaattgtttccattcagctttggttttgttttctctgcaatttacatgcaaacaccatctatctattcatccatacatccattcagcctctt

SEQ ID NO: 482453 - DNA, 160 bp, Homo sapiens
gtcgtctctgacggatccccggtggtgggccctagtatccctagctagttacggcatcgctgaggcgggagaattgcttgctatccgggtatgtggcgattgcccgtgcgccgagattgtgccattgtagtctagcctgtcccaccgcgtgggtaccgag

SEQ ID NO: 482454 - DNA, 835 bp, Homo sapiens
  misc_feature (293)..(293): n is a, c, g, or t
tggaagcatagggcgcctcccaggccgtctccccgcgtccagttatagaaccgtaattcccaagtgacccgggaccgggcccagtcctgggctcttactgtccgcttctgctgggacctgtaccactaagatgggcgtcttctgccttgggtcgtgggggtagggccggaagcgtgcggacgcctgggaaggggccgttgaagtatcttatgagccgtctctggggggaccactatgcagggccagtccctagcctagaggaatggctcgcctggcttgtggtcaggagggangccgtgtgggactgctcgtccttctctcgtcgctgcgtgatggtgccgagctagttggaccaggactccagaggaagcaaggcacgtggcccatgctcagacatcgcggacccgcatatcgtgcccgtgggctttggagagagctggaacgaagcaccgtcagcgtgggatgttcgggaaaccgtatttatcaagctaatgggatttgttgcagaagaaagaaagcattacactgtttatccacccccacaccaagtcttcacctggacccagatgtgtgacataaaagatgtgaaggttgtcatcctggggacaggatccatatcatggacctaatcaagctcacgggctctgctttagtgttcaaaggcctgttccgcctccgcccagtttggagaacatttataaagagttgtctacagacatagaggattcagttcatcctggccatggagattatctgggtgggccaagcaaggtgtactccattctcaacgctgtcctcacggttcgtgcccatcaaggccaactctcatacagga

SEQ ID NO: 482455 - DNA, 689 bp, Homo sapiens
  misc_feature (236)..(236): n is a, c, g, or t
tgtgagatggtatctcatcgttgatttgatttgcatttctctaataatcaatgatgctgagcttttttttgatatgtttgttggctgcatgaatgtcttcttttgagtgtctgttcatgtcctttgcccacttttatttttttaattttaattttattttattatgttttttgaagacagagtcacactcagtcacccaggctggagtgcagtggtgcgatctcggctcactgcangctccacctcctgggttcatgccattctcctgcctcagcctcctgagtagctgggactacaggcacctgccactacatccagctaattcttttgtatctctaacagagactgtactttcaccgccttagccagcggtcttgatctcctgacctccgcatccgcccatctcgcccttccatttgctgctccttctcccccctgacccttctcgatccttccctccctgcctacctttctcatccccttcctcccccatccttctctccttctccgtcctctcccccctcctgtcgctctctcccctctcttctcccctctccccccatcacctcccccttcttcctcccttccctcttcctctcctcctcctccccaccctttctcccccgtctccgctccttcacctctctcccctcccctttctcttccccctctcccccatcctcttccct

SEQ ID NO: 482456 - DNA, 279 bp, Homo sapiens
gctgctcagagtatccccagtgatgacatgctcgagtcctttcactctgtctcctcagttaatagaaaggaaacatagcccatctatctggacctgtgtagaagaatttggaggggaaaaaaaaaaaaccaggcaagaattgtccccttatttggtgagctccctttatcctgtcccatggtcctacagcaaagggcttatttaaaattatttcagtttccctcatctaatagggcatattgaataaattaatttagagcgggaaaaagctggggtacc

SEQ ID NO: 482457 - DNA, 1420 bp, Homo sapiens
  misc_feature (1262)..(1262): n is a, c, g, or t
ctttttcgttgggtatgtcgccatgctacgtcgcggtttcttgctatcgtcacgtgtgttgtcggtcttcagttctgtgttcgattttttcaactgtgtttaggtgtcctcctacgtattgggcttcctctgttggtatcgctcgttgtgtaattgttgccacctgttgcaaggtcaatcagttgtggtgccccctcttttgcgcgcaatttttacttgtttctgtggcctgcaagtgactggtccaccgtcgtgggtgttcccccctacccctggggggtcgttttgccccccctgtgtttgccgggggtgtcgcctcgacagtttcgcgtggcgccggacctgttactagtggtgtgcgctgctttgcgggtttttttgcttcagcttggtctctcgcccaccccgcgatatcacgttgggagctgtgtgttttctccttgtgtggtcccacccgcgtttgtgttttgtttggcccctgttacaccgcgtctccttggttgcgacacacagggggtggaggggtgcccctcccctgtgggacacccagacctggtgtgaatcgcccctgtcctcccccccctgcatggtgcccaccaacacgccctttctggtgaaccaacttgcgttttcccgtgtcgcccgcagtgtcgaccttcagtccgtgcctgcttttaggagaagcaccgttcttgtgtgggcttttttggctgtggacgccagtccaccccctgggacctcctgtcttaggtggtctttctgagggacccacttgatggaccctggaggttaagtggattaccagaccctttggccaggacccttgattgagtgaccccttctctggagacttgcgcccaggtctcctctgtgcaacgcccaggccagaaccccaatcgcaatccctgtgagacacctgcgcctcactggccacccacgaggtgaaccacgggccacggccacgcgtatttatggcccacagcctggggaaaatgggaagagttcctcgtccccgctcgccaccactatgtccctaccagtgaaaatattgggaaaagttgcgtggctatttgaattcccgggtctcgttctctggacggccacgaggacccctctggtggaatatagttggtcacgctgccctggagaaaccctcgttcccacgctttattcacggaaccgccacggccctcgtgggagccccccaacgctggccgcgggaacacgggccacgatttcactgttgacaccctcggggatgnctgtgaaattttctcctcgcacggagagacactcacttgaattttttcaacctgtatcacgtacgcaccacgtatttttgtatgaaaagtgggagaactttctgacccgtaattccatttaattcccaagccttttgaaattaaaaaaatccaactta

SEQ ID NO: 482458 - DNA, 105 bp, Homo sapiens
ctcaagcttatacttcattctttccaagctattggaaacgctatagattcttgtgttaaaagaagttctgaaataataatgtcacagcgcgaatcatgcaagaga

SEQ ID NO: 482459 - DNA, 139 bp, Homo sapiens
caagtcgttagtgcctggatcaggacatggcgctgatcaccccagagacaacaagctccccggcgagatgcgtggacctcggcttgaccttgcttgcagatgttcagctgtctggcagtagacgggcgactgcgttgca

SEQ ID NO: 482460 - DNA, 540 bp, Homo sapiens
ctccgtgtgggtgcaagtggaacacacagagctcgaggtttcagtgacgtgaagggggccgacgtgaggttaagacgtccccgttgacctgcctcttcgtatttcttgaaagaccctggtgcacgcttagcgacgtagcgagcgccaggatttatggatccccgagccctgtgacaagggttcctgtcgcagttgccccctcccaggatttcgactcagttcagcgaagtcggccgccccgtctgagaaatgaggacaccaaggtcttagagcacaggccccgaggcgccgtctaccgaggaccccgtgcccctcccgccggctcctgtcggtcagcactgaaaccgccgtggctgctccaggcgctccttctctggggtccagagggtcccagtacaggcgcgtctgctcttcggccgtaggcccgttcagtcggccggtcgcctcgtctccctgagcttgtcctgcatggccatggtgcaggcatggccggtattccggtcgggtctcctgtgtgctgacgacgccagttggacctcc

SEQ ID NO: 482461 - DNA, 674 bp, Homo sapiens
  misc_feature (2)..(2): n is a, c, g, or t
  misc_feature (163)..(163): n is a, c, g, or t
  misc_feature (295)..(295): n is a, c, g, or t
  misc_feature (337)..(337): n is a, c, g, or t
  misc_feature (409)..(409): n is a, c, g, or t
  misc_feature (430)..(430): n is a, c, g, or t
  misc_feature (501)..(501): n is a, c, g, or t
  misc_feature (550)..(550): n is a, c, g, or t
  misc_feature (602)..(602): n is a, c, g, or t
  misc_feature (614)..(614): n is a, c, g, or t
  misc_feature (641)..(641): n is a, c, g, or t
ancaattctgttttatggaagttgtataaaactacatttggtattttccctcagtcctctggtattcttgaagcttgaaaaatttagaacactttaatggtaacttgttgaacagcaatagaaaggagaagatgttcttagaagttagttttttaaaaaaaanaaattatatccgagttctgttaaagccccagcaagcaaggcccataaaggaattaagaaataggataaatttatggtagttaactgttccagtttagcacaaagtcgaaggaagaaggctaatttaagttanaatgcaataaggtaccaggctttttttttaatattgttttanccatgttgagggttaaagccagatttacaccgcccagccattttcacaattagcaggacaagaaggatagtntcaaatatccagaatggaatnaatattaggaaccagttccaaggtgctcttctcatccagtttcaacaccaacatgatcaagaagagttgtnttataagccaggggagttgtacttttttagccaaggacatttttatttnaacagtttaaagaggctgttgcagggtcggaaaaaaggaaaaataccctggnagccctgccggncggaaagcggagagggaagcgaagatnagcaaattcgccagtttggattcttgttctttt

SEQ ID NO: 482462 - DNA, 1480 bp, Homo sapiens
ggcctttgaccggcagctctgtgtctttggtggatagatgcagaaacaaggaagacatggcgtctgctcctgagaaccttcaacattacaggccaggagagaagtcttcagaccaacgagctcccagcagttcacacattcatatcaaccagacacaacaaggcgatggcagcccaaactccggcagatataacacagaggagacgtgacgctggtgcggctgcggcacaatcagggcacggttcccatggcgggaggatgatcccttgcaactggctcaccacggggcaaccactcaagacgccatgcatctggacgcacacgcaacgcggctgcaacgcagagacgacacacaaccggagaagctaccagtcgcaccccagtgacaacagaacggcggccactcgacgcgaccctgaccctagcagacacctgcagcgcgagtcacaagccaccctcccatatcccccccagacatagcgcgcacatacacattgactcaccgcagagccctacgtcgcacgacattactacgcgcgctccatgagaccacccatacccatactatcacaacgtcgcgccttcccaaacactgccctaccacagcttcacgcccagactacccacactgcttacctcgccatggcaatacgccttgagcactcgatcgccacgcccacgcggcaacgactccgcaccaaacgcgcatcacgcctcacacccatggaaggaaatactacacaggccaactgacaacgcaccacaaacaaccatacacaacccaccacacacacgaagcgacacccggccgccgcgccccgccaacaaaacccacacggaaaaccataacacacaaaactgggaccacaaacgccagcactaacgcaagccctgctagcccccaaacacggcgcgccactccagaacgacacacacacacgcaacacaacaccagcacaaaacaacaccaccagacattacagtccacgacacacacagaaaaacggtcaggaaacacagctacgaaacacacgaaagaccacactggagacaatacgagagcaggcgcacaccacacgagatcaagaaggcaaacctgagaacccgtcaccacaaggcaccgaaccaccgccgaggacaggcaccagcacgagacacacatgacagacccacacacacacaacagtgaaggacaggacgcaggcgaccacaataaaacgggacggagctgacacggacagtacgccgaaacgaacgacagaaacaacacaccaaagcaccgacagcaacatacaagctctaaaagaagcagaagacatcatggagacggacagcacccaggactagacacacaacgaggggacgacaaaagaagaaagacacggacgacgactgacggaccaacagcagagcgtcggaggacaggagacaaaccgagagacgaaaacaaacagcactaaagagagaacgcgacgaaaaa

SEQ ID NO: 482463 - DNA, 175 bp, Homo sapiens
ggtccaacagaaaataacggagaagaaaggaggtcaaggatcagggaactaagcgtctgtacatctggctggtgaattcacataatgcttagttccccagcaagatgtacagaacgcctgttgtttacattgtttttaatggaactagcagaataaaacatctattttaaaaatg

SEQ ID NO: 482464 - DNA, 253 bp, Homo sapiens
gctagccatcggttaaatagccgacgcaggaggtgctatgaagttagcacagtacgttctgcagtgaatttgcgcggttatgatttagcactgcatctttacatttgtttacatttctctcagctgtgaatgcctccccataaggcctgtgtgtgtatgtatatattttgataaactgtaactttgtaataatagatttgtgcatattttgtggttgtaaatgataaaatagaccagtatctatatatattta

SEQ ID NO: 482465 - DNA, 301 bp, Homo sapiens
ttcgtttgggccagaggatccacacacatcttcccctaaagcggacaaaccaggcaggtgcctggcacccgcagctgatggctgaagaggagcctggggtcagagaaagcccgttcatcacctggaaatcctgcggtttgtctgacagcagctttctagatgtaggcgcacttcgctttcttttgatcccggggtagtggggcggaggacgtgaaggtagtttccttggggtggtgggagcccccgggcctccgctttgatccaggaatggctccgcctcatctccagtgagtccctggtc

SEQ ID NO: 482466 - DNA, 115 bp, Homo sapiens
gccctgatgctcctattgttacctgactaaagaaggaccataaggtaaaaggcaccattacctatatggagtgagcccagaccccaaggagaaaagcttgggatagaacaagtcc

SEQ ID NO: 482467 - DNA, 591 bp, Homo sapiens
actaatcctatagatcagttatttttcgactttttagaaaggctttagactagtgtgagatggtgtctcattgtagttttaatttgcatgtctctaacgatcagtgatattgagcttttaaaacatgcttgttggccgcatgtgtatcttcttttggaaagtgtcttttcatccgggcatggtggctgatgcctgtaatcccagcactttgggaggccgaggtgggtggatcacctgaggttgggagttcaagaccagcctgaccaatgtggagaaaccccgtctctactaaaatacaaaatcagtcaggtggtgcatgcctgtaatcccagccacctgggaggctgaggcaggagaattgcttgaacccgggaggcagaggttgtggtgagccaagatcacgccattgcactctggcctgggcaacaagagtgaaactccatcttaaaaaagaagtgtctttcatgtcctttgcccactttttaatggggttgtttctttttgtcttgtaaatttgtccaagttccctatagaagctggctattagacgtttgtcagatgcatagtgtgcaaatatctctcccataggta

SEQ ID NO: 482468 - DNA, 727 bp, Homo sapiens
gggggcagaggttgcagtgagccaagatggcaccactgcactcgccagcctgggcaaaaaaaaaaaaaaaaaaaaaaaaaaaaatttgggggcgggcttgggccttagagaaaaggttttcaagagccacattcgcggtggggcgcgcgggggccccagagaggggaacgggagacactgggcgccaaaggcgggtgcccaaaaggagagaaccgcggggcacatggagacaaaggggcgcgggagttcttctccaccacatataaaaaaaatcgcgccggggggggacaccccgcgagggcgggtcccggagaaccaaatctcccacaagaggggagaggtccaggggggagagcccaaaaacggggggagatcttatccccaccaggggggagtgcccaaaggacgaggcctcgcgagaatattcccaaaaatctaaaggccgcccgagtctcgggggggggtgccacacacaaagcgaacagagaacacaacaggagcaaaaaaaagatagacaaaaaacaacataaagacgaagacaaaaggaggaggaaaacaaaggagagcacgcagcgaggaagatgggagaggcgagacaaaagcccggacgacacagagcaggagagagacagacaacgacacaaagcaacaagcgagaaagagggaacgcagaccacacgacagcgcaggaagagaggaacacaagagaggagcgaaagaaggacga

SEQ ID NO: 482469 - DNA, 287 bp, Homo sapiens
  misc_feature (272)..(272): n is a, c, g, or t
tacagagtgaatgtttccttttgcgtggatgctgtcgatgaatactccgtcacctcttgaagcttacgctggtcattgccagcgtcatcctctgttgggcgtattcccccatcggcgtgcacatggggctgcactgttacagccccggccaattggcgctgctgcggtttttgatcgcgtcggtattcatgggcggcgtggcctcggtgttggaaattggacggccaccattgcgcgacctgccgtggttgtttgtgctgggctttttcggngtgttcctgcaccac

SEQ ID NO: 482470 - DNA, 132 bp, Homo sapiens
ccttaagtttgaagttggaatgctccagggtcgacttttctaggtagctcgctagacgggtcatttaggttctgcatggccattttctcattgccaacaaacaggtccccgccgacttgtgagcatcgctcc

SEQ ID NO: 482471 - DNA, 294 bp, Homo sapiens
aacccctggactagcaatcatgaaagacaaatagatctaaatatctctaaattgagcgtggattttgacaagattttaaacctgatcatcctagaaattttcgaaattcaaaccataattttgcagccgttttggaattcttattcttcaaacttgagattatgagctttaaccccagcgtgtaaatcagctgtgtttgtagcaaagtttatctgtaaaacaaattttggtaagtagattttaaatggatagacagggtgtttcagtttcctcccatggtcctcccacgggatc

SEQ ID NO: 482472 - DNA, 249 bp, Homo sapiens
tcagtttttggaaagcagggttcctctgcctgctagcaagcccgcgtggcacagtgtgaatgtctgtcctttacgcctatgtttttaagtagtccaacttcaagaaacaatctaaacgagtttctgttgcatatgtgtgttgtgaacttgtatttgtatttagtaggcgtctatagtgcatttaacgtgtttttgtaactcctgattcgtccttttcggatactattgatgaataaagcaattaaagtg

SEQ ID NO: 482473 - DNA, 460 bp, Homo sapiens
actagttctttcatttcttatagggacggggtctcgtcatgtagcccaggatggtcttgaactcctggactcaagtgctcctcctacctttaagtgctgagattacaggcatgagccagcagacctgaccttggcgttctcttactttgccttcgagccccttcagacagttcttcttggaggttaggggaaggcttctgtacagacaacttccttatacctgtatgatgatggtcaaaggtcccggtggcgaccgacttcccaggcagcaggaaaaggaagtgcaaagcaatgtagcctctacaagagcacatgtgtagtaaacgggtggcttgataggaccctgggaagagagctgggtgatgcagggcacatgactggcaggtactgacaggacttatggggtatgctaaggagtatggaaaatggggagtatccaaatttagagcccaggaacagt

SEQ ID NO: 482474 - DNA, 284 bp, Homo sapiens
cagagaacagtttcgcgtaagaggacttataggtacatccggaaataaataacctatctatgatcatagagctccattgggcaacttgtgtgaacagtgagaaagcagaacattttatgcgaaatctgataatcagactaacgtggatttacatcatatgcattggtcattcaagatgcccaagcatcctctgtctagctacacttcgtttccataatcttgtagaagaaagagactttatgaccatgtagcattccattcttttagtcctgaatcttcctctt

SEQ ID NO: 482475 - DNA, 916 bp, Homo sapiens
ggcgcattgggcactatgggaccagttcatccccaaacgtagattcccgcccataccgcgtaacgccatgccagtgtcgactcagcccctgactcaacgctctgttgccaccttgcttcggctgatcagactgtgcaagatctggagaccgtccaacttctccctgatgacggagctgagctatcaagagcggcaaccccggggaagtcctcccgcggaccggatgatgggcctgcgccttctcgggggactgcccacgtacagtcgtcactgtcttcctcggacaacctggcccggctctggatgtgtggagactggagagatctaagagagagtatggcggcacacctagaaggctgtcgtccttgcaatggccttcaaagtgacagtgtgctgtggctagcctgtgtacccactctgggacatgcctggtgcaggtggtggcagctgtgagggacccatgcagcacccaggtcagagcagaccctcccctgccggcctgcgccagctggacctgatggacacccatgtggcgccttgaccatgcatgggcacaggcatgcccatgggactctcagcccccagttgcattatccagatgtgacagagctcgacgccaagccaggctgcacactgcctggacatggggctagccatgcactcgcctagggaaacgtcaggaccgagggcactcaaagctcgctgaggggtctgaggctggtgcccaccccgcaagctagtgcgttctgctgcccctacactgctccgcgtttcagggcaatcggtccatagagaacaccaccacgatggcaaggtggaagggtttattagtacctgccagcagactgtcctcgtggtgcaggtggcatggccagcccactggattgggacgggtatacgctggggagatcggggg

SEQ ID NO: 482476 - DNA, 194 bp, Homo sapiens
caaccgactctttcatgctgctcggctatccaggatcaaaaacgcctcctggatttcagagaaggccagcgacccgaccgggctatcttggcgttggcactgcacgggtcagtccttgacgcgcaaacgggtgtccgcaccttcgagtacagaggcaaggcgacgcccgaaaaatggaacccggcggtgacaaa

SEQ ID NO: 482477 - DNA, 281 bp, Homo sapiens
gagaacttactccttgctattccgaacactttgagccacggccagtgtggaggattgcttgaggctcatagttcaagactagccagggcaacataggaagaccctttctctccaaaaaaattttaaaagaaattagctggccgtggtggctcatgcctataatcccagctactcaggaggctgaggcacaagaattgcttgaactcaggagatggaggttgcagtgagctgagatcgcgccactgcgctccaacctgggcgacagagcgagaccctgtctc

SEQ ID NO: 482478 - DNA, 432 bp, Homo sapiens
gggtctcgatccaccattgccttacaaaacaaagcccttaatctctgggaagggtttttgtgcaaaacgtcaccgattttaagggttgaaaggttcgatttccaggtgccttggacacaacagctgaaagaagcactcctccttcccttgccgggcagggcattttaagggtttccgcacggtcatccgccccttttacctgaccaactcctcaggtgtggattaaacggggtggcccaagggtggtaaaaaccgaaaaaccccaggacgccctcattgcaggttcccctcctgggtttctttcctttttgcaatgaccttcaacaaccggccaccaaatttcgccctattcacctgagcggtaagtttcaaaaaattattggaaggtttcccttagggtcccccaggagttttccccccccctccccagtt

SEQ ID NO: 482479 - DNA, 164 bp, Homo sapiens
tggaaatgggagtttggctcgtggcccaggcgggagtgcaagggcacgatctcagctcatggaaaccaccaccttccgggttcaagtgattctcgggcctcagcctcccaaatagcggggatttactcgatgtgtgccaccaggcgggcctctatgtcatttcg

SEQ ID NO: 482480 - DNA, 154 bp, Homo sapiens
gagagagagagagagagagaactagttctctctctctggaccccaactgctcctgtgccgctgcaggtgtctcctgcacctgcgccacgtcctgcaagtgcaaagagtgcaaatgcacctcctgcaagaagagctgctgctcctgctgccctgt

SEQ ID NO: 482481 - DNA, 438 bp, Homo sapiens
attcgcggccgcgtcgacccggcgctccgcagcctcggggtggagtaaggttgcattgttccaatactcaatcaactgcctgcgggcttctgtggtcagcgggttaccgcgcgataaatgtgacgttgttgacgcggatgactgcctcggcctcctcgggcggcgggttgactcgggactcgggcaactgcgtgatacggttctcggtcaggtcaacggtgtccaacgcctgatgtggccccaggccctgcggccactcggtgatcccggtgtttctcaaattcaccccgcgcaggttcggcagggtaccgaagttgggagtacgcgccagggggttgcggctcaggtcgaccgtcttgagtgaggtgagcccctccagcagatccacgtccgcctcggtcagagacaaccggttgcccctgaggtccaggcgggtga

SEQ ID NO: 482482 - DNA, 267 bp, Homo sapiens
gactcatcagtccagcagagtgacagttagatgtcttcttatcctatattgtcttgtcaggaagtagagaataaacatgcagaagaggataaatggatttgatttgctattctggctctctaacttctctatagttggctgtagtctgctggattgtttgttggcccagtagaagcaaccctctttgctgctagagtttggaaccgattgaggcatagatgcaagtcaggtaggtggagattgaaatggtaactctaagaactgaaa

SEQ ID NO: 482483 - DNA, 154 bp, Homo sapiens
ctggtatcaagagcacagtttataagaatgatccccgtagaaaaggatctttacgacatcaaagcagcacagatctctgcacagggaaactgggatctcttttccgaaaataagtcattttatgcatcacaggttgtcattcagtcggcgaatg

SEQ ID NO: 482484 - DNA, 1105 bp, Homo sapiens
gggaccatccgcaacctgcccctgtgaccacgcatctctggtcaagagttggcccgaggaggtgtcccgaggaggccggagccgggtctggaggccgaggccgcctcaccgaggaagaggaggctgagccaggacagagtgtggacctggcggtcctggcctgacactggccctgacccctgccctggcagcgggctgcctgcccatgcctgctgttgaagactcagaggccacagagacatcggacgaggccggagcgccctaggcccctgctcagccaccatcctcctggagcacaactatgccctggccgtcaagcccaagcccccatgggcacagacccttgaggaaccccggagccagtgccccgcggcctacggagccacgcagtgagtttgaacagattgaccatcctgtatgacatttttggaaactcgggcctggaactcagaggacatagagttaccgtggggcttaccggtacgaagcggctgctgcagcaagaccaagcgggggcttggactggctcagacgaggactcactgggtaccatcacacaatacaaccaagctgagccagccgcaagaaccgcataggcgtgtgggcccccagggactggggcccccgggagcaaccagacgagcgctcagccgcgcagcgaagggctactaagcccaaatgagggcacgacagggaggaaggacaagtacatggacgtgtgcgcagtcgtcgggcccggacagcttggaaggcgcgtttggaacaccttcaggggaacgaaacccggggttgcttgtacccgagcgcccgcggcccgaagccacaggggcggcttgctgaagcacgccaattcgggtacatgccggcaaagtcgattggcagaaggatgaacgctggttgaaaagctccaaacccaggcctccagttacccgggaaggaaaggaaggccgcgaaatatgggcccgggaccgggagtccaacgaagtgggggcgccttgtatggccattgtgataccccattgcgtcgctggcggaaagctgggtcagatggcaattacgtgagattcaaaaaccattcggacagacatggtgtggcgaacatatg

SEQ ID NO: 482485 - DNA, 582 bp, Homo sapiens
ggtctatctacttgaactcgcgtctttgctccacacaccttggtgcagaggacggagccactgggagtcatccctgttgtcaccaagaggagtgagaagggccccccagccagggccccaggaccggctgattctctcgtgggcttgctgaggccacatgtcaagcaagactgcctggacatccctctgcctctcctgtcaagtgaccccaaggacaggtcattcctgagagacggtccatggtgccaaggatggagcggtgtcagccccctgactgggataccgccaagcagggaagcgcacctgattaagacaccgcagagatggacggcctcatccggggggcctggggtctctggactctgatgatcacctgaggcatggtgacagcgacagacgggatctggacggacttgactgtcctaagtggtggactcaaccttgctgggtcatagaggagctgtaccagaaggtttggaacctggcagttgaggatgtgacaatgtcagctcagtggaaaaaccctctttcagacagaatgggctgggagaggggatgagcatgaggcaatgtaagggtgtc

SEQ ID NO: 482486 - DNA, 1432 bp, Homo sapiens
  misc_feature (103)..(103): n is a, c, g, or t
  misc_feature (194)..(194): n is a, c, g, or t
  misc_feature (246)..(246): n is a, c, g, or t
  misc_feature (255)..(255): n is a, c, g, or t
  misc_feature (258)..(261): n is a, c, g, or t
  misc_feature (263)..(264): n is a, c, g, or t
  misc_feature (268)..(268): n is a, c, g, or t
  misc_feature (270)..(270): n is a, c, g, or t
  misc_feature (412)..(412): n is a, c, g, or t
  misc_feature (418)..(418): n is a, c, g, or t
  misc_feature (598)..(598): n is a, c, g, or t
  misc_feature (946)..(946): n is a, c, g, or t
  misc_feature (1097)..(1097): n is a, c, g, or t
  misc_feature (1124)..(1124): n is a, c, g, or t
  misc_feature (1149)..(1150): n is a, c, g, or t
  misc_feature (1164)..(1164): n is a, c, g, or t
  misc_feature (1184)..(1184): n is a, c, g, or t
  misc_feature (1204)..(1204): n is a, c, g, or t
  misc_feature (1213)..(1214): n is a, c, g, or t
  misc_feature (1218)..(1218): n is a, c, g, or t
  misc_feature (1229)..(1229): n is a, c, g, or t
  misc_feature (1231)..(1231): n is a, c, g, or t
  misc_feature (1238)..(1239): n is a, c, g, or t
  misc_feature (1244)..(1244): n is a, c, g, or t
  misc_feature (1247)..(1247): n is a, c, g, or t
  misc_feature (1253)..(1253): n is a, c, g, or t
  misc_feature (1268)..(1268): n is a, c, g, or t
  misc_feature (1277)..(1277): n is a, c, g, or t
  misc_feature (1279)..(1279): n is a, c, g, or t
  misc_feature (1281)..(1281): n is a, c, g, or t
gggacttcctgccacccaagaagataaaggatcctgatgcttcaaaaccggaagactgggatgagcgggccaagatcgatgatcccacagactccaagcctgnggactgggacaagcccgagcatatccctgaccctgatgctaagaagcccgaggactgggatgaagagatggacggagagtgggaacccccngtgattcagaaccctgagtacaagggtgagtggaagccccggcagatcgacnacccagatnacnnnngnncttngntccacccagaaattggaccaaccccggagtattcttccggttccagaggatcttattggctaatgtagtatacatcttgtgcgtgtggcgtgggctgtgagactctgtggcgtgtcgatgtgtggcaaacatcttatgacancttccntcatcaccaacgatgaggcatacgctgaggagtttggcaacgagacgtggggcgtaacaaaggcagcagagaaacaaatgaaggacaaacaggacgaggagcagaggcttaaggaggaggaagaagacaagaaacgcaaagaggaggaggaggcagaggacaaggaggatgatgaggacnaagatgaggatgaggaggatgaggaggacaaggaggaagatgaggaggaagatgtccccggccaggccaaggacgagctgtagagaggcctgcctccagggctggactgaggcctgagcgctcctgccgcagagcttgccgcgccaaataatgtctctgtgagactcgagaactttcatttttttccaggctggttcggatttggggtggattttggttttgttcccctcctccactctcccccacccccgtccccggcccttttttttgtttttttgttaaaacggggtatttaaatcttggattctccttcaagcccttcaaccccgtggttcctcatctttctgngatcaacaatcttttctgtgcctctgtgttcccctttctctcaatctctatagctcccctccaaccggggggggcaggtggtgtggagaagccacaggcctgagatttcatctgctcctccttccgtggagcccagaggagggcagcaaanggggggtggtgtctccaaccccccagncactgaggaagaacggggggctctnnctcatttcaccctnccttttttcccttgcccccnggactggggccacttctggngtggggcanngggntccccagatgngnctcaccnntgagnatngtgganctacaaacaaaattnctattaaantnantttggtgtctcccaaaaatatataataatataacaaatataaatcgcgcggcttttttttcgcgtgggacaaggttaaaatgtggccatggtcattgttccgcaccattttttaaaagggtaagcggggccaatgggatatcgaacgcaga

SEQ ID NO: 482487 - DNA, 409 bp, Homo sapiens
ctaaaacacagcatacagataccaaatgctcaaggatcaaaacctgtcggcgcatgtcacgaaggatgcgacgatgcgcttgaatgatcacaatgagtcaaccccagaaatgtgcactaaaatagtctgctaatggtgacttctgagttgcatctcccggcaaatattgtttcttatcataacacttcgggtcgggggaaggggtgttaacggtaaaaagaggaacgagcaaatagataaagagaaaaattcatgcctccaggaaacataagcagaaaaactatagacttgtgtctctgcttattttcttaagtacagtgtacttaataaaccaaagagaatctctataacttaatatgtatgtgaataatgttcataaaaggggtataatgtgttagtcataatggaa

SEQ ID NO: 482488 - DNA, 822 bp, Homo sapiens
  misc_feature (552)..(552): n is a, c, g, or t
  misc_feature (599)..(599): n is a, c, g, or t
  misc_feature (625)..(625): n is a, c, g, or t
  misc_feature (630)..(630): n is a, c, g, or t
  misc_feature (639)..(639): n is a, c, g, or t
  misc_feature (699)..(699): n is a, c, g, or t
  misc_feature (709)..(709): n is a, c, g, or t
  misc_feature (747)..(747): n is a, c, g, or t
cgtgaccatcccccttcgtcttcagcagtgagggtagggaaggaagaattggatgctgaagacgaagtggagggtgtctggaagagaacagtgggagaaaatgggtggatgagtgatgcaaggttttaatgtgaatcctgaggagaaaaagagagacgtgggagtggggcagccatttgaggtggcatatgggatgcatgttgggtcacgtaagtgaataggaaaagaaagggactgaaagcatttaacaggagacaacctcacaaatctgtgggggtgatgaatgctggtcaaggggccaaggtggaaaagtgaggggaatgcagagttctcaaactggggcactgacagatctcatgtgaaaagttggtttcatgaccgtcatcaaggccagactgtaggatcagagcagatgcaagagcccaggaatatgcggaactaggtccacaggagaatgtgggggatggggacaaatgactcaggttaaatgaaggaaatagcatcactgcatggtaagatggcactgggcatggtaacctcagggacttggcnatggactcgtggtttgagtctattgtgtgggtagaaagatgcttgcnaatagtggaggagtagttaggaaccnatgcngaggaagcnattcagaatgatcactgaatctgagcttctgctgtcacggaaggctaaaaggatagaganatagcttacngctgaaagtatgtacatagagatgaaataaagtaggcnagggagagtctcctaccccgtgggtctcgtacttgtaatgtgagtttagatccgtatcagctgatacccccgagt

SEQ ID NO: 482489 - DNA, 1399 bp, Homo sapiens
  misc_feature (565)..(565): n is a, c, g, or t
  misc_feature (913)..(913): n is a, c, g, or t
  misc_feature (1064)..(1064): n is a, c, g, or t
  misc_feature (1091)..(1091): n is a, c, g, or t
  misc_feature (1116)..(1117): n is a, c, g, or t
  misc_feature (1131)..(1131): n is a, c, g, or t
  misc_feature (1151)..(1151): n is a, c, g, or t
  misc_feature (1171)..(1171): n is a, c, g, or t
  misc_feature (1180)..(1181): n is a, c, g, or t
  misc_feature (1185)..(1185): n is a, c, g, or t
  misc_feature (1196)..(1196): n is a, c, g, or t
  misc_feature (1198)..(1198): n is a, c, g, or t
  misc_feature (1205)..(1206): n is a, c, g, or t
  misc_feature (1211)..(1211): n is a, c, g, or t
  misc_feature (1214)..(1214): n is a, c, g, or t
  misc_feature (1220)..(1220): n is a, c, g, or t
  misc_feature (1235)..(1235): n is a, c, g, or t
  misc_feature (1244)..(1244): n is a, c, g, or t
  misc_feature (1246)..(1246): n is a, c, g, or t
  misc_feature (1248)..(1248): n is a, c, g, or t
cgtgaccatcccccttcgtcttcagcagtgagggtagggaaggaagaattggatgctgaagacgaagtggagggtgtctggaagagaacagtgggagaaaatgggtggatgagtgatgcaaggttttaatgtgaatcctgaggagaaaaagagagacgtgggagtggggcagccatttgaggtggcatatgggatgcatgttgggtcacgtaagtgaataggaaaagaaagggactgaaagcatttaacaggagacaacctcacaaatctgtgggggtgatgaatgctggtcaaggggccaaggtggaaaagtgaggggaatgcagagttctcaaactggggcactgacagatctcatgtgaaaagttggtttcatgaccgtcatcaaggccagactgtaggatcagagcagaggagtttggcaacgagacgtggggcgtaacaaaggcagcagagaaacaaatgaaggacaaacaggacgaggagcagaggcttaaggaggaggaagaagacaagaaacgcaaagaggaggaggaggcagaggacaaggaggatgatgaggacnaagatgaggatgaggaggatgaggaggacaaggaggaagatgaggaggaagatgtccccggccaggccaaggacgagctgtagagaggcctgcctccagggctggactgaggcctgagcgctcctgccgcagagcttgccgcgccaaataatgtctctgtgagactcgagaactttcatttttttccaggctggttcggatttggggtggattttggttttgttcccctcctccactctcccccacccccgtccccggcccttttttttgtttttttgttaaaacggggtatttaaatcttggattctccttcaagcccttcaaccccgtggttcctcatctttctgngatcaacaatcttttctgtgcctctgtgttcccctttctctcaatctctatagctcccctccaaccggggggggcaggtggtgtggagaagccacaggcctgagatttcatctgctcctccttccgtggagcccagaggagggcagcaaanggggggtggtgtctccaaccccccagncactgaggaagaacggggggctctnnctcatttcaccctnccttttttcccttgcccccnggactggggccacttctggngtggggcanngggntccccagatgngnctcaccnntgagnatngtgganctacaaacaaaattnctattaaantnantttggtgtctcccaaaaatatataataatataacaaatataaatcgcgcggcttttttttcgcgtgggacaaggttaaaatgtggccatggtcattgttccgcaccattttttaaaagggtaagcggggccaatgggatatcgaacgcaga

SEQ ID NO: 482490 - DNA, 127 bp, Homo sapiens
atccattgacatcccctttctcaaagagctggaaattagggactcacataggatctctgagttctctcctgtctgcaacagacctgaatgtgtgcaatgctcttccctgtagtagcattccagttca

SEQ ID NO: 482491 - DNA, 517 bp, Homo sapiens
ctgattctgcgaatttcggcttgtgctggaaatatccaaacccaagtcagatatgggcacattctgttctcagttccggcaagttctacggtgacgagtgagaaacgataaaggtttgcagacaagccaggtgtgcacgcttttatgctctgtcggccagtttcgagcctttcagcaacaaaggccagacgctggtggtgcagttcacggtgaaacttgagcagaacatcgactgtggggagcggctatatgaagctgcttcctaatagttgggaccatacagacatgcacggagactcagaatacaacatcatgtttggtcccgacatctgtggccctggcaccaagaaggttcatgtcatcttcaactgcaagggcaagaacgtgctgatcaacaaggacatccgttgcaaggatcatgagtttacacacctgtacacactgatagtgcggccagacaacacctatgaggtgaagattgacaacagccaggtgaagtccggctccttggaagacg

SEQ ID NO: 482492 - DNA, 1492 bp, Homo sapiens
  misc_feature (658)..(658): n is a, c, g, or t
  misc_feature (1006)..(1006): n is a, c, g, or t
  misc_feature (1157)..(1157): n is a, c, g, or t
  misc_feature (1184)..(1184): n is a, c, g, or t
  misc_feature (1209)..(1210): n is a, c, g, or t
  misc_feature (1224)..(1224): n is a, c, g, or t
  misc_feature (1244)..(1244): n is a, c, g, or t
  misc_feature (1264)..(1264): n is a, c, g, or t
  misc_feature (1273)..(1274): n is a, c, g, or t
  misc_feature (1278)..(1278): n is a, c, g, or t
  misc_feature (1289)..(1289): n is a, c, g, or t
  misc_feature (1291)..(1291): n is a, c, g, or t
  misc_feature (1298)..(1299): n is a, c, g, or t
  misc_feature (1304)..(1304): n is a, c, g, or t
  misc_feature (1307)..(1307): n is a, c, g, or t
  misc_feature (1313)..(1313): n is a, c, g, or t
  misc_feature (1328)..(1328): n is a, c, g, or t
  misc_feature (1337)..(1337): n is a, c, g, or t
  misc_feature (1339)..(1339): n is a, c, g, or t
  misc_feature (1341)..(1341): n is a, c, g, or t
ctcggctctaccttgtctgtgtccgacatggtggaacagacaaggtaggatggtttcatacagcagatggacgcagtacagcatgctggggataaagagactgtggcaatggtggcagcagtgagggtagggaaggaagaattggatgctgaagacgaagtggagggtgtctggaagagaacagtgggagaaaatgggtggatgagtgatgcaaggttttaatgtgaatcctgaggagaaaaagagagacgtgggagtggggcagccatttgaggtggcatatgggatgcatgttgggtcacgtaagtgaataggaaaagaaagggactgaaagcatttaacaggagacaacctcacaaatctgtgggggtgatgaatgctggtcaaggggccaaggtggaaaagtgaggggaatgcagagttctcaaactggggcactgacagatctcatgtgaaaagttggtttcatgaccgtcatcaaggccagactgtaggatcagagcagaggagtttggcaacgagacgtggggcgtaacaaaggcagcagagaaacaaatgaaggacaaacaggacgaggagcagaggcttaaggaggaggaagaagacaagaaacgcaaagaggaggaggaggcagaggacaaggaggatgatgaggacnaagatgaggatgaggaggatgaggaggacaaggaggaagatgaggaggaagatgtccccggccaggccaaggacgagctgtagagaggcctgcctccagggctggactgaggcctgagcgctcctgccgcagagcttgccgcgccaaataatgtctctgtgagactcgagaactttcatttttttccaggctggttcggatttggggtggattttggttttgttcccctcctccactctcccccacccccgtccccggcccttttttttgtttttttgttaaaacggggtatttaaatcttggattctccttcaagcccttcaaccccgtggttcctcatctttctgngatcaacaatcttttctgtgcctctgtgttcccctttctctcaatctctatagctcccctccaaccggggggggcaggtggtgtggagaagccacaggcctgagatttcatctgctcctccttccgtggagcccagaggagggcagcaaanggggggtggtgtctccaaccccccagncactgaggaagaacggggggctctnnctcatttcaccctnccttttttcccttgcccccnggactggggccacttctggngtggggcanngggntccccagatgngnctcaccnntgagnatngtgganctacaaacaaaattnctattaaantnantttggtgtctcccaaaaatatataataatataacaaatataaatcgcgcggcttttttttcgcgtgggacaaggttaaaatgtggccatggtcattgttccgcaccattttttaaaagggtaagcggggccaatgggatatcgaacgcaga

SEQ ID NO: 482493 - DNA, 552 bp, Homo sapiens
cggactgacgagtctcaacactagtatcatagtcaaaaataaaccaaggccctgagtcctaataactcttctaacaaggatgttttggtgagtattcgcaagggaaggggagcctaggtgctcatgaaaactagttaaagactgggcatggtggctcacgcctagaattccagcacttggggaggccaaggtaggtggatcgcttgatcccaggagtttgagaacagcctgggcagtgtgataaaacctcgtctctactaaaaatacaaaaattagccaggcgtggtggcaggtgcctgtagcccagctactctggaggctgagttaggagaatggcgtgagcccgggaggcggagcctgcagtgagccgagatcgcgccaccacactccagcctgggcgagagagcgagactccggctaaaaaaaaaacaaaaaaagacggcagggccacggccgggcttgggaggatgggggatgggaacggttccatgacccactacagagcaagacccctgggtgcgtgaccccgggacagcagacctggagtatgcg

SEQ ID NO: 482494 - DNA, 545 bp, Homo sapiens
  misc_feature (538)..(538): n is a, c, g, or t
cgtgaccatcccccttcgtcttcagcagtgagggtagggaaggaagaattggatgctgaagacgaagtggagggtgtctggaagagaacagtgggagaaaatgggtggatgagtgatgcaaggttttaatgtgaatcctgaggagaaaaagagagacgtgggagtggggcagccatttgaggtggcatatgggatgcatgttgggtcacgtaagtgaataggaaaagaaagggactgaaagcatttaacaggagacaacctcacaaatctgtgggggtgatgaatgctggtcaaggggccaaggtggaaaagtgaggggaatgcagagttctcaaactggggcactgacagatctcatgtgaaaagttggtttcatgaccgtcatcaaggccagactgtaggatcagagcagatgcaagagcccaggaatatgcggaactaggtccacaggagaatgtgggggatggggacaaatgcctgtgggaatgctagttatgggcaatgcaaagaggcagtgaatccgggcagggagataggntacccag

SEQ ID NO: 482495 - DNA, 525 bp, Homo sapiens
  misc_feature (478)..(478): n is a, c, g, or t
  misc_feature (482)..(485): n is a, c, g, or t
cgtgaccatcccccttcgtcttcagcagtgagggtagggaaggaagaattggatgctgaagacgaagtggagggtgtctggaagagaacagtgggagaaaatgggtggatgagtgatgcaaggttttaatgtgaatcctgaggagaaaaagagagacgtgggagtggggcagccatttgaggtggcatatgggatgcatgttgggtcacgtaagtgaataggaaaagaaagggactgaaagcatttaacaggagacaacctcacaaatctgtgggggtgatgaatgctggtcaaggggccaaggtggaaaagtgaggggaatgcagagttctcaaactggggcactgacagatctcatgtgaaaagttggtttcatgaccgtcatcaaggccagactgtaggatcagagcagatgcaagagcccaggaatatgcggaactaggtccacaggagaatgtgggggatggggacaaatgtncagnnnnggtcgacgcggccgcgaatttagtagtagtaggcggccgc

SEQ ID NO: 482496 - DNA, 283 bp, Homo sapiens
cttgaggatccgtgcgcacatttacaccacaccgcccagctgcccattgtctacaccacacagcccagctgctccactgtctacaccacacagcccagctgctccactgtctacaccacacagcccagctgctccactgtctacaccacacagcccagctgctccactgtctacaccacacagcccagctgctccacatgtctacaccacacagcccagctgctccacatgtctacaccacacagcccaagctgctccacgtgtctacaccacacatgcccaa

SEQ ID NO: 482497 - DNA, 527 bp, Homo sapiens
  misc_feature (480)..(480): n is a, c, g, or t
  misc_feature (484)..(487): n is a, c, g, or t
cgtgaccatcccccttcgtcttcagcagtgagggtagggaaggaagaattggatgctgaagacgaagtggagggtgtctggaagagaacagtgggagaaaatgggtggatgagtgatgcaaggttttaatgtgaatcctgaggagaaaaagagagacgtgggagtggggcagccatttgaggtggcatatgggatgcatgttgggtcacgtaagtgaataggaaaagaaagggactgaaagcatttaacaggagacaacctcacaaatctgtgggggtgatgaatgctggtcaaggggccaaggtggaaaagtgaggggaatgcagagttctcaaactggggcactgacagatctcatgtgaaaagttggtttcatgaccgtcatcaaggccagactgtaggatcagagcagaggagtttggcaacgagacgtggggcgtaacaaaggcagcagagaaacaaatgaaggacaaacaggtncagnnnnggtcgacgcggccgcgaatttagtagtagtaggcggccgc

SEQ ID NO: 482498 - DNA, 343 bp, Homo sapiens
  misc_feature (103)..(103): n is a, c, g, or t
  misc_feature (194)..(194): n is a, c, g, or t
gggacttcctgccacccaagaagataaaggatcctgatgcttcaaaaccggaagactgggatgagcgggccaagatcgatgatcccacagactccaagcctgnggactgggacaagcccgagcatatccctgaccctgatgctaagaagcccgaggactgggatgaagagatggacggagagtgggaacccccngtgattcagaaccctgtaattcagtggtgcattggcatagtcctccgctagattgactaccctagatgatctaagggcactcggtatcctacccgagcatagttgtactaccctcgtgtattctctcgatcccagtatctatgcgctat

SEQ ID NO: 482499 - DNA, 642 bp, Homo sapiens
agcggggcggctccggcggctcctcctcctcctttggtggcggcggcggcccgggaccgatgacccggccccggctcccttcgtactgcctgctcgcgtgtagtgggcttcgattatctggtcactcggaaacgattactcgaaagaaccgaaccaggaggacatcccacagatgcaccagaacacagaatgccagactatatcacagcataggcaccagaagacacagaccagacagactatacggcacaagatttactacacctctgagctaggatcgtcacacaaaaccggaccagcctccatcggagaccgacggtgaagagacccaaggctatgacaaaccaacaagagacagcccacgaaatcaatcatctcaaggaatgtaccgaccaaggcggagacagaccccaggacggacacatcagacacacacgccgtaacacaacaaacaccaccggagacagggacaatccttagcgaggacacacaaggacaggcagcccattggcccattatcaagcaacagagacaacagagacggattcagcaatacccgtccagaagacagggatagaccaacggaaccagaaacagccggaccagcccaccatgacatggcaacgggcaggaaagggaacc

SEQ ID NO: 482500 - DNA, 168 bp, Homo sapiens
  misc_feature (86)..(86): n is a, c, g, or t
  misc_feature (152)..(152): n is a, c, g, or t
gggcactgtgttcagtatgtacaaagggagacggcactgtcacagaggctggggcaggtggggctgctggaggcgaggcctgctgnggcagatagctcacacagtagatcctccgcagctctccgggcgctgtgatcgtgttgcactgaggncagagcttcttggcac

SEQ ID NO: 482501 - DNA, 439 bp, Homo sapiens
aggcagggggtttacaggtagaggcgtagaaagcgttagcgttttcccaaggcttgcggaagtgtaggagtttgtcttagaacgctttttctagacacttgaagaacgtttaagaagattcaaacttatgacccaaatttcctgtaggcttagtttagtcagttgttgcttctgtctggccggggaggcctgacacctcgcggtcttccaggtagaatgagcttcccgtgggtacatcttaccagaaagatatttaccctaacttgttacacaaactattgccacagtacctgtggattgttaagttaactaacatgggtatttctctttaaaggttttgtgcacagaccaaacatatcaccctcagtcttcccagcagtcagatgtggtaactgagactaggacggataatataggttgtgaggtggcaatcaagctt

SEQ ID NO: 482502 - DNA, 472 bp, Homo sapiens
gggtctccgagaagcgtctgggagcattccccccagctcccagctccccactgtgtgccacccctcctggtctcctgcggactgccttcccccagaagctggtctgaaacgtggcgctcagaccttcccctgaacgggaggagaagcccaaagagagcgaggacccagcatcagcctgggaaggcgggctgggagccccatatgctctgaaagcagccaggaagcaagggcttctgccaaaagctatcggaggacaggacccaaggtgacccggcagtgcgggctgttgggctgtcctttggtaggcccaggggaaaggggcatgaggcaggcagacggtgtggcccacgaacggtggggaatacccaggggcccagaaagccctttttcaacagaaggggtgccagggcccttaatgccctcctggtggccctgtcatcctggtgctggctctaatctgcagcatgccaca

SEQ ID NO: 482503 - DNA, 294 bp, Homo sapiens
  misc_feature (15)..(15): n is a, c, g, or t
  misc_feature (60)..(60): n is a, c, g, or t
  misc_feature (107)..(107): n is a, c, g, or t
tgctagaattactgnagttggctataatcaatttgtttaaataattgttgatgttgatgntgttcattgattctataacccagctgttagcagaactcctgaggcgntctgtgtgtgcaatgatgctgttattagaaacaatactctaatggggaagccaacataaggggccttaattgctcttgcaatgaagatgggtcttgatggacttcaacaagactacatcagaaaagctgaatacccttttagctcttagcaaaagtgtatggctgttaagtgtgtacaccgaacact

SEQ ID NO: 482504 - DNA, 299 bp, Homo sapiens
ctgaccggtccgaaacttatagtgcattgtgatgtggagaataaggtgcatacgatgaaaaaggtgatttgtcatttacaagaggtaggtcgaaacagaacatgaaagttggtcggtaggtggcatgcagaggtagtttcaaggtgacaggttatgaagatatggtgcaaaagacaaatggatggtggcaagcatagtaaaatgatggtgtggaagacatagatggtatttgttttgcatttacggcaccggatgcgggcgataatgacggaacactataagtttcggaccggctcgat

SEQ ID NO: 482505 - DNA, 119 bp, Homo sapiens
ctagagggtgttgagggaatagaagtgactgccagtgggtatcttttgggggtgataagttgttctacaattagtgttgtggtggccaggcactgtggctcacacctgtaatcccagca

SEQ ID NO: 482506 - DNA, 1432 bp, Homo sapiens
  misc_feature (1432)..(1432): n is a, c, g, or t
gggcggcgccagcggccagcgaaggaggctgctgcgccagcccgcccgcggcgccggggctcaggcgccgtgacgtgttgcacgcgcttgcccccgaactctgagggccttcattagctcgctccccggcgccgagggcttgggggccgggcagcacggcttcgggaaacttctgggatccgtgtttctccaatactttttctccccccttcatactccgacaagtgctcagggggctcattgttccagaggagttgcggggggggaacttacaagcccctgggcgggcccggagaggaatttcggcaaagggcgcccggggggaaagcacggggcctgggtgtgagcccccgaagggagaccggggggagaacagagggcacttcggggcttcattctttcgggccccgtttgtcccccggttcgttcactcgcacccggggttcacagtggcccttccggggcctccggggagtggccccattcccgtggggccaaaggttgtgtgttgtttgccaacactaagggttgtgaccagcacctgggacacgacattccgggggggaaccaataattaaccctttccatcaaaggcggtgaacttgaccataagtggcgtgggacattgtacccgggagagctcatcattcctgggcaaggtcgttctggcaaggaaaccttcccccattaagggacacggtacgcccaaacccaagcggtgtgggttaacttttttcacaaccaggacaagaacaggacacatttttttcttctctgagcgaaacaacctgtgagcctttcactttttcccacaacacaaggcggtttttggggaacaactccgggcatcggttcccctctcagaacagttgtggcggcgcagcaaccagcactatccacatatatcattaataggaagcagggggggcctccgcaggaagaaagccccaacacgagagaaagcggcttatacacaacataggccagcagcgagtcacgacggggataacccgtggcgaaaacagggaggtttgtcaccagaggagcagacgagagctcgtcctctggggagcaaacaacaagcacctccgtcaggcaacaacattagacaggcaggcgaggcggaagaaaataacaaacgaaaagatgacaatcgaggcgaggcgcgagtactatgagatgcggtcgccccacatacagacagaaggtgacgatcctaccaaaccgacaaaagacagcaacacggaccagatctaccttcgtgatcacgaagattccaaggggaacacagtacaagccaccaagaaacgacaaagacgcaagctagatgagtactgcgcgaatatagctaccttcccccgctccctttttctgtatgttcgcctcctctcttcttttttctccaatctatttcgtgcgaaaggggggagan

SEQ ID NO: 482507 - DNA, 386 bp, Homo sapiens
atcagatccaaactccttagtttctcacgttttggcctttaagatgcggagatcacggggaggccgcatcaaaagtaaggattacacatcaaaggtaaaactttcaaagaactcgccaagtatttcatagcaggccacttggaccactttcatcattttctgtagatctttatattcttgacacaacaacatcctattttggccgatgttaaaatcgaggactcccagagcctctcctgttctctcacgaagtggaactactatatgcgtttctccacaggcagaagccagaacaacttctgaactgtcagtacatttaaagaggaaatctctgaaatcaaaaccaaataagcacaaggatattaaacatctgtctgttcacatca

SEQ ID NO: 482508 - DNA, 237 bp, Homo sapiens
ccgctcatggcatccggactctggtggcggcgcgactctggctccacagcaatccgtcggtgtcggcagccttggtaaagattgcgctcagtatcaggattcctccaccttctctggaccttgattcagtctcctaactgccacagaagggatgaaggttgaactccagctgggatgtcctgatgtggatgggacaaggtgggtttcttctttcttcagccgaggccgccgccgcct

SEQ ID NO: 482509 - DNA, 310 bp, Homo sapiens
gggcgcgcggggctgaccgctcaccgacgccgcgcgcggggctccccctcggtctccgcctcgaacacgatgcgcctctccgccctcagcctcctcctcacgctggaaactcgaggacggcgcggcagccgctgcgacccccgcggcggagccgtagaaggcggcggcggccaagccgagcccgccgggtgcccgcagccgcccgcatctcccgccgccgcggctcctggcgccccgccctacccgcccccgcacgcggcagcggcggcgcgggtcttggggccgctacacgccgggcgcgcgcgttcgg

SEQ ID NO: 482510 - DNA, 619 bp, Homo sapiens
tgtccagaactgaatttcgatggcgaggatggcacgaaaagctgccatcttctatgtactgcagaaccccaattggcgttggtcatcagatccagaggtatcaatggagtagccccaaaggttcgaaaggtgtcccagcttcttcgccttcgtcaatctctcaatggaacctttgtgaagctcaaccaggcttcgattaacatgctgaggattgtagagccatatattgcatgggggtcccccaatttgaagtcagtaaatgaacttatttcccagcgtggttatggccaaatccataagaagcgaattgctttgacagataacgctttgattgctcgatctcttggtaaatacggcatcatttgcatggaggatttgattcatgagatttatactgttggaaaacgcttcaaagaggcaaaaaacttcctgtggcccttcaaattgttttctccccgaggtggaatgaagaaaaagccccccccttttgtagaaggtggagatgctggcaacagggaggaccagatccacaggcttattagaagaatgaactaaggggtctcccatgattatttttttaagctggttggttaataaaccggccctgctttccaattga

SEQ ID NO: 482511 - DNA, 1541 bp, Homo sapiens
  misc_feature (1223)..(1223): n is a, c, g, or t
  misc_feature (1229)..(1229): n is a, c, g, or t
cggtgttgtttttctccggggcacccccccttcgtagatgatttaatatatatttctcttgtagtattcccacgacccaccacggacgtcttctccgagcaaagtatatagatgtctcctgcccccgcccaacagtagatgttgtggtaaacgcacgtgttagtctttagttctctccttcgcggggctagtatatactaggagaccgcacacacacgctttgaggggagaaaaaacccacaataacagggggtaatatttgggttttcctttcgagagtccttattattagaagttatcgtcgtacagctttgggtggccttttcctccatcaaaggggggttattatatatattcctgcgttgggtgtgaggcgccgaccaccccgccccaccaaaaagatagtgtgttcgccaccgctaatggagggtattttattagacccgtgttatgaaatcaccccccccgaggcgccacataattgttgtcgaacgccccctcccccggcgtttccccaactgagtgtttccactttccggtatattttccccccccaccccccggggggcggtttccacaaaacgttaatttttttatagcccttgaagacttctgcccccacccacacttgtcccacccggggagaagcccacataatttgtaagattgggttttttcgcctcgcccaccgctgggctcttctggagggccccccttcttggggagttttccactccctctgtttctctgtggtggcaccgcccgcttatagggttggggccccctttgaagacttcgggcccacctctggttaatatttatgcgcccacaacacgtgcacgtctcaccgcttatggagcacatcctttcgctatactaatcacacccggacacacactggtatgacttaaaacgctttttgtattagcctcacacacttcttcccaccacatatatgggtgtccctatatgccacatatagggagagctctgtgatatttttcgcccacatcacaaatataggagaggcgttttcacatttcacactctgaattttgcccccccatatttctccacaggcgtaccacccccttataggccccacaactctatacccccccagaatcccactcttctacactcatttcaataatttatatcccggcggtaaaatatttataactctttcttttccgcaccacacacacactctttctcgcgcnctattntccggagaattgccccgcacacgcttatactccgcgagactataccccgcagatgcacataacacccaccactgtgaaacactccctcatttcaattctcgttatggctcacattcacattttttttaacacgcacgtaatattaaataattttcactgagatttgagaagccttcgcttcgagaagcggaaaagtcctataatatagtatagaagaaccctccactataaacctggaggtgagctaatatatggagatgcccccccccctaccacacatttgaagaacccgtatacattaaatttagacca

SEQ ID NO: 482512 - DNA, 384 bp, Homo sapiens
ttcctggaccccgtggtttgctgagcacctaggttctgctgacggggaagccctgcaggaacttcagggtgctggtggcctacagcatgctgcagatggtgcgggagcaggtgctgcaggaaagcatgggcggggatgacatcctcctggcctgcaacaacctcatcgaccttgatgctgatgagctgatctctgccgcctgcgtggtttatgctgagctcatccagaaggatgttcctcagacattaaaggatttcttcctctgaggacaccaaagcccgcagtggactgatgccttcgatgggcaggatgaaggccaggggcactggagtgagggagtagataaaacagctgcaatataaacagtcctctggaataaaaaaa

SEQ ID NO: 482513 - DNA, 480 bp, Homo sapiens
ctctaggtgtcctaacggcggccacggcctgccaattgttacttcatatacacaaatcagtgaccacagcctgccacatgggtcgccttaactactagatgctccagtctgcgctccttgcatgaagtgcttcaagataacgacaaggtgtggctgttgcgggatcacaagcgctggaatgaaaccccgcaagtcggtgtcagctgccttcggaataactacccgtgcagcatgccgggcctcagcgtgctacatccatgacaatcagcactggtcgacggcgccttcctggacacctgaatggaatgcagggaacacactgaacggggatgtcctcaaccagctacacgtacagctcatggagcagaggagctgcaaggggttacaagcagtgtaacccccggactcgaaacatgtaccctgggacttaaagatggaggaagctactgagcaatacaggggaccaactgtgggaaggct

SEQ ID NO: 482514 - DNA, 114 bp, Homo sapiens
cgagacattgctctcaaaaaatgtacatcatttttaggtggataaattaaacatagaaattgggtccggctaaatacagttagatgggtaacttagatttatattagctagcat

SEQ ID NO: 482515 - DNA, 492 bp, Homo sapiens
ctaggttgagcgacgtgaagataataagaaaggtatcatctacagcctttacgagggctacgctgaggactttgaccctgccgtcactgaggtacatccatcaggtaggaagttcccccgcagataattcaggctccctatggggcccggatatttggcgctccatggatggcttgatagtacatcgcagctctggctctacggtagggatatttctgttaccccgtctaacaagaatgagccccaatggaagagctgagaactgctgtacgatatgcaaccccattggctctacgctcatggagttaggctgggaagaatggccaccactgggaaggatgccgtgtaagacgtcattcccaccgacattcaccagagggcgccggtgatctgggggtcccccgactatctgctcgagttcctgaatgtgtgtgagaagcactctgtccagtgagcatctgccctgcctgcatccggagaattggctctagc

SEQ ID NO: 482516 - DNA, 404 bp, Homo sapiens
  misc_feature (332)..(332): n is a, c, g, or t
  misc_feature (394)..(394): n is a, c, g, or t
atttttagtagagatggtgttttaccatgttgtctaggctggtcttgaactcctggcctcaaaggatcgcccaccttggcctcccagaatgctagaattacaggcatgagccaccgtgctcggcctgattttttaaattatctgtaagatgaggtcttgctatgtttcccagggcaggtctccaactcctgggattcaagtgattctaccacctcagcctcccgagtagctgcgattacaggcgcccgccaccatgcgcgactaatttttttatatttttaggcagagacgggtcttcgctgtattgggccagggctgttctcaaactcctnaacccttcaggtgatcccaccccaccttgggcctcccaaagtttttgggaatttaaaggggntgaggccacc

SEQ ID NO: 482517 - DNA, 106 bp, Homo sapiens
actgcgccttctaccgcatgagcacagcatggccatcagcactgagcccatcaaccacagctgcactggtttgcgagcacgggcttgcgggatgaaaaaccctgcg

SEQ ID NO: 482518 - DNA, 298 bp, Homo sapiens
tctatgttatgtgcgtgtgcctgttggtgtatctgtatgtccgtgtgtgtgcccatctgtgcatgtctgcgtctgtatgtgcctgtcactgtatgtatgtccatgtgtgtgtgtgtccagctgtgcatgtctgcgtctgtgtgcgtgcctgtctgttggtgtatctgtgtagtccgtgcgtagtatgtactgtgcccatctgtagcatgtctgcgtacagtgtgtagcctgatagctgtgaaatgtctgagtctgtgtgtgcctgtcgctatatactgtatgtccatgtgtgtgtgcc

SEQ ID NO: 482519 - DNA, 107 bp, Homo sapiens
acgtgtaactggcggcatgtgtccccggctcgccagtcgttgcgcgtctgtctctgtaccaagccggccagtgatataccgactgcactgttcatagcgccttgcat

SEQ ID NO: 482520 - DNA, 486 bp, Homo sapiens
gtcatttttttcaaccatgaactcctcttttcttaacatagctcagtcattacagctatcccctttacgttcattaagctgttgagtaccatcttctctaaaatcctcaaactctctgatggaagttgatgatattttaagttctatatcctgaggttccgtatcctgtttttctcagagagaacatttataaagggactagttggggttttatgaggggacaggagagactctgttttggtatctcttggcggatacccaggaaaactccgatccttccttcttacgtatttttaaaatgatgtgtatgttttggggtggctctcggcatgtgagtgcgagtgcccaaggaggatgtacacacgcctggagtggaagctccagcgggctgggggctgatcctctacaagagcaatgtgtgctctttgcagctgagccatctctccagcccaaatcatgtttcctaacagcacatctggtcgacgc

SEQ ID NO: 482521 - DNA, 203 bp, Homo sapiens
gtgcacgtagaggcttactagaagtgtgcaaacgtatgcttggattaaggcgacagcgatttctaggatagtcagttgaattacaattgtgacgatgataagcgtcgacggaaggttaacggttgatattgctagggtggcgcttccaattaggcgcatgagctggagtcctaggcgcagctctaagcctacttattcgagcc

SEQ ID NO: 482522 - DNA, 700 bp, Homo sapiens
ggggggtcattactgcaggaaaaggttttggagagctgagcagtcaagatgtgtgacttcaccgatgaccagaccgtagcaggatcaaagttgaatgggcatcagagctcatgaggtaggcgatggattaaccctcaaatcctgagttggcattcatttgaatccttacagttcaaggaggccttccagctgtttgaccgaacagagatgaatgtgaaggagcaggactttgagcactttttgcccatgctgaagacagtggccacgaacatggaccagggcacctatgaggattatgtcgaaggactttgggtgtttgacaaggaaggaaatggtaccgtcatgggtgctgaaattcggcatgatcttgtcacactgggtgagatgatgacatatgaagaagtacagatgctggaggtacggcatgatgacagcaatggttgtgttaactctgaagagctcgtccgtatggtgctgaatggctgaagacctttctagtctcctcagatgacgggccttatcctgtgagaattggaatttagcctaaagttccctaggctttcttgactgagaaactatcccatcttgtctttttaggatgatgtttgcctgtagcgtttaccaaaatcttgcacctctggggacacaatacggttccctttatataaccatggtgagtcgccttggactcggttatttt

SEQ ID NO: 482523 - DNA, 662 bp, Homo sapiens
gactagttctagatcgcgagcggcagcccggcaaaaaaaaaaaaaaaaaaaaaaaaaaaaaaaaaaaaaaaaaaaaaaaaaaaaaaaccaaaaaaaggaacaaaaaaaaaaaaaagaacacagaaaaacaagaacaaagaggagaccccatatagagaagccgtataaaaaactaacgcaagcgacacggcgtacaaagagttcgggagacagggggaaaaacgcgggcaacccgtggggacaccatgtgtgataaagggaacaccttatactttcgtgggaggtgggaacaaataatgtgggaccaaacattaccataacagcagaatttaaagaactcatagggaaaaaattctaaactttttaaaacggtggtaaaagtgggtgtaaaccacataccctcggaatatctggcaaggcaaggttaggagaagttttcgcggctacactggagatattggattttagtcgaaacattttttattacacccagggggagcctaggggagaataaacagggtgaaaggaacagagcgatgcctccccccgccgtgaacgagagggggggcacctaggaagcaacgaggggaaggagggcggggcggagggggaggagagcactcgcaccccaccaagccgagcggaccggcaacgggaagaaa

SEQ ID NO: 482524 - DNA, 577 bp, Homo sapiens
ctcgcgaacgttatccagaaaacctaacagggaccatcaatgaaagtggctacaataaacaacagattctcaatgtagacaaaacagccttctattggaagaagatgccatctaggactttcaaagcccaagagaagtcaacgcttggcttcaaagcttcaagggctgactctcattgacaatttgaaaaatgctagggcccttaaaaattatgctaaatctacttgcctgtgctctataaatgaaacaacaaagcctacatgacagcacatctgtttacagcttggtttactgaatattttaatcccgtcatggagacccactgcttgaaaaaaaagattcctttcaaaatactgctgacaatgcatcgggttatcacgagctctgacagagatgtacaaggagatgaatgttgttttcaggcctatcaacacactatccattctggagcaaatggttcaaggagtaattctgaccttcaaggcttattcaagaaatacatttcaaggccaggtgtggtggctcatacctgtaaccccagcactttgggataacacgttcgcgaggggtaccgagc

SEQ ID NO: 482525 - DNA, 946 bp, Homo sapiens
gtctgctccagcctgcttaggtgggaaggggctcgtatgtaggcatatgataagtttgacagcccgatgtgccagtgtgaagcatataatatatataactaggttacttccctgaagtgctgcccctgctgattatcctttccaggacttcgatgatggaataggcctgtcaggccgtcaaggaacagatgctgccatccatggatatagtcgtcaagactagggtctcgaaaccagacactgttaatgcagattcccagatgatgttgtgaacttattgaccctagacttactcgctctaggatcatgcatccaaggagtaggagaccggttgtgatgtgggaggattgaagagaaggaagggaatgttggggtaggcaagaggactttttaaactagaaaatactagggaggattatggggagggaaagttctagagtgtgtgtcgcggagtggactgtgcgaggggaacttgagttagcacggtctaactgatgtgttgggttggttaccgtagattgggtcgggtcccatggtaaattccgtatgcacgtttagatgaagaagtctgaagagcaggaggattccatgctggacagtcaggaagtgttgagcacgcgacgggctcgtcaaaacattgagttggatagacccccttggtttgactcgaaaaggtggcgcctgatttgctcagggacggcggtgggcgcgtggtgtagctcccatggctaactttgggcgacggcgtcgagtgcgggtgagaactcgtcttgtagcgctgggagggtcggcagggttcgcagttgaggtgctgccactggcggtcctttggcacgtccaagacctggcgcactggaggcgggtaatcctttcgggaaaaaaggcggtcggatccattcacactgtgttgcccggctcacccacagggagggtatagagcgccgag

SEQ ID NO: 482526 - DNA, 201 bp, Homo sapiens
  misc_feature (22)..(22): n is a, c, g, or t
  misc_feature (57)..(57): n is a, c, g, or t
  misc_feature (151)..(151): n is a, c, g, or t
  misc_feature (164)..(164): n is a, c, g, or t
tcggtcgactggagttgttctncacacaatctacgcaaccattcctagtagtggtgnctaatgaggtgtctgggacagggcggcgtattctgtgaaatgttaggatataatgaataactgatgaatggagtcgcgcctgtatcaatcactnaggtcatctctgncaccttgatttttccggctgatcacagagcagcttat

SEQ ID NO: 482527 - DNA, 131 bp, Homo sapiens
  misc_feature (23)..(23): n is a, c, g, or t
  misc_feature (53)..(54): n is a, c, g, or t
gccggctggtggcgacggcgccnataatgtgtgcccaggccaagaatcccagnntctttccattcagctctgttcccatgaacttcttccgctcccatttgccgtccttcatcgaagccgtcgcctacgca

SEQ ID NO: 482528 - DNA, 220 bp, Homo sapiens
tattaacaatacaagagacaggggacggtcggcataccatagggaaatcttatgaataaatatatgtaaataaaataagaaagagtattgtctccaccgttgtccccaaaagcaacagcaagacatatgtggttagatattttatgtgtaagtgtttgctatagatttaaagagatgtatagccgtgcgcagatgtgtgttttcatagaccatggatagt

SEQ ID NO: 482529 - DNA, 433 bp, Homo sapiens
atgctccgccagatcatcggtcaggccaagaagcattcgagcttgatccccctctttgtatttattggaactggagctactggagcaaccctggatctcttgcgtctggcactgttcaaacccaaaggttttgttgggccagaaaataacccagagccctggaacaaactgggtcccaatgatcaaaacaagttttactcagtgaatgtggattacagccagctgaagaaggaacgtccagatttttaaatgaaatgtttccctataacgctgctttagaatgaaggttttccagaagccccatccgcccaattttccccttaaccaggaaaaatttttcctctaaaagcatgaaatcatgttggagatttcctattgtaatttcttattgggggattccaagtgattaaatcaataaataactgaaacttga

SEQ ID NO: 482530 - DNA, 299 bp, Homo sapiens
ggcttcttgacaggaatattcctggtggtctagaaggagctatgtgcttgtatggagattgggaccacagaatggtgccgactgttgagaccaccttctcctcactctactgtctcacgagggaggctgccagtgctctctacgcatcgactgatcagctgacactctattatctatatataggaggctgatggaagcctatgcctccttacagctttcaggacttgctgagcctggttctgatgatgccactgaccataccactcacctactactttcgactacatagccttgacttc

SEQ ID NO: 482531 - DNA, 864 bp, Homo sapiens
  misc_feature (685)..(685): n is a, c, g, or t
  misc_feature (725)..(725): n is a, c, g, or t
gacagtggctcatgcctgtaatctcagcacttgtgaggccaaggcaggcggatcacgaggtcaggagttcaagaccagtctggccaacatggtgaaaccctgtctctactaaaactacaaaaaaaaagtccaggcacggtggatcacacctgtaatcccagcactttgggaggctgaggcgggcggatcacgaggtcaggagatcgagaccatcccggctaacatggtgaaaccccgtctctactaaaaatattaaaaaattagccgggcatggtggcgagcacctgtagtcccagctactcgggaggctgagacaggagaatggcgtgaacccaggaggtggagcttgcagtgagccaagattgagccactgcactccagcttgggcaacagagcaagactctgtctcaaaaaaaaaaaaaaaaggaaaaaaaaacttttgggccgcttgggcccttggaaaaagttttttaaaccttccgtttgggcgcggggcccgtgggtagtgtgacccttggccatagcggttcccaaggaaatccgggctggatggggttggagtttctccccaattaaaaagcgcgggggaaccggggttcttgaaccaatcccgatggggtccgaggtcatgatggactcttaaccaggagtccaggaccggaaaattatgaccccccgggggganatgaatgagcaaaacacagatagaacacacaaacagacanaaggacgatgacacaaaggcttacaacacaaacacacaaaaaaaggacaacaacaaaaccaaatgaagctagagagggacaaggagaaaaaacaaacacggcaaaaagagagaaagaacagcccttgccactcactcga

SEQ ID NO: 482532 - DNA, 148 bp, Homo sapiens
tcttgattcttctcctccaactgtgcttccatctgtcgtaacctttcttcaatgacgccgtgtctctcttcagcctcggaaagcgctgccaccctctgggccagctccgcctgcacctccgcgagcgtctctgccttcctcagagact

SEQ ID NO: 482533 - DNA, 81 bp, Homo sapiens
gccgaggacacggctgtgtattattgtgcgaatgtgggtgactaccattttcattccgaaaatggccactggggccaggga

SEQ ID NO: 482534 - DNA, 159 bp, Homo sapiens
tagtggacatacttctggtgggacactgtgcgagaaacttgaggatgaaatcagtgagctagcatgcacttgaaaggcatggccatgtctcctcatctatgagtgcaaggtccatcagaccaacagccctgttctagatcaatactcgatgtcacagcc

SEQ ID NO: 482535 - DNA, 371 bp, Homo sapiens
gatgtggacagagtcatatactatatgtttatcacattttttatagtagaagaaaattggaagcaacttaaaatgtgaaaaagaggggccaggcgcggtggctcacacatgtaatcccagcactttcagaggctgaggccggcagatctcttgagcccaggagttcaagaccagcctgggcaacagtgcaaggcccagtgtctacaactatacaaaaattagctgggcatggtggtgcacgcccagctattcaggaggctgagctgggaggatcactcaaacccaggaggcagaggctgcagtgagctgagatcacgacactacactccagcctgggggaccgggcaagactctgtctgtctttaaaaaaa

SEQ ID NO: 482536 - DNA, 148 bp, Homo sapiens
cccgactagccgacaggtgcccgactagcccgacagcagcagagtcttcatcatgcctccaatatctggagtctttgcacgcctcggtcagcggcaccctgtgcccgcgcgctcatacctggcgacgccgccctgtcgggctagtcgg

SEQ ID NO: 482537 - DNA, 1013 bp, Homo sapiens
gtccttgctggtggaagcccaccacgtttctctgaagtctcccccatttagttgataagacggaggtcgtccagcgagcactgatcgccaccaggggccgagcttgtatgatagcagatcactgcgttgtgaggatgctggccgcacctcgtccatacttgcatttggtccccagcgttctttctcgctagcagtcacattgaaggggacatcgtgggacctccgctgggggcggtgcaccaaggacgaagcgactcattttatgtccaacacctgtcttgtcccccatcttctcggtcctcttgtcgcccaccagttcattccgtgggggcccactttctaataggacttactatgcacggagattggaccgtacttgtttcctacgaacttgtgtgggatccgaatggtgcgttgttatctcgctcttttttcttcgttcgggaatttgctgtaagcgctcagtgatttacgatgtgctgtcccaactgtggcgcctacgctcaccaatctctagtcgcgatgtcttcttgcggtgtatgtcgtcctcgaggagatgattggtctgcggagcgcaccattatctcgtcatttcacaccggcgctggggagcggcggctgtccgttcctcatactcctagcctccgatcgctaggcctgaggagacacacacacacacacacacacacacacacagcacacgcacgcacagcgcacaacatcttacctctcatgcgtcgtctttacctctcttgacgtctcagacgtggctcactcgagctgggagtccttaccatcggggagagggggaggttggttccttggggaggccaaagtaaggcagggaagtgcctggagggtaactggggggccaccatgaccccttctctctccagaaacagctgcttctcacctcgatcccagggtctccacccccaacccccagaggtggcccttgtttacagtgagactcggccactgtgtctcatgattcctggaatataaactgtagc

SEQ ID NO: 482538 - DNA, 362 bp, Homo sapiens
ggggggactggttttttatttcaaaaagacacttgtcaattttcattataaaaacagttgcactattgatttttttttttcccaattggccccaaatagacccctttaaaggggagttcattttaagccaataagctgcaggatgtacacctaacagaccttcttaaaaccttaccaaaaaatggggactgggtggggaaggaaacttaaaagatcaacaaactgccaccccacggactgtagaggttgtcacagcctaatggggtggcctgggtgccacaaacccaaaaaaaagtttcaaaataatttaaaatttaaaaagttttttccataagctttttaagattttttcagcactgact

SEQ ID NO: 482539 - DNA, 632 bp, Homo sapiens
  misc_feature (113)..(113): n is a, c, g, or t
  misc_feature (150)..(150): n is a, c, g, or t
agcggggagtctcgcggtgctgccgggctcagccccgtctcctcctcttgctccctcggccgggcggcggtgactgtgcaccgacgtcggcgcgggctgcaccgccgcgtccncccgcccgccagcatggccaccaccgccacctgcacncgtttcaccgacgactaccagctcttcgaggagcttggcaagggtgctttctctgtggtccgcaggctgtgtgacgaaaacccccacgcaggagctacgcagcagaaatcatcactaccaagaaacttgtctgccccgcggatcaccagaaacctagaaccgctgagcgctcgcgcatatgtcgcacttctgaaacatccaacacatcgtgcgcctccgatgaccagtatccctgcaagcaccgggctcccactacctcgctgtctcgacctctgttaccgcgcgcggacctgctttgcagcacctcgctggccagagcagctactacactctcgaagccagcatgccagcccactgctactacgatcacgacttctggcacgagtgttaaccgagcatccaccagccatgacgatcgtccacagtggaccctgaagcctgcagaacctgctgctggcgacgtaaatgcacgggtgccgccc

SEQ ID NO: 482540 - DNA, 239 bp, Homo sapiens
taaaattgggaatcacaagagggtattaaacgggctctgagaaggacaataacaagatacaagcctacatttggagaaacatctgttggctgaggaaggaagattatcccaaataacagcaaaacgtgggttctgggaataccagttcatatctagcatactaggcttaggatgggtaaccaggatctagtggcctcgtgccgggggatccctctagaagtcagacctgcgaggcattg

SEQ ID NO: 482541 - DNA, 840 bp, Homo sapiens
ggctctcgccaggcgtcctcgtgcaagtgacatcgtcttggaagccctgcgtggcaatccctgacgcgccgccgtggatgcccagcggaagacaagggcgacctggaagtccaaggcatactgtccattgaacgcagcatccatctattagggatgatgtatccgacaagtgtttcatgtgtgggagcagataatgtgagctccaagcagatgcagtcatgatccgtcattgtcccttcggcgggaaggctgtggtgctgatgggctaagaacacactatgtatgcgacacaggccatccgaggggcaccatggaaatacaaacccaggctctgcgtagaagaactggtcgtgtgctcatcattctgtggggggtgtggcgctgttgttgtgcaccaatgggggacctcgctgcgatcatggcacgtgtcgctgggctgttgaggtgccctatgctgtccgtgcgggttgccattgcttccactcgtgggagttcctgtgtcctgcccaggatctattggtcgtcgggccctgagagaggaagctctgtttgggcatccgctgtagggtagtcatccaacatgaaactctcccgggggcgaccaccagttgactgtcctggaggtgattgtggcaaggttgagatccagatggggagacgcaagagtgggaagcccagactgaaagtcgacagcttgcgtgaacagtggtcaaaatctcccccattcttccgtggggactgggtcgtgccagccacggcgttcaacgaggggaaggaattcaagaacctgaaaggggtgaatatacaggggaatcctggcatcggggacctggaagggcc

SEQ ID NO: 482542 - DNA, 135 bp, Homo sapiens
gtaatagaattctggacaatggtgatatgctgtggtacttgccagggacaatgttgtgtctgtggagcctggtgctgctgtggagaagctgtagattcctgactgacgcctggcatggtggtactgccagtggaa

SEQ ID NO: 482543 - DNA, 439 bp, Homo sapiens
  misc_feature (430)..(430): n is a, c, g, or t
ccccccttgggggttgcccccttttttcccggggtgttttttttttttcccaaattttttttcccccccggggggttttttttcccccctttgggaccctttaaaaacccattttttggggtttttcccccccccggtttttaagggcccccttccacttttcccccttttttcccaaaaccctttttcccgggggggcccttttctttcccccccccccccccccttttgggcccccaaaaggggacccccccagggggtttcccccttccccttccccccttttaagttttcccccccccccccctttgttttctggggttaaagggacccttttttgggtaaaaaccttttaaaccttttcccccccccccttttttttaaatttttaaaaaaaaaaaaaaaaattttttttttttaaatttttttncccccccca

SEQ ID NO: 482544 - DNA, 115 bp, Homo sapiens
caaagagatggatctacgaaggcgcctctgatgggacgagtgggcacgcacactgatttgaaatacatgtgtgagtggctataagacctgatggcatgagccccctatgaggacg

SEQ ID NO: 482545 - DNA, 240 bp, Homo sapiens
gccttagtggaactgctcggatccacgttgactctggttagtgtcagaattgaataggaatgcgggacagtcagccggcgtcagccgcttgctgtggataacccacgcgcctggggtcggaagtcttgtgtgagagcaaaagaaaacacagtgagttttttcttaggcatacactccacacacacacacacacacacacacacacacacacacacatatccggaggcagttccatttagg

SEQ ID NO: 482546 - DNA, 235 bp, Homo sapiens
  misc_feature (48)..(48): n is a, c, g, or t
acggcagtgaatcgagctcgtgtgacccggatcgtggacgtctcccangcctaagtacagagcgagactccatctcataaaaaaaaaggaaaaattaggtataatatttggtgtaggttctgtaaggttggctttgctttatttaagtggttaacactagacctgtaaggtaggtactgttttcttcccccttctaaacacttaggaggtttagagactccagagactccacgtt

SEQ ID NO: 482547 - DNA, 117 bp, Homo sapiens
cacgaggcctacgactacttgtgccgccgcctcacggctgaggacctgtccgaggctcggatcatctctctcagagacctagaatctgttccgggagggtaccaggatccatccgtg

SEQ ID NO: 482548 - DNA, 378 bp, Homo sapiens
ttttttttttttgagacggaatcttgctctgtcacccaggctggagtgcaatggtgcggtctcagctgactgtaacctccgcctcctgggttcgagattctcctgcctcagcctcccaagtagctgggactacaggcacccaccaccacacctggctaatttttttgtatttttagtaaagacggggtttcactatgttggccaggctggtctcgaactcctgacttcgtgatccacccaccttggcctcccaatcttattttgcttacaagtcctgcttcagggttaccttcctgaccactgctgcctcctcccagcattgccagggacggcattgcatagtttattttctgttttgttttttttgcgttttgtttt

SEQ ID NO: 482549 - DNA, 698 bp, Homo sapiens
gatcgtttctagactcgccagtgcttcccagaacccgatgtggttcagtagaggcttcttccatggaagctgccaatatgtgtcccacctgccggcattagacctggggcacctgattgcttctgcccgccccaggatgcttgccccaggcctctcccatccatccaggtcacctcctccctagaccttctcagcagcccctggcttgtctctgagctgcgggctttctgttcctggactgcccttcaccctgtccccagagcctcctcagcactgatctgattttgtcactgcattcctgtgcttgtaagcctgtgaccagcaatactgtcacttcttagaaaacattttggcctcgacacggttcacacaggcaatgccccgccatcattgcttccaattgtgttcgacgggaagcagacagtggcagcgacggctcttggtgctcacccagacctcccttgctgggaggttgccccaagaccctgcagcctgttactgatggaggcaggtacacacatagccatccccttgccctccctcagggaccagctgtgaagtacagtgcgtgcgtgcacttccagatggcattcgactgcagctggtctcagttgggacacatcagtgcctctcgtctccctaccccaggcacttcctcctcctctattacctcatgcccccataatcccacgcccgcc

SEQ ID NO: 482550 - DNA, 334 bp, Homo sapiens
aagggtcccgcatacgtctctctcttctacaaaggtgtggcagagccaggaccagtgagggctgctgtgcaggagtggcctgagacaatgcgctgtccgccgtgagagatgggctccgaagaaacgggcccagaggccctgaactcaagcgcgtggtgagaggcgtggacatgtgcatgtgaggggtcctcacggccaggaggagaatttgagggccactgtgctctagttagcgttggcatgaatgcaaggacgctttacttccagagcaaaagaggatttgacctcagcttgtcaaaagtgccacgtttgtactcccagcatgtaagccatc

SEQ ID NO: 482551 - DNA, 398 bp, Homo sapiens
tacgtatctagagaaagtggtagctaggctgtacaaggaagggctctgtgagaaaggggatggttggctgggtgtggtggttcacgcctcatatcccagcactttgggaggttgggagtttgagaccagcctgaccagcatggagaaaccccgtctctactaaaaatacaaaattagcccggcatggtggcacatgcctgtaatccaggctacctgggaggctgaggcgggagaattgcttgaacccgggaggcagaggttgtagtgagccgaaatcatgccactgcactccagcctgggcaacagagcaagaccccatctctaaaagtaataataataataaagttgtatgtttcaatgccttgatatgtttatttcactaggatacagtagggaga

SEQ ID NO: 482552 - DNA, 534 bp, Homo sapiens
  misc_feature (77)..(77): n is a, c, g, or t
  misc_feature (279)..(279): n is a, c, g, or t
  misc_feature (288)..(288): n is a, c, g, or t
  misc_feature (290)..(290): n is a, c, g, or t
  misc_feature (302)..(302): n is a, c, g, or t
  misc_feature (318)..(318): n is a, c, g, or t
  misc_feature (323)..(323): n is a, c, g, or t
  misc_feature (327)..(328): n is a, c, g, or t
  misc_feature (343)..(343): n is a, c, g, or t
  misc_feature (350)..(352): n is a, c, g, or t
  misc_feature (354)..(354): n is a, c, g, or t
  misc_feature (357)..(357): n is a, c, g, or t
  misc_feature (360)..(360): n is a, c, g, or t
  misc_feature (370)..(370): n is a, c, g, or t
  misc_feature (374)..(374): n is a, c, g, or t
  misc_feature (378)..(378): n is a, c, g, or t
  misc_feature (380)..(380): n is a, c, g, or t
  misc_feature (387)..(387): n is a, c, g, or t
  misc_feature (394)..(394): n is a, c, g, or t
  misc_feature (400)..(400): n is a, c, g, or t
  misc_feature (410)..(410): n is a, c, g, or t
  misc_feature (412)..(412): n is a, c, g, or t
  misc_feature (418)..(418): n is a, c, g, or t
  misc_feature (425)..(425): n is a, c, g, or t
  misc_feature (452)..(452): n is a, c, g, or t
  misc_feature (455)..(455): n is a, c, g, or t
  misc_feature (457)..(457): n is a, c, g, or t
  misc_feature (460)..(460): n is a, c, g, or t
  misc_feature (466)..(466): n is a, c, g, or t
  misc_feature (470)..(470): n is a, c, g, or t
  misc_feature (492)..(492): n is a, c, g, or t
tcgccggggccggggacccgcggtccgggcgccatgcgggcatcgctgctgctgtcggtgctgcggcccgcaggccngtggccgtgggcatctccctgggcttcaccctgagcctgctcagcgtcacctgggtggaggagccgtgcggcccaggcccgccccaacctggagactctgagctgccgccgcgcggcaacaccaacgcggcgcgccggcccaactcggtgcagcccggagcggagcgctgagaagcccggggccggcgaaggcgccgggganaatttttancngcgcgtctttcnctaccacccttcacancccgnccannccgccaaaaaagccnttattannntntanatnatcacttatntttncatnangcatatncttcttnttgcgntgcttacctntntatatnactcttnccactctttttttttctctttaacttntantnttnttttantttntgggagcgtgtgggtgttcctngacgtggcgcacgggggccgccgcggccccacctgggcatgg

SEQ ID NO: 482553 - DNA, 314 bp, Homo sapiens
agccatcaccagcatgaatgtgttcgtagggcctttgagtgtggcgattgtcatattctgttggataacaatgtattggggtggtcgattgtcatgggggcagggggagaggggcagtacacctggagggaccattttggtccacatcgacaccatcagtcttctcttagaggatgcccttgagtattcggcgttgatttcgggcacccaaatcagactttccacctcggactgtcgaggtgcagacccttggagcaccacttgcccatctcttacacaggctgacccatttcttctcgggggttcagaggctc

SEQ ID NO: 482554 - DNA, 235 bp, Homo sapiens
tatgtgcagaagatcacctccaactgcttcattcctcacgtcgtctcctttcatgggtacgtgtctcctgggctatggacggggctgcagccactcccgagcccaagatggagcaccccagtggcctgcatgcccacacatttgcctaccaaacgtctgcccaagggagggagggcgcggaacccacccatgggcaggggtgatcttctacacgataaggtgatcttctgcacga

SEQ ID NO: 482555 - DNA, 911 bp, Homo sapiens
gtgccagcgtctgcattggtgggcagcgacggcctggtcgctttttaaaacgcgttcttggcagtgttgtttcgcccccttgtgcccccgcggtccccgacgttatgatgtgatttaacccccctttgtggtgtaattctgtgggggagaaaaaaccacggctgcgcgggtgtgttttatatataatctgtccgccgctggtatataacctctcgggggtcccccaccacccacattgatgggtggggtcgcctccctccgttgttggttaatccccgcgggtgatttgtgcgcctctccccgcccgccccgccctgtgtgttgagagccttttcttcttgttttggaggaatatctcttttttattggttttcgcccccccacatgtggggagtgatgaatgctctcctccccccgtctgggtcctccccctgtctttttttttagaacggcccccctgctgtttgtttatgataattatcgccccccctctctggtgttgttttaattgagaagagagggtgatcatcttttgtgtcacaagaaacccccccccccctcctgttggtgctgagggcgcccccgccctctctttttttaaatagatcacctcttgaataccacaaccctctcttttttcacgaaacccgcccgccagctcatttaagcgggctgctctgtatagggtcacccccccaatgataatttatttgttgtattggtgggttgataaacaagagccgaggggggggtggggtagaccacgcgagcaaacaaccacaacccgcagtgtgtgtgtgttaaaaaaatatattctttagaaagggttttttttttaagggggcccccccttttttttttccccccgggcccgggccgccctttttttttttataaacttgcccccccca

SEQ ID NO: 482556 - DNA, 556 bp, Homo sapiens
ccttcatcatacctaccaagactaagtcatgatgaaatagagaatctgcagagacaacttgcaaggagactgaatcagcaatcagaaatctcccaaaaaagagaagtcctggtcctgatggcttcactggtgaattctactaaaacgtttaaagaactgaaccaacactaatcctcctcaatcttttccaaaaactgaagagaagggaacaccttctaactcattctatgatgccagcattaccctaatcctaagacagacagacactgcaagtaaagaatattataaaccaatatcaccttatgaacacagatgcataaatccttaggaaaatactagcaaaccaaattcagcagcatatgaaaaagattatataccatgaccaactgggacttattcatgaatgtaatgtgctcaaaattaaaaaatgcaaatggtagttcactgtgggtgattttttttctttgtatttttctgttgcataaatgtccacaaaatagaatattttattttttacatttattataaagggtaggtatgatgaaggacgggtacc

SEQ ID NO: 482557 - DNA, 243 bp, Homo sapiens
  misc_feature (221)..(221): n is a, c, g, or t
ggcgaaggttactatgcggcggatcatttacgtcacgcattaaacctgctctgttacccgtgctctcttatatgggccccgcatttgtcggcattattaccggttctatggttatcgaaaccattttggtttgccggggattggacaacgttcgttaatggcgcattgaaccgtgactattccttagtgttaagcctgaccatcctgggtggtgctttaancattttgtttaatgcattgtcg

SEQ ID NO: 482558 - DNA, 220 bp, Homo sapiens
aggatccccaatgatgcgtcctcagtctgcatgtcttgtggatgaatacatcattgtctcctgccatggtcatctgactgacaccaatatcacacggacgtgctgtttgtgagacatgatggctcgatagctctcaaggcagcgagctgctcttcatgaagaagaaccacgacgaggaagtataaggcctacaagcccagattggcgagggacttggttg

SEQ ID NO: 482559 - DNA, 847 bp, Homo sapiens
atccggtgaggagaaagaaagacgtgccgttattgcccccgaatatgcgggtgacatagccatagaagggtgtgggccagccccgttccccgtggataatcttcgcgttgaaacgggcacccacaattggggcccttgccctcttaactctgcacctttctcttggcgggttccagaactcacaccatgtagtgcgcaagcgcacagctgtttgtagacaccaaattacatgtgagaagtcggttgctccgcgtctcggtcaacaaggtatgtccgagcagctaggtctctaagcttgaccgctccagcggtgggcatgagaccgtttggatcgcgccgccactttcccccgcggttgctgaggtctacattgtgcagacagatcatagagcccatgctgccacaagagactgttgtggagaaaaatacgtgacaggggaagccccccacagggcttgtcaaattgcgcgtcagtatacatgagcactgttcactgctagactaacaccacaggggttttatgttctatgggtcaggttcacgagatctagaataagggagattctttataagacaatttgtatgtacagttagctcaaagatattgtgtacatcgaagttcttgtcgagagatagacacaacaggcgtttactgttgaacagcactaatcaggaacatgggtgttacaccattgaggaacacttctccgagtcatagcctgctggatacagtgacacgcatatttggcaagacagccctgctgtctcccctctccggctatgggatagatggaatcaccaggcgtgctggtcatgacaacccataaaccctgccttgggaaagcgg

SEQ ID NO: 482560 - DNA, 237 bp, Homo sapiens
agtccattaaaactcattatcctttataaatcacccagtctcaagtatgtcttatattagcagagtgagagcagactaatacacatactcaacctagggggatttaagcccccacacacattggcaatgtctggcacacacttttctggttgtgaacactaaaggagtggacagggggtgcatattggcatcaagtacatagagctcagcgcatgctgctcccacacccatacaatg

SEQ ID NO: 482561 - DNA, 270 bp, Homo sapiens
ctccttgcggccgcttacagcgttttgttactgattttgaacaacaaaccggaatggaaatttattagcccggtactaaaacgctcggcaaagtcgcgattattggcgcaggtcctgccggattgcaggccagtgtgacactgacaaaccagggttatgacgtcacgatttatgagaaagaagcgcaccccggcggctggttgcgtaacggtattccgtaattccggataccgcaatcagtgctggatgcagagatcgtccgtattgaaa

SEQ ID NO: 482562 - DNA, 176 bp, Homo sapiens
cccgcactcagtcagctcatgtataacgaggtatactccttaaggcaacgtttctcctccgtcagtgcaatttatggctgatctctcttacgttagttttctcatgttataatgagcactgacatttgtggctacggctttgctcacattgaggtaccgcggctcgtaattctgta

SEQ ID NO: 482563 - DNA, 472 bp, Homo sapiens
cagcagaatgctggttagaactccagtactacattgaatagaagtggtgagaatgggctttcttgctcttattccagttctcagggggaactgcttttaactttctcctgtttagtattatgttcggctgtgggtttgtcatatgatggcttttattacgtttaggtatgttccatctatgttgactttggtgagggttttaattctaaagggatgtttgattttgtcaaatgctttttctacatctattgagatgatcatgtgattttagtttttaattttgtttatgtggtgtatcacatcaactgacttgcgtatgttaaaccatccctgttatgaaacccacttgatcatggtggattatctttctgatatgctgatagattcagttagctagtattttgttaagaattttcgcatctgtattcatcaggactattggagtgtagttttctttttctcttcttgtttt

SEQ ID NO: 482564 - DNA, 128 bp, Homo sapiens
cctgcaactgaaaatcccagaaatcaacagcagtgctatgtcggccacgtcacagcccctctggcctgtgtgcctagaggcagcagcattgtgcccactggggcacgaactcacaactgcgtcctggt

SEQ ID NO: 482565 - DNA, 302 bp, Homo sapiens
  misc_feature (21)..(21): n is a, c, g, or t
  misc_feature (28)..(28): n is a, c, g, or t
ggcgctagttggaatccccangcgttgnggtagtgtattgaaggtattcaatcctgtaggagaccggaatatgctgattacatttcactccaaggtcgtggccgaagtcctgatgcttacctgaccatgctggtgccctgctcccaggccgtgggcaatgtccttcggcgacaagattcccgaacgcggcgtgttcaccgtcgaccagctcggtcctggccatccagtggcatcgaacgggccatcgaagaggcccagggcacccacgaagaggacgaggaagacgaggacaagccgccggt

SEQ ID NO: 482566 - DNA, 187 bp, Homo sapiens
ctatctcatgcaacagcttcggcttcatcctcctcgagacgctcaaggtgggccttcagacagggcgtgcaggagcggagttcactgttctcctcctccagtgctgtagccgggtctgcaggttctcgatctcaatgctcttctccctacggtatcctacacctctcatagacaaggtagagccgag

SEQ ID NO: 482567 - DNA, 498 bp, Homo sapiens
ctatcttcaaaatctggaagtgaccgggcacaatggctctttcctataatcccagcaccttaggaggccgaggcgggtggatcacttgagctcaggagtttgagaccagcctaggcaacatggcaaaaccctgtctctacgaaatatacaaaaattagccggatatagtggcgcaagcctgtgatcccagctacttgggaggctgaggcgggggtatcacttgagcccaggaggcggagtttgcagtgagccaagatcacaccactgcactcagcctgggtgacagagcgagactctgcctcaaaaatagaataaaataaaaataataaagtctattaatttttaaaatatattaattgagccgggcgcggtggctcacgcctgtaatcccagcactttgggaggccgaggcaggtggatcacctgaggtcaggagttcaagaccagtttgaccaatatggtgaaacctcgtctctacttactaaaaatacaaaaatt

SEQ ID NO: 482568 - DNA, 749 bp, Homo sapiens
ctagttaccattaatttagggacctggtatgatatggctccacgacgtggttctcgctgtctcttacttttaaccagatgaacattttgatctggccctgatgccaatcatgtgcagtggcatgacacagccaagatgacaagaccctatggtgctttaagtatattgaatgcggaaacttagtacctaacttaaacccactaggtcctaaactatctaaacctgctatttagaaatttcggttgtggcgacctgcggagacaggatagccctgtctccgatctgttacatgctacgacttcacctagctcacaagtcgtatctacatatatcgtcaaattgattctcgaaatacacccttgtaccaacggaacatacggattattcctagtggataagcaagtcgactacattcctatatctgatagtcgcatatcgaacgaatagggtttacgatctcgatgttggcatccaggacatcccgatggtgtagccgctattacgacggttcgttctgttcaaccgtattacacgtcctacgctgaatcttgatttgccgaccgtagtaactccaatgtcggtaggctatctacttcaaatgtcctgcctgttcgaaaggactcgagaagcttaggcctagttcacaaagctggcttcccccggtatgatgattatcatctttcaacttagttattttacctaagccaaccaagaacggggttgtcatgatacgccttatataacgggtg

SEQ ID NO: 482569 - DNA, 160 bp, Homo sapiens
gttcaaggacaactttgatgagatggacacatccagggagattgtgcagcagctcatcgatgagtaccatgcggccacacggcagactacatcttctggggcacccgggtcagtgtggtccccaggtcagggtccctcatctgtcttgctggttggtcca

SEQ ID NO: 482570 - DNA, 514 bp, Homo sapiens
cgctggtggcagggtctgcctgtgcaacccttcctgcgtgtatttaggccccggctccttcatggagggtgaatatcccctctcagctcagtggtaaggtctgtccccctccagctccattccatgattcctctttcccaggctgtagctgccgctgtttgtgggggaagggccagtgatgggtctggagcgaaggccaagagtggggcacctgggggaaggtatgaggtccctcccaggatcagactgtctcgaaatgtcatctgccttgggaggccaaggcgggtggaacatctaaggtcaggagttcgagaccagcctggtccacatggtgaaactctgtctgtactaaaaatacaaacattagctgggcgtggtggtgggtgcctgtaatcccagtgactcaggaggctgaggcaggagaattgcttgaactcaggaggcggaggttgcagtgagctgagatcgtgccattgcactccagcctgggtgacagagcgaaactccatctcaa

SEQ ID NO: 482571 - DNA, 163 bp, Homo sapiens
ttatctagtgttgttctaattttgggtctgctatgtgatccaatgagcccaaaagagtaacatgccctcaaaggatagagaacaaaaaaaggaaacagcaacacaaaggaaaacataaccttcccaattgagaccttactcagcgtgatttcttgtcctaaaa

SEQ ID NO: 482572 - DNA, 465 bp, Homo sapiens
tactgtgattgttgacaagatgcagattgaagcacgaggaggcatcatggcgatgaagactaacgacaagactaagcgagaaggggatgtccacttcgactatgatgagacctggactatcggagatgagcaggacacagacctgctgcaggtggcagcccatgaattaggacaggatgctggggctgcagcacaacaacagcagccaaggacctgaatgtctgcttctacacctttcgatacccactgaatctcagcccagattactgcaggtgctgtcaacacctatatggccagccctggcccactgtcacctccaggaccccagcccttggcccccaggctgtgatagacaccactgagattgcaccgcttgcgccatacgccccgcctgattcctgtgaggcctcctttgacgcggtctccaccatccgatgcgagctctttttcttcaaagcgggcctt

SEQ ID NO: 482573 - DNA, 520 bp, Homo sapiens
  misc_feature (183)..(183): n is a, c, g, or t
  misc_feature (266)..(266): n is a, c, g, or t
  misc_feature (288)..(288): n is a, c, g, or t
acatgctgtgtgcggggaacacgggaaggactattccagggcgattcggaagggcccctggtgtgaaaggtgaatggcacctggcttcaggggggcgtggtcaactggggcaagggctgtgcccagcccaaccggcttggtatttacacccgtgtcacctaatacttggagtggatccaccantatgtccccaaaaaaccgtgagtcaggcctggggtgtccacttgggtcattggagagccagcccctcttgttcaaaaaaccantggttcctacccaggtggggantgcgcccccacacctttcttgccccgtcctgagggccccttcctgtcctaagccccctgtttttttttgagccccttcccctgttttgaggacccttccccatcttaagcccccttccctgttttaagcctgaagcctggaccgggccctccggccctcccctgcccaggcaattggtggtgggggctaatcctcctgaggggtggccctcattaaagggcatggaaatcca

SEQ ID NO: 482574 - DNA, 138 bp, Homo sapiens
gccgtgagctgagattgcgccattgcactccagcctgggatgcagcgcgagactcacaaaaaataaataaaataagttaactaatagttgaacagacacaactttgactaagaatacacggtcaacttgtctggagta

SEQ ID NO: 482575 - DNA, 409 bp, Homo sapiens
ctagcattagaaatgagagaaatcagccagacacggtggcgtacacctgtaatcccagcacttcgggaggccgaggcgggaagattgcttgaggccaggagctcgagaccaaccctgggcaacatggtgataccccatctctaaaaaaaaaaaaaaatttaccctggcttggtggtgtgccccttattgttcccagctgcccaggaggctgaggcgggaggattaccacctttaaaaccaggaggttgagactgcagtgagccattgattgcaccacgtgcaccccagcctgagcgacagagtgagactctattctcaaaaaaaagaaacgaaagtgaagaacgctttctgcccactgatgctctaagactcctggcagcaggtttgagtgaatgggataccgacctcg

SEQ ID NO: 482576 - DNA, 123 bp, Homo sapiens
ctcgctctgagtatccccgacatgtaagccaaccgctggatgggtgggtggtcaaaagggaaggatgaggctccctgtggtgccagcaggtctggtgtagaacatggtgcagaatagactgcg

SEQ ID NO: 482577 - DNA, 749 bp, Homo sapiens
gggatgtcgtgtcccagactttggcaccgtcggggttcgtcgttccccgtaatgtgacagcatcccgcccctgtgctgctgcccaggagtccgccggaccccggtctcgatatgggagacctggaactgctgctgtcccggggaagctgaacgtgctggtgcggggtctgcgtcacgcttcccgctaacgcgagatgggctaccgaagggtggaaccgagttagcatgagaacctgggcagaagctgatcatgcagagcgcatcctcgagtgtccacagtcagctcatggtcgagcccattcaggagctgctggtcacccatggtaaggttccaacagctggtggaggagctgatcgcaggtggaagatgtcggaagccatgcacaggtgttccctgtagtactgccagggctggaggacgttcaaagtcctcgcagataaaccttactcctcagtctaaaatggtgggagcaccaacggagggctcgtccatcgagtcaaaccttcttggagaccacgtgttcttcgcactacaggaggtgtgatgagatcacgcagtaagacactgttctttggacgttggtagtactattgtgcatccggtagaactgacccatgctggtggccccagaatgcgctgtggagagccctcacttgagaatgcaggggaatcccgaggacagtaaacctcatgcaggaagcatgcagaaataggaagagctgatggaatcgaaaaatgcctgaaggtc

SEQ ID NO: 482578 - DNA, 310 bp, Homo sapiens
  misc_feature (180)..(180): n is a, c, g, or t
gctttctacaggagatctgcaagtcagagtgtccatcttcatttccttttccttgtattatttttgccaagtctctgaggccttgtagacagctttactcctgcataccaattaaaaggcaacaggagggtgtaagcggagacatgaaagtaattctcgcttctgtggaatccagccagnagcatcctacgtgctaacgagctaagaatggataactaacaagcatgcctataatgtgtgcggaacgagtaaatgctttctacaagagcctcatgagagcttgtggaaacataattacaagggaaaacgg

SEQ ID NO: 482579 - DNA, 243 bp, Homo sapiens
aggattcgaatcatgcgttcaacagctctagcatctgaggataggaggagctgatatgaacgccgagcctctacctgtgcagcggaatgccatgtcggctgccgatcagaagacaacccgagaagactagcccagtgccccaatcaagcccaccaacacttgacattggaggaaggacaactataattaccccctgatcacagtggactacctctcctcctccccaacctcgtccgagcggag

SEQ ID NO: 482580 - DNA, 217 bp, Homo sapiens
cacgaggaggattgatgatctcaacctccagtcagctgtattgattcaaaggagaaaatatcctatgtgagatatagattcaaatacaaaggatatcgtctctgattcttactaagggcagcctgaaattcctaatgcattattgcataaattatttgaggtcagggattgtttttaaaatccaagaatgagccggatatgatggctcatgcatgta

SEQ ID NO: 482581 - DNA, 202 bp, Homo sapiens
attaccagttactcttgtgaccccccctccccccaatcaaacaagcagttttgcattggacgttggctgggtgtcttccaagctggctcagttgtgaccactctatacttgagcatgctgtcagatgccacaggttggggacctcaggctgtttcatgtgagcttttgaccaagcatcctaagttggcattccagtcgacgc

SEQ ID NO: 482582 - DNA, 716 bp, Homo sapiens
  misc_feature (9)..(9): n is a, c, g, or t
  misc_feature (12)..(12): n is a, c, g, or t
  misc_feature (29)..(29): n is a, c, g, or t
  misc_feature (32)..(32): n is a, c, g, or t
  misc_feature (57)..(57): n is a, c, g, or t
  misc_feature (60)..(60): n is a, c, g, or t
  misc_feature (67)..(67): n is a, c, g, or t
  misc_feature (76)..(76): n is a, c, g, or t
  misc_feature (80)..(80): n is a, c, g, or t
  misc_feature (83)..(83): n is a, c, g, or t
  misc_feature (85)..(85): n is a, c, g, or t
  misc_feature (88)..(88): n is a, c, g, or t
  misc_feature (92)..(92): n is a, c, g, or t
  misc_feature (106)..(106): n is a, c, g, or t
  misc_feature (111)..(111): n is a, c, g, or t
  misc_feature (115)..(115): n is a, c, g, or t
  misc_feature (120)..(120): n is a, c, g, or t
  misc_feature (124)..(124): n is a, c, g, or t
  misc_feature (127)..(128): n is a, c, g, or t
  misc_feature (130)..(130): n is a, c, g, or t
  misc_feature (139)..(139): n is a, c, g, or t
  misc_feature (150)..(150): n is a, c, g, or t
  misc_feature (152)..(152): n is a, c, g, or t
  misc_feature (160)..(160): n is a, c, g, or t
  misc_feature (164)..(165): n is a, c, g, or t
  misc_feature (191)..(191): n is a, c, g, or t
  misc_feature (205)..(205): n is a, c, g, or t
  misc_feature (212)..(212): n is a, c, g, or t
  misc_feature (246)..(246): n is a, c, g, or t
  misc_feature (249)..(249): n is a, c, g, or t
  misc_feature (268)..(268): n is a, c, g, or t
  misc_feature (271)..(271): n is a, c, g, or t
  misc_feature (281)..(281): n is a, c, g, or t
  misc_feature (295)..(295): n is a, c, g, or t
  misc_feature (307)..(307): n is a, c, g, or t
  misc_feature (326)..(326): n is a, c, g, or t
  misc_feature (334)..(334): n is a, c, g, or t
  misc_feature (366)..(366): n is a, c, g, or t
  misc_feature (380)..(380): n is a, c, g, or t
  misc_feature (383)..(383): n is a, c, g, or t
  misc_feature (386)..(386): n is a, c, g, or t
  misc_feature (403)..(403): n is a, c, g, or t
  misc_feature (467)..(467): n is a, c, g, or t
  misc_feature (472)..(472): n is a, c, g, or t
  misc_feature (481)..(481): n is a, c, g, or t
  misc_feature (493)..(493): n is a, c, g, or t
  misc_feature (504)..(504): n is a, c, g, or t
  misc_feature (510)..(510): n is a, c, g, or t
  misc_feature (514)..(514): n is a, c, g, or t
  misc_feature (534)..(534): n is a, c, g, or t
  misc_feature (539)..(539): n is a, c, g, or t
  misc_feature (544)..(544): n is a, c, g, or t
  misc_feature (565)..(565): n is a, c, g, or t
  misc_feature (569)..(569): n is a, c, g, or t
  misc_feature (573)..(573): n is a, c, g, or t
  misc_feature (583)..(583): n is a, c, g, or t
  misc_feature (585)..(585): n is a, c, g, or t
  misc_feature (610)..(610): n is a, c, g, or t
  misc_feature (626)..(626): n is a, c, g, or t
  misc_feature (629)..(629): n is a, c, g, or t
  misc_feature (632)..(632): n is a, c, g, or t
  misc_feature (654)..(654): n is a, c, g, or t
  misc_feature (682)..(682): n is a, c, g, or t
taagggggncanctttattcaagccagcnaangacacgccaggggcccaggggagcnggngggcccngcccagccnggcngcngnggngggncagagcccagagcnccccngggnctggnaganggnncngcctgcacntctttttgggncncagagacnaaannagaaagggggggggggagccccaggngaacccactttcantgtcaancttgagggcaaagaaaaccagagggctgtcttcngcntggggggcagcaagggtcncgnccaggacccngagggggcgggggncttccagcgggngggcactggactcactgcngccgtcanccagctctcgggaggacgagttttcggcatcngagttttccgagcngcngancaccacaacgcgttccnctgcctccccggcgccactggccacgtggttgctgttgggcaggaagacctcacttcctatganggggntcctggggntaggcggtccanccaggtggggnggtganactnccttggaggtgctgggcctnggctnctccngggagctccgagccaaccttncctncttnccctcctcanantccatcttgatgaccttcctggggnactgggtctggctgcnctnccncttctgggctgtcgttgttttngagaaatccaggtcaacgtcaatagggnccctgggagttctggcagcctctgggctggcttt

SEQ ID NO: 482583 - DNA, 282 bp, Homo sapiens
ctattacacgcaatataattgtcaatagtggctgccgataaagattaactacgcagtagtgagagacacgatatgctgtaatgatagccctagaatctcttctcctacagaatcgattcagtaggagcagatattctgcgctatcataatcccatatgtttctctccctccagttgttaatataatgcagcattaattgcaagttattatgcgcgtacacgttcttcccgtataagaatatcgctcatgtgctaataatgcttgtgggagacaagaggcgtg

SEQ ID NO: 482584 - DNA, 781 bp, Homo sapiens
  misc_feature (13)..(13): n is a, c, g, or t
cagcatcccaaanaaagactcaaaattttaagaaatatcaaaatatccagcacccaacaaggtaaaagtcacaatgtctagcagctaatcaaatattaaaggcatgcatggaagtaggaaaacaggacccataatgaggaggatattcagtcaaaccaacccagaaattacatagatgttaaaattggcagagaagggcattaaaacagtcattataactgtattctatatgttcaaaaagtcaagtagaaagatgaaaaatgtaaaaaaaaatacctgaatcaaactcctagagataaaaacttcaaagtatggtgtgaaaaatatacttgatcaaaataatagcagattagactttgctggatggaagattaatataggtgaagccatactagtagatactgtacaaaatgagtcacagagagggaaaaaaagagaaaaatatttgaaaagaccattactgagctgtgggactgtaagtggcccagtaaatgaaaacttggaatccctgaaggagatgtagagaaaaataatggctgaaaactttccaaactaaaaatgataagcccatacccaaaccagttaaggtacatggaaaaaactgtgccaaggaataccataatcaaaattgtcaaaccagtgatacagtgaaaatcttaaaaacaaaaaaaaatttttatatatatactttttattatactttaagttctagggtacatgtgcacaaggtgcatgtttgttacatatgtatacatgtgccatgttggtgtgtaaaaaaaaa

SEQ ID NO: 482585 - DNA, 771 bp, Homo sapiens
  misc_feature (369)..(369): n is a, c, g, or t
atcttggagccacgcagaagagcagattttgggaggtggtaataacaaaatttaatttcttcccaacaacttaattttctcatttattttacagaatagtagtgaaatatttgatgaaactttgtattttggtagcactacatagaaaatgtgttttagatttatgatgatcatatttctcaccaatgtaatttcagtctcagcagtgattttcaaacttagggaaagggacagcattagatttttttttttttccatttttttaaaatgatattcttaccgtgaaactacaaacgacaaaagagaattagaaagtgtttgaatttacaagttgaagaagggtttgggggaagatgggcctgaacccancttccgtgtcctcaactccagtgcataccccaatacactccagggaaaccctctgaagcgtttaactggggtgcacttgtgaaaattctctcttctataggtggtgcttggttgtgattttaaattcacagagaaaacgtgggtttaactcttagagaaccattttcatccagttttttagttggcttcattggacttcctaaatcattttggacgttcacaaggattgggtactttccggttaagcttcctctctctaagctttatctaccttaaaaccaaagtccttttttataatggccagtccaaccaattgatttctcaaactgaagtgcccaggtgtggactcatcaattcccgttagaatagggacatcctatttacaaagtgggtgcagttcca

SEQ ID NO: 482586 - DNA, 236 bp, Homo sapiens
  misc_feature (71)..(71): n is a, c, g, or t
  misc_feature (116)..(116): n is a, c, g, or t
ggggttagtgaatagtctttaaaaaaaatttagaaaaatgagaggttcaggacagacatggaaaccttttntgtacagcagcataactccagtttgctttccaagccctctgattnagaagccaataggcaaagtaagaatgaacctacttttatcagacactatgattcgagccagttggctgttaattctttttgccttgagctatttcggtgaaataataaaattgatcttat

SEQ ID NO: 482587 - DNA, 1517 bp, Homo sapiens
gtgattggtatgaccgtaagatgttgatctcatatcataattacgggaaccattgccaagtctggtactaaagtcattcatggatgcgctctatcagagctggtgcagacgatctccatggaattgaggcatgtatcaggccgttcggcattattattctagcctacttggctgtgctagtagcacaagtgtgttgtcgatcgacaaagcacaaggcatgatgaacagtactgcgttgggaagtctatctagcatagcgagggttccattcacttgatgacagtgcatagagccattggttgaggcccgagtttggacagtggcgtaccgaacacgttgatccgtcacattcgttaaacgaacgatcaagacgacgacgtacacttagcaagaagaggctgggtcaaatagatagtatgtgaacgtaagcagttctgcagattgcataggacatatccgcattacccgtttatttgggaagaatggaagcgagagacaggaagattaggtgatgactgacgagcacgacgcgacagcgacgacaacggtgacgaccacgaacgacgggaacgactaacagactgactgacaccgacagacaccccagagactcgaccgactgctcgggttccgactgacgggacggaatggacccagcgtgctagaggacttacagacaagacagacacaaggctacagaccagacttcaaaggagcaagagtacaattcggaatacacgagagaaaaactagacagacaagaacacaacagaccttaattagcggacacaggagaacccttgagtgaccaatcaagcgcaaaggagggcacgtacatgagcacgaaaaattactcaccaaagaggaaagcacgccaccacgataaaatgggagccctgggcggaacagagaaaccaacactatgagacaagacaccacaggaccacacaggatacactagacaacaccaggggccacaggcaagggacaaaataaacacgggagaacataggctaaataacacatacccagtacgacggaggagcaacccgatagatgaaccgcagaacaggagccgagcacccaacgcacagacaacacagacaacagaacacacgtccaaagacaccccaacggagacgcggcacggagggtagggcccaacaccaaaagtgcgaaccgacgaatgggtgcgctgcgaaggacgggaaacaccacgcagagcagaaccaacgaaaaatgaccagcggagggcggagagcacgaccaacagaagggagtatacgcgcaagaagagcacaaaaggacgagaaaagacacaacagcacaacaaaaaaagagagaagaaagaaagcaacaaagacaggtagaaaacggcgagcagacgacaagaaagaagcgagagaccaagacagccacacacataagtaggagacccaacaaccgcaggaacgacaacgagagccacaacaacagcacagccaagcacagaatccagacaaagaaacaacaagacg

SEQ ID NO: 482588 - DNA, 430 bp, Homo sapiens
  misc_feature (26)..(26): n is a, c, g, or t
  misc_feature (56)..(56): n is a, c, g, or t
  misc_feature (128)..(128): n is a, c, g, or t
  misc_feature (172)..(172): n is a, c, g, or t
  misc_feature (190)..(190): n is a, c, g, or t
  misc_feature (195)..(195): n is a, c, g, or t
aacccgaaaaagaagcgtactagccncgtagacactctaatcttaaaggtgttacngccgggaggagaaactttgataatggggctttttacaaaagccttgttgagattagacccctcgtataatanctttaccttctaataagggactccgtgttgctatgtgcagatcnctctggagcttttttgcnggcantaaggtgtgctatttgtcagtagcctttttttgcagtgatttgagaccaagttgttttacagctgtgttaccgttaaggtttttttttttatatgtattaaatcaatttatcactgtttaaagctttgaatatctgcaatctttgccaaggtacttttttatttaaaaaaaaacataactttgtaaatattaccctgtaatattatatatacttaataaaacattttaagctagg

SEQ ID NO: 482589 - DNA, 1500 bp, Homo sapiens
  misc_feature (970)..(970): n is a, c, g, or t
  misc_feature (1172)..(1172): n is a, c, g, or t
  misc_feature (1302)..(1302): n is a, c, g, or t
agtttctgtatctgttctattattttttcatcttatgtgtatcatcatattcgtatgtatgttcttcttttttctttttttctcttttttatttatctcttatttttatatttgttcttcaagatcgtcagtacacatcatactagaagacaacactactattgtaaacacccggttggcgccatatataccccgggggacccctatgtttgccacaacaagccgttttgtcttccccccccccctcgtttttttactccgtctctgtaattgcaccgacccccttggtgggcaatctttccgcacccgaggtacactctcgctgtggccgcctgtgagatataaccccccccgggagggtttttcctggggtgtcggccccccaccggcccgggattgtgtgaaatcaccccccgtgccggcgtgtcctctccttgcgccctgggttttcccccgaggagaaaggaaggggggatataaaccccaggctcccccccagtcatcggccagtgccgctgcacattgtccggctgtctaagccctgtgcacagcctgcgctctgttcatcacccaggtgaggagttccacgggtcttccccgccccctgtcgtgttggtgtacccccgggttccggggcctccggttgggtgctcccttgatgcccctcttccccccccccctgtagattcccccggtggggccgaagggaatatttccacgaagggattcccccaatcctttcactcctaacccttattttctatcctccccagtggattccgctcttgaaaaatgtatacacacagagtgaatctataacgcgtgctccaccgcaccccatagatccgcagggatattttcttccaacgcgtcaccagtctcacaggcttctacaccagaacacccccctataccgccatttatacttggcgcgacaccagatggcctgaagtgcgccgcgccacgcacntcttacaatctggaagattctcccgggccggccgcgcgcttgtcccccgaagggggaccacaaagcaccacactttcgccacgattctctctcctgggagattttccctgtataggagccacacctgtcgagagccgagcccacatgttcttcacatttgcgttcccacccacgagactccccgcagggacacacgagagcncccctcctgcttccgcagaccctctcacgcttcttttgtggcctcttgaggagattgtggagagacaccgcgggccattccccctctgttccccacagaggagcccgcaacgccttgctttcactggccntaacacacgctttcgaagaagaagaattcttcgcggaagaaggaaggaaggaatatagggcccccttcggggctgggcacatcccgcccctggggccacaccccttgtcagcccgcggtgggtaggaaccctagactcgctcatttcccctgggtttgtccccctgttgtaatcgtcccaattaaccctccctcccga

SEQ ID NO: 482590 - DNA, 777 bp, Homo sapiens
tcggctgtaaggaggtggcagtaacaaccacaaccacaacggcctggggtgaggagaatgtgcggcacgcgtgcgattctatggcgtgccctaggcggctggtggaggagcgcgaaggaggcagggtggcggccgggcttggcttcgcgctccttgagtgagcttgtgcggcgtgcgcgacccggggaaccggcattggcttctatgctctgtgttatttatcatctcgataaccccgtggggccagatgtccagctcgccgctgtccaagaaacgtcgctgtgtcctgggcctgatccaaagccgggttctaactgctcccctgcccagtccgtgttgtccgaagtgccctcggtgccaaccaactggaatggccaagaacggcagtgaagcagacatagacgagggcctttactcccggcagctgtatgtgtcgggccatgaggcaattgaagcggctccatgacatccatgtgtcctggtatcagtgcctgcggtggccttgggctgtggcgctcgctaagcaacatcatcctttggtggcggtcaaggctgttaccctacatgaccagtgggcactgcccaggtgggctgatctttcctcccagttctaccttgcgggaggaggaacatcgcgtaaaaaacctgggccgagggtaatacaggccccgcctcgctgagctttcaacagctatgtgcctgtcgctggcctacactggacccctcgttcgaggactccttactgcgaccccggtggtggtgtcaccaaagaccccc

SEQ ID NO: 482591 - DNA, 935 bp, Homo sapiens
ggagagagaactagtctcgagttttctgggatttttccaggcggccgggaaaaatgggggacattcaaactgagcgtgcctaccaaaagcagccgacaatctttcaaaacaagaagaagggttccggcgtgggagaaaacgtggcaagtgagaagcttcccgacggaataactcacaagaaccactcggctcgtgggccttcaagaacacccaaggaaggcatattttgagggcaccatacatttgacaacgaaagtgcgccacttatcaaacgtgagaaaatgtgagtggtcacatatctacagaggagcggagactccccctctatctgtgggcagtgtggatgtagaacccaacacaagtgacaagcagtgacacgaagtagaacacatatgggatacaaccttcctgcccggaagacatatacctccgtgacaaaattaacccaactgcggcggcaaacagtattaaagacaaacacggggttttatacgagcagaaaatatgacgaccaccaaacgaagagaaaacagatgttgtgatccgtgatatcacacacccatagtaggaacacccccacctgttgtgccttatcgagacggggggaacaaggagtaccacgaaacaacttcggagtgaacacaacaatcagtatacgagcaagagtaatgtatagaccgacaaatagtagccccaaagcaccaactacagttggaatagccacagaacaccagcaggggtaggagccactatcacaaaaacgtgatggagaacacaaaaagaggagtcacaccacaaaaaggaggctcatgcagcaggggaaaacccaaaagaaaaacagagcaaagagtacacccgaagacaaatagatatcagaaggaggagagggatctgtgagagaaaaaacttgcagggacaacccagcatgtttaccc

SEQ ID NO: 482592 - DNA, 134 bp, Homo sapiens
ccaagatccaggatcaggaacaggaacccatgcagatatccgacatggagaacccggcaatacccatcccaacttttgattaaacaaaattaccaacaattaccaaaattttgacattcctgttaaaatgatga

SEQ ID NO: 482593 - DNA, 89 bp, Homo sapiens
ccctcccggttagcgggcggttgtaagggtgctttgcggcctgcctgcctgtcctccagagggtgtttcctagaaatcgataaatcaga

SEQ ID NO: 482594 - DNA, 636 bp, Homo sapiens
cacaccactgcactccagcctgggcaacagagcgagactgtctccaaaaaaaaagaaaaaaaaagaaaagaagaaaacagttgaaagcttcaatatcttagaccaagtggaagaaataatttcagagcttgaagaccaatcttcttaacccagacaaaaataatatttttttaaatgaacaaaatctttgagaaatatgggataatggtaaagtgatcaaaccttcaaattatggcattcctaagtgagacagagaaaaggtaaacaacctggaaaacatatttgagggaataatcccagaaaaatcccctaaccttgctagagaggtgaatatccagattcaaaaaatctggagaacatctgggagatactatataaaatgaacaccaccaagaactttactcaccaggggatggtctaagggtccaatgctaaagagaaaatgttagaaagaaaaaagcaagatcacatataaagggaacaccattaagctaacagcagatttctcagaagaaaccttacaagccaggagagttgggggcctgttttcaccattcttaaaataaatctcggccaagaatttcatatcccaacaaagataaagcccctcaataacgcccaaaagggagtaataaa

SEQ ID NO: 482595 - DNA, 246 bp, Homo sapiens
cgggggagaaaattggagtctcggacctcaggatgaataaggtgacattgcatggatcaagtatcattggggatggtagagctttttttatgtcgttcacttccatctgcaaccgaagcgggattttcttctcttcatccaactcagacaataagggtttaatctctcgtgtgggcgggtccttcagggtctcgaggatgctcctcagcgcggggaccggtgtccttacctcgtgcggagggtacc

SEQ ID NO: 482596 - DNA, 585 bp, Homo sapiens
ttctatgaagcaggcattgctgccaaggcagttggctgggataacatgcattcatctcctccatcgctttttggacctgaccgatgcaatcgaggaaaggactctagatggccttggcccctttgattttcaggatacagacattccctttgaggggccccttccagctaaacagcatgttccggaggcttaaaaaaaaaaggtttgagactgggtgcttacagtttccatggaccaacgggtggaacaggtttttcctcgggattagcgtggggccttccaggcctccctaatggcaacgagcactggtgtttgagccctgccctgccttattacaggataccccctttttaggaacaaaatttaattttaacggccaaggaagggtgctaacaagggcaactggaattaattccttatggccctcaagacctcccccagcccagtggggcaggacgtgcttaaatttatcagtcaatggggtggaggggtccccagccccagcttttcccttcagtagtcggtaaagcttaggaaaaggtagggcctctccctccttaaagttttataaataatttaaaaaaa

SEQ ID NO: 482597 - DNA, 340 bp, Homo sapiens
cacacctgtcaaagcagggctgaacctaacggctgcccaggtctagtcccttctcaaacatgccacttccgtgtcctgaagcacaggtctgcggcggacctccccaggccaggatgccccgttgttggagtcactgagttctactgatgtggctctcctgctgccgtggctgcagacggagggatgccacagccccccctgcagtgaccaggcacaggagaacatggccccagagccaccacgggagtgtgtcttgtctaaactgactcagaaactctgctccctgagcggctcagtgacacaaacaccctcctctccctgcatttcacaggcagtgagg

SEQ ID NO: 482598 - DNA, 618 bp, Homo sapiens
tgcggagactgcttccggactccaggtaccgcgcttggggcagttgcccccagaattctgtcttttcagctgcagtgaaggctcggggctgcagaatttgcaaaccttgcaagtggaccttgatcggtttggttatgcagccctcgtgaccatttggaagcattttggatataagcggagaggtggtgtccgtctttgatgctgccatatagtgtgggatgtttggccgggatatggagcttaccggtgtctccaatgacaaacgaagatgtacaagtgtcactgttaacaggctttcttcctggctacacaataagtgggtgtgagatttaaggaggtcccagaaaataaattgcccttgatgggtttgggttgcaggtttaaaggcctcattgattgatcctgagactttgtcctgtaggcatgctctgagcattcttgtgaggaacaagaaaaactaagttcatgtccatccgtgcttgtaagtgggccagagccatatttattggggttatttcaaaagattacatttccaatattggaagtggctagaaaacaccaatgtcgcatcttggctcacccttctaatttgaacatttagttcgagggaagtataac

SEQ ID NO: 482599 - DNA, 1961 bp, Homo sapiens
ctccgcagaagatttgttgccgtcatgtcggctgcgattgcagctctggccgcttcctatggttcgggttcagggtccgaatcggactcggacagtgagagcagtcggtgtccgctgccagccgccgactccctcatgcacttgactaaatcgccttcatcaaagccgtctctagcagtggcagtggactcggctccggaggtggcagttaaggaagatttggagactggagttcaccttgaccctgccgtcaaagaagttcagtataatcctacctatgagaccatgtttgctcctgagtttggaccagaaaatccctttaggacacagcaaatggctgcccctagaaatatgctttctggatatgccgaaccagctcatatcaatgatttcatgtttgagcagcaaaggagaacttttgcaacatatggttatgcattagacccttcattagataatcatcaagtgtctgctaaatatattggttctgtagaagaagctgaaaaaaatcaaggtttaactgtatttgaaactggtcagaagaaaacagaaaagaggaaaaagtttaaagaaaatgatgcatccaatattgatggttttttgggaccatgggcaaaatatgtggatgaaaaagatgtagccaaaccttcagaagaagagcaaaaagaattggatgaaatcacagcaaagaggcagaaaaaaggaaaacaggaagaagagaaacctggggaggagaagacaatcttacatgttaaagaaatgtatgactatcaaggcaggtcctatcttcacatacctcaggatgttggtgttaatctacggtcaactatgccacctgagaagtgttatcttcccaaaaaacaaattcatgtgtggtctggacacacaaagggcgtcagtgcagtcagattgtttcctctctctggccatttattgctgtcttgttccatggactgtaaaattaagctatgggaggtttatggagaacggcgctgtctgagaacatttattggtcacagtaaggctgttagggatatctgcttcaatactgcaggaacacagttcctcagtgcagcctatgacaggtatcttaagctctgggacactgagacaggacagtgtatatcaagatttacaaaccgaaaagtaccttattgtgtcaaattcaatcctgatgaagataagcaaaatctctttgtggctgggatgtctgataagaagattgtgcaatgggacattcgaagtggagaaattgtgcaggaatatgatcggcatttgggagctgtcaacaccattgtttttgtggatgagaataggagatttgtgagcacatctgatgataaaagcctaagagtttgggaatgggatatccctgtggatttcaagtacatagcagaacccagtatgcactcaatgcctgcagtgactttgtctccaaatggaaaatggctagcatgccaatcaatggacaaccaaatcttaatttttggagcacagaacagatttagattaaataagaaaaaaatttttaagggccatatggtagcaggctatgcttgtcaggtggacttttcaccagacatgagttatgtgatttcaggagatggaaatggaaaattaaacatttgggactggaagaccacaaaactctacagtcgatttaaagctcatgataaagtgtgtataggtgcagtgtggcatcctcatgaaacttctaaggtcataacatgtggttgggatggtctcattaaattgtgggattaatgagattaatccttaaactagctgggatcatttttgatccattgtcatatttatatttaattattaaatgtatctgatgataacttgatttacagataatgttgatgacattgaccctttgtttaaaaaaagaaactgtaaatttgacataatttcatttgcaacttcattttgttttttataaatgttatttatac

SEQ ID NO: 482600 - DNA, 444 bp, Homo sapiens
cgtatgtgaaggaccctgagcatttcacccttgtagtcctgggtaccacggtaatcaaatagtatagaaaaagaataaaagcggagatatattttttgacacagaggcacccaaagaaatacaaacattgcctagctgctgccatttctgtaactgcccagaagggtgacagatttctgaaggggaaaggattcagatatgaccttttctttagtcccaaccactagttttaacaaatgtgaattattgaaatgtgaagggacaaaaagaatcatacatttaaactgtcttgttcagcataccaatattgtatgttacaaatcatcatttctaaatctggattgattctgttgtgtttttgactgtttctaaagtaagtgtgtataaaagtctcctttttaaaaagatcatatttttaaataaagcattttttgtagaaagtgc

SEQ ID NO: 482601 - DNA, 665 bp, Homo sapiens
aataaatggagagttctcccaacttgtgggaccgcgttttatataaatatttataaaggggctctcataaccttcagacgcgcttgttaaatatttatacgcggttggttcctccctcaacctgcacacagggaggtaaataatatttctgttctcgcgccgcgaaaatttacgttatgcctgtggcacacaccgggaggagaaaatgttggcggaaaattggccgtcgccaccagggttagacttttctcgggcgccacaacctgtgagagaccgctcttgttgaaaatattcaacactacatacttctcacagcgggcccacatcataattgatcaattctctgctcaccaacttctctaaattttctctcaataaagcaccacttagatggtgcccacatcttaaaatgtgcgccacaacaaaataggtaatattgtgttaaaaccgcaatatttctttttaaaatatcgcaccctttggcgacacagggttgtcacacttgtttttcggcgaattcatccctgtttgttggtaatataaaaagtggtggtgttgtgtgaaattttcgcgcacataaagttttaatttccccacggttaagaaggaaaccttgatcactgtgcataatataaaagattaatgttctgggtaatgccacaaat

SEQ ID NO: 482602 - DNA, 293 bp, Homo sapiens
tgttgtatttttttaatggttgttccagaactaagcgagttgcatattcacagggaccaagaacagctgagaaacctatcttgagtaattgggaagagctgagtcctgctaagtacgttcgctgccttcctctgttaatattcaatgtctttaaggtcagctccaatagctaccagtagatgaatcctcctcccactgattccttgtatcactggaagatttttttgttgcctcagcttaaatctgtgtgagacataggcatatgtaaatttttagattgctttaccgtgtag

SEQ ID NO: 482603 - DNA, 3857 bp, Homo sapiens
ctccgcagaagatttgttgccgtcatgtcggctgcgattgcagctctggccgcttcctatggttcgggttcagggtccgaatcggactcggacagtgagagcagtcggtgtccgctgccagccgccgactccctcatgcacttgactaaatcgccttcatcaaagccgtctctagcagtggcagtggactcggctccggaggtggcagttaaggaagatttggagactggagttcaccttgaccctgccgtcaaagaagttcagtataatcctacctatgagaccatgtttgctcctgagtttggaccagaaaatccctttaggacacagcaaatggctgcccctagaaatatgctttctggatatgccgaaccagctcatatcaatgatttcatgtttgagcagcaaaggagaacttttgcaacatatggttatgcattagacccttcattagataatcatcaagtgtctgctaaatatattggttctgtagaagaagctgaaaaaaatcaaggtttaactgtatttgaaactggtcagaagaaaacagaaaagaggaaaaagtttaaagaaaatgatgcatccaatattgatggttttttgggaccatgggcaaaatatgtggatgaaaaagatgtagccaaaccttcagaagaagagcaaaaagaattggatgaaatcacagcaaagaggcagaaaaaaggaaaacaggaagaagagaaacctggggaggagaagacaatcttacatgttaaagaaatgtatgactatcaaggcaggtcctatcttcacatacctcaggatgttggtgttaatctacggtcaactatgccacctgagaagtgttatcttcccaaaaaacaaattcatgtgtggtctggacacacaaagggcgtcagtgcagtcagattgtttcctctctctggccatttattgctgtcttgttccatggactgtaaaattaagctatgggaggtttatggagaacggcgctgtctgagaacatttattggtcacagtaaggctgttagggatatctgcttcaatactgcaggaacacagttcctcagtgcagcctatgacaggtatcttaagctctgggacactgagacaggacagtgtatatcaagatttacaaaccgaaaagtaccttattgtgtcaaattcaatcctgatgaagataagcaaaatctctttgtggctgggatgtctgataagaagattgtgcaatgggacattcgaagtggagaaattgtgcaggaatatgatcggcatttgggagctgtcaacaccattgtttttgtggatgagaataggagatttgtgagcacatctgatgataaaagcctaagagtttgggaatgggatatccctgtggatttcaagtacatagcagaacccagtatgcactcaatgcctgcagtgactttgtctccaaatggaaaatggctagcatgccaatcaatggacaaccaaatcttaatttttggagcacagaacagatttagattaaataagaaaaaaatttttaagggccatatggtagcaggctatgcttgtcaggtggacttttcaccagacatgagttatgtgatttcaggagatggaaatggaaaattaaacatttgggactggaagaccacaaaactctacagtcgatttaaagctcatgataaagtgtgtataggtgcagtgtggcatcctcatgaaacttctaaggtcataacatgtggttgggatggtctcattaaattgtgggattaatgagattaatccttaaactagctgggatcatttttgatccattgtcatatttatatttaattattaaatgtatctgatgataacttgatttacagataatgttgatgacattgaccctttgtttaaaaaaagaaactgtaaatttgacataatttcatttgcaacttcattttgttttttataaatgttatttatacagaaagtggctattgactttctatttgacaagtagttataattggcaagcagtttgagtttatactcatgacatactgaaagcatctctttggggtcaagaaagaatccctagtggatttgggattctagaggaggtgttataattaattattcagaaaaatgcatgtatttacctcttcaaccaaaagggcagtaaagaatagggataatatattttaatgtaaatttggaagaaggataaaatcacccacagttactctccctattattttcactgggtcaagttttaatcttttggcttcatgagttccactccctttgatgatatatgttgtatatttttagttgtaaagcagtaatctttaactgtagcattcctctaattataaacagtgaaaaatcaaaatcagtccagagttcttttgttgacttaattcctgatcagtatagacaggactatatatatttaatcagagaattacattatatctgaagatggagctcaggagaatgcaccaagactttgaattgtatttacattcactgtcagtaaagacctggctacgctttgagaaatcaggatctcctaggtcattgcttcgcagctgtgattactgaaatcctcctcataggagataaagtacgaggggtagagtccaagatgtcaacttgtaatttctttgaagtcatatgttttatctttaaaattattcttattttacctgtgaatatatacaacagaactttttaagattaaaaaatttttaaacctctatgtctgaaaaaaaaaatgacactcctggaagatggctagggttccccagtttgagaagcagtggccatggtgaaaaatagtttttgaaaacatcagattataaaatcaagatagtccggacgcggtggcacatgcctgtaatcccagcactttgggaggctgaggcaggtgaatcacctgaggtcaggagttcaagaccagcctggccaacatagtgaaaccccgtctctactaaaaacacaaaaattagccaggcttggtggctggcgcctgtaattccagctactcagaaggctgaggcagggagaattgcttgaacccaggagtggaggttgcagtgagctgagatcatgccactgcactccagcctgggcgacagagcgagactccacctcaaaaaataaaatcaagataacctcttgaatgtaatagctcatagcactttaatttggcaagccatttttcctgttttattataaatctatattagatgtttgaatatggtttgaaatatttcactaccgtgctgaaaaaggttggttgatagcagcttggagtgctaactggaagatcaaaatcatgtctcttgctgataacctaagagcattaagctctgagtccagtgaggtcatagcagtgtatgctccttgcccttacggagtgtctgtttttagaaatttagattttaaaaggcgtgggacatacgaccaggccctatagccacataaatataaatttcatagaaaaagaataaaagcggagatatattttttgacacagaggcacccaaagaaatacaaacattgcctagctgctgccatttctgtaactgcccagaagggtgacagatttctgaaggggaaaggattcagatatgaccttttctttagtcccaaccactagttttaacaaatgtgaattattgaaatgtgaagggacaaaaagaatcatacatttaaactgtcttgttcagcataccaatattgtatgttacaaatcatcatttctaaatctggattgattctgttgtgtttttgactgtttctaaagtaagtgtgtataaaagtctcctttttaaaaagatcatatttttaaataaagcattttttgtagaaagtgc

SEQ ID NO: 482604 - DNA, 242 bp, Homo sapiens
cgattaaccaggcagcatctaggtgcaggactgctgccaaagcagagaggtgaggtacagcatcagtagctcccagtgcagcctcttcctcatgtgtacagtgcgcgttactcattcatgcctgggagaggtgttggggtagtgtcacaacgtgctcgcgctgattgggcgtgcaacggggagccctacatatggagccccaggtgtgatctggggcctacgtggtcctgcctgtgtcccat

SEQ ID NO: 482605 - DNA, 3712 bp, Homo sapiens
tgttgtatttttttaatggttgttccagaactaagcgagttgcatattcacagggaccaagaacagctgagaaacctatcttgagtaattgggaagagctgagtcctgctaagtacgttcgctgccttcctctgttaatattcaatgtctttaagtttggaccagaaaatccctttaggacacagcaaatggctgcccctagaaatatgctttctggatatgccgaaccagctcatatcaatgatttcatgtttgagcagcaaaggagaacttttgcaacatatggttatgcattagacccttcattagataatcatcaagtgtctgctaaatatattggttctgtagaagaagctgaaaaaaatcaaggtttaactgtatttgaaactggtcagaagaaaacagaaaagaggaaaaagtttaaagaaaatgatgcatccaatattgatggttttttgggaccatgggcaaaatatgtggatgaaaaagatgtagccaaaccttcagaagaagagcaaaaagaattggatgaaatcacagcaaagaggcagaaaaaaggaaaacaggaagaagagaaacctggggaggagaagacaatcttacatgttaaagaaatgtatgactatcaaggcaggtcctatcttcacatacctcaggatgttggtgttaatctacggtcaactatgccacctgagaagtgttatcttcccaaaaaacaaattcatgtgtggtctggacacacaaagggcgtcagtgcagtcagattgtttcctctctctggccatttattgctgtcttgttccatggactgtaaaattaagctatgggaggtttatggagaacggcgctgtctgagaacatttattggtcacagtaaggctgttagggatatctgcttcaatactgcaggaacacagttcctcagtgcagcctatgacaggtatcttaagctctgggacactgagacaggacagtgtatatcaagatttacaaaccgaaaagtaccttattgtgtcaaattcaatcctgatgaagataagcaaaatctctttgtggctgggatgtctgataagaagattgtgcaatgggacattcgaagtggagaaattgtgcaggaatatgatcggcatttgggagctgtcaacaccattgtttttgtggatgagaataggagatttgtgagcacatctgatgataaaagcctaagagtttgggaatgggatatccctgtggatttcaagtacatagcagaacccagtatgcactcaatgcctgcagtgactttgtctccaaatggaaaatggctagcatgccaatcaatggacaaccaaatcttaatttttggagcacagaacagatttagattaaataagaaaaaaatttttaagggccatatggtagcaggctatgcttgtcaggtggacttttcaccagacatgagttatgtgatttcaggagatggaaatggaaaattaaacatttgggactggaagaccacaaaactctacagtcgatttaaagctcatgataaagtgtgtataggtgcagtgtggcatcctcatgaaacttctaaggtcataacatgtggttgggatggtctcattaaattgtgggattaatgagattaatccttaaactagctgggatcatttttgatccattgtcatatttatatttaattattaaatgtatctgatgataacttgatttacagataatgttgatgacattgaccctttgtttaaaaaaagaaactgtaaatttgacataatttcatttgcaacttcattttgttttttataaatgttatttatacagaaagtggctattgactttctatttgacaagtagttataattggcaagcagtttgagtttatactcatgacatactgaaagcatctctttggggtcaagaaagaatccctagtggatttgggattctagaggaggtgttataattaattattcagaaaaatgcatgtatttacctcttcaaccaaaagggcagtaaagaatagggataatatattttaatgtaaatttggaagaaggataaaatcacccacagttactctccctattattttcactgggtcaagttttaatcttttggcttcatgagttccactccctttgatgatatatgttgtatatttttagttgtaaagcagtaatctttaactgtagcattcctctaattataaacagtgaaaaatcaaaatcagtccagagttcttttgttgacttaattcctgatcagtatagacaggactatatatatttaatcagagaattacattatatctgaagatggagctcaggagaatgcaccaagactttgaattgtatttacattcactgtcagtaaagacctggctacgctttgagaaatcaggatctcctaggtcattgcttcgcagctgtgattactgaaatcctcctcataggagataaagtacgaggggtagagtccaagatgtcaacttgtaatttctttgaagtcatatgttttatctttaaaattattcttattttacctgtgaatatatacaacagaactttttaagattaaaaaatttttaaacctctatgtctgaaaaaaaaaatgacactcctggaagatggctagggttccccagtttgagaagcagtggccatggtgaaaaatagtttttgaaaacatcagattataaaatcaagatagtccggacgcggtggcacatgcctgtaatcccagcactttgggaggctgaggcaggtgaatcacctgaggtcaggagttcaagaccagcctggccaacatagtgaaaccccgtctctactaaaaacacaaaaattagccaggcttggtggctggcgcctgtaattccagctactcagaaggctgaggcagggagaattgcttgaacccaggagtggaggttgcagtgagctgagatcatgccactgcactccagcctgggcgacagagcgagactccacctcaaaaaataaaatcaagataacctcttgaatgtaatagctcatagcactttaatttggcaagccatttttcctgttttattataaatctatattagatgtttgaatatggtttgaaatatttcactaccgtgctgaaaaaggttggttgatagcagcttggagtgctaactggaagatcaaaatcatgtctcttgctgataacctaagagcattaagctctgagtccagtgaggtcatagcagtgtatgctccttgcccttacggagtgtctgtttttagaaatttagattttaaaaggcgtgggacatacgaccaggccctatagccacataaatataaatttcatagaaaaagaataaaagcggagatatattttttgacacagaggcacccaaagaaatacaaacattgcctagctgctgccatttctgtaactgcccagaagggtgacagatttctgaaggggaaaggattcagatatgaccttttctttagtcccaaccactagttttaacaaatgtgaattattgaaatgtgaagggacaaaaagaatcatacatttaaactgtcttgttcagcataccaatattgtatgttacaaatcatcatttctaaatctggattgattctgttgtgtttttgactgtttctaaagtaagtgtgtataaaagtctcctttttaaaaagatcatatttttaaataaagcattttttgtagaaagtgc

SEQ ID NO: 482606 - DNA, 160 bp, Homo sapiens
aattctgcaccacagccataaccaccaccactacggtgaccccaacccgacacccatcgccaccaccactacggtgaccccaagcccaacacccaccggcacacagaccccaaacgacgacacccatacagcaccgaccaccacggtgagcgccaaagcc

SEQ ID NO: 482607 - DNA, 4067 bp, Homo sapiens
ctccgcagaagatttgttgccgtcatgtcggctgcgattgcagctctggccgcttcctatggttcgggttcagggtccgaatcggactcggacagtgagagcagtcggtgtccgctgccagccgccgactccctcatgcacttgactaaatcgccttcatcaaagccgtctctagcagtggcagtggactcggctccggaggtggcagttaaggaagatttggagactggagttcaccttgaccctgccgtcaaagaagttcagtataatcctacctatgagaccatgtttgctcctgagtttggaccagaaaatccctttaggacacagcaaatggctgcccctagaaatatgctttctggatatgccgaaccagctcatatcaatgatttcatgtttgagcagcaaaggagaacttttgcaacatatggttatgcattagacccttcattagataatcatcaagtgtctgctaaatatattggttctgtagaagaagctgaaaaaaatcaaggtttaactgtatttgaaactggtcagaagaaaacagaaaagaggaaaaagtttaaagaaaatgatgcatccaatattgatggttttttgggaccatgggcaaaatatgtggatgaaaaagatgtagccaaaccttcagaagaagagcaaaaagaattggatgaaatcacagcaaagaggcagaaaaaaggaaaacaggaagaagagaaacctggggaggagaagacaatcttacatgttaaagaaatgtatgactatcaaggcaggtcctatcttcacatacctcaggatgttggtgttaatctacggtcaactatgccacctgagaagtgttatcttcccaaaaaacaaattcatgtgtggtctggacacacaaagggcgtcagtgcagtcagattgtttcctctctctggccatttattgctgtcttgttccatggactgtaaaattaagctatgggaggtttatggagaacggcgctgtctgagaacatttattggtcacagtaaggctgttagggatatctgcttcaatactgcaggaacacagttcctcagtgcagcctatgacaggtatcttaagctctgggacactgagacaggacagtgtatatcaagatttacaaaccgaaaagtaccttattgtgtcaaattcaatcctgatgaagataagcaaaatctctttgtggctgggatgtctgataagaagattgtgcaatgggacattcgaagtggagaaattgtgcaggaatatgatcggcatttgggagctgtcaacaccattgtttttgtggatgagaataggagatttgtgagcacatctgatgataaaagcctaagagtttgggaatgggatatccctgtggatttcaagtacatagcagaacccagtatgcactcaatgcctgcagtgactttgtctccaaatggaaaatggctagcatgccaatcaatggacaaccaaatcttaatttttggagcacagaacagatttagattaaataagaaaaaaatttttaagggccatatggtagcaggctatgcttgtcaggtggacttttcaccagacatgagttatgtgatttcaggagatggaaatggaaaattaaacatttgggactggaagaccacaaaactctacagtcgatttaaagctcatgataaagtgtgtataggtgcagtgtggcatcctcatgaaacttctaaggtcataacatgtggttgggatggtctcattaaattgtgggattaatgagattaatccttaaactagctgggatcatttttgatccattgtcatatttatatttaattattaaatgtatctgatgataacttgatttacagataatgttgatgacattgaccctttgtttaaaaaaagaaactgtaaatttgacataatttcatttgcaacttcattttgttttttataaatgttatttatacagaaagtggctattgactttctatttgacaagtagttataattggcaagcagtttgagtttatactcatgacatactgaaagcatctctttggggtcaagaaagaatccctagtggatttgggattctagaggaggtgttataattaattattcagaaaaatgcatgtatttacctcttcaaccaaaagggcagtaaagaatagggataatatattttaatgtaaatttggaagaaggataaaatcacccacagttactctccctattattttcactgggtcaagttttaatcttttggcttcatgagttccactccctttgatgatatatgttgtatatttttagttgtaaagcagtaatctttaactgtagcattcctctaattataaacagtgaaaaatcaaaatcagtccagagttcttttgttgacttaattcctgatcagtatagacaggactatatatatttaatcagagaattacattatatctgaagatggagctcaggagaatgcaccaagactttgaattgtatttacattcactgtcagtaaagacctggctacgctttgagaaatcaggatctcctaggtcattgcttcgcagctgtgattactgaaatcctcctcataggagataaagtacgaggggtagagtccaagatgtcaacttgtaatttctttgaagtcatatgttttatctttaaaattattcttattttacctgtgaatatatacaacagaactttttaagattaaaaaatttttaaacctctatgtctgaaaaaaaaaatgacactcctggaagatggctagggttccccagtttgagaagcagtggccatggtgaaaaatagtttttgaaaacatcagattataaaatcaagatagtccggacgcggtggcacatgcctgtaatcccagcactttgggaggctgaggcaggtgaatcacctgaggtcaggagttcaagaccagcctggccaacatagtgaaaccccgtctctactaaaaacacaaaaattagccaggcttggtggctggcgcctgtaattccagctactcagaaggctgaggcagggagaattgcttgaacccaggagtggaggttgcagtgagctgagatcatgccactgcactccagcctgggcgacagagcgagactccacctcaaaaaataaaatcaagataacctcttgaatgtaatagctcatagcactttaatttggcaagccatttttcctgttttattataaatctatattagatgtttgaatatggtttgaaatatttcactaccgtgctgaaaaaggttggttgatagcagcttggagtgctaactggaagatcaaaatcatgtctcttgctgataacctaagagcattaagctctgagtccagtgaggtcatagcagtgtatgctccttgcccttacggagtgtctgtttttagaaatttagattttaaaaggcgtgggacatacgaccaggccctatagccacataaatataaatttcatagaaaaagaataaaagcggagatatattttttgacacagaggcacccaaagaaatacaaacattgcctagctgctgccatttctgtaactgcccagaagggtgacagatttctgaaggggaaaggattcagatatgaccttttctttagtcccaaccactagttttaacaaatgtgaattattgaaatgtgaagggacaaaaagaatcatacatttaaactgtcttgttcagcataccaatattgtatgttacaaatcatcatttctaaatctggattgattctgttgtgtttttgactgtttctaaagtaagtgtgtataaaagtctcctttttaaaaagatcatatttttaaataaagcattttttgtagaaagtgcaaaaaaacatgttaaaaaaaaacttgtttgcgcggccgtgggcccgcaaaaattttgaagaccattggtatggcgcaccggcgcccataggtacagtgccacgttcccaacctttccaagaaaacctgggcacgacaaggggtggcttcctcccaataaaagcccgtggcaccgggttcgaacaccacggggctcggggccgggcctacg

SEQ ID NO: 482608 - DNA, 3910 bp, Homo sapiens
ctccgcagaagatttgttgccgtcatgtcggctgcgattgcagctctggccgcttcctatggttcgggttcagggtccgaatcggactcggacagtgagagcagtcggtgtccgctgccagccgccgactccctcatgcacttgactaaatcgccttcatcaaagccgtctctagcagtggcagtggactcggctccggaggtggcagttaaggaagatttggagactggagttcaccttgaccctgccgtcaaagaagttcagtataatcctacctatgagaccatgtttgctcctgagtttggaccagaaaatccctttaggacacagcaaatggctgcccctagaaatatgctttctggatatgccgaaccagctcatatcaatgatttcatgtttgagcagcaaaggagaacttttgcaacatatggttatgcattagacccttcattagataatcatcaagtgtctgctaaatatattggttctgtagaagaagctgaaaaaaatcaaggtttaactgtatttgaaactggtcagaagaaaacagaaaagaggaaaaagtttaaagaaaatgatgcatccaatattgatggttttttgggaccatgggcaaaatatgtggatgaaaaagatgtagccaaaccttcagaagaagagcaaaaagaattggatgaaatcacagcaaagaggcagaaaaaaggaaaacaggaagaagagaaacctggggaggagaagacaatcttacatgttaaagaaatgtatgactatcaaggcaggtcctatcttcacatacctcaggatgttggtgttaatctacggtcaactatgccacctgagaagtgttatcttcccaaaaaacaaattcatgtgtggtctggacacacaaagggcgtcagtgcagtcagattgtttcctctctctggccatttattgctgtcttgttccatggactgtaaaattaagctatgggaggtttatggagaacggcgctgtctgagaacatttattggtcacagtaaggctgttagggatatctgcttcaatactgcaggaacacagttcctcagtgcagcctatgacaggtatcttaagctctgggacactgagacaggacagtgtatatcaagatttacaaaccgaaaagtaccttattgtgtcaaattcaatcctgatgaagataagcaaaatctctttgtggctgggatgtctgataagaagattgtgcaatgggacattcgaagtggagaaattgtgcaggaatatgatcggcatttgggagctgtcaacaccattgtttttgtggatgagaataggagatttgtgagcacatctgatgataaaagcctaagagtttgggaatgggatatccctgtggatttcaagtacatagcagaacccagtatgcactcaatgcctgcagtgactttgtctccaaatggaaaatggctagcatgccaatcaatggacaaccaaatcttaatttttggagcacagaacagatttagattaaataagaaaaaaatttttaagggccatatggtagcaggctatgcttgtcaggtggacttttcaccagacatgagttatgtgatttcaggagatggaaatggaaaattaaacatttgggactggaagaccacaaaactctacagtcgatttaaagctcatgataaagtgtgtataggtgcagtgtggcatcctcatgaaacttctaaggtcataacatgtggttgggatggtctcattaaattgtgggattaatgagattaatccttaaactagctgggatcatttttgatccattgtcatatttatatttaattattaaatgtatctgatgataacttgatttacagataatgttgatgacattgaccctttgtttaaaaaaagaaactgtaaatttgacataatttcatttgcaacttcattttgttttttataaatgttatttatacagaaagtggctattgactttctatttgacaagtagttataattggcaagcagtttgagtttatactcatgacatactgaaagcatctctttggggtcaagaaagaatccctagtggatttgggattctagaggaggtgttataattaattattcagaaaaatgcatgtatttacctcttcaaccaaaagggcagtaaagaatagggataatatattttaatgtaaatttggaagaaggataaaatcacccacagttactctccctattattttcactgggtcaagttttaatcttttggcttcatgagttccactccctttgatgatatatgttgtatatttttagttgtaaagcagtaatctttaactgtagcattcctctaattataaacagtgaaaaatcaaaatcagtccagagttcttttgttgacttaattcctgatcagtatagacaggactatatatatttaatcagagaattacattatatctgaagatggagctcaggagaatgcaccaagactttgaattgtatttacattcactgtcagtaaagacctggctacgctttgagaaatcaggatctcctaggtcattgcttcgcagctgtgattactgaaatcctcctcataggagataaagtacgaggggtagagtccaagatgtcaacttgtaatttctttgaagtcatatgttttatctttaaaattattcttattttacctgtgaatatatacaacagaactttttaagattaaaaaatttttaaacctctatgtctgaaaaaaaaaatgacactcctggaagatggctagggttccccagtttgagaagcagtggccatggtgaaaaatagtttttgaaaacatcagattataaaatcaagatagtccggacgcggtggcacatgcctgtaatcccagcactttgggaggctgaggcaggtgaatcacctgaggtcaggagttcaagaccagcctggccaacatagtgaaaccccgtctctactaaaaacacaaaaattagccaggcttggtggctggcgcctgtaattccagctactcagaaggctgaggcagggagaattgcttgaacccaggagtggaggttgcagtgagctgagatcatgccactgcactccagcctgggcgacagagcgagactccacctcaaaaaataaaatcaagataacctcttgaatgtaatagctcatagcactttaatttggcaagccatttttcctgttttattataaatctatattagatgtttgaatatggtttgaaatatttcactaccgtgctgaaaaaggttggttgatagcagcttggagtgctaactggaagatcaaaatcatgtctcttgctgataacctaagagcattaagctctgagtccagtgaggtcatagcagtgtatgctccttgcccttacggagtgtctgtttttagaaatttagattttaaaaggcgtgggacatacgaccaggccctatagccacataaatataaatttcatagaaaaagaataaaagcggagatatattttttgacacagaggcacccaaagaaatacaaacattgcctagctgctgccatttctgtaactgcccagaagggtgacagatttctgaaggggaaaggattcagatatgaccttttctttagtcccaaccactagttttaacaaatgtgaattattgaaatgtgaagggacaaaaagaatcatacatttaaactgtcttgttcagcataccaatattgtatgttacaaatcatcatttctaaatctggattgattctgttgtgtttttgactgtttctaaagtagctatttggttatataactaactttgtttctggaatagtaatctggaaatctagtgtgattataccttctcactattcattccatttgtatgtacatcatttgatgtaatatcgtttctat

SEQ ID NO: 482609 - DNA, 533 bp, Homo sapiens
ccggagataccgttgcgccctgtacagtagttggggttacttgctcccattatatccagacgattgctgacaatatgcaatcacagaaatgaagcatgccatatggtcatccctccactatattatgattcatcgtaatgaaagtactgttcaaaacccttgtagaaatttgaaaggcatacctttcttttctggaagaaacattacaataagacaagccagtcctcctaggcacagaaatgctgataatgttcgcttccgaccaaaccatttttggttaatcaagtagatacagagagggtaagatggaatctctatgaggccagacagggccaggttggcataaatacttccacctagatcacccgcactcagagttaggccataatacaccaagctgcacacaaactttgtaagtatttgcttttgaaagggtagaacctcaaattagcagctcctatgtagtgttgtcaggtttggctttcaacggttttcttaatctccatgcctccaagcctcaacatttattatgc

SEQ ID NO: 482610 - DNA, 647 bp, Homo sapiens
  misc_feature (3)..(3): n is a, c, g, or t
  misc_feature (70)..(70): n is a, c, g, or t
  misc_feature (72)..(72): n is a, c, g, or t
  misc_feature (77)..(77): n is a, c, g, or t
  misc_feature (259)..(259): n is a, c, g, or t
  misc_feature (280)..(280): n is a, c, g, or t
  misc_feature (290)..(290): n is a, c, g, or t
  misc_feature (319)..(319): n is a, c, g, or t
  misc_feature (327)..(327): n is a, c, g, or t
  misc_feature (330)..(330): n is a, c, g, or t
  misc_feature (388)..(388): n is a, c, g, or t
  misc_feature (396)..(396): n is a, c, g, or t
  misc_feature (398)..(399): n is a, c, g, or t
  misc_feature (456)..(456): n is a, c, g, or t
  misc_feature (633)..(633): n is a, c, g, or t
canaagatttaaaaggcaggactgcttttttttagtcaatgttcacattaatgtaataaatttttattantngtgtnttttttgcacgcacactttttacagtgtctattgtgaaaaacatctcagctgagcagttttggtcaagattcagacctcatcaactgtttaactgtaataaatagaaaaataaagcagctggtgattttgtcagagagaatgtgttcagtaagagtagaaccactttctccagggatggcanagagtgtgaaatggttaaaanacctacaganccagtcgattgggcgattaaacactagtnagttatanttntatggtatttgattaaatagtctaatttaaaaaaaaatcttagattttaaattgattnttgaaatntnnataaaaagttgatttagtccttgggtttttcttagaaaaaaagcaaagtaaatatanaacctaaaacagcagaatttgttttggaatagtatcaatggaaactaccaagtattcagggaaaaagttactaaaacaccttgcttggttttacagtcatgtgctttgctttgcaaccattagaattagatagttacaaaaacactttataggtcacagaatgactcaaatgtatgnaaaataatggattc

SEQ ID NO: 482611 - DNA, 3196 bp, Homo sapiens
ctccgcagaagatttgttgccgtcatgtcggctgcgattgcagctctggccgcttcctatggttcgggttcagggtccgaatcggactcggacagtgagagcagtcggtgtccgctgccagccgccgactccctcatgcacttgactaaatcgccttcatcaaagccgtctctagcagtggcagtggactcggctccggaggtggcagttaaggaagatttggagactggagttcaccttgaccctgccgtcaaagaagttcagtataatcctacctatgagaccatgtttgctcctgagtttggaccagaaaatccctttaggacacagcaaatggctgcccctagaaatatgctttctggatatgccgaaccagctcatatcaatgatttcatgtttgagcagcaaaggagaacttttgcaacatatggttatgcattagacccttcattagataatcatcaagtgtctgctaaatatattggttctgtagaagaagctgaaaaaaatcaaggtttaactgtatttgaaactggtcagaagaaaacagaaaagaggaaaaagtttaaagaaaatgatgcatccaatattgatggttttttgggaccatgggcaaaatatgtggatgaaaaagatgtagccaaaccttcagaagaagagcaaaaagaattggatgaaatcacagcaaagaggcagaaaaaaggaaaacaggaagaagagaaacctggggaggagaagacaatcttacatgttaaagaaatgtatgactatcaaggcaggtcctatcttcacatacctcaggatgttggtgttaatctacggtcaactatgccacctgagaagtgttatcttcccaaaaaacaaattcatgtgtggtctggacacacaaagggcgtcagtgcagtcagattgtttcctctctctggccatttattgctgtcttgttccatggactgtaaaattaagctatgggaggtttatggagaacggcgctgtctgagaacatttattggtcacagtaaggctgttagggatatctgcttcaatactgcaggaacacagttcctcagtgcagcctatgacaggtatcttaagctctgggacactgagacaggacagtgtatatcaagatttacaaaccgaaaagtaccttattgtgtcaaattcaatcctgatgaagataagcaaaatctctttgtggctgggatgtctgataagaagattgtgcaatgggacattcgaagtggagaaattgtgcaggaatatgatcggcatttgggagctgtcaacaccattgtttttgtggatgagaataggagatttgtgagcacatctgatgataaaagcctaagagtttgggaatgggatatccctgtggatttcaagtacatagcagaacccagtatgcactcaatgcctgcagtgactttgtctccaaatggaaaatggctagcatgccaatcaatggacaaccaaatcttaatttttggagcacagaacagatttagattaaataagaaaaaaatttttaagggccatatggtagcaggctatgcttgtcaggtggacttttcaccagacatgagttatgtgatttcaggagatggaaatggaaaattaaacatttgggactggaagaccacaaaactctacagtcgatttaaagctcatgataaagtgtgtataggtgcagtgtggcatcctcatgaaacttctaaggtcataacatgtggttgggatggtctcattaaattgtgggattaatgagattaatccttaaactagctgggatcatttttgatccattgtcatatttatatttaattattaaatgtatctgatgataacttgatttacagataatgttgatgacattgaccctttgtttaaaaaaagaaactgtaaatttgacataatttcatttgcaacttcattttgttttttataaatgttatttatacagaaagtggctattgactttctatttgacaagtagttataattggcaagcagtttgagtttatactcatgacatactgaaagcatctctttggggtcaagaaagaatccctagtggatttgggattctagaggaggtgttataattaattattcagaaaaatgcatgtatttacctcttcaaccaaaagggcagtaaagaatagggataatatattttaatgtaaatttggaagaaggataaaatcacccacagttactctccctattattttcactgggtcaagttttaatcttttggcttcatgagttccactccctttgatgatatatgttgtatatttttagttgtaaagcagtaatctttaactgtagcattcctctaattataaacagtgaaaaatcaaaatcagtccagagttcttttgttgacttaattcctgatcagtatagacaggactatatatatttaatcagagaattacattatatctgaagatggagctcaggagaatgcaccaagactttgaattgtatttacattcactgtcagtaaagacctggctacgctttgagaaatcaggatctcctaggtcattgcttcgcagctgtgattactgaaatcctcctcataggagataaagtacgaggggtagagtccaagatgtcaacttgtaatttctttgaagtcatatgttttatctttaaaattattcttattttacctgtgaatatatacaacagaactttttaagattaaaaaatttttaaacctctatgtctgtttttagaaatttagattttaaaaggcgtgggacatacgaccaggccctatagccacataaatataaatttcatagaaaaagaataaaagcggagatatattttttgacacagaggcacccaaagaaatacaaacattgcctagctgctgccatttctgtaactgcccagaagggtgacagatttctgaaggggaaaggattcagatatgaccttttctttagtcccaaccactagttttaacaaatgtgaattattgaaatgtgaagggacaaaaagaatcatacatttaaactgtcttgttcagcataccaatattgtatgttacaaatcatcatttctaaatctggattgattctgttgtgtttttgactgtttctaaagtaagtgtgtataaaagtctcctttttaaaaagatcatatttttaaataaagcattttttgtagaaagtgc

SEQ ID NO: 482612 - DNA, 3406 bp, Homo sapiens
ctccgcagaagatttgttgccgtcatgtcggctgcgattgcagctctggccgcttcctatggttcgggttcagggtccgaatcggactcggacagtgagagcagtcggtgtccgctgccagccgccgactccctcatgcacttgactaaatcgccttcatcaaagccgtctctagcagtggcagtggactcggctccggaggtggcagttaaggaagatttggagactggagttcaccttgaccctgccgtcaaagaagttcagtataatcctacctatgagaccatgtttgctcctgagtttggaccagaaaatccctttaggacacagcaaatggctgcccctagaaatatgctttctggatatgccgaaccagctcatatcaatgatttcatgtttgagcagcaaaggagaacttttgcaacatatggttatgcattagacccttcattagataatcatcaagtgtctgctaaatatattggttctgtagaagaagctgaaaaaaatcaaggtttaactgtatttgaaactggtcagaagaaaacagaaaagaggaaaaagtttaaagaaaatgatgcatccaatattgatggttttttgggaccatgggcaaaatatgtggatgaaaaagatgtagccaaaccttcagaagaagagcaaaaagaattggatgaaatcacagcaaagaggcagaaaaaaggaaaacaggaagaagagaaacctggggaggagaagacaatcttacatgttaaagaaatgtatgactatcaaggcaggtcctatcttcacatacctcaggatgttggtgttaatctacggtcaactatgccacctgagaagtgttatcttcccaaaaaacaaattcatgtgtggtctggacacacaaagggcgtcagtgcagtcagattgtttcctctctctggccatttattgctgtcttgttccatggactgtaaaattaagctatgggaggtttatggagaacggcgctgtctgagaacatttattggtcacagtaaggctgttagggatatctgcttcaatactgcaggaacacagttcctcagtgcagcctatgacaggtatcttaagctctgggacactgagacaggacagtgtatatcaagatttacaaaccgaaaagtaccttattgtgtcaaattcaatcctgatgaagataagcaaaatctctttgtggctgggatgtctgataagaagattgtgcaatgggacattcgaagtggagaaattgtgcaggaatatgatcggcatttgggagctgtcaacaccattgtttttgtggatgagaataggagatttgtgagcacatctgatgataaaagcctaagagtttgggaatgggatatccctgtggatttcaagtacatagcagaacccagtatgcactcaatgcctgcagtgactttgtctccaaatggaaaatggctagcatgccaatcaatggacaaccaaatcttaatttttggagcacagaacagatttagattaaataagaaaaaaatttttaagggccatatggtagcaggctatgcttgtcaggtggacttttcaccagacatgagttatgtgatttcaggagatggaaatggaaaattaaacatttgggactggaagaccacaaaactctacagtcgatttaaagctcatgataaagtgtgtataggtgcagtgtggcatcctcatgaaacttctaaggtcataacatgtggttgggatggtctcattaaattgtgggattaatgagattaatccttaaactagctgggatcatttttgatccattgtcatatttatatttaattattaaatgtatctgatgataacttgatttacagataatgttgatgacattgaccctttgtttaaaaaaagaaactgtaaatttgacataatttcatttgcaacttcattttgttttttataaatgttatttatacagaaagtggctattgactttctatttgacaagtagttataattggcaagcagtttgagtttatactcatgacatactgaaagcatctctttggggtcaagaaagaatccctagtggatttgggattctagaggaggtgttataattaattattcagaaaaatgcatgtatttacctcttcaaccaaaagggcagtaaagaatagggataatatattttaatgtaaatttggaagaaggataaaatcacccacagttactctccctattattttcactgggtcaagttttaatcttttggcttcatgagttccactccctttgatgatatatgttgtatatttttagttgtaaagcagtaatctttaactgtagcattcctctaattataaacagtgaaaaatcaaaatcagtccagagttcttttgttgacttaattcctgatcagtatagacaggactatatatatttaatcagagaattacattatatctgaagatggagctcaggagaatgcaccaagactttgaattgtatttacattcactgtcagtaaagacctggctacgctttgagaaatcaggatctcctaggtcattgcttcgcagctgtgattactgaaatcctcctcataggagataaagtacgaggggtagagtccaagatgtcaacttgtaatttctttgaagtcatatgttttatctttaaaattattcttattttacctgtgaatatatacaacagaactttttaagattaaaaaatttttaaacctctatgtctgtttttagaaatttagattttaaaaggcgtgggacatacgaccaggccctatagccacataaatataaatttcatagaaaaagaataaaagcggagatatattttttgacacagaggcacccaaagaaatacaaacattgcctagctgctgccatttctgtaactgcccagaagggtgacagatttctgaaggggaaaggattcagatatgaccttttctttagtcccaaccactagttttaacaaatgtgaattattgaaatgtgaagggacaaaaagaatcatacatttaaactgtcttgttcagcataccaatattgtatgttacaaatcatcatttctaaatctggattgattctgttgtgtttttgactgtttctaaagtaagtgtgtataaaagtctcctttttaaaaagatcatatttttaaataaagcattttttgtagaaagtgcaaaaaaacatgttaaaaaaaaacttgtttgcgcggccgtgggcccgcaaaaattttgaagaccattggtatggcgcaccggcgcccataggtacagtgccacgttcccaacctttccaagaaaacctgggcacgacaaggggtggcttcctcccaataaaagcccgtggcaccgggttcgaacaccacggggctcggggccgggcctacg

SEQ ID NO: 482613 - DNA, 268 bp, Homo sapiens
aaaacacatcccatccaaatatacgcgcctttacgccgcgccttactgtccgcaacaccaattccgaacgccgctatcgattttccaccgaaaagcacgactacgcgaaccgcgaacgctcgcgccgcgcgtccgccccgcgcgcgacgctaatatctcatctctctctattatctttttccacagttcaaaaatcaattactcatcgaatttctctccgaaactacttcgacaatcttatttcattaaacatctcccaaccaccaaa

SEQ ID NO: 482614 - DNA, 2434 bp, Homo sapiens
ctccgcagaagatttgttgccgtcatgtcggctgcgattgcagctctggccgcttcctatggttcgggttcagggtccgaatcggactcggacagtgagagcagtcggtgtccgctgccagccgccgactccctcatgcacttgactaaatcgccttcatcaaagccgtctctagcagtggcagtggactcggctccggaggtggcagttaaggaagatttggagactggagttcaccttgaccctgccgtcaaagaagttcagtataatcctacctatgagaccatgtttgctcctgagtttggaccagaaaatccctttaggacacagcaaatggctgcccctagaaatatgctttctggatatgccgaaccagctcatatcaatgatttcatgtttgagcagcaaaggagaacttttgcaacatatggttatgcattagacccttcattagataatcatcaagtgtctgctaaatatattggttctgtagaagaagctgaaaaaaatcaaggtttaactgtatttgaaactggtcagaagaaaacagaaaagaggaaaaagtttaaagaaaatgatgcatccaatattgatggttttttgggaccatgggcaaaatatgtggatgaaaaagatgtagccaaaccttcagaagaagagcaaaaagaattggatgaaatcacagcaaagaggcagaaaaaaggaaaacaggaagaagagaaacctggggaggagaagacaatcttacatgttaaagaaatgtatgactatcaaggcaggtcctatcttcacatacctcaggatgttggtgttaatctacggtcaactatgccacctgagaagtgttatcttcccaaaaaacaaattcatgtgtggtctggacacacaaagggcgtcagtgcagtcagattgtttcctctctctggccatttattgctgtcttgttccatggactgtaaaattaagctatgggaggtttatggagaacggcgctgtctgagaacatttattggtcacagtaaggctgttagggatatctgcttcaatactgcaggaacacagttcctcagtgcagcctatgacaggtatcttaagctctgggacactgagacaggacagtgtatatcaagatttacaaaccgaaaagtaccttattgtgtcaaattcaatcctgatgaagataagcaaaatctctttgtggctgggatgtctgataagaagattgtgcaatgggacattcgaagtggagaaattgtgcaggaatatgatcggcatttgggagctgtcaacaccattgtttttgtggatgagaataggagatttgtgagcacatctgatgataaaagcctaagagtttgggaatgggatatccctgtggatttcaagtacatagcagaacccagtatgcactcaatgcctgcagtgactttgtctccaaatggaaaatggctagcatgccaatcaatggacaaccaaatcttaatttttggagcacagaacagatttagattaaataagaaaaaaatttttaagggccatatggtagcaggctatgcttgtcaggtggacttttcaccagacatgagttatgtgatttcaggagatggaaatggaaaattaaacatttgggactggaagaccacaaaactctacagtcgatttaaagctcatgataaagtgtgtataggtgcagtgtggcatcctcatgaaacttctaaggtcataacatgtggttgggatggtctcattaaattgtgggattaatgagattaatccttaaactagctgggatcatttttgatccattgtcatatttatatttaattattaaatgtatctgatgataacttgatttacagataatgttgatgacattgaccctttgtttaaaaaaagaaactgtaaatttgacataatttcatttgcaacttcattttgttttttataaatgttatttatacagaaagtggctattgactttctatttgacaagtagttataattggcaagcagtttgagtttatactcatgacatactgaaagcatctctttggggtcaagaaagaatccctagtggatttgggattctagaggaggtgttataattaattattcagaaaaatgcatgtatttacctcttcaaccaaaagggcagtaaagaatagggataatatattttaatgtaaatttggaagaaggataaaatcacccacagttactctccctattattttcactgggtcaagttttaatcttttggcttcatgagttccactccctttgatgatatatgttgtatatttttagttgtaaagcagtaatctttaactgtagcattcctctaattataaacagtgaaaaatcaaaatcagttttttttttttttttttttttttgatttttacaaatattgtttattttaatgaagctggta

SEQ ID NO: 482615 - DNA, 430 bp, Homo sapiens
tgagacagagtttcgctcttgttgctcaggctggagtgcaatggcgcaatctcagctcaccacaacctccgcctccgcctcccaggttcaagcgattctcctgcctcagcctccggagtagctggcattacaggcatgcgccactacgcccggctaattttgtattttcagtagagacggggtcagggtttccccatgtttgtcaggctggtcttgaactcctgacctcaggtgatccgcccgccttggcctcccaaggtgtacaggcgtgagccaccacacccggccaatagttattttcaagaccaaacgactctaccaaaaatgctgatttttttttaagacagggtctcgctgtgttgcccaggctagagtgcagtgacatgatctcgactcactgcagcctcaacctcctggcctcaggtgatcc

SEQ ID NO: 482616 - DNA, 900 bp, Homo sapiens
  misc_feature (792)..(792): n is a, c, g, or t
caggctgtaccggtcgcgagtcgtatggagagggtgcaggagcagacgggaggatctcaggccaggacgatggcggctctgcaggagaagaagacgtgtggccagcgcatggaggagttccagcgttactgctggaacccggacacggggcagatgctgggccgcaccctgtcccggtgggtgtggatcagcctgtactacgtggccttctacgtggtgatgactgggctcttcgccctgtgcctctatgtgctgatgcagacagtggacccgtacacaccggactaccaagaccagctacggtcaccaggggtaaccttaaggccggatgtttacggggagaaaggcctggaaattgtctacaacgtctctgataacagaacctgggcagacctcacacagactctccacgccttcctagcaggctactctccagcagcccaggaggacagcatcaactgcacctccgagcagtacttcttccaggagagtttccgcgctcccaaccacaccaagttctcctgcaagttcacggcagatatgctgcagaactgctcaggcctggcggatcccaacttcggctttgaagaaggaaagccatgttttattattaaaatgaacaggatcgtcaagttcctccccagcaacggctcggccccagagtggactgcgccttcctggaccagccccgcgagctcggcagccgctgcaggtcaagtactaccctcccaacggcaccttcagtctgcactacttcccttattacgggaagaaagcccagccccatacagnaaccccccttggtggcgagcgaaggctcctcaagattcccaggaaccgctgagggttcgccatccgtgttgcaacggtcatggcagaagccgttgacttcaaaaaatc

SEQ ID NO: 482617 - DNA, 200 bp, Homo sapiens
cagtgtgtaatggttatagaactcccacagcttctgaattatctcaggagacgtctttattgctccattattgaagaatagttttgccagagatactattctttgttggcaatttaaatctcattcagcactttgaatactacttatcccattctcatattgcctccaaagatttctgctattaaaatccatcgacattc

SEQ ID NO: 482618 - DNA, 337 bp, Homo sapiens
caggctgtaccggtcgcgagtcgtatggagagggtgcaggagcagacgggaggatctcaggccaggacgatggcggctctgcaggagaagaagacgtgtggccagcgcatggaggagttccagcgttactgctggaacccggacacggggcagatgctgggccgcaccctgtcccggtgggggaaagcgagggtccccagagcatcctgaaggctgagttgacctggagccccagctgcagaacgccggtggagggcgtccacagactggccccaaatgtcagccgtatgtctgagaacagcattttaaaagtatgtttctaaagtgaatcattttg

SEQ ID NO: 482619 - DNA, 881 bp, Homo sapiens
gaaagaaggtaaaatcatatgatgaaactccctgtttgtcatataagctcaggtgcctgatggatacgtgcacatagctagtgcatgacaaactgtcctggccctaagtgtcagtcagtcttttgttccctgtttcacagttctactacttcttgtgcttgcataacgatgcttctgagagaggccatgtcacgtaataatcgagatgtggaggaatactaggtgttctcaagacgtatacttctgctagtcacatgttgttccttcagcctagaggcagctttttaaataatgcaagtgtatttattagcattaaaattaacatctcagtaatcagcattagcatttctgaggaccattattaattctgagaacagaaattggtgccttgcaaggaagtttactagctctatcaacaagcattcaaggttacatctgctagcagagtagtgttaggaacctggccttactctcctctgacaatcgcaattttttcttattttttataaattcaagaagatacacttggcatcgtgtatcgaggctaagtttttcatgcatttcccagactacttatggagaattgcagtttaagttgctgaaaagtattaacatggtattaagcttaaataatacgtaatgggactagatggcccactaaagccactgttattttccttcctctctggcagggcactttgatccattccaaagtcaaaaaactggactgaagtctaaatttgtacttttcactaatatacattctgcttctgggcttatcttcttggtaacatccatctcttattgtcacaagttattggctagatttaacccgttgaagtcccatttaatgtggcctattttgaaccctgtgaaaggcc

SEQ ID NO: 482620 - DNA, 294 bp, Homo sapiens
tgtgggaccgcagagctacgcagacgcacttgggtgctcatacgctcttcctgctggcggcggaggtggtggtgtccttgatggtggacctgccgcctccaacagagctgaggacacccccaatggctctgccactgctggcactgaagccaccaccaaagccaagaccactgccataagagtagcataattccaccacccatgcctaaaccactgacgacaccactggcaccgccatagccactggagacagtggactgcaccacagagatattgcctttcggagaaaaggaa

SEQ ID NO: 482621 - DNA, 1217 bp, Homo sapiens
ctgcccgggaacatcctcctggacctcaactcactggcttgtggtctggtcgccacgcaaccctgaactctcaacaccctggacgacgtgccttcgacgtgcgacggacgacggatggctcctgaccgctaacgacgcttcgtgctgacacacctgggccaacagtcaccagccacacacacctgtgcctgccacttccacaccctacgcttctaactgtccctacggctgcactgccaaaccacgcatcggttgttgccccaccagaccaaggcactgtgctgagtgcgcactgtggtgagcaccggcagaccagacgtgggcaggctggtccttatcccatctcaccagcccgtgtgcacagctgctatgccatgcagagctgtggcaacttccacccatctcaggccacccacgcgccccacacacattgcaccagctccacacagacgttgccccagccactgggcattcacagcaaattctccaacaggttatccgccccccaacacaggcccccatccacaacccttgggcctagggcaccaaatcgcacaactccacccattgggcccaagccatgcgcacgcgatgccacccatttgcgacacggcattcccacacagtcgcatggatggggcaccagtatagtggcacccataggaaaaacacatcaaacggccccacaggagcgcaacattgggacacccaacacacagaattacacacacgtggcactggccatcgtgccccatccatggacgtacaccccattccgctggacaacacaacaccacccaccagacgaacacaaccacacaaaccacaaccaccaccgaccagaacacacaccccaaaaagcacagccaaaggagcagacggagcacgccgaacgaccaaccacgacgcggcacccaacgagccacaaccatgggacacccccacctgggacaaccacaaaccgagcggaacgaaaccaaccgtgccaccccccgaaagccgacgcgtgatccgactgttgagtcgaaaaaacacagccggtgcgcaaacaccacacacccggcacgcgggagactcccgacaccgcaaacacaacgcgcaggcggccacaacacgacaactgcaaacaagaaagaccagacgccaacccgacccacccgacgcgcactacaaccaaacgcggacgaccaaccaatggaccaactcactgcgcacca

SEQ ID NO: 482622 - DNA, 373 bp, Homo sapiens
  misc_feature (70)..(70): n is a, c, g, or t
  misc_feature (114)..(114): n is a, c, g, or t
  misc_feature (221)..(221): n is a, c, g, or t
  misc_feature (226)..(226): n is a, c, g, or t
  misc_feature (240)..(240): n is a, c, g, or t
  misc_feature (246)..(246): n is a, c, g, or t
  misc_feature (269)..(269): n is a, c, g, or t
  misc_feature (306)..(306): n is a, c, g, or t
  misc_feature (314)..(314): n is a, c, g, or t
  misc_feature (350)..(350): n is a, c, g, or t
  misc_feature (359)..(359): n is a, c, g, or t
ttacctgcatgcaatgtggtctaaggggaaaacaactaaagtcttaccccaactttcactcattcatttnaaatctgctttcagcaaagcaaacagaatgttcaaccttggacntgttttgattttatacaacctcacatttggaaatacaagtcctcaaaaagagacttcaaatttgcttcaagtcacctagaagatctacataatgaaacatactgtgnacacntaaaaacaaaatanttattnatggggggaagagtaccaaaggnaaggtggcaaaatcatgtattctcctaatggagaaangcaggggnctaagactcagacacactcagttctgggaaggactnaaacatacnctacaaaggcgagc

SEQ ID NO: 482623 - DNA, 1635 bp, Homo sapiens
ggtgtgcctgatggcaagaagaatgtggcaccaggtgctgctcccgagattctcagatctgatttccacgcttgctaccaaaatagtctgggcaggccactttaggaagctaggcgattatctagtgagcatggtcggacgctttcgatttcgcatttcccactaaatggctgagacttctcgccaggcgcaggatcagacctgttcctgggagctttccgagagccccgcgcctcgattctcgctctccgccgagctcgcacagctagggtgaggactcgcgcggtaccgcggagcttcatggccctcgaccggtggcgcggagagtcccaggcccggtccgggaccgggacggcgtccgagtgccaatgggctagctcgtaggtgtcccgctccccgagggtgccgctgtctccccggagcttctctcgcatggctggggacagtactgctacttctcgccgactgggtgctgctccggaccgtgctgtccctggcatattcgtccctgctggttgcccaccgcgctgcactgctccgggtctgggcgtgtgggcctgagcctgtgggccgtgctctgtctgggggtctgcggtgtcctcagggacaacggttggctccaagagcgaaaacgcaggtgcccaaggtggctggctgcttttgaacgcattaagttgcggtactgggctgggactatgcgggaattgcttgtacgaaactgactcatggggagcccggaccaggaaagaccaggtatggccgggaacctacgctttatttatattgtaaagatagccagagagtggcaactgacacctaccacagcaaggtagaccaataagataacagaaaaccccattgttgacccaaaacaacacccgtgagacgtcatctcacctgtgccagatctgggaaaaaacagccacaagaaaactgaagacagacagcgagaagcaagaccaagcaacaacaaatagagaacacacaaaacaaacaactcgccgagacagacaccaagaccaaaacgggggcgggacaggaagacgacaaggcgagtcaaaaggaaggcgaaagagaggaactaagacgcgaagggcgacacgggacgcgaggggacgcgggcctgcgaacgactagcacaaggcagaggaacgcgccgcggaagggagagacgagaggacagagccaccgacacacacgaaggccgcagagaaaagagacgaaagccggacagagagaacacgacagaacgaaaacccgagacacgaaaacacaacgcaacgagaaaaaaaaaagaaaaagaaaaagcgacaagagcaacaagagaaaaacaacacaataaaaaacaacaaacagacaagacaaacacaagaaacacaccaacagaggacataccacgacacaccgcacaaaagacagaaaagagcacaagaagcaagacaaaagaacaagacgcacaaagaaacaaccagcgaacaggaacgcaaaaacaagaggagaaaaggagcacaaaaaacgcaggacaaaacagcaaccagcagacacaacgaagacaagcaacacgcgacaaaacaagagatacaggccagaagagagcaaagacaaccgaagccacgaacagagacgaaccaagcg

SEQ ID NO: 482624 - DNA, 732 bp, Homo sapiens
agcggactggggactccggaggcacggggaggaggaaggtgcgggcagcttgcggtgaggatggacgcgtgccaccgacgtatgccagcggctgcagggggccaaacgcctatccacaaaacccaccgcgatcgctggcagccgtggcgggaggcggcagcagttggcagaggtgccagggagggccggctggggcaggtggatcctggcagcagcagcgcaggggtcacgctccaggcctttctccaagccctccccgcgctgggacgcatttacccgcctgcctgttgacttcggctggcacccactcctgggctgctcagagctgctgctccctgttgatgagcactgtaggtggcttcgagatgcacacctcgggacgatctgccttcctcccccgcctgccattcccgcactgacaaacgtctgccctgggtgttaggagcgaggtgcacattgcaccttacatcctcatgggcggctccaggagcctcactgcagctgatgagtacttaacaccatcatccatctgtgtggccgttggggctggcacagaagctctggatgcctctacctggacaaccagggctgttctccctggatggcaggaaggaagcaggtgggaggcgggcggaggtgcttgttccaccggcactcctgggttctgagggacatggcacttcccggctgtggtcttgctttggcataagttctgagcttctgcttctctcg

SEQ ID NO: 482625 - DNA, 185 bp, Homo sapiens
ccaagatcatgccactgcactccagcctgggcaaaagagcaagaatcgtctcaaaatacactgaaagaacacatgctggccaggcaccagtggctcacacctgtaaccctagcactttgcaggccgagccaggcagattgccggagctcaagagtttgagaacaggctgggcaacacggtgaaac

SEQ ID NO: 482626 - DNA, 825 bp, Homo sapiens
gcaccactgcactccagcctggacaacagaataataccctgtctcaaaaaaaaaaaaaaaaaaaaaaaaaaaaaaaaaaaaaaaaaattttgcccttgattcaaaattttaccttttaacccttggttaaaatggttgtaggaagttgacatgtggttacaaaattgcttgcagcagaagcgttgttgttattgttgcgtgaaaaaaggagtttgacttagggcagatgattgtgacattcttcgtgtcccagaattatttggcttataccttctccctgtgtcgtgggcccccttcccttattaggaagcattatattatgtgccctcattcccccttactttacaatatagggtttgggctatattaggagactttgctttgggccaggtggaattattgggtatagagaagggcaaaattattcgcgcccgggccgcaatgggcttcacacctgtgttaatctcccaagcactttgggaagagattgatggcgggttggactcagcttgaggttccagcgaagtttccgaagaaccgagttcgttggcccaagcgttggttgaaaccctctgttctctcactaagggttcacaacatttaagcccgaggcattggttggcccacggggggcccttgttaaatcccccagtgtgcgtggaaaaatgcgcttgaagggcacggaagaaaattcaccttttgaaaccccggggaaaggggagggaggtttgcaatagagccccagaattaatgtccatttgacatcccagcttgggacaaaagttgaaccctccgtcttcaaaaacaaacccataaaaacttgtg

SEQ ID NO: 482627 - DNA, 155 bp, Homo sapiens
  misc_feature (41)..(41): n is a, c, g, or t
  misc_feature (88)..(88): n is a, c, g, or t
  misc_feature (94)..(94): n is a, c, g, or t
  misc_feature (98)..(98): n is a, c, g, or t
agagccggtacctcagtgaaacgcagctgaagatattgtanaggtcatctaaaatgaccactaattgcctggataaaggaattaatanatttantganatactgtctttcggaaatgggattattagacctcctctttgaggggaaaagaccctg

SEQ ID NO: 482628 - DNA, 198 bp, Homo sapiens
tggatgcacctgaatgctgttagccttatttacagttatcaacctcatatgccgcaggttcgagtttaccctggtagtcttaagttgcagtgagccgagattgcgccactgcactccagtccccaggcaacagagtgagactccatcctcaacaaagagaaaaagagaaaatgatgttaagcacacggcattacccct

SEQ ID NO: 482629 - DNA, 487 bp, Homo sapiens
agattctgtgtatatggaggatatgggaaagttgaaagatactagataatactagctagatatcatgatgataagcccaggtgccttgactatttaactgacagattaaaaggcagtctgcgtcatcttacttataaaagcaaaatccagaatacttgtagactacctaaatagcacttcttgctgtgtttacgactggtggtatctattattgtaataaatacacagtatggatgtgatcaaacattatctattatgattatatacgaacacttcatgttatctgaaaatcaagagatccatcctcactacatcctccatcttcactcattcattcttccaacaaatttgagacacatcaaagatctatccacaaaaattagagcttgactaaactagcaggaacttaacagaaagacaaacatcacaaagagatatgaaccatatggaataaacgaatcaaaacacatgatatcacatgaccata

SEQ ID NO: 482630 - DNA, 312 bp, Homo sapiens
tatacacacagtaatatatacatagactacacacaaataaaaaatatgtaatacaaaaacaatataatactcctatacaaaagcaactaaatataaaatgtttggcttacgcactgtcattgctattatgcctttgcatgaaattccactcttacgactccattgtcccgcaacaggccacatatcagcttgtaatctttaatgaatattctgtaacaagttcctgaagttatctaattctttcacacttgtcgaaattcttccaaatgcgttgaataatgatactatttcttgtctggttagatggaattc

SEQ ID NO: 482631 - DNA, 181 bp, Homo sapiens
ctgtggtgtaccgtgggggaaatgtaacttatctagtaggagaataataaaagaaactttgtgtagttcccgtcctggcacagcagaaacgaatccgactaggaaccataggttgcgggttccatctctggcctcgctgagtgggttaaggatccggcgttgcagtgagctgtggtgtagg

SEQ ID NO: 482632 - DNA, 214 bp, Homo sapiens
aaaaaaaaaagaaaagggatggttaaaccgagaagagcagacggttacctctctgagagtgatttctacctggtccatcttatcaggttaataagtgttactatgtttcattttagtaacccacaatatctggattaaaaaaaaaggcggtaatccagtggggatactttaaggcctggtttcccttttacttgcctcctgggaaatctatctg

SEQ ID NO: 482633 - DNA, 140 bp, Homo sapiens
  misc_feature (21)..(21): n is a, c, g, or t
  misc_feature (27)..(27): n is a, c, g, or t
  misc_feature (129)..(129): n is a, c, g, or t
tcccggcattgccaggacagncaccancctggacaagatcaccgtcacggctcgctgatcccgcagacccaggttgagacccagaccccggtcatgaccatcagcgctgaagccatccagtcgcgcggnttcaacagcgt

SEQ ID NO: 482634 - DNA, 344 bp, Homo sapiens
  misc_feature (63)..(63): n is a, c, g, or t
tcacggcagagagcggtctcatcagaactaggctgaagaaggtgcaggaccttgagaatgttntgggtcactcatgtcacccacgctctgttgcgtgcagaggagaggcagtcgttcctctctgaagactattatattcgattggcctctggttatggtgcacatataaatcagagttaatatatgaacgcgtgtgcatgcccagtgtgtgttgtgcctgcgtgcttgtgcgtggcagggttgtgtgtgtgtgtgtctggctgtgcgttccggattgtgtgacgatgctgacctagctgtgtggccttgggcttgttgcttcattactcacctggatggggacg

SEQ ID NO: 482635 - DNA, 155 bp, Homo sapiens
gcacgagtcttaatgcaagcatcaagagccctgaaaatggctaactaggtaaagtataccattttcggggctcccgctgcctgccctaaaaaaaaaatcttttttctttatcttctactctaactcttcctcccctcaccgtccaccccccgacc

SEQ ID NO: 482636 - DNA, 860 bp, Homo sapiens
cctctttgattttcagtttctcttccttgctcatctgtttccgagctctccgtcgtgggctctgaaacagatgagcaaggaagagaaacctggaaaattcaagaggagaatgaaaaatttactggaaagaaatatggatcctggtatcaatgggataaaccaacaaagaagaaggatggcttaaactttcacggaatatgagccttcctgggactttttccggtgggccggcgggcaaccaaccccaaaagaatggggcatgcttggaagaagaacggaaatcaatggcccggaggatttcattcattcacacttggttaggcaaagatgccaaagggttcctttcttccttccttccagggacattaaggtgggaaacgaatgtccgggcatggattaaccaagggttactttggggctggggtttccgtgggacagaggaacattccaaaggtttccatttaaatacattcatgctttaaacccttagtccaaacgaatcaaggcgtggagaagggacgtgggcagaaaaataaccgaggaacgggctcgggcgggctggaaaagcacatggttgtgggaccacagaatgccgggcagaccaggtaatccagagaaggacaagtcacacgtccccacaacggaagaatgaaaacgtgccgggcaagtacgaggctgagaagccccgtgtaactctcagtccgaacaaggctgtggctccctggagaagccaggcaatggaaacacgcgagggacgggagcaaaccagcggacccctggtgggctggtgggtccaacttcgaagtggccgcacaccaacctacacccaaaagtgactggccggcatagtcgcgtagccg

SEQ ID NO: 482637 - DNA, 374 bp, Homo sapiens
ttagatgtagatctgtggccaggcggagctgtgcaggaagcagtgggcctccacctgcctaggaagaggtttagtttcctgaacctgtgccctgaggtcaaattctggttcttccgctcactgtgagacctgacctctctgagccctggtttcctcggttgtaaaatgggaataacagcacctacctcacagggttattttgatgatcagatgagataagagatgtgaaaatgtctgtgcccgtgcatagtaggctcgaatgcaaagtgcaggataggaaccgaatgccatgagtctcttgagcatgtgttttctttctttctaggtaacccagctggacccaaataaatcattattggaggtaaagttgttcc

SEQ ID NO: 482638 - DNA, 100 bp, Homo sapiens
tagaggatcccccgggccagtacggatgtgctcgttcgagtcctgattggtgtccatgtcactgtgagctcgcagtgctttcctagtcgctcgatagctc

SEQ ID NO: 482639 - DNA, 420 bp, Homo sapiens
  misc_feature (80)..(80): n is a, c, g, or t
tatattatcacacccatatgttataatattccatattaccaagcctattgatggtgttatttaaatatcctatatctttncctttttatgtatctttttgtaagagacagagtctcactctgttgttacctagggtggaagagtgcagtggtgcaatcatagctcactggaggctcaaactcctggcctcttgccttggcctcccaaagcactgggattatagttatgagattttcatcatgtttttgtgtgtgtgtgtataaaaagacctcactctgtggttctgtgcatgtgtgtggtctctgcattttaggaattctgtttcataaggttggctccttccttatacagtgcatgaaagtttatgactgttatatcttcttcacaaattgtaacttttctattcatttacataaatgt

SEQ ID NO: 482640 - DNA, 136 bp, Homo sapiens
gattctctcatctcgcacggggcgggaaatcgggctgaagcgactgagtccgcgagtggacgagagaaaaggaacagttccgtaagctctttatgggtggcttaagcttggaaaccacagaagaaagtttgaggaa

SEQ ID NO: 482641 - DNA, 231 bp, Homo sapiens
gtccatacatagtctgatgacataataatgtaatttagatatgatcatcagcatgaaaaaaagtaataccttaacagtacatttctttttttttttaaacgacaacccattattggcagtatttcaaatctagaaatgggttacttccaaaacagtgttacaattagcctactaaagataatttcttcccatcgctttatttataaagtgccagaacacacacatgcactt

SEQ ID NO: 482642 - DNA, 179 bp, Homo sapiens
gactctagagtatccccccgcgttcatgtcttacgcacagcgcttaactcgcactgatattttacctcagtatgcctagaaataaacatctagctttataccagtactaaccaaaaaaataaaccctcgttccacacaacctgccatcaactatttcctcacgtcagacatcaccgcag

SEQ ID NO: 482643 - DNA, 145 bp, Homo sapiens
accccttgcaactgtccacgggtgccgtggccccaggggttgcccacctgcgggccccggccgcccctccttgtgaaagggcatttttgtaaatgggtacatattaaaggaagccctctgtatatttgattgaataatgccccca

SEQ ID NO: 482644 - DNA, 112 bp, Homo sapiens
aatgctagcggactcggcattgtcgcccttagaccccttgtgaagcccaagatcgtcaataaagagaaccaacgaagttcatccgtgcaccaggtcagacctgatatggcta

SEQ ID NO: 482645 - DNA, 376 bp, Homo sapiens
ggcccctcagtcccttcctactccccaacaagggggtcactatccccaaaaaaggagctgttggggacccccgacgcagcccctgtactggattacagcatattttcatttttggccccgaggctgcctgtggggggagtggagacctcccatcaatgaggacagatcacagaccacgagggcctttcccggacctggaggttgcctccaaagcaggccccagctttttccctctttagacaaaaaaatttttgtaaggttttggggcagggagggagcatgaaggacgaggaaaacttgaattccagatttttaaagcaaaggatttatcatttttaccagaaaaaaacgttttaagtttttacttgaaaaaaaa

SEQ ID NO: 482646 - DNA, 342 bp, Homo sapiens
  misc_feature (1)..(1): n is a, c, g, or t
nggggtgggtttccccccccggggcttttttttttttaggggttggggggggggggaggtttccgcccccccccccggcccaaaaaagggggtccgggaaaaaaatttttgccctttgggggggccccccctttaatgggggttttttgggggggggttagggccccctttttggggggtggcaatttttggtggggcccccggttttgggtttttttcgggggctttttttcccgggggggcttgggggggggggggccctgggccggtttccctttttccttggttgggggccccctgggccccccccccccccctttttttcccctggttctccttgga

SEQ ID NO: 482647 - DNA, 83 bp, Homo sapiens
atgctggaaaagctccctcttctggtcctggctcagggggctgggattttgaaatattttctaataaaggactttgtctccca

SEQ ID NO: 482648 - DNA, 157 bp, Homo sapiens
tcgtaccggtccgctcggaccatacctatgtatccaaatggttctttttatccggagtagtaagttacaatatgggagattattccgaaacctggtaggataagaatataaacttcagggtggccgaaaaatcagaataggtgttggtccgagcgga

SEQ ID NO: 482649 - DNA, 181 bp, Homo sapiens
cataattgttacagggctcaatttcagcaagaagctctcactatcttaaatgtatatgcacccagcatggaagcacccagattcataaagcagttcttagatttcctcaagagacttagactcccacacaagttgtaaccaatttttgaggtattataatgaaaattggggtctgatctcc

SEQ ID NO: 482650 - DNA, 528 bp, Homo sapiens
  misc_feature (26)..(26): n is a, c, g, or t
  misc_feature (37)..(37): n is a, c, g, or t
  misc_feature (56)..(56): n is a, c, g, or t
  misc_feature (100)..(100): n is a, c, g, or t
  misc_feature (109)..(109): n is a, c, g, or t
  misc_feature (220)..(220): n is a, c, g, or t
  misc_feature (333)..(333): n is a, c, g, or t
  misc_feature (335)..(335): n is a, c, g, or t
tttttttattggcttcttaatggaancaggattttancaactgatggaatttacgngattacacaagtagcttggttataaaggctgtctgttttatatngaccttaangaaaacaactatgccaagactgtcttgagctacgggtaagacttagaaagtgattgcagagatttggaatgattaatctatgtagaaccagaagtttaagaatttgttaancagaaagcagcatatgagttaatattttgtggttaactcttgacttgttttgagccatatctgattttctgtctcctagtaaacttttaagaaatgaattctgtttttatttntntatttttattttttacttttttgagacggagtctcgttctgtcacccaggctgaagtacagtgacacaatcttggttcactgcaacctccacctcccaggagaatcacttggacccgggaggcggaagttgtggtgagctgagattgcaccattgcactccagcctgggcaacaagagcgaaactccatctca

SEQ ID NO: 482651 - DNA, 411 bp, Homo sapiens
gcagtgtccatttcccccgtcctcaggctgtgtgttcttcacggcagctcagaagttttctccctggacgtcagcagctgggctggacctcctctgtaggcccccgtccttgggctctaggctcgtgcagcccctgcgaggacgttggaaatcagcctgtctcttggccaatgtcctgtgttttcccctacgcctcttttggaggagcgaggaagaggaggagggagagaagcaggatggagaccaccaagaccccgtatcagtacctcccagtgccttctcagaccactgtggggaactgaccctgtaggcatgaggggctggtcctcagggcctgcagctgttgaaacggaccttgtgagtcagggcctgggaccctccaaggatcctgagactataagctccaggagg

SEQ ID NO: 482652 - DNA, 581 bp, Homo sapiens
  misc_feature (427)..(427): n is a, c, g, or t
cgcacacatgagggcgctggaggcatatactatacacactgtctgctctgtcatacccttcccagagcgtggaccaccaggctggccacctctccctgactttaacaggtaatggcaactaaggatctataggacccgctcatctgcagatacttgcattgagatggcgaaggcagagcgttccagatagtatggggtcccccatagaagcattaacccctggttattcccattgagcttcacacagccctgcacacaatggacacccaggaattggtgtcaacagaagggcgtgagcaggttgcacaggagctgggtaggctgaccatgggacctacactctctagcactccactcatatttactgacagaagcccagagagattaccttcacccagactgtggcccactgagacatactagacangctgtacttcaagcccagctgagtggattattgggcactgtgaggacaggcgtttcgacctaacagtgcccactctgtatagactcacactctattgagagattctgcagagccccatgacatttattcacaggagtccaccatacctgcgttt

SEQ ID NO: 482653 - DNA, 206 bp, Homo sapiens
  misc_feature (63)..(63): n is a, c, g, or t
  misc_feature (74)..(74): n is a, c, g, or t
  misc_feature (138)..(138): n is a, c, g, or t
tcataaatctttcttttattccaagtttcaagtatgtgtaagtgtctgtgatgacacatggtnctcagtgagcnccctgtcacccaggaccctggttatagcaccgttgatcaaaaaccacagattgacacagagatngtcacttacacagtgggttgtttttcttagatttgtactcaaggccagatgtcatattaatgcaatat

SEQ ID NO: 482654 - DNA, 409 bp, Homo sapiens
ttcatgtacagcgctttcatgcgggctgggaagaggggagactgaaggatgacgtgctccacgggtctgggtgtcacgaaatcatgatcgagtgctttcatccctaatgcgaatcactactattctaaacccactaacaaactacatagcctatccattcctcatgccttccatatgaggcataatcataaccagctctatctgcttacgtcaaaccgacctggcatgaaggcactcgatatgaaatgtcgagtgccttcatgccttacaattgagatttgcccataggttaaacatggtaagaaacaaccgaacgcataaaagacaaatctaggccgggtgcagtgtcttcatgcctatattccctgcactgtggtaggcaaggcaggccggatcatggggtaccgag

SEQ ID NO: 482655 - DNA, 844 bp, Homo sapiens
  misc_feature (24)..(24): n is a, c, g, or t
  misc_feature (29)..(29): n is a, c, g, or t
ttctgaattattgtatatgtaacnttttnctttcaatagtgtgccccctcctataatatttctctcgctttcgacctttcttgttgtgctgctccagctgtgacgcatcactgcaaccatgagtcaccgcattctccacttcccaaggttacacacttctgatggcactaactgtatgttagaattgtgtggcaaagaactgaaggcatcatcccaaaagcccaaacaactacataccgccaacaaccccatgaacttggaagtgggttctttcccagtgagctctggagatgacaaaacacagacaacaccttgattgtagcctgcgacaaaacctggagcacaagacccagctaacttgcgctcacattcctgaccaatacaaattgtgagacatatgtctattgttttatccaatccttcgataatgtaagatgaaccgatatataactaatacaaattataaaactgtatacattcgtttcatcatctattcccgcttatattcaccctcaattttccactggcctgctctctgcatatcatcctctccctatcgtctccaccctcttctctctccttttctatcatcccttctgctgtttctcccgctcatatccgctgccccctatcaccagctttttgcacatcccactctcgtcgccacccgatcctcatcccgtctcgtcgcgcttttactttttcccgttcctccctttcccttttcgtttctattcgctgtcccattctttcccatccttttccatctcattctcccctccttcttttcttcttatttctcccgtctcttcctcctttatcttctcacttctttcttttgctc

SEQ ID NO: 482656 - DNA, 946 bp, Homo sapiens
  misc_feature (93)..(93): n is a, c, g, or t
  misc_feature (105)..(105): n is a, c, g, or t
  misc_feature (107)..(107): n is a, c, g, or t
  misc_feature (110)..(110): n is a, c, g, or t
  misc_feature (113)..(113): n is a, c, g, or t
  misc_feature (121)..(121): n is a, c, g, or t
  misc_feature (126)..(126): n is a, c, g, or t
  misc_feature (133)..(133): n is a, c, g, or t
  misc_feature (146)..(146): n is a, c, g, or t
  misc_feature (154)..(154): n is a, c, g, or t
  misc_feature (163)..(163): n is a, c, g, or t
  misc_feature (170)..(170): n is a, c, g, or t
  misc_feature (175)..(175): n is a, c, g, or t
  misc_feature (178)..(179): n is a, c, g, or t
  misc_feature (228)..(228): n is a, c, g, or t
  misc_feature (248)..(248): n is a, c, g, or t
  misc_feature (258)..(258): n is a, c, g, or t
  misc_feature (311)..(311): n is a, c, g, or t
  misc_feature (944)..(944): n is a, c, g, or t
ctttagaagtagggcaattgttttttaatcggcaacccatatctgaaagccatttcttaggaataagagaccttaggtgttgaattggcaagntctgcataaagnanacngtnatcaaccnctggnacttttnattgagaatttgnttcaaggnatgcttttncctccantgtcntgnntgtcaaactagttttatagctatcaacattaggagtaactttcaacctngccagcatcactggtatgangtatatttanttaaagcacacttttccccgaccgtatacttaaaatgacaaagccattctttnaaatatttgtgactctttcctaaagccaaagtttctgttgaattatgttttgacacacccctaagtacaaggtggtatggttgtatacacatgctgccttcttggggattcaaaaacaggtttttgattttgaatagcaattagtgatatagtgctgtttaagctactaacgataataaggtaataacattttatacaatttccatatagtctattcattaagtaatctttttacagttgcatcaggcctgaacccgctgccattcagaaagcttcaaattatagaaacaatactgttctatacgagtgaccgattatgctttctttggcctacattctttattctgcggtgaagttgaggcttataagttaaaacaaaggaactaacttactgtccaccagtttatacagaactcacagtacctatgacttttttaaactaagatctgttaaaaaagaaatctgtttcaacagatgaccgtgtacaataccgtgtggtgaaaatgaattcagacttattaaatgatgaacttgttaaatcttctcagtgtctatttatcagcacaatacacacaggagaactgttgatggcatattgaatagattttcctgaataaattgctctggaaaccnca

SEQ ID NO: 482657 - DNA, 977 bp, Homo sapiens
  misc_feature (93)..(93): n is a, c, g, or t
  misc_feature (105)..(105): n is a, c, g, or t
  misc_feature (107)..(107): n is a, c, g, or t
  misc_feature (110)..(110): n is a, c, g, or t
  misc_feature (113)..(113): n is a, c, g, or t
  misc_feature (121)..(121): n is a, c, g, or t
  misc_feature (126)..(126): n is a, c, g, or t
  misc_feature (133)..(133): n is a, c, g, or t
  misc_feature (146)..(146): n is a, c, g, or t
  misc_feature (154)..(154): n is a, c, g, or t
  misc_feature (163)..(163): n is a, c, g, or t
  misc_feature (170)..(170): n is a, c, g, or t
  misc_feature (175)..(175): n is a, c, g, or t
  misc_feature (178)..(179): n is a, c, g, or t
  misc_feature (228)..(228): n is a, c, g, or t
  misc_feature (248)..(248): n is a, c, g, or t
  misc_feature (258)..(258): n is a, c, g, or t
  misc_feature (311)..(311): n is a, c, g, or t
  misc_feature (975)..(975): n is a, c, g, or t
ctttagaagtagggcaattgttttttaatcggcaacccatatctgaaagccatttcttaggaataagagaccttaggtgttgaattggcaagntctgcataaagnanacngtnatcaaccnctggnacttttnattgagaatttgnttcaaggnatgcttttncctccantgtcntgnntgtcaaactagttttatagctatcaacattaggagtaactttcaacctngccagcatcactggtatgangtatatttanttaaagcacacttttccccgaccgtatacttaaaatgacaaagccattctttnaaatatttgtgactctttcctaaagccaaagtttctgttgaattatgtttttgaatccccaagaaggcagcatgtgtatacaaccataccaccttgtacttaggggtatggttgtatacacatgctgccttcttggggattcaaaaacaggtttttgattttgaatagcaattagtgatatagtgctgtttaagctactaacgataataaggtaataacattttatacaatttccatatagtctattcattaagtaatctttttacagttgcatcaggcctgaacccgctgccattcagaaagcttcaaattatagaaacaatactgttctatacgagtgaccgattatgctttctttggcctacattctttattctgcggtgaagttgaggcttataagttaaaacaaaggaactaacttactgtccaccagtttatacagaactcacagtacctatgacttttttaaactaagatctgttaaaaaagaaatctgtttcaacagatgaccgtgtacaataccgtgtggtgaaaatgaattcagacttattaaatgatgaacttgttaaatcttctcagtgtctatttatcagcacaatacacacaggagaactgttgatggcatattgaatagattttcctgaataaattgctctggaaaccnca

SEQ ID NO: 482658 - DNA, 417 bp, Homo sapiens
  misc_feature (20)..(20): n is a, c, g, or t
  misc_feature (24)..(24): n is a, c, g, or t
  misc_feature (106)..(106): n is a, c, g, or t
gctgttagctggcgaggatngcanaatggattgctggcccaggttttagatatttaacctggctgcagagccaaaagtgaaccggaggaaaagcaggtgtgaaacnaatctgcagcggagatgtacggttcctcatttgacttggactatgactttcaacgggattattatgacaggatgtacagttacccagcgcgggttcctcctcctcctcctattgctcgagctgtggtgccttccaaacgtcagcgtgtttcagggaacacctcacgaaggggcaaaagtggattcaattcgaagagtggacaaaggggatcttcttccaagtctggaaaattgaaaggtgatgaccttcaggccattaaaaaggagctgactcagataaaacaaaaagtggattctcttctggaaagcctg

SEQ ID NO: 482659 - DNA, 104 bp, Homo sapiens
atggactggttggctttgttgggtgagcttgtatgtagtcctgtgggtggactgtggttggtgcttggcaggatcctggtatcctgctaacaggtcaaacatgc

SEQ ID NO: 482660 - DNA, 384 bp, Homo sapiens
ggtcacggatgtctcagtcagcagcccagctgcggcggggagctgcgtagactgtgcacagcacagcatcttgtgagcacacttacaccgtgccagatgtccgtcccgcgatcgttcgcatacaagctatgaacgtaatgaaccgtccagctcgaccatggctggactggtgtctcagaagtctggcgcacttgagacgcgacattagctaggagtacgatatggcagcatggaccacgagtgagcctctgtcatacgcctggtgttgaccggtgccccctgtgtttgcactcgcattgatcaccaggcccacggtaggtcaaaaacaggtatcataggtgacgcctccggtctctgaatattgcagcaggtggcgcgtatccc

SEQ ID NO: 482661 - DNA, 409 bp, Homo sapiens
cacagtatctgtagaatgcattgcccagatccatcaaccaccaccttagcaaatggatcaggaagtcggaaaaaatcctttttcaccaggttttttgcacagagtactgtcaggcgcagcttgacgggcccgttcatccggcgtccggggttagacatgtccccggcggcgggggcggcgggggcggcgggcggcacgggggcgacggcgaggcgcggcggagtcaccacagcggccgggctggggcccgagcagccggcgcctcgcgccacggccggagggtcccggatgtgccgagagtcgtcgccatgagccgcggagggagcgggacgccgagctccccagctcctcccgacttctcctatcacgtgcccagggccgcacaagcagagacggcagccgcggacgc

SEQ ID NO: 482662 - DNA, 86 bp, Homo sapiens
ccgggatccgaggtgcgccgagcaggagcagggaacaaaggagcggagaggggaggggagagaggggggcgagggagagcccccgg

SEQ ID NO: 482663 - DNA, 143 bp, Homo sapiens
aaggatgggcgataatccatggattatggatgagcagattacgtgaatttaaactgatgacgaagaacaagagttccgtaaactgtaaaagtatttaaaatttcccatcttgaccgggcgcggtggctcacgcctgtaatccc

SEQ ID NO: 482664 - DNA, 175 bp, Homo sapiens
  misc_feature (12)..(12): n is a, c, g, or t
tctagaggatcncctttctctgatcgctcatggagggggaaggctagtcatagagagatgacatctaagcttctttctagactttgtgggacagtaatgagcacaactgatgtggaaaaatccatttgataaattggttgaagatctacctgaaattagcactggatactcctaa

SEQ ID NO: 482665 - DNA, 293 bp, Homo sapiens
  misc_feature (88)..(88): n is a, c, g, or t
  misc_feature (287)..(287): n is a, c, g, or t
ctccaccccccaatctttttaaatggcggataaatcccttctttctggttcactaacttcatgccacacctggtaaccaactcctttnggaggcattccttttgttagaaagtgcaggcctccatggagttacctggaaagctgccatccctgaacactctgaggaggaatcaagaatagctggaattgaagattctgcatgggattgctttgcgcagggaaggggactgaaccgttgaagagagatcagatcaactgggggaaaggcctaggtagctcagtgaccnggggac

SEQ ID NO: 482666 - DNA, 798 bp, Homo sapiens
agcgggcagtcggtgtctccgcgtcgctgggtgggacttggctcggacggccatgggcaccgtcagaacgagcgaagtctggcgcgcccgacggatgttgcacggacctggcgaagagaacacagagcttctcaggaggctggtagctgcaggcagtggtacaaggggcttcatcaaggaactgcccccacgaggaatcctcaattgtggtatgagttcaatgaatgatctactgccaagcttctttccgctatggtgacgccgtccaaagttgtgcctgagctacgtcttccgcaccttttgaccagcaacaggcgatggcaccatagacttgtcgggagcttcagtcattgcgctgagcgtgagctcgcgcgggcgtctggagcagaagctcatgtgggccttcagtcatgtatgtacctggtacggtcaacggtctacatcatgccgggagtgattatgctgtgagatcgtgcagtgccatttacatagatgcgttatcgtgccgatgatgaagtatgccgcgaggactgagtcgaccccggcaaagagaggacggacgaaaatcttccgccaattggacacgaatagcaatgtactggcatggctgtccttgcgaggagattcaatccgacggggccaaaggcgacccgtcatcgtgcgtctgctgcagtgcgagcacagcatgcgcctcccgagtcctgatgaggacgccagggttcccctttctccctcccttcgccggacccctcccggttcttaggttccacgtcccttgtgtgtatctggctgggggca

SEQ ID NO: 482667 - DNA, 366 bp, Homo sapiens
  misc_feature (15)..(15): n is a, c, g, or t
  misc_feature (146)..(146): n is a, c, g, or t
  misc_feature (355)..(356): n is a, c, g, or t
ggacccaaaaattanaaacaattgtgaacccccagggaaaccgtggaaggatggttaccccagaggcctgggaagaatagtagtagggaagtggcgatggttaatgtgtacaaaaacaaatagaaagaatgaataagacctagtanttgttaatgcagcattgtgactatagtccataattaattgtacattttaaaatagaagagtagaattggattgtttgtgcacaaaggacaaatgcttgaggtaatggaaaaaccccatttaccctgatgtgattattacacattgtatgtctgtatcaaaatacatcatgtaacccatgaatgtatacaccttctatgtacccacatannttaaaaattt

SEQ ID NO: 482668 - DNA, 751 bp, Homo sapiens
gtcgccatgggcctgtgtgatcctgtggacatgatgtgaatgggcgccgtggtctgtgttcctgctgctgcacttgtaagcaccgtaaatgtgctgctgcgcgcctgcgcgccgtggatttcgctgagcggcacggctacatcaatgtgtgcatctgtcaagtgacatcatccactgaccctgttggcctgctgtgctgcggcccctctgccaatggtgtgtcattcctgggatccagtatctggtattaagaatgctgtgactgtgatgcattgtttcaattgcctgcctgagtggcaatatcatcacaggagccaagtataatgtgtataagcaaggcaagagaatgtgccacagagcatccaaacattgcggacaattagttgctcccattgatagagagacaaccaattgcccttagatatgagataccaaaatctggttgtttgcttatggccctttgagaaagagagaaaatggcccttagagagttaacactagatagtgcaaaactggcttatggaccttgcgggcaattcaacgtgggaaacactaattgcccaacgctggattaattctttcccaagcaaaagcaccatttgacgaacaccaagagaacaggaaccccggttgttgaaacagctttgcaccttctcgagtgaattccaagagaaaaggagtatatcataccatcaaagccaaacaagaaggctagtaaagtcatggtagttgagtagagcttggatcagtg

SEQ ID NO: 482669 - DNA, 882 bp, Homo sapiens
ggcgccccgccgtgctgcggaggggggttccaggaactttccaggaatcggcctcacgtgaccgcgggccccgtatgttaaagaggctcgtcgcaatacacaggcttcagggaagacggagttgtgccatctcgttaccagcaccaaccaccaacaagcaccctcaagactccctgtgatcctgggatgcactcaacgaagatgtgtgtgggcccagggattgggattggaaatgctacaagagaagcaggctcctccccttctgaaatgatgggtgatacattgaccatacaggtcaatttttcccacccaactttgggggggagccttgtcaaaagaacaagggcaaccaggagaagagaagcagagcttgaggtgggggtgaagaagggagaaattcctgaggtgcttgaatccaaaatgcggaagccgaaccaacactttggacttctcaataacaggaagcactctgcgaggcattatgtgggagggctacaactaagatttctctgcagaaaagtgtctagatgcaccagatttgggggctgtgatgtgaaaactgaaccttcactctaaatcggatggtctgtgacctcaggtgagaaaccaagtcatgctgaggaactgagatccagcggtgaacacaggtgcactaacagtggtccggcctttgagatggtgtgactaccatttctgcacgttgccagtgtacatggttaccaagtcaattaactggcttgatcctccgaaacaggttgttgtggacccaagaggctataatttaggccccagccataatgtagagatgtttggcacacccctatagatgggggggcttcgccccctcgtgttagcccccaacaaaaggttctcgcggggaac

SEQ ID NO: 482670 - DNA, 287 bp, Homo sapiens
tctaggaggatccccctataggtttggcctcgcctttctattagctcttagtcaagattacacagtgcagcatccccgttccagtgagttcaccctgctaaatcaccacgcatcgctagggaccaggcatcaagcacgcagcactgcagctcaaaacgctgtagtccgagccacatccccacggtgtatacagtcagtgattaaccttttagtcaatagacgaacagctttagactaaggcgtattctataccctagggtttggctcaactttcgatgccagtccac

SEQ ID NO: 482671 - DNA, 928 bp, Homo sapiens
  misc_feature (16)..(16): n is a, c, g, or t
  misc_feature (81)..(81): n is a, c, g, or t
  misc_feature (83)..(83): n is a, c, g, or t
  misc_feature (101)..(101): n is a, c, g, or t
  misc_feature (117)..(117): n is a, c, g, or t
  misc_feature (119)..(119): n is a, c, g, or t
  misc_feature (138)..(139): n is a, c, g, or t
  misc_feature (179)..(179): n is a, c, g, or t
  misc_feature (185)..(185): n is a, c, g, or t
  misc_feature (211)..(211): n is a, c, g, or t
  misc_feature (218)..(218): n is a, c, g, or t
  misc_feature (220)..(220): n is a, c, g, or t
  misc_feature (222)..(223): n is a, c, g, or t
  misc_feature (228)..(228): n is a, c, g, or t
  misc_feature (230)..(230): n is a, c, g, or t
  misc_feature (243)..(243): n is a, c, g, or t
  misc_feature (249)..(249): n is a, c, g, or t
  misc_feature (251)..(251): n is a, c, g, or t
  misc_feature (257)..(258): n is a, c, g, or t
  misc_feature (261)..(262): n is a, c, g, or t
  misc_feature (280)..(280): n is a, c, g, or t
  misc_feature (288)..(288): n is a, c, g, or t
  misc_feature (293)..(293): n is a, c, g, or t
  misc_feature (302)..(302): n is a, c, g, or t
  misc_feature (315)..(315): n is a, c, g, or t
  misc_feature (317)..(317): n is a, c, g, or t
  misc_feature (359)..(359): n is a, c, g, or t
  misc_feature (383)..(383): n is a, c, g, or t
  misc_feature (416)..(416): n is a, c, g, or t
  misc_feature (449)..(449): n is a, c, g, or t
  misc_feature (464)..(464): n is a, c, g, or t
  misc_feature (475)..(475): n is a, c, g, or t
  misc_feature (489)..(489): n is a, c, g, or t
  misc_feature (506)..(506): n is a, c, g, or t
  misc_feature (521)..(521): n is a, c, g, or t
  misc_feature (537)..(537): n is a, c, g, or t
  misc_feature (586)..(586): n is a, c, g, or t
  misc_feature (588)..(588): n is a, c, g, or t
  misc_feature (644)..(644): n is a, c, g, or t
  misc_feature (657)..(657): n is a, c, g, or t
  misc_feature (661)..(661): n is a, c, g, or t
  misc_feature (664)..(664): n is a, c, g, or t
  misc_feature (669)..(669): n is a, c, g, or t
  misc_feature (672)..(672): n is a, c, g, or t
  misc_feature (691)..(691): n is a, c, g, or t
  misc_feature (708)..(708): n is a, c, g, or t
  misc_feature (801)..(801): n is a, c, g, or t
  misc_feature (823)..(823): n is a, c, g, or t
acaagataaaaaaaancttaaggagtttcccactgctacagcgaaaaaaaagaaacagttcttcaggcacaaagccaagtnanataccttcctggcaaatngaacatccacagtaantnttctgcagccccagaaagnnccaggtccacagtggctgctgggccctctggccacgaganaatgancagctcacctgcgttggtcacttggntcctggntntnngaggnangggggttttttgntacttngnatttgnntgnnagcacctgctggatcctntgcatccncaggnaaagctggntggacctggtttnanaagataaagcgaaattaaccaggctctttaaactcgaaggcnttgctaaaggttagcagcaccttnttgttcaaaaagcggcgccagatcagcattttntcctcaaaggtgcccttgatcaggtactttctnaagttaacccagatnaagaatttagntccacgatttattntggggatccccaatgcnctaagctcttctganatataggttttggcanctttgatctgggcatggttttttggcaggtacacctggttgatccagtnanggtcccggattatctgttctatcttgtattggaccaagctacttatgccgtggtanctgcatatggaanctanggnagtgncanatcctggttttttgtgtanagcgtgccaaagcggancccagacatcccgaagtccttgctggttgcccacatcacatgggtcctctgggggtcagggagcctttccaggcttaggacactgcggtaccnaacagacttctcaaacacgganagcatgtagacctcatccacaatcacatgcagcctgtgcctcttggcaaataccaggtactcctgtagctcttcaggggagtatacatcagccagagggttcatc

SEQ ID NO: 482672 - DNA, 329 bp, Homo sapiens
  misc_feature (15)..(15): n is a, c, g, or t
ttcagccgggcgtgnttcagtgataccaatcggaccagtccagagtccaatgagggtccggaaaatgaaatggtctccagtttggcactgcagatgtcactttattttaatacctactatttcccactgtggtggttgagcagcattatgatgcttcacatgaagtattcaatcttgcctgactactacaaattcatcgtgatcactgttatcatcctaataaccttaattgaagccatccggttgtatctgggctacgtgggtaacctacaggagaaggttcctgagttggctggcttttggcttttgagcttctattgcagttacct

SEQ ID NO: 482673 - DNA, 152 bp, Homo sapiens
aggttgatccggttgcccttcttggccccatgcgccttcagcacattggccatgcggcagacttcgtcatgaagctcgccataggtgatgtggcggctgtccctggggtcatcgccttcccagatgatcgccgtctcgcccttgcggtgggg

SEQ ID NO: 482674 - DNA, 86 bp, Homo sapiens
agagcactcatatgcattttataagtggtctaaggtcatttagcataaaagcaaatagctccccgtgccccttctgtcgtcttctc

SEQ ID NO: 482675 - DNA, 404 bp, Homo sapiens
  misc_feature (180)..(181): n is a, c, g, or t
  misc_feature (184)..(184): n is a, c, g, or t
atgctgtcttcaggatggtcttgatctcctgactcgtgacacccgcctcggcctcttgaagtgctgggattacaggcatgagccactgcggccggccccccacttattgttgaatgtgtagcagcagcttcccaaaagccagcatcgtttttaggtgaaaaatgggcctagaaaatcaannccnttgccagatctggtggtgaccatgcagaggtgggcgtaaggaagccatggatctgaacaaaacctcagttgttcgtattagagccaattatcagattcagtgggatgcaaatctatggagagcgtgtgttcaatatgaaaatttaaaaaaatcttgaacttttagaatgtggtcttatctagtccttaaaaattaggaaatttttagtgcatgtagcagc

SEQ ID NO: 482676 - DNA, 253 bp, Homo sapiens
  misc_feature (17)..(17): n is a, c, g, or t
  misc_feature (25)..(25): n is a, c, g, or t
  misc_feature (52)..(52): n is a, c, g, or t
  misc_feature (67)..(67): n is a, c, g, or t
  misc_feature (164)..(164): n is a, c, g, or t
  misc_feature (183)..(183): n is a, c, g, or t
  misc_feature (213)..(213): n is a, c, g, or t
aggcaatgccgtgcggnaggcttcnagcacgcggtggtaataagccagcccngcgcgcgagatcctnccgcgctcgggctcgatccgcgaccattcgatcgagaagcgatgcgcgttgaagccgagcgagtcgacgagcgcgatatcctcgtcgacgtggtgantaagcgtcgcacgcgttcnccgagggctgggcgaagatcgtcggcttgntatgctcgaccacccacaggtcgctcgcatcattcccgcc

SEQ ID NO: 482677 - DNA, 549 bp, Homo sapiens
caatctgtgaggtaattaatataaattttattattttaaaaattatttcaatcacctatgtttagcagtgttttaaactatctctggtaaaagatattttttccttaatttcaagtccattgcggaccaatacttttgtaaattttttttaatcctaattactgacaatatacaattttggagaatgaaaaattcaagcccctttattttgttattagagtcaatagatataaaattgctatgtaaacattctagaagtgtttaaaggactaagctccgcttattttttatttttatggatatgtaatcgttgtatatatttattatatacatggtatattttgctatgagcatccaatgtgtaatgatcaaatcagagtaactgggatatcaattacctcaaacatttatcacttgtgttaagaacattccgaggctgggtgcagtggctcacgcctgtaatgccagcactttgggaggcagaggtgggcagatcatgaggtcaggagttcgagaccatcctggccaacatggtgaaaccccgtctca

SEQ ID NO: 482678 - DNA, 296 bp, Homo sapiens
  misc_feature (18)..(18): n is a, c, g, or t
ggggggcccccggggggnaaaaattttgggggcgggggcccccggcccccccaaaagggggggaggggggggcccccttgggggccccccaggggggggggtccccggtttggaccccctccccccccccctttaattttggggggcggggggccgggggcggggggggggggtttttgccccccccctgggggggggaaaatcccccccggggcccgggggggggggggggggaaccccgggtccccgggcccccctttttttttttttttggaaaaaaaaggccgggtttccca

SEQ ID NO: 482679 - DNA, 394 bp, Homo sapiens
  misc_feature (28)..(28): n is a, c, g, or t
  misc_feature (192)..(192): n is a, c, g, or t
aaccccctaaagtaataccattttaaantggtaaccaggaaaaattttacaagtgtaaaccaatgtggtccaaccattttgccagaattgacctgtaatatggacccttaaatcttttgtgcaagcctggaaggatccagttgtaagtaatgcccaggaaagtgcgttttacctaagacttccttctcagcntctcccataaagagaccctaatatgcattttgaactgtaattggaaatgtaactttcactgaaagtgtcatgtgatgtttgcattacttttaactgctatgtataaaggaaagtgtgtcttttgacttcatcagttatttctcttgtgcacagaggagaaatgcattaaaaatgactaaaaaaaagtaaaaaacttaaaaaa

SEQ ID NO: 482680 - DNA, 830 bp, Homo sapiens
gttgccttccggttgtcgctgcggtgtgtgggaaatgctggctgcgcgcggcgcggtggcactggtggcccttttgctgaggggctctctactggcttctggcctgctgctcctggccgtgcctcctctggattgccccgaaacacctgtggtactgtacgtgcctgcagcatggatgtgcctgggtggtggagctgaagtgtggcctgattccacctggatcctggagcctggttaagaacatacctcatcacctgtagtaaagacctggatccgatatgtgcagagtctacaaggaaatatgtcatcaactgtgcctagagcagttcggctgtgactctacgacaattgtaactctgcaaatcgataggagtccttaaaacctagcgcatcataggacccttacaaggcaagctacggtgtggaagagaccctgagtatagcctgacacccagccagacacaaacaagccatgagatcagagctcggaaactctctatggacaaagacttccgggaccgggagtccctgaatagccagacattgtaggaaagccatcaaccaaagacttgctgacatgcagaggtaataagctgcctccgaaaatgaataatcaaggaatatccatgttgaccaacccgggtagaaaagaagtatatagaagaatgcagggagagagagcaaaacaggaggaaaacggggcaaaaaagacaagaggacagaagaaaaccacgaaaagacagcaaacatgtgcacaacgtgagaaaaggaccaaacatgacccgaaaaaaaaaggcgtaagaaaatcaaaaacgaagcaagaaaagaaa

SEQ ID NO: 482681 - DNA, 1259 bp, Homo sapiens
aggacatgcacacacaagtaacattgagctgcaatggacaggagccttgacgctggcgtgtgggaagttgagcgccatgtctaggctgtagtgggtatccccctggtaggggcagctagggctgtggttccctgctccgaactctcagggctgtctccctgagtctccagggccagaatgcctggatgcgctgggtagccatgtttggaggatgtgggctgcaacgtgcggtcaggccagcgatggcgtcgctcacttggctgtagtcaacctgactagtcgctattggtcgctacctcgcgtgttccgttgactcgttggactgggggtttggacgaccaggtccgccctttatcgatcagcttcgtgatgcgctcctttagtcttgtctcatgtgagatacagaagtggcacactgtgtgcatggctatgcggcattagatgatacagtagaaactgtggtcatgtctccaatcacgccctatgctaacagtgcgtgtgtttggcacgacacgcaaaggggggagatcaaagggacaacccaatctcaaatcaatggcgcaaatgggggatccaacggacgctggaagttggcaaacggcgaggatctgatgcccattaagtgcaacagcgcccgatggctctatggctaacatagtagacatctcggagtactatagcagatatggaaggccgaagcattctccaagttacacggaccattattggctttgcactagttccccatatcagttatacgcactatacggagtgtataagtgaccatcgagtgatgtgagaaattggaagaggagaaaaaataaggcgggagatatgaggacaaaatggagaacattacacaaatttcgaaattctaagtgaaatgtttgggaaagcggggggtcgagagaagtggactgcaaagcaggtttgttgagcagcatcacggaaggcggtacaggtgtattccaaggggaaaagctgccggtttacacaaaacacagcgagtgatggcagtacatagcaggagcagatgagaaaacaaatatttgcgttgagacgcgataataaacgccacctagatccagagagcccgacccgaacgatgactacacactgagggaaaggcaggcattcgagggatgtatgcaacacagctatactatagggacccattatgtattggcttgaccccaacaatgggaggcaacgtaggaccacaaaaccacagatacacacacagattccaatccttccga

SEQ ID NO: 482682 - DNA, 126 bp, Homo sapiens
gtcgtgaggtcgatctctaggatttaggcaaagctcgtacatcttctgtctggtatactacagactttatccccctcaccctccagttgagtagctgttggagcttctgggcccaaggctttcagg

SEQ ID NO: 482683 - DNA, 116 bp, Homo sapiens
cgtccccctgactcctgggcctcccggaacctccacggacgtggtggtaggccctgcctctgccctcacggggctggcacgaccaccccgcatactgttcattggatggcttcttc

SEQ ID NO: 482684 - DNA, 919 bp, Homo sapiens
  misc_feature (35)..(35): n is a, c, g, or t
  misc_feature (51)..(51): n is a, c, g, or t
  misc_feature (54)..(54): n is a, c, g, or t
  misc_feature (56)..(56): n is a, c, g, or t
  misc_feature (73)..(73): n is a, c, g, or t
  misc_feature (81)..(81): n is a, c, g, or t
  misc_feature (93)..(93): n is a, c, g, or t
  misc_feature (107)..(107): n is a, c, g, or t
  misc_feature (132)..(132): n is a, c, g, or t
  misc_feature (142)..(143): n is a, c, g, or t
  misc_feature (203)..(203): n is a, c, g, or t
  misc_feature (224)..(224): n is a, c, g, or t
  misc_feature (262)..(262): n is a, c, g, or t
  misc_feature (267)..(267): n is a, c, g, or t
  misc_feature (296)..(297): n is a, c, g, or t
  misc_feature (325)..(325): n is a, c, g, or t
  misc_feature (337)..(337): n is a, c, g, or t
  misc_feature (381)..(381): n is a, c, g, or t
  misc_feature (412)..(412): n is a, c, g, or t
  misc_feature (421)..(421): n is a, c, g, or t
  misc_feature (482)..(482): n is a, c, g, or t
  misc_feature (486)..(486): n is a, c, g, or t
  misc_feature (488)..(489): n is a, c, g, or t
  misc_feature (495)..(495): n is a, c, g, or t
  misc_feature (502)..(502): n is a, c, g, or t
  misc_feature (529)..(529): n is a, c, g, or t
  misc_feature (568)..(568): n is a, c, g, or t
  misc_feature (582)..(582): n is a, c, g, or t
  misc_feature (617)..(617): n is a, c, g, or t
  misc_feature (636)..(636): n is a, c, g, or t
  misc_feature (648)..(648): n is a, c, g, or t
  misc_feature (653)..(654): n is a, c, g, or t
  misc_feature (659)..(659): n is a, c, g, or t
  misc_feature (678)..(678): n is a, c, g, or t
  misc_feature (761)..(761): n is a, c, g, or t
  misc_feature (764)..(764): n is a, c, g, or t
  misc_feature (837)..(837): n is a, c, g, or t
  misc_feature (857)..(857): n is a, c, g, or t
  misc_feature (894)..(894): n is a, c, g, or t
acgctggtgggcctgtagtggagtacgctttggantgagaagaatcgaggntanangaagaagctgtagcaangaaggccnaggggggatggnggctaaaagagganggcgcttaaagtgggcaattaagcnaagcgggcanngaggaggaagaaggggtagaagtaaacggggaagtagaaaggaagaatagatataaaaanaaggaaaaatggaaaagaaantaaaaaaaaaaaaataaaaaaaaaaaaaaagaaaaaanagaangaaaagaaaagaaggagaaataaaattannataaaaataaaaaaaaataaaatagaanatataaataatnaaaataagaaggaaaaaaaaatataaaatataaaaataaaaaanaaaagaatatataaaggaataaaaaaaaatnaaggaaaanaatagaaataaaaagaaaataaaaagaagataaaaaagaaaaagaaaaaagtatataaagngtangnnatatanaattagnaaaataaagggtttggcattggctgtntacaagtaccagtacatgggactgtaacctacacatgcntcggattggttagncttcattgagcacactgagagaatggagtacagtngtggaggactgcttttgtnaacatgagagancagcnnctggnccctatgtatttgggtctnatttacatacttctataagcacagtggctcctcagcatactcttaaactaatcacttatgtaaaaaagaaccaaaagactttnctncatggtggggtgacaggtactagaaggacaatgtacataatcacgacacacacagagacactataccataacncaaggctggaaaataatgtngaaaactttatttttgtctacagtacagaacacaaanaacaacaaaaaaacataactatgta

SEQ ID NO: 482685 - DNA, 707 bp, Homo sapiens
agcggaattggggggcagctccgtgagggacggtttctgccttgttcccgcctcagctcggcagctccccatccgtcgcccgctgttctccgcgctcctcggccgggttcatggtcctccccgtctcggtctgtgtcgcttctaggatggggaggtaacaggcagggccgtaaagagcctcgtcccgacaaccgagagaccgaccggtccccggaggtgagcgccagcctccgcgtgtccatacaccggcggggggccgcctcgccatgctgcaagagcaggacgaggaaggacgaacgaagagcgacgcaagggaagagaggcaagaaagaaaccaaaagagggaaaaaagaaggcgcagaacggggagggccggccaagagggggcaagtccgatggccatacggggaggaaccatcaaggcacgaccgatagggaaagcagagcagcaaaacccaagcaggagtaaggaagtaaagagcaacaagaaccatggagggagaacctcccaggtagccgtgacaggagcgttgcccatcaaagcgaagcaacagggacccacgagaccgataggcaagagaggctgagcggaaaaaaccaacaagagacaacagaccagggacgtgatggcccccaaaaagctaaactagcaacacaacaacacaggagcccggggacagaacacgacgagtagaacaaggagccac

SEQ ID NO: 482686 - DNA, 298 bp, Homo sapiens
cttgcgtgtccatacttcagggattatgcactatccactcattacatattatgcctaccctgagtttatatgaatctgccacaataatgaatcctggatagcaatttgaaacccttcatgaagcactgaaactactgccacctgctcactgcgaaaccctccgttacctcatggcacatctaaagagatgtaccctccacgaaaaggagaatcttatgaatgcagagagccttggaactcgtctttggacccacccttattagacccgcaaggtgatcacggagctctcattccgtaa

SEQ ID NO: 482687 - DNA, 543 bp, Homo sapiens
gttaatggtttaactgctggttcaggttctgattaaatcatttgtgtttaaagtgaaaaaaaaaaaaaaaaaaaaaaaaaaaaaaaaaaaaaaaaaaaaaaaaaaaaaaaaaaaaaaaaaaaaaaaaaaaaaaaaaaaaaaaaaaaaaaaaaaaaaaggggggggggggaatttgggggggagacacttttagggccgcccaagtagggagcgggttaatatataataacaggacacgaaccgcgcggcgcgatcgaacaaccaacgcgcggacggagaaaacagtgcgagcatggtggggtatactttgtgggagaagaagcaacaccccttctggggggggggaggaggaaatacgtgggggagccaaccccactacgaaatgaatttaaagacacgtcagagggagaaaataaaacatgcggagggtaggtagggttggtaaacaagcgcgtatataattggttggtgggagaaaaagtttgagcaggggatatattgtacaaaaatatttatacagagtgtttaaaatacgggggacgt

SEQ ID NO: 482688 - DNA, 102 bp, Homo sapiens
agcagaatgagtcgggtagcgtagatacctccggagaacgtgttactggcctggtgggcgacaggcccgccggaggccagctgggatgtgtagagcggataa

SEQ ID NO: 482689 - DNA, 350 bp, Homo sapiens
ttcaaagactccctgatttgtgattggttaaggaagcaaagctttgtctacttggggtccgcagaaaggaacattaaggtctggccaggcccctcaggaagaaactgagagcaaagaatggaggtcagagtttagtccctggtgttcccccttatctgacgtctgtgtgaatccatttggtgggggtctgggtttctgtggctattgtttgaaactgttatgaccttcttgcttatcagcttgctggtttccttctcggggcgagctgggtgcctggagttttcggtgaaggaaactcaagattctcctttatttctgtgcttgtgggtccccctggcacaccccggggg

SEQ ID NO: 482690 - DNA, 965 bp, Homo sapiens
cggcccctttttttgtttttttaacggagaaaaaattttgatggtgatataaaatgcacttataaaaggtccaccagaaggcatgtaattcttcacgggtatataaatgtacggggaatatgttattcaccatctaggtatgatacggccaactaaaacatactgtaaacgagtgagttatacgtctataacaaagggcatcacgtgattttcagcaatcatggggtttaataataattaggtttaagactataatcacatctatattcgtggaagtgtccatttactcttaagtgtagcggtaggggaatttagagtataatggcccatagagtggtacagaaaaacattcacgttctaaattattttataccttcagtgacaggtagtcttcctgactgaaaataacagcttcagctatggtcctggctcaggattcttaaggcacataataggggtgtatgtgtgtcgggagagtggcgggccgtgaataagcttccaaaatgatgcccaacacagttatccctattgaaacgaggggactgatcgctccaaggtatcccccagttgtgagtaaacatcagtgctgccaggtgcttgctgaggctgtaagactcaacccggggtccccgtggtcatgaaccaagactaaatggtcacaaggcagaggcaaggaacaatcccaactgcagggggccaatctgaaacatcctgaatgttgccaaccggagaaaagcttggcgtaacattgcccaaacccaaacgctagcagggagtgatggccccccacaggaccggtaggcgaaattgaaacagcaacctaaggggaagcacacccagcacgagagacgcacacacagcacacacaccacgatggacgcgacacgaaacgggcagacgagcacggcaccatacagaaccacaactcacaggacgacgcaaggtcaagagacggcacacaggca

SEQ ID NO: 482691 - DNA, 1045 bp, Homo sapiens
gaatgggatcatcagcatacggaacaaaatatggcgaggagacaatggaaagatcgagcggtcggggggctccctctcggcccatatggtccatctgcgggatcccttcaagagacgagagtaatgacatcctggtctgtggctgactggggacatatgagtttgcttctaccagctgagtggaaatcagattggaaaaggactcgggcaaatgaatcattctgactcccgtgctatgtatcaggcttacatttagctaaaaaggcgaggtatcaattctctgcatgcggggctgcgggacaatccaatgtatcttctctttcaccgcagtggactggatgtgaggcttgtgggacttgtgtgagcgcgagcacgaacctccctgggatgatggactgtgctcaagtctaaagacggactaccaaacggagtgtgagatggtcgggtgcgaaggaccgcatcatggtgccattctagccatgtatctaattgtatcccgccacgaggtgccactgcccgcttgaactatacggaactggtatgcctatcgctgatactttgactgacgtcattggtgtcagccacctgatgcaccgattcagaaagtcccgggattcactagtgcatgagagcttgtcaagactgattgccatctagctgaagtcgctcgtggtatcaacattgcctcagaagattcctcatctatgaatcgtatttccgcaggacttatcagcacgattggatgagcgagtcctggactgacgtaatagtcaatcacaggtctgagttcaatcccccgcctggaggtggagtctcccatcatcagtgtgtgcccggaacaacccgtttacgaaaggcagggcggcaagggaaccggaacgatcgggtggttgcacaatgtaagtgttccgttgggttaccaaggggaaacggggaccaccgggagcacaagcctctgtggggcccaacatatgacaccgcgctcacgggccatccgacgtttggccttcaagaaacaccggccaataaaaagtcccaaaggcgt

SEQ ID NO: 482692 - DNA, 461 bp, Homo sapiens
  misc_feature (63)..(63): n is a, c, g, or t
gagagagagagaaagaaattataatgctctagtatgcacagaagcaagtgcacgcatttttanaatcattttgctgcctatatgatttcaatggtttctttataaagtgatcattattcaaatatgcgaagcctctacagtctaagagcaaggccacttctgcaaggcttttaattgtgatcttaaaaaattaaatcaaaagcattttctttaaaatatctttgtaatatattacttttcctaaatatatgagtgagagggcagtctttcagattcttactgtagagttttgattttaattgtgtgtttatttctgtggatgctttggtataatatcttagtaattccaaatgtaagcatacctcagtaattgtgttaatagccataaagccacttccatggtgcttcatcattgtaactgacggtgaaactaacaaaaataaaaagtatgttggaggtgc

SEQ ID NO: 482693 - DNA, 615 bp, Homo sapiens
ccacggcttcagcgttggatgtgcccacacagagcactgttgtcagcgtgtatgccaccagcaaagtgacctctgcgccgttcgacaataagttggtcctggccgctcgggacgatgctgccgctttcattgccactgacggccaatggcggggcgcacgcctggagtccgcgctggactatctgcgccgcacccagccaaaacttcatgcaagcgaccttgaactggcgcaagcaattctcgtccaataatcatcattgtatttctatctttgtcattggagtcaccccatgcgtagcccgctgatcgtcgccgccctcggcctgctgtttttggccgatgtcgcccaggcgcaaaccttgaaggccaccagcaacatcgtcgtgcgagcctcggcgcgcaccattgatttcacctcggacaccaccacctccatccgcgactccaagatcgtgcgcgaagcccacgatgacgccgccagtttcgtcgctaccaatggcgagatccgtggcgcccaactggaagccgtgttcgatacccttcgcacccgcgtgccagaagcccgtgatgccagcgaccagaccctcgcagaagctatccgcagggacccactcg

SEQ ID NO: 482694 - DNA, 148 bp, Homo sapiens
ttatcgctcttttttcttttattcccaaagaagatgtacaaatgcttacataatcagaacagggcaatcttaccaatgaagtttacctggggggggctacatttacttatttcatttcttcgcacaccaacataaatttgataccgtc

SEQ ID NO: 482695 - DNA, 100 bp, Homo sapiens
  misc_feature (9)..(9): n is a, c, g, or t
cgtttcacntacgcacgactttaccacactccgacttcacgacgtaccacacacacgaccactttacttcacgtaccaccaccacacacttacgtacacc

SEQ ID NO: 482696 - DNA, 5468 bp, Homo sapiens
  misc_feature (953)..(953): n is a, c, g, or t
  misc_feature (1013)..(1013): n is a, c, g, or t
  misc_feature (1073)..(1073): n is a, c, g, or t
  misc_feature (1249)..(1249): n is a, c, g, or t
  misc_feature (1280)..(1280): n is a, c, g, or t
  misc_feature (1286)..(1286): n is a, c, g, or t
  misc_feature (1310)..(1310): n is a, c, g, or t
  misc_feature (1318)..(1318): n is a, c, g, or t
  misc_feature (1325)..(1325): n is a, c, g, or t
  misc_feature (1334)..(1334): n is a, c, g, or t
  misc_feature (1338)..(1338): n is a, c, g, or t
  misc_feature (1340)..(1340): n is a, c, g, or t
  misc_feature (1345)..(1345): n is a, c, g, or t
  misc_feature (1355)..(1355): n is a, c, g, or t
  misc_feature (1367)..(1367): n is a, c, g, or t
  misc_feature (1370)..(1370): n is a, c, g, or t
  misc_feature (1384)..(1385): n is a, c, g, or t
  misc_feature (1398)..(1400): n is a, c, g, or t
  misc_feature (1487)..(1487): n is a, c, g, or t
  misc_feature (1490)..(1490): n is a, c, g, or t
  misc_feature (1496)..(1496): n is a, c, g, or t
  misc_feature (1514)..(1514): n is a, c, g, or t
  misc_feature (1518)..(1519): n is a, c, g, or t
  misc_feature (1529)..(1529): n is a, c, g, or t
  misc_feature (1534)..(1535): n is a, c, g, or t
  misc_feature (1544)..(1544): n is a, c, g, or t
  misc_feature (1547)..(1547): n is a, c, g, or t
  misc_feature (1550)..(1550): n is a, c, g, or t
  misc_feature (1564)..(1564): n is a, c, g, or t
  misc_feature (1580)..(1580): n is a, c, g, or t
  misc_feature (1583)..(1583): n is a, c, g, or t
  misc_feature (1630)..(1630): n is a, c, g, or t
  misc_feature (1663)..(1663): n is a, c, g, or t
  misc_feature (1693)..(1693): n is a, c, g, or t
  misc_feature (1703)..(1703): n is a, c, g, or t
  misc_feature (1741)..(1741): n is a, c, g, or t
  misc_feature (1771)..(1771): n is a, c, g, or t
  misc_feature (1783)..(1783): n is a, c, g, or t
  misc_feature (1797)..(1797): n is a, c, g, or t
  misc_feature (1801)..(1801): n is a, c, g, or t
  misc_feature (1827)..(1827): n is a, c, g, or t
  misc_feature (1831)..(1831): n is a, c, g, or t
  misc_feature (1857)..(1857): n is a, c, g, or t
  misc_feature (1861)..(1861): n is a, c, g, or t
  misc_feature (1947)..(1947): n is a, c, g, or t
  misc_feature (1951)..(1951): n is a, c, g, or t
ggtatcgataagcttgatggagcggacggcagacggggcgggcggcgtcagggtcgcagcgtctacagctgctcgggggcggtttcttggcggaggcttggccggctcctctctcccggctccgcggcggctgcgaaggcggcggctcctgccctctcgctttccctctcgcgtctctggctgcagaaagaagcttccggttctgaggtcctggaggtgccatttccctctctgttgaagcaaaggccggggcagacctcctagtgaaaggaaagcaagccaggatggatatttacgacactcaaaccttgggggttgtggtctttggaggattcatggttgtttctgccattggcatcttcctggtgtcgactttctccatgaaggaaacgtcatatgaagaagccctagccaaccagcgcaaggagatggcgaaaactcaccaccagaaagtcgagaagaaaaagaaggagaaaacagtggagaagaaaggaaagaccaagaaaaaggaagagaaacctaatgggaagatacctgatcatgatccagcccccaatgtgactgtcctccttcgagaaccagtgcgggctcctgctgtggctgtggctccaaccccagtgcagccccccattatcgttgctcctgtcgccacagttccagccatgccccaggagaagctggcctcctcccccaaggacaaaaagaagaaggagaaaaaagtggcaaaagtggaaccagctgtcagctctgtagtgaattccatccaggttctcacttcgaaggctgccatcttggaaactgctcccaaggaggtgccgatggtggtggtgcccccagtgggtgccaagggcaacacaccagccactggcactactcagggcaaaaaggcggaggggactcagaatcaaagcaaaaaggctgaaggagccccaaaccagggcagaaaggcaganggaaccccaaaccagggcaaaaagacagagggaaccccaaaccaagggaaaaaggcaganggaaccccaaaccaaggcaaaaaggcagaaggaaccccaaaccaaggcaaaaaggcgganggggcccagaaccagggtaaaaaggtagatacaaccccaaaccaggggaaaaaggtggagggggccccaacccagggcagaaaggccgagggggctcagaaccaggccaaaaaggtagaaggggcccagaaccagggcaaaaaggcagagggggcccagaatcagggcaaaaaggnagagggggcccagaaccagggcaagaaggcngagggngcccagaatcagggcaagaaggcngagggggnccagaancagggcaanaagncngaggnggcccagaancagggcaagaangcngagggggcccaganncagggcaagaagnnngagggggctcagaaccagggcaaaaaggccgagggggctcagaaccagggcaaaaaagtagaaggggcccagaaccagggcaagaangcngagggngcccagaaccagggcaanaagnncgagggggcncaganncagggcaanaangcngagggggcccaganccagggcaagaaggcnganggggcccagaaccagggcaagaaggccgagggggcccagaaccaggncaagaaggccgagggggcccagaaccagggcangaaggccgagggggcccagaaccagggcangaaggccganggggcccagaaccagggcaagaaggccgagggggcccngaaccagggcaagaaggccgagggggcccngaaccagggcangaaggccgaggggncccngaaccagggcaagaaggccgaggggncccngaaccagggcaagaaggccgaggggncccngaaccagggcaagaaggccgagggggcccagaaccagggcaagaaggccgagggggcccagaaccagggcaagaaggccgaggggncccngaaccagggcaagaaggccgagggggcccagaaccagggcaagaaggccgagggggcccagaaccagggcaagaaggccgagggggcccagaaccagggcaagaaggccgagggggcccagaaccagggcaagaaggccgagggggcccagaaccagggcaagaaggccgagggtgctcagaaccagggcaaaaaagtagaaggggcccagaaccagggcaagaaggctgagggggcccagaaccagggcaagaaggccgagggggctcagaaccagggcaaaaaggccgagggagcccagaaccagggccaaaaaggagagggagcccagaatcagggtaaaaagacagaaggggctcagggcaaaaaggcagaaaggagtcccaaccaaggcaaaaaaggagagggagctcccatccagggcaaaaaggcagattcggttgctaatcagggcacaaaggtagagggtattacaaaccaggggaaaaaagcagaagggtcccccagtgaaggcaaaaaggcagaagggtcccccaaccaaggcaaaaaggcagacgcagctgccaatcagggtaaaaagacagagtcagcttctgtccagggcagaaatacagatgtggcccagagcccagaggcaccaaagcaagaggctcctgccaagaagaagtctggttcaaagaaaaaaggtgagcctgggcccccagatgccgacggccctctctacctcccctacaagacgctggtctccacggttgggagcatggtgttcaacgagggcgaggcccagcggctcatcgagatcctgtctgagaaggctggcatcattcaggacacctggcacaaggccactcagaagggtgaccctgtggcgattctgaaacgccagctggaagagaaggaaaaactgctggccacagaacaggaagatgcggctgtcgccaagagcaaactgagggagctcaacaaggagatggcagcagaaaaggccaaagcagcagccggggaggccaaagtgaaaaagcagctggtggcccgggagcaggagatcacggctgtgcaggcacgcatgcaggccagctaccgggagcacgtgaaggaggtgcagcagctgcagggcaagatccggactcttcaggagcagctggagaatggccccaacacgcagctggcccgcctgcagcaggagaactccatcctgcgggatgccttgaaccaggccacgagccaggtggagagcaagcagaacgcagagctggccaagcttcggcaggagctcagcaaggtcagcaaagagctggtggagaagtcagaggctgtgcggcaagatgagcagcagcggaaagctctggaagccaaggcagctgccttcgagaagcaggtcctgcagctgcaggcgtcccacagggagagtgaggaggccctgcagaagcgcctggacgaggtcagccgggagctgtgccacacgcagagcagccacgccagcctccgggcggatgccgagaaggcccaggagcaacagcagcagatggccgagctgcacagcaagttacagtcctccgaggcggaggtgcgcagcaaatgcgaggagctgagtggcctccacgggcagctccaggaggccagggcggagaactcccagctcacagagagaatccgttccattgaggccctgctggaggcgggccaggcgcgggatgcccaggacgtccaggccagccaggcggaggctgaccagcagcagactcgcctcaaggagctggagtcccaggtgtcgggtctggagaaggaggccatcgagctcagggaggccgtcgagcagcagaaagtgaagaacaatgacctccgggagaagaactggaaggccatggaggcactggccacggccgagcaggcctgcaaggagaagctgcactccctgacccaggccaaggaggaatcggagaagcagctctgtctgattgaggcgcagaccatggaggccctgctggctctgctcccagaactctctgtcttggcacaacagaattacaccgagtggctgcaggatctcaaagagaaaggccccacgctgctgaagcacccgccagctcccgcggagccctcctcggacctggcctccaagttgagggaggccgaggagacgcagagcacactgcaggccgagtgtgaccagtaccgcagcatcctggcggagacggagggcatgctcagagacctgcagaagagcgtggaggaggaggagcaggtgtggagggccaaggtgggcgccgcagaggaggagctccagaagtcccgggtcacagtgaagcatctcgaagagattgtagagaagctaaaaggagaacttgaaagttcggaccaggtgagggagcacacgttgcatttggaggcagagctggaaaagcacatggcggccgccagcgccgagtgccagaactacgccaaggaggtggcagggctgaggcaacttctcctagaatctcaatctcagctcgatgccgccaagagcgaagcccagaaacagagcgatgagcttgccctggtcaggcagcagttgagtgaaatgaagagccacgtagaggatggtgacatagctggggccccagcttcctccccagaggcgcccccagccgagcaggaccccgttcagctgaagacgcagctggagtggacagaagccatcctggaggatgagcagacacagcggcagaagctcacggccgagtttgaggaggctcagacctcggcatgtcggttacaagaagaattggagaagctccgcacagccggccccctagagtcttcagaaacagaggaggcctcacagctgaaggagagactagaaaaagagaagaagttaacaagtgacctggggcgcgccgccacgagactgcaggagcttctgaagacgacccaggagcagctggcaagggagaaggacacggtgaagaagctgcaggaacagctggaaaaggcagaggacggcagcagctcaaaggagggcacctctgtctgagtttcctctttggaaaaagaagttactgttcaacttaccaaaatgccttacacattccttacaaataaaccaaccaacctacacagcgttatccaggcccaacttccggtactccgagagaagccatgagagacaagtctcttagagccacagaagtagaccttccagagccccagtttgtaaatgaacctgtgtcacatttgataaacactatcctgggcgcagccccgggccaccgccgagtgacgccaaagccctggttgactctgacagccccgtgggtgtgtgggaggccgggcgctctggggtctgtctgtcagtgcaatcgtttagtgttttttcagtggggcggggcgggaagcgggtgggaccgggcagccagttctcaaaggctgtggggccgactggaggccacagcccctcacccctagacgttgccaaccagaactgacgtgtgacctcctgggtgttgatgccattaaaaccaacgttggtgcccgg

SEQ ID NO: 482697 - DNA, 143 bp, Homo sapiens
tctctcacttgagtgaattggatggaagtggtgaatttcagccaaagtggccaaagaaatcctgttcctgtgataatgacgccatcagcctctgcacctctgtcttcccttctgccacatgttgtctgttctccgtgactttg

SEQ ID NO: 482698 - DNA, 5368 bp, Homo sapiens
  misc_feature (953)..(953): n is a, c, g, or t
  misc_feature (1013)..(1013): n is a, c, g, or t
  misc_feature (1073)..(1073): n is a, c, g, or t
  misc_feature (1249)..(1249): n is a, c, g, or t
  misc_feature (1280)..(1280): n is a, c, g, or t
  misc_feature (1286)..(1286): n is a, c, g, or t
  misc_feature (1310)..(1310): n is a, c, g, or t
  misc_feature (1318)..(1318): n is a, c, g, or t
  misc_feature (1325)..(1325): n is a, c, g, or t
  misc_feature (1334)..(1334): n is a, c, g, or t
  misc_feature (1338)..(1338): n is a, c, g, or t
  misc_feature (1340)..(1340): n is a, c, g, or t
  misc_feature (1345)..(1345): n is a, c, g, or t
  misc_feature (1355)..(1355): n is a, c, g, or t
  misc_feature (1367)..(1367): n is a, c, g, or t
  misc_feature (1370)..(1370): n is a, c, g, or t
  misc_feature (1384)..(1385): n is a, c, g, or t
  misc_feature (1398)..(1400): n is a, c, g, or t
  misc_feature (1426)..(1426): n is a, c, g, or t
  misc_feature (1429)..(1429): n is a, c, g, or t
  misc_feature (1435)..(1435): n is a, c, g, or t
  misc_feature (1453)..(1453): n is a, c, g, or t
  misc_feature (1457)..(1458): n is a, c, g, or t
  misc_feature (1468)..(1468): n is a, c, g, or t
  misc_feature (1473)..(1474): n is a, c, g, or t
  misc_feature (1483)..(1483): n is a, c, g, or t
  misc_feature (1486)..(1486): n is a, c, g, or t
  misc_feature (1489)..(1489): n is a, c, g, or t
  misc_feature (1503)..(1503): n is a, c, g, or t
  misc_feature (1519)..(1519): n is a, c, g, or t
  misc_feature (1522)..(1522): n is a, c, g, or t
  misc_feature (1569)..(1569): n is a, c, g, or t
  misc_feature (1602)..(1602): n is a, c, g, or t
  misc_feature (1632)..(1632): n is a, c, g, or t
  misc_feature (1642)..(1642): n is a, c, g, or t
  misc_feature (1680)..(1680): n is a, c, g, or t
  misc_feature (1710)..(1710): n is a, c, g, or t
  misc_feature (1722)..(1722): n is a, c, g, or t
  misc_feature (1736)..(1736): n is a, c, g, or t
  misc_feature (1740)..(1740): n is a, c, g, or t
  misc_feature (1766)..(1766): n is a, c, g, or t
  misc_feature (1770)..(1770): n is a, c, g, or t
  misc_feature (1796)..(1796): n is a, c, g, or t
  misc_feature (1800)..(1800): n is a, c, g, or t
  misc_feature (1886)..(1886): n is a, c, g, or t
  misc_feature (1890)..(1890): n is a, c, g, or t
ggtatcgataagcttgatggagcggacggcagacggggcgggcggcgtcagggtcgcagcgtctacagctgctcgggggcggtttcttggcggaggcttggccggctcctctctcccggctccgcggcggctgcgaaggcggcggctcctgccctctcgctttccctctcgcgtctctggctgcagaaagaagcttccggttctgaggtcctggaggtgccatttccctctctgttgaagcaaaggccggggcagacctcctagtgaaaggaaagcaagccaggatggatatttacgacactcaaaccttgggggttgtggtctttggaggattcatggttgtttctgccattggcatcttcctggtgtcgactttctccatgaaggaaacgtcatatgaagaagccctagccaaccagcgcaaggagatggcgaaaactcaccaccagaaagtcgagaagaaaaagaaggagaaaacagtggagaagaaaggaaagaccaagaaaaaggaagagaaacctaatgggaagatacctgatcatgatccagcccccaatgtgactgtcctccttcgagaaccagtgcgggctcctgctgtggctgtggctccaaccccagtgcagccccccattatcgttgctcctgtcgccacagttccagccatgccccaggagaagctggcctcctcccccaaggacaaaaagaagaaggagaaaaaagtggcaaaagtggaaccagctgtcagctctgtagtgaattccatccaggttctcacttcgaaggctgccatcttggaaactgctcccaaggaggtgccgatggtggtggtgcccccagtgggtgccaagggcaacacaccagccactggcactactcagggcaaaaaggcggaggggactcagaatcaaagcaaaaaggctgaaggagccccaaaccagggcagaaaggcaganggaaccccaaaccagggcaaaaagacagagggaaccccaaaccaagggaaaaaggcaganggaaccccaaaccaaggcaaaaaggcagaaggaaccccaaaccaaggcaaaaaggcgganggggcccagaaccagggtaaaaaggtagatacaaccccaaaccaggggaaaaaggtggagggggccccaacccagggcagaaaggccgagggggctcagaaccaggccaaaaaggtagaaggggcccagaaccagggcaaaaaggcagagggggcccagaatcagggcaaaaaggnagagggggcccagaaccagggcaagaaggcngagggngcccagaatcagggcaagaaggcngagggggnccagaancagggcaanaagncngaggnggcccagaancagggcaagaangcngagggggcccaganncagggcaagaagnnngagggggctcagaccagggcaagaangcngagggngcccagaaccagggcaanaagnncgagggggcncaganncagggcaanaangcngagggggcccaganccagggcaagaaggcnganggggcccagaaccagggcaagaaggccgagggggcccagaaccaggncaagaaggccgagggggcccagaaccagggcangaaggccgagggggcccagaaccagggcangaaggccganggggcccagaaccagggcaagaaggccgagggggcccngaaccagggcaagaaggccgagggggcccngaaccagggcangaaggccgaggggncccngaaccagggcaagaaggccgaggggncccngaaccagggcaagaaggccgaggggncccngaaccagggcaagaaggccgagggggcccagaaccagggcaagaaggccgagggggcccagaaccagggcaagaaggccgaggggncccngaaccagggcaagaaggccgagggggcccagaaccagggcaagaaggccgagggggcccagaaccagggcaagaaggccgagggggcccagaaccagggcaagaaggccgagggggcccagaaccagggcaagaaggccgagggggcccagaaccagggcaagaaggccgagggtgctcagaaccagggcaaaaaagtagaaggggcccagaaccagggcaagaaggctgagggggcccagaaccagggcaagaaggccgagggggctcagaaccagggcaaaaaggccgagggagcccagaaccagggccaaaaaggagagggagcccagaatcagggtaaaaagacagaaggggctcagggcaaaaaggcagaaaggagtcccaaccaaggcaaaaaaggagagggagctcccatccagggcaaaaaggcagattcggttgctaatcagggcacaaaggtagagggtattacaaaccaggggaaaaaagcagaagggtcccccagtgaaggcaaaaaggcagaagggtcccccaaccaaggcaaaaaggcagacgcagctgccaatcagggtaaaaagacagagtcagcttctgtccagggcagaaatacagatgtggcccagagcccagaggcaccaaagcaagaggctcctgccaagaagaagtctggttcaaagaaaaaaggtgagcctgggcccccagatgccgacggccctctctacctcccctacaagacgctggtctccacggttgggagcatggtgttcaacgagggcgaggcccagcggctcatcgagatcctgtctgagaaggctggcatcattcaggacacctggcacaaggccactcagaagggtgaccctgtggcgattctgaaacgccagctggaagagaaggaaaaactgctggccacagaacaggaagatgcggctgtcgccaagagcaaactgagggagctcaacaaggagatggcagcagaaaaggccaaagcagcagccggggaggccaaagtgaaaaagcagctggtggcccgggagcaggagatcacggctgtgcaggcacgcatgcaggccagctaccgggagcacgtgaaggaggtgcagcagctgcagggcaagatccggactcttcaggagcagctggagaatggccccaacacgcagctggcccgcctgcagcaggagaactccatcctgcgggatgccttgaaccaggccacgagccaggtggagagcaagcagaacgcagagctggccaagcttcggcaggagctcagcaaggtcagcaaagagctggtggagaagtcagaggctgtgcggcaagatgagcagcagcggaaagctctggaagccaaggcagctgccttcgagaagcaggtcctgcagctgcaggcgtcccacagggagagtgaggaggccctgcagaagcgcctggacgaggtcagccgggagctgtgccacacgcagagcagccacgccagcctccgggcggatgccgagaaggcccaggagcaacagcagcagatggccgagctgcacagcaagttacagtcctccgaggcggaggtgcgcagcaaatgcgaggagctgagtggcctccacgggcagctccaggaggccagggcggagaactcccagctcacagagagaatccgttccattgaggccctgctggaggcgggccaggcgcgggatgcccaggacgtccaggccagccaggcggaggctgaccagcagcagactcgcctcaaggagctggagtcccaggtgtcgggtctggagaaggaggccatcgagctcagggaggccgtcgagcagcagaaagtgaagaacaatgacctccgggagaagaactggaaggccatggaggcactggccacggccgagcaggcctgcaaggagaagctgcactccctgacccaggccaaggaggaatcggagaagcagctctgtctgattgaggcgcagaccatggaggccctgctggctctgctcccagaactctctgtcttggcacaacagaattacaccgagtggctgcaggatctcaaagagaaaggccccacgctgctgaagcacccgccagctcccgcggagccctcctcggacctggcctccaagttgagggaggccgaggagacgcagagcacactgcaggccgagtgtgaccagtaccgcagcatcctggcggaggaggaggagcaggtgtggagggccaaggtgggcgccgcagaggaggagctccagaagtcccgggtcacagtgaagcatctcgaagagattgtagagaagctaaaaggagaacttgaaagttcggaccaggtgagggagcacacgttgcatttggaggcagagctggaaaagcacatggcggccgccagcgccgagtgccagaactacgccaaggaggtggcagggctgaggcaacttctcctagaatctcaatctcagctcgatgccgccaagagcgaagcccagaaacagagcgatgagcttgccctggtcaggcagcagttgagtgaaatgaagagccacgtagaggatggtgacatagctggggccccagcttcctccccagaggcgcccccagccgagcaggaccccgttcagctgaagacgcagctggagtggacagaagccatcctggaggatgagcagacacagcggcagaagctcacggccgagtttgaggaggctcagacctcggcatgtcggttacaagaagaattggagaagctccgcacagccggccccctagagtcttcagaaacagaggaggcctcacagctgaaggagagactagaaaaagagaagaagttaacaagtgacctggggcgcgccgccacgagactgcaggagcttctgaagacgacccaggagcagctggcaagggagaaggacacggtgaagaagctgcaggaacagctggaaaaggcagaggacggcagcagctcaaaggagggcacctctgtctgagtttcctctttggaaaaagaagttactgttcaacttaccaaaatgccttacacattccttacaaataaaccaaccaacctacacagcgttatccaggcccaacttccggtactccgagagaagccatgagagacaagtctcttagagccacagaagtagaccttccagagccccagtttgtaaatgaacctgtgtcacatttgataaacactatcctgggcgcagccccgggccaccgccgagtgacgccaaagccctggttgactctgacagccccgtgggtgtgtgggaggccgggcgctctggggtctgtctgtcagtgcaatcgtttagtgttttttcagtggggcggggcgggaagcgggtgggaccgggcagccagttctcaaaggctgtggggccgactggaggccacagcccctcacccctagacgttgccaaccagaactgacgtgtgacctcctgggtgttgatgccattaaaaccaacgttggtgcccgg

SEQ ID NO: 482699 - DNA, 1203 bp, Homo sapiens
  misc_feature (1203)..(1203): n is a, c, g, or t
tggaaatggagtctcccaggcggaaatgcaagggtgcgatctcgacttcactgcaatcttcacctcccgggttcaagcgattctcccacctcagcctcctgagtagctgggattacaggcacctgccatcacgctcggctaatttcggtatttggagcagggatggagtttcaccatgttggccaggtgatctgcactcccactccccccacatttcccaaagtgctgggattacaggcataagccacaagccacctcacccagccaacatgttacatcttaattctgggatttccttcactgcagggcttggcggtggagaaataaacactcttcaaatgcataatctgggagatccctgtgaatcaataattcttatacacaactgcggctcaaaatccctcctttccctttcccgagttattccatccatcttattcagaagggaagtgaactcaggtgtacggtggtctgtaacaccctgaacatcttttataccgtgctacaagggtatgcctgggatatataggtagccatacaacgcagagactgacactaccagctaacagaagaaggaggattccaaggcaaactgattgacctgaaacccacaagtcatcagtgactgatcctgcatatagacataaggtagcgaccacttccactgaaccatagtgccgggaacttcattacagccgacacctatcaagttagcatcccatatcgtattggaggggacattagagacacacagttcacacacgggtaaacattggacgtaagaacacgcaaccatttttaaaactatcaaaacaacttcttgaaagagaggagcataaacggacaatcgatatacacagatgaactacaccttagaaaacaggcaaacgagacagtacagccactagacaccagggggtgaagaacatggagcgagggcccagaacacctgtagagcgacacagtgacggcacacacgctaccccccgcggggcacaacgagcacaactcgctcgggccaccaagcgctgctccgcagaaaaacgagggtacgaatcacacgcccgcggagccaacacgaaccacgagatgaccgaaaaggccagccgacgaatcaagacagaacacaacgagtgagcaaccaaacacgacgagcgacgcaggcgaggtatacacaaccccaagaacaggcaagaacacccn

SEQ ID NO: 482700 - DNA, 121 bp, Homo sapiens
gtcaacaggatgcagactaggtgcaagtgcaaactagttcctgtcggaagcctaagactcacccaggttaaaatatttcccctcatattgacaggaggcttgatcttggaactagcacttc

SEQ ID NO: 482701 - DNA, 336 bp, Homo sapiens
ccgccttcagctcccaaagtgctgggattaaaggcatgaaccactgtacctggcctttttgtattttttgtagagatggggttttaccatgttgcccaggctggtctgaaactcctgaactcaagcagtccccgcaccttggcctcccaaagtgttgggattacaggcctgatcccctgtgctcaaacctgatgagatcttttcatgtgcttatttgccattcatatatcttctttggagaaatgtctatttaaattctctgcacattttaattttatttttatacacctattgttttttaggctaggtccttgctctgtcactctggcttaagtg

SEQ ID NO: 482702 - DNA, 384 bp, Homo sapiens
ttgagcccctggcatgtcattgagtcccctagatgctacttatcataaagaggacttataaaaaataatcactgcatcaaaatgtacaagaggtggggttatgctgtgatattaattttcctcaattaatgtttttcttgactgttcatgaacaatattaatagtttccacggtaaatttgttttcataatgccgaattgcgaaacaattgctggcttcacgtttctgaatacctttaatattttctctgcgttgcggttggtttgtttccttgtcttgacgctgtctatccatatggaaatcctggttctcattgttttcattgctatcagtaataaccatgtgctcctgaatcatattggactgaggcatatcggttccagc

SEQ ID NO: 482703 - DNA, 550 bp, Homo sapiens
gacgcagaccacaatgataaacaacaaagagaaagaaagaaaggaaaaaagaaaggaaaaagatagacaacaaccagaagataataaacaaaatgacaaggataagtccacacttaccaataataacctgaaatgtgcacaaattaaattttccacttaaaatgtctagactagctaaatataatagatttgtttaaaacatgactcagctatatgctacctataagaaactcattttacctgtaaagacgtatatagactaaaagtaaagggatggaaaaagacattccatacaaatggaaaacaaaaaaacaagcagaagtagctgtacttatatcaatatcatataaaacagaatttaggtcaaaaaagagtaaaaatagatcgaaaaaggtcgttaaaacacaataaagggatcaattcagcaagaagatttaaaaattctaaatatatatcagccaacatgggtatatataaattaaatattattagacctaaaggcagagatagactcgaatataataatagttacagacttcaacaccccatt

SEQ ID NO: 482704 - DNA, 347 bp, Homo sapiens
tcatgttgtgtcactctatcccagtctttcttcccacattgagaaggcttgtggccaccagctggtttcgccatgatgatctgatccactctaagtacagtgactgcagcattagtagcgagtttgatagcccaatattttcccaggtaagtatctagaataccagcttccagcatgtcctttacagcagggacttcagcctcaatatctaatccaacgtatttattccttcttgatgtactgcataaagtttagagattacttcattggccttaactccagagttttctgccagtgcgcggggaatagcttcaaatgcctcagcaaacttcttaatagcatactgt

SEQ ID NO: 482705 - DNA, 1090 bp, Homo sapiens
ggtagatttcattctgatgtgctatccggtgacaagcccgatcgacatggttttcctgggatcatatctcgggtgggtgaaagtctgtgagcccgaagaaggatgcgaggctcatgtgaccggtggacatccaagctgcggatccgcttcaaaccgttcctcttccggccaacgtaggctaggttacatcactcgactgagtcgtcggtcaacgagtcccagcaagacgttgcatacgtgactacaaagacattatgtgcacaaagcaagtgccgtcctggcgcgcaaagggtatgcaatgttgagagccacgggaccaaggctagcacggtttgcagctagcgacgacctcgacagcaccgataacaccagtcgagctgttgcacacacatgtggaggaatagaagcgctaacacttgccgacgaagtgcacatttctctccatggtggcacctgtacagcgctcgcttgatccgggcggggcggagctttgcaatgctcggcgtatcccggctgtaccttaatcgaaacccgtacttaaatggaactcgtggaggtcggtgattactttacctttcaccgccatagggtgtgggaaaagccacttcgcatggtctagccccgccggaaaggtcgaccaaccatggcttaccttatcacacatcggcccgattccataggcttgtggcacgggctggcctggtaccccctttactgcaaccaagaacagccccttcccaagttgcgaggccaaccaagacggcacgaggcccgcttgtcaaatacgtacgagaggcgcggcaacctctgggcaaaccacataccaggtaaaccacctccgggacagcccccggaaacggcataacccttacccaagaattacggggcatacccttttcataagcacacggcggcagttggggccacgaacggggcacgaagcgttgggacgcccaaggcaccctatacggggacccttacatgggcaagtccagcatgtggccctctgtcggcatccccatgcacccgggatcttccccccctcgatggtaggggcttgcacatccttcgacagcccgacgcaatgcta

SEQ ID NO: 482706 - DNA, 530 bp, Homo sapiens
atgatcattcctttatatcatcagatatccacttaatgttcagcttgccttgattagagtgtgcttgtttcgactaagatcgacatcaggtccattcattgcaaataattgacaagtcttttaaaaacagctttattgcgatagtcaacatattacacaattcacagcgcaggttgaactcacagccttgtgcgcccgtccctgtgcatcaatgattttttaaaaatcatattcatagggctgtgtaaccatcaccacaatctaattttggaacattttttgtccccctctgcccccactgccccggagagaaaccccatacgcattagctgtcactctaatcccctccctcccaccaggccccagcccctctggcaaccactagtctacttttggccagactctgctgagacattagaacaggatttatttatttatttatttattttattttattttattttattttattttatttttgagacggagtctcgctctgtcgcccaggctggagtgcagtggtgcaacct

SEQ ID NO: 482707 - DNA, 167 bp, Homo sapiens
gcttagatctaattgcttgctgtgattttgaaaactgacctacactttttgtgcattatatgtatgtcaatatagtttaggtcatattatataaggcgttcgcatttggcttttacaatataggcaaccacaggattttgttacatattttaaatccctcctaaatt

SEQ ID NO: 482708 - DNA, 101 bp, Homo sapiens
aatgtatccttttcagacaaattacactatgttgaaatcgcagaaaaaaaaaaaaggggccccgggtgggaattccttaaatattaggccttggcgttttc

SEQ ID NO: 482709 - DNA, 183 bp, Homo sapiens
  misc_feature (49)..(49): n is a, c, g, or t
ggagagagactatgtatatccgacacgtcacgcactgatcaaaccctgngaatcttacaaaaccgggagatgctttgtacaggagctggtggatgttgtgctcatctcgacctactatcgcatcacccaaattttgcagcagcacaattccctgtggtatggcacaagacggtaagagggaga

SEQ ID NO: 482710 - DNA, 455 bp, Homo sapiens
  misc_feature (87)..(87): n is a, c, g, or t
  misc_feature (152)..(152): n is a, c, g, or t
ggcacgagcccaggctggccttgaactcctgacctcaggtgatccacctgcctcggcctctcaaagtgctgggattataggcgtganacccatgcccggcctaagcttgtgttcttaataaatacacaaccgcataatccagttgtttaganttaactaaacttttactggtttcattgctcactacaaacagcttcttgtgttccacaccctatcaatttttgagttacttatttgaattttttgttgttgtttgtctggagtattttctcaaacaagttttaacagaaatagcacgagtataatttctaagcctttctgtatctgaaagtgtcctttttccttcacacgtgaattaattctgggtgtctagaaattctagggtcatagttcccctatctatctatctatctatctatctatctatctatctatctatctatgtacccatctac

SEQ ID NO: 482711 - DNA, 238 bp, Homo sapiens
ctcacgaggccacagcatagagatcgacatcaaacaagaacgactactgaatacacaacgccccaaaccccacacaccacagcactccccgcctacggcggaaagcccgtcccttccacaggtcctgtcactgcaacatctttccatgccaccagtacctatccaaccccatcacaccctgagaccacacttcccactcacgttccacctttctccacctccttggtgactccaagta

SEQ ID NO: 482712 - DNA, 998 bp, Homo sapiens
  misc_feature (314)..(314): n is a, c, g, or t
  misc_feature (342)..(342): n is a, c, g, or t
  misc_feature (359)..(359): n is a, c, g, or t
  misc_feature (380)..(380): n is a, c, g, or t
  misc_feature (398)..(398): n is a, c, g, or t
  misc_feature (403)..(403): n is a, c, g, or t
  misc_feature (431)..(433): n is a, c, g, or t
gaaacacagttccaaatggactgttacagactgaaagctgttcacacctttcagtctgtaacagtccatttgaaacagtgttcccggtagcgcgtgttgtcgaagtgatcggggtggaatcgcggggagggatgtaagtgaggggtaagggactctattactttccacagattggtcggggaagagggatctaaacacttttgtacagcagcacatattttgtatattcatgtttatttcatgtggtgaatatgcaggcggtacactacgcactggacagcatcagaaatcctctgttaatgtggactggagcntggtagatgcttgattgttttggtctcnaaatggtgtgctataangataaaggtgaggggaagacnaagcacaccatatgtccnctgtnctgttctcatagaggaaattcaatcccnnnttatctacttagcataactcaagggcactgctgatacacgtctcccgagtaacacagacacttttttcacaagccttccacctctttgtggacttaacacctttcttataaagatcactctatactactgtcccttcccactgtgagcgcaactacgaaattaccttcgtgctggatctgcagacgctttggctacaccccagtttccatcctaaactgcacaggtggacaaatccttccttcttaaacattagccacttacctgacaccatgaaacgtgttaacttttaaccctgctgtcgacactatccaaggaacctacaccaagctaactatcaaacccctcactaccactccatccacacaaccacaccacactacacaccccttaccttcgccacatcaaccacaacccactaacaacaccacaaccacaatcacacctctcctacactcctcctcacaatatctaatcacaaataccctcccccttaatccccaccacaacacacaccacatatctcataacgataccacccatatcacactatccactaactatccc

SEQ ID NO: 482713 - DNA, 124 bp, Homo sapiens
cctcgcgaagtgcccgtcttggcctctcaaattactgtaattacaggtgagagccaccatgcctggcgccatatagactttatcaatgcaaagtacaggatatttcgacaggccactgtattta

SEQ ID NO: 482714 - DNA, 508 bp, Homo sapiens
  misc_feature (314)..(314): n is a, c, g, or t
  misc_feature (342)..(342): n is a, c, g, or t
  misc_feature (359)..(359): n is a, c, g, or t
  misc_feature (380)..(380): n is a, c, g, or t
  misc_feature (398)..(398): n is a, c, g, or t
  misc_feature (403)..(403): n is a, c, g, or t
  misc_feature (431)..(433): n is a, c, g, or t
gaaacacagttccaaatggactgttacagactgaaagctgttcacacctttcagtctgtaacagtccatttgaaacagtgttcccggtagcgcgtgttgtcgaagtgatcggggtggaatcgcggggagggatgtaagtgaggggtaagggactctattactttccacagattggtcggggaagagggatctaaacacttttgtacagcagcacatattttgtatattcatgtttatttcatgtggtgaatatgcaggcggtacactacgcactggacagcatcagaaatcctctgttaatgtggactggagcntggtagatgcttgattgttttggtctcnaaatggtgtgctataangataaaggtgaggggaagacnaagcacaccatatgtccnctgtnctgttctcatagaggaaattcaatcccnnnttatctattaccgataatccagcctcgtgatcaccgttttgagtaaaaacggtaccggctcgattcgatctgtct

SEQ ID NO: 482715 - DNA, 315 bp, Homo sapiens
  misc_feature (117)..(117): n is a, c, g, or t
aaagtcactctagagatcctatttgatgctccctctcttaaatctgagctggagatggggaagaatggaggagaaatcaataaacgtttgaccagcagaatgaattctgtctccagntgaggctgtgcttgcaattttgtcttggcttttttatttttctgaactttctctcaacataaatcctttttcctttccttttacccattaaaatgtttttactctttgtgccagcactttgtcctttggctctttctgtgtctgtcccagctcagattttaaggagaggggagcatgcaaatgtaccatccatggcag

SEQ ID NO: 482716 - DNA, 719 bp, Homo sapiens
agcgggagtcgcgtgtgtggtgtccccacctggttgtaaggctgtgggtccgggaacccgagccaaaggagtggggaagtggacccggatcgaggataacatctccctgccctgtacatgactgtacacaagctgtagctgttagaccgaaatggatgtagtgctctgtactacatcgaatggaatcgacgaaagaacgtccacaagcgagggatttcccaagggatggacggagatatacagcctagatgatactgcggatgcgtcattatactctatcacgctgcgtaagtcaatcaagatgttcccgctagacatgatggatggcttactggccttccaaaatagtcggttaacagactccattattactaaattgctctagtgggcatcaaacgtatgtcactagagttaggtgactatgagagcggtgatgacgcacatacgcggagatggtgcatgtatccgacatatacagagcgctgtctgtggagctggtggagaagaatccccctatacccgcatggggcgcactaccatgtggacaaagtcgatgcatcgtagtcggattcccagatgtggaatcctaatgttcgctcgctgaccttccttctccatatgggtcggttggctgaaagcatagactactcatcagagtctcaagagtaagttctattgtctgtctagtaggcccatttccagaactctgtagtaacatt

SEQ ID NO: 482717 - DNA, 795 bp, Homo sapiens
gctcgctgcatcctcgatctcctgggctcaagcggtcctcttgcttcagcctcctgaatagcagagactacaggtttggtgtataaaagcagatcaagctcaagatgtagagaagattagagaaatgccacagatcgaagataaatgcgatatatatggtagaccaaggatagcctcgaaatgttagccatggataatctgatggtgaactggtttgaaatgaagatcttggtcgatgtaagcttaggaagtaaatatcttttgaattgaagagaaatgtgttgggacagaaagtactttatgtaactaagtgggctgttcagaagcttagaggtcatttttgtaattttctttttaattactttagagagctagggatgcaaatgttttcagttagaaagcctttatttactttggaaatgaacaagaaatgcatctgtcttagaaactggagattatgtgatgttaggtaaaacatgtaatcgtttctctggcaaattgtatcagtaaattggaaaatgagatattaggaaaaaagcaaatgcttcttaaatggagttcatctattcttttaaaagaagcttcagatgtaaccattttgtcacattccaggtattctgggagcataaaatgtatgctgttgtgaccataaatcttacattctggtcattgggaataaactcaaaacatagattgcttgttttcatactggtacctaattttgctcgcagtgtagctcaatctatccgaaagtattgtggccaccatatgtggctatttcaattaaccacgtaa

SEQ ID NO: 482718 - DNA, 170 bp, Homo sapiens
agctcggtaccgtagcgtggcagttcacctggcaacagctattctgaaaaacccagagtagctggcaggctggcagccaggacagcctgcgcctggaggcgggcctctgcctgtatgggaatgacattgatgaacacactacacctgtggatgggcagcctcatgttgga

SEQ ID NO: 482719 - DNA, 136 bp, Homo sapiens
tgtagtgatctagaggatcccacatgactaagaaccaagtatgttaagagaaaggaaagacacaaaaaagatcatttagaattctgctatactttgagcaacttgaacaagttttcttggtgagaggaggcggtgg

SEQ ID NO: 482720 - DNA, 750 bp, Homo sapiens
gaagctccctaaagcagtcgtgtgtggcgtgctgcacatgtacggtaacttgaacatggatcatgactggtttccaagagatatcgtggtctggactagtgttagggtccttacccaatataaaacagtgtggccgttggacctgacgtgtgttggtaaaaatctcaaggatgtgtcgttaattgaagtgtatattaataggaatgatatcgaataagagaggttgctgagcagaatttcgactatcgtccattacagcaaccgtgggatgtttaaaaaagaaattagaaggaggagtaatgtgaaatccttttggagctcaatggctgattgcttttatgaacaggaaaatctatccccgtgtatctaattttaacttctcactggttaaaattgtgagaaatctgtggaaaccaaagttccacaaggctattctcatatttcttccaatttctttttcagccaacgtccaaggatatgtatcaccctttggacttaaattttgctttctctaagggaaacaggggcacaaacatgttcaccatagctccactggaatgtttttatataatagaggagagatattgtaaaatagaggactgcagccagtttccacaaaaaaaggaagagttcataaatttgacatgtttggaacccataaagacattttctttgtttggaaccattataaaaagtaagtgaggttttcagagctctatatacatttttaattccctcacggttatatgc

SEQ ID NO: 482721 - DNA, 643 bp, Homo sapiens
catcttgatctcacagaatcagaggtacagccgcgagagagagtcaatgaacagactagagtcgcttgaggagtcaggagggtgtagctgcgtggacaacagactacagccctcacaggtggctctgctcttccaagcaccagtggaagatgatcacatcccagggatcagtgtcgtttagggcaatgtgactgtgggctatcactcaagaggagtggcagcatctggaccctgctcagaggacccgtgtacagggactgtgatgctggagaactacagtccaccgttgtctcaggtagggtatggcattcctaaaaccagaagtgattctcaagttggagaaaggcgaggagccagtggatattagaggaaaagtttccaagccagagtccatctgggtgacgttacgtatgtgccaggatgggaattttaaaggaaggtagatcaccaaaggtgaatcagagctagaaaaacaatcgagccagcgtgcagtggctcatgccttgtaattcacaggactttggaagggcctaaagttgggatacatcgtcctgaggtcacggagttccagaccaggcttggccatcgtgatgaaaccctgtctctaacctacaaactcacccacaattagccgggcatggtg

SEQ ID NO: 482722 - DNA, 266 bp, Homo sapiens
tattcaaataaaattttaaggatttcagttcctgaaaaggtagggtcattaaaggtcatttccggctaaatttcaaattacagattggggggccattcctgagcagaagcatcatttctactaaatattcaggtggttaactaggggtaactggacagtatcatgggcaggagatgacgaaggcgcaatggatcagctcatagctaagaaagggggaaaaaacacaataaccaaagcaaaaaacaaaatagctacagatattatgt

SEQ ID NO: 482723 - DNA, 126 bp, Homo sapiens
gtactagaggatcccccggccgcacagcttctcgatgcaattgtcaccagtacactcgtctactgatgaatgatcgtaatagatgtagatttttgaggttatgtggcgatatcttcataagacctc

SEQ ID NO: 482724 - DNA, 546 bp, Homo sapiens
agccaccatgtcagtggcggccgcgtataaaatggacacatcggaagagtgctggactgattgctccaggattcagtggccgaatgtcgtctagttccatgtcaagcgactcgtacttgggcctcccccctggtcggggagtgactcgggggtcgggacccggcaacctgaaaggaaaagtcagcgcggtccaagaggtgccgggtgcacggtcggccctgcgtagtaatgccacagagatttcagtgtcaactatcaacaatggagggaccgagaaactcccgagggagcggggccgttcagcctggctgaaaagccgcagcacatcgccagagcatcgcagcgatcggcccacagctccagaaattaactccgtgtcgcgagccggtcacggatcgcccctacaacgaacgtcgaagggaagcagcatagaaaggacggccatggcgacccactcatcccaaggacatgatccggaccactctgggctactcccatacttagggaacagggcctttggaaaattggtgcttgaccatggtggct

SEQ ID NO: 482725 - DNA, 521 bp, Homo sapiens
ggttgactatagcaatgggggccatgggacccaggtgtgtggaacccccccacggtatggccggtatatggcaaaggggtggcaagcccccccttatggggttagcgggcacccatggaatccacagggatttggagtagatcaatccccttttgcggcttggaggggtggatttggtgttcaccctccccaaggacaagctcccccccctgtaaaccctcctcctaaccaagccggatatggtatggcaagttccccaccccagtgacccgggcctttaaaaaaaaattgtaattcatgaaggggttcgttttcctgtgcccctttgaagccatgaaagtagccatcggaaaatgaaaattttttttttaaaaattgaaaggtttggcccctttagcccaaatttgctttggtgagggaccggggttttttagtttcccctttttaagtttttgttcatgagggatatgaccatgttttttttttttggccaaaaattaaaataaagtcaataaagccca

SEQ ID NO: 482726 - DNA, 717 bp, Homo sapiens
tgccgaaacggctcgacagtgtggtgcaattcgcggaacttcggtcccagctcggttttcggctaagtttcgacgtggaactcaacaggggaggctggacgcttgcatggcgcttgagagatgccatcgtgcctggctcaaataagcgcttactggaagcgaagaggagcagtactgaacgcggaagaggtagctgaggactgggggatttggagcgatcatcgaatgaccatggcggttgaactccagagggacagatgctagcttaaactggctgagggcttggaactactggaagatgatgaagaggagaaggatgatgatcgacacatgatgagagagcaaaggatagagcgtgccacatcctgagactaccatcatggtgttagagtcatgctgacgtgtctgatgactgcatgcactgagagatttagaaaccaatggatagacttgttgatgtaccagagcgattcacaggttcgccaggactactaccagaacgagtgtattgaccaggagcacgcgctgcacgagaggtgacaatggaccagaatggggagttttcagaagcttggatggtggagaagatgccgtacatgcggcataaagcattgctgggacatgtaggtgactaattgaatggagcaagacgaaggtgaccttggtcaagaacatgaagctgaggaaatgggaacttgaaaatgtgggacttgataa

SEQ ID NO: 482727 - DNA, 895 bp, Homo sapiens
  misc_feature (895)..(895): n is a, c, g, or t
acagaactactcatatttaatagtcctcttcgaaagcagacttatcacccacacttggtatcatcacaccgatgaggcaactcagccagaacgcctgaacgcaggcacatagcttcgctattgcatacaccctagtatggctcccttcccgctactcatggcacctaatttacagctcgatcaaaagcgcatagggtcactaaaatattcgtactactcagtctcactgcccaagaactatcaaactcctgagccaacaacttaatatgactagcttacacaatagcttttatagtaaagatacctctttacggactccacttatgactccctaaagcccatgtcgaagcccccatcgctgggtcaatagtacttgcccgcagtactcttgaaactaggcggctatggtataatacgcctcacactcattctcaacccctgaaaaacacatagcctaccccttccttgtactatccctatgaggcataattataacaagctccatctgcctacgaaaacagactaaaatcgtcattgcatactcttcaatcagcacatagccctcgtagttacaggcattctcatcaaacacctgaagctttacgggcaggcattctcatatcgccaggaatcaatctcattatattctgctaggcaatcaatagacgcatcacagtgatcataatccttttcaagattaaatctatccctatagttttggatttacaagctgtaactgttacccatataacatggggatcttgggtgtaaccggtccgtaaatatcccataggaaatagaggcgttcctattacacaagggcgccctaaaacttcaagcagtgtcatcttcccacatggaaaagcgttcgcgcgggtgtctctacgacacacgn

SEQ ID NO: 482728 - DNA, 410 bp, Homo sapiens
  misc_feature (146)..(146): n is a, c, g, or t
  misc_feature (157)..(157): n is a, c, g, or t
cagtcaagcgactatatactcatgtcatacttgacacgaacagtacctaagatacaggcaactatttatagatccatataaaaatagggttacgacctcgatgttggatcaggacatccgatggtgcagcgctattaaaggtcgtntgttcacgatnacagtctacgtgatctgagtcagagcgcagtatccaggtcggttctatctacttcaaatccctcctgtacgaagggacagagaataaggctacttcacaaagcgccttccccgtaaatgatatcatctcaacttagttattatacccacacccacccaagaaacagggtttgttacagatggccagagcccggtaatcgcataaaacttaaaactttacagtcagaggttcaattccttttcttaacaacata

SEQ ID NO: 482729 - DNA, 85 bp, Homo sapiens
ggatttgctggtgcagtacaactaggcttaatagggacatgcaaaagaatgaacttgagctacttcttcacgctgtatacaaaaa

SEQ ID NO: 482730 - DNA, 1145 bp, Homo sapiens
  misc_feature (28)..(29): n is a, c, g, or t
  misc_feature (55)..(55): n is a, c, g, or t
  misc_feature (59)..(59): n is a, c, g, or t
  misc_feature (76)..(76): n is a, c, g, or t
  misc_feature (78)..(78): n is a, c, g, or t
  misc_feature (82)..(82): n is a, c, g, or t
  misc_feature (99)..(99): n is a, c, g, or t
  misc_feature (115)..(115): n is a, c, g, or t
  misc_feature (124)..(124): n is a, c, g, or t
  misc_feature (143)..(143): n is a, c, g, or t
  misc_feature (154)..(154): n is a, c, g, or t
  misc_feature (163)..(163): n is a, c, g, or t
  misc_feature (241)..(241): n is a, c, g, or t
  misc_feature (448)..(448): n is a, c, g, or t
  misc_feature (528)..(529): n is a, c, g, or t
  misc_feature (546)..(546): n is a, c, g, or t
  misc_feature (549)..(549): n is a, c, g, or t
  misc_feature (615)..(615): n is a, c, g, or t
  misc_feature (619)..(619): n is a, c, g, or t
  misc_feature (667)..(667): n is a, c, g, or t
  misc_feature (689)..(689): n is a, c, g, or t
  misc_feature (702)..(702): n is a, c, g, or t
  misc_feature (823)..(823): n is a, c, g, or t
cggttgacagattggggttcagaaatgnnggcttggggattccttcaaaatgtgnaagngatttcgcccccagggnantgcntggaagattcaggagcntgggggccttcgttantctcactgnttctgagttgcccaggagnccactggcagntgtcccggngaagagaagagacacattgttggaagaagcagcccatgacagctccccttcctgggactcgccctcatcctcttcctnctccccttcctggggtgcagcctaaaaggacctatgtcctcacaccattgaaaccactagttctgtccccccaggagacctggttgtgtgtgtgtgagtggttgaccttcctccatcccctggtccttcccttcccttcccgaggcacagagagacagggcaggatccacgtgcccattgtggaggcagagaaaagagaaagtgttntatatacggtacttatttaatatccctttttaattagaaattaaaaacagttaatttaacttgaacagagtagggttatnntgcagtattcgttggtnaantatttaatttcaactatttatgagatgtatcttttagctctctcttgctctcttatttgtaccggntttngtatataaaattcatgtttccaatctctctctccctgatcagtgacangtcactagcttatcttgaacangatatttaatttntgctaacactcatgtctcgtgccctccccgatcccctggctccgccagcacacattcctttgaaataaaggtttcaatatacatctacagtactatatatatattgtggcaacttgtattngtgtgtatatatatatatatatgttcatgtatatatgtgattctgtattgaatagcaccgttggcgtagttctgaacaccggtagtattgtaagccctcaaaaaggacgaacccttctcctgagacattctacctgtatgttaaaaaacaacagaatgaaaactttctcccattgataacccggggcctggggtccctgtcttgcttcccggggggggcccggtgaccaccttttggttccctttaccgcgggctacttcgatcctgcgaatgagcggggctctacccgtgcctggtgtgccagggctccgtccaaccgaga

SEQ ID NO: 482731 - DNA, 451 bp, Homo sapiens
catggccttaatcatcttatgctttgtcttcactgttcttcaatttgtgcccttctctagtgccagccatgtggtaggccctgaagaacaccctcatggagagcatattctgtagtcccagctactcaggaggctgaggcaggagaatcacttgaacctgagaggcggaggtgcaatgagccgagatcgtgccactgcactccagcctgggcaacagagtgagatctgtctcaaaacaaaagaccctgtctttacgaaaacaaacaaacaaacaacaacaaatatatatagagagagacagagagagagtgtcaggtatggtggtatgtgcctgtggtcccagctgctcaggtgactgaagctagtggatcccttgagcccaggagttcaaggctgttgtaagtcgtgactgccatgcactccagccaaggagacagtgagatcctgtctc

SEQ ID NO: 482732 - DNA, 736 bp, Homo sapiens
gagaaagacattgcagcagtatacctattattcgccgcatgagctggagtcgtaggcacaggtctaagcctccttattcgagccgagcgtgggccaggcaggcaaccttctaggtaacgaccacatctacaacgttatcgtcacgagcccaatgcagtttgtaatcgatcttcgttcagtgagctaatacccatcgataatcgggaggcttaaggcaactgacagtagtgcccctaataagtcggtgcccccgatatggcgttggccccgcaataaacacagataagcattcatgactcttacctccgctctctcctactcctgcatcgcagtctgctatagtggaggccggagcaggaacaggttgaacagatctaccctccctatagcagggaactactcccaccctggagccatccgtagacctaaacatacttctccgttacagactagcaggtgtctcctctatcttaggggccatcaatttcatcagcaacaattatcaatataaaagccccctgccataaccaataccaaacgcccctcttcgtacggatcctgtcctaatcacaagacagtcctacttctcctatctctcccagtcctagcgtgcgtggacatcactatactactaagcagacgcaacctcaagacgcagcttcgtcgaccccgcggaggaggagatcccataaatataccaacactattctgattttcggtcaccctgaagttatat

SEQ ID NO: 482733 - DNA, 119 bp, Homo sapiens
cacggttgacagggttcttctacaccgctgtagtaacagaagaatcacacatcaatcccaaagcccttttacatcccttctctttttgggcttgtggctgctgttggcactgttggact

SEQ ID NO: 482734 - DNA, 113 bp, Homo sapiens
caataaagggtttttttttaaacccaaaaacaaaaccaaaagcctaatgaaacccttataagaaatatataatgaaaccgggaaactggattaaataatttttcatccatata

SEQ ID NO: 482735 - DNA, 454 bp, Homo sapiens
  misc_feature (20)..(20): n is a, c, g, or t
  misc_feature (39)..(39): n is a, c, g, or t
  misc_feature (56)..(56): n is a, c, g, or t
  misc_feature (182)..(182): n is a, c, g, or t
  misc_feature (357)..(357): n is a, c, g, or t
  misc_feature (440)..(440): n is a, c, g, or t
cagatttttgatgaccatcnccctgaaccgtcatgtgancaactaattaaatgaanatttaaatgcctatggggcatttttttaaatgcattgatgtaaataggaaaagttagagaaaagtattaatagaacatgtggaatatggaccatgggaaaaaacaaacgcactgctgggtgccagntgttacgcctgtaatcccagcattttggaaggccgaggcgggaagatcacttgaggtcaggagttcaagaccagccctggtcaacatggtgaaaccttgtgtctactaaaaatacgaaaaacattagccaggcaaggtgtcacacgcctgtagtcccagctactcaggaggctgnggcaggagaattgcttgaacctgggaggcagagattgcaatgagccaagatcatgccactgcacaccagcctgggtgacagantgagactctgtctc

SEQ ID NO: 482736 - DNA, 218 bp, Homo sapiens
agctatgccgggaccggtgctggggagtttccagtcccggctcggcttgggacgcagctgtgcgcaggcgtgtgtcggtccggactttggagtgggacctgggccgtgctgggtcttgggcgtttggtgcacgcggagggctggctggggcttgttctgtcttgggacgcttgggaatgcggaggactggctggtggctgcacatctgtcaaaggggc

SEQ ID NO: 482737 - DNA, 469 bp, Homo sapiens
cacgaggcgcagcacctggtctcgatcggccagggcctcgaggagatcgcgagcgaggtcggctacgccgatgccgcgaccgtgcgcagcctgctgcggcgcaagctggggcgcggggtgcgggaactgcgctcggcgctggcataggtcgtggggcacgatctcttcgtgtccgccaatggcgcgatccgcaaggtatccgaattggcgcgtcgattcagtgaacgcgcaattgctcttcttctttcatggcccggcgcatcggcgaaatagcgctcgctcattcgacgcgcgccgtgttgcgagcgcattccacgctcaggcttcgccgcaattcgagaggtcggcgaaaggctcttattcgtaatgagataaattctcattcgaatttattgcgtcgtcagagggcaacaagtttcgcaaaccaaaggtaaagttgccgtaaatcgatagtgcgagtcattatcat

SEQ ID NO: 482738 - DNA, 91 bp, Homo sapiens
cgtccgatggaggcactcacaacacaggaggaagcgccacacaactcagctcctcgctatctaggaggccattggtatggtcggcaagtga

SEQ ID NO: 482739 - DNA, 249 bp, Homo sapiens
atctaggaggttacgtaacgccttccccaacagatgatatagtctgccttactcagcacttacattctgagtcagcaattgacagaatcaaatccccagtcatggtgaactgatagaaacgaaccttcttcacagacacattgatggcactctatcctaataccctttatctgtcccggcatccttatattgtctccatacaaatgatgagacagccacaagggacgggatagcagtggactgtcaaga

SEQ ID NO: 482740 - DNA, 394 bp, Homo sapiens
atggccaaacagcattggaaggctttagccctgctcctctaaattccatcctgtaaagaacaggagtcaggagccgttggcggaagacagcatgtaacccaggactttgccggtgcaaaatatgagcaatgccatgtttttgcagaaaacgcttagcctgagtttaataggaggtaatcaccagacaactgcaaagtgtggagcactgaccaggacaactgacctgtctccttaacatagtccatatcaccacaaataacacaccaaaagggagaagagatattttgggttgaaaaaaagtaatcttttggttgttgccattgatggtggtgacatggacttgtttatagaggacaggtcagttttctggctaagggatctacattctgaagcc

SEQ ID NO: 482741 - DNA, 725 bp, Homo sapiens
gggagatgacacgccgaccagctgcagagaggaactaccctctctgctgacagctggacacttatcaggagacctgcctgcagagaggagctaccctctctgctgagagctgaagagaagatgggccaaccagctgcagagaagagaggagctaccttctctaccgaacacggaacactccttgggacgacctgcccagcagagaggagctaccctccctgctgagagctgaacactcatcgggacaccctggctatgcagaggagctgcacactccaggtctactgtgagctgttctattgttcagtaaagctcctcttcgtcttgctcacgctccacttgtctgtgtacctcattcctcctggacacaggacgataatctgagacctgccaaatggcggggctaaaagagctgtaatacagacagggctgaaacacgccacttgctcgccattttgtgagtgacaaggacgagagaagtgagaaggagagaaggagaggagctgcagctctttgggaaacctagacctgggagctccccaagccaggctgtgactacccctttggggctctgaggttcctggagtctccaagcttctgggcaccactgtgttcctggtgccagcgtggaagctgcttgtggtgcagctggccagcagcagctcgcagagatgcgacgcttgtgcagactggagtgcccgcccacgcagcgtcaggttcgactg

SEQ ID NO: 482742 - DNA, 1141 bp, Homo sapiens
  misc_feature (392)..(392): n is a, c, g, or t
gcgctgaagccgcgccggcgggcgagggctctgaagctgctcgcgcgcagtcggaggcggagaaggacgaagactgagactgacacttctgctcccggcgccggatttacgcggggccctcctaagacggccctagagcaacgcagattcagacgtacagaggtagagagcgggcgcctatatgcacgctctcatgcacatgttgctggctgctgaggaagaaatccgttcattcgtctccaggtttcgggaatggagcaagggggaccactttccaatggaaaggccaaacgagagatacggacaggcatattaaccagctggcgagattttcacgagagtaatttggaaaataatggaggggcgaaacaggcagactcctggggagaganccaggaggacaagaacagtacccagcaaaagcaacgacacaccggggataggacagagagccggaggtaaccactcctcgctggaggcacagcgagacggacgcaaggatatgggagcgagcacgaatttggcagagcacggagaatcaaggggcacaaatagccagggaggatacagatataactgggcacacagccaggggggccaaacaattgggaccctgtgtggcaccagcggagcaagtaggagaccaactctacaggaacacagtaccggggacacaccgacagatggagccatgagcaccactcaaggggcagacaaattcgaccaacacctaaaggatatactctggcgcaactacgacgcgtcacattgaccaaacacttggcgacaaaagcctccaccacacgggccacggtgacacaccgtattcgacgggcacgccagcaaacagagaatccacccgacaacgcagcacacaagtcgccgcaacagggccggaaataccactcgcacccgagaaacatgattcacacacaaccacggggagcagacacgcgcgaccatgtagtacccgacacgccacgtcagcgccgtgggaattcaatgtgagagacagccacagctgctgcaccagaggtcgtcaaaagaacacagaaggagacgaggggcagacagccacgatgcaaccaacgggagcacaaggggtggcaacacgccgcttagagaagcacgagcacaccaa

SEQ ID NO: 482743 - DNA, 416 bp, Homo sapiens
aatggaatcgatccccactcgctgttctggatcaaaacgcgacttccccttcgactctgcgtgggttgtttcagaggtcgagcacctgatgcgtctgtcggccgtcaagtgtcgtacgccgtgaacggaagctcagcattcttctactggtctcaggtagattctggagtcattgctgttgccaggttggcatcaagtgcagtcgtcgaagttgatgtcgtacccgctgcgcaagttgacgctccatctgcgcacagggcactaccagtgacagctcaatccatctttctatagcactcacttccctgaggaggctcccctatgcaggtcatggcatcaacaattcaaaaagtggagatttctgaaataaaagcgctcgaccctgtgacatgcatcttgcaagatttgggtcgtta

SEQ ID NO: 482744 - DNA, 1494 bp, Homo sapiens
  misc_feature (416)..(416): n is a, c, g, or t
  misc_feature (1245)..(1245): n is a, c, g, or t
  misc_feature (1493)..(1493): n is a, c, g, or t
tctgagaagggagtctcgctcgtgtacaccaggcgggagtgcaggggcgcgatctcggcaaacctcgcgcctttcgtggggtacaagcaatttctccgtgccttcagccctccgtggaggtagcgtgggacatatagggtgcagtgccaccagtgcccagctaattttgggatatttataagtagagcacggggtttcaccagtgttgggcccaggatgtggtctcgagtcctccgtgacctcagtgatcacacccaaccttcggccttcccaagaggtgtcgtgggattctccagggcggtgagccactgtgcgccgcggtccagcccgtggtggatcttctacaaagaaacccttcggcccccagtgtgatgtggctgtgatatcttcaacctcccaagcgtggtcttcgtatngcacattataacactctccttctcctgttggggaactccctgtcttctcctgtgaagcagccatgtggtcctatggtgggggagataccaggggggacagttaccctgtgtaagagtggaacccctgtgcgaccccacattagatcctctgtgtgcccaggagcagagggagtagaattcacacagaaagcccggatacatgggaggggagacaatcccctcacattgtgacctaagcacacaaggcgccccatatcacggaaaaagcacaagggagtggggcactgggggcatctaaccttacagcgaggggggcatcctcccacaaaagaaaccaatccaagggaaggtgggaatatacaagagcagcccccctgggagggggccctgcgggcgtatggaagcggagaggggagcccacacaaatcgaaacgatccccgagtgggagcctacataaacgccccactcggcggcaacaagggcgtctaggcgatcatggatatactaacgcgagcccactactcattggggtgcacacacaacgtaggccagtgaaaaaaagccccccaatatcacggtggaggcacccccctttcagggcaaccataaagacgcgggggttacccacaaggtatcccccccaaggtggttgtgtacccccacggacaacggggcgcgacgtagtacacaggagggaaacacccacgcgtcgaaaatataacaataaagagaatctagtagggcaccaaatgggatattatcaccggaggcgaatatggagataatgcaacacacgatgttttgtgagcaccaacaaacagaaacaangtggggcggcataaaataatacaatgaggcgaggcgagtgaacaatcccacacttgattaaagatggacacgatcgcaaacaataaatacaagagtgagtcatacgatagactaagagatagagagcagtaaataaggtcggagcagaaacaacatacagtagttctctcgtatgtcttatcatgaaatctgcatcatttatagacgaagtaaagcgaagatcgaaagcgaagagagaggagaagagna

SEQ ID NO: 482745 - DNA, 862 bp, Homo sapiens
  misc_feature (4)..(5): n is a, c, g, or t
accnnagaatggagtagtgtaagtaagaaagaagaaaagagaaacgcgtataatagatatggggcgcaatcttacgcatattattgtgaacaacgttgtccagtgttgccccccgcgggaccacacccaatgtagttcacactgttatccgcctgccgttatgtccggttcaccccatcccttgtaactccccgtaacataccgggcactcgaatatttaaaggccggcacatgtccgtgaagggcgaaaacggacattgtctttcttccaaaggccgtccttcacaataccctgggttccctaattcaatccggttccacaaaacaaaagctgctgaaaaatctcattatgcccgcgagtgccagcattcatctttacgaaggtgacatccttcgcacgtcccaagatgggaagtccttacccccatgcacttatgtagaaaaacacccccctcacacattttttcaaaagacacccgccctcgtcaattggtactcaccaattccgtttcatatgaagccacagtggcgactctaaacatgatcgtagggagcccaacaagtgtattccagggtgcacctttggaagcccgcagggtctatatatatcaatttttgaggggggtgttgagttgatgtccccattaaacacggtgcttgttcagcgtgtgtacacgtgtgcacacgcactgggcaataaatctgtggtacccacgcttttgtgtaacccaccacccaagccccgtataaggttcagtagggtgcgagtctcccacacaagcgaagtcagggggagttaagcgaaaaagttttgggaataagaccttcttaaagaaaaaaaagagaacccgcctacaaaaca

SEQ ID NO: 482746 - DNA, 538 bp, Homo sapiens
gaggatccccgtctggagcaagcggggaatgtcttatcttcgctggttcaggggacagtttggctaaatatagaattctgggttaacatggttttggttttagcactttgaatatatcagccacggggccttcttacctccaagatatcatatgagaaaagggctgataatcatatggaagatcccttatatgtgatgaatggttacggtttggctgcttttaagattccatctttaccttgggctttggacaattggaatatgtctcaggatagttctcttggagtttatcttactggttgggtgagcttctgggattggtagagtcaggtttttcatcaaattggggaagttatcaaccattacttcttcaaatacactttcgggccccttcttctctctgcttcttcggtgactccggcagattatgtgggtcggctggatggtgtcccttgagttccttaggcgctgttcactttttttcattcattttcattcattcttctttcggtttctcaaactcagtaattggaccttc

SEQ ID NO: 482747 - DNA, 241 bp, Homo sapiens
cactcctggatgcggtcggagccaaacgataggctacttgctccctcaacatccaaatctcatcgccctcccaataataggtacccggcctggccttggcggggtcttcaaggatcagccccgcctcacgcaattgctgcacaaaatcaccgacgtaccgaggcgcaagtcctcggcagtcagctacggtgaagccgccattggtcaatctcggcgtaatggccctgtccagtgccaacag

SEQ ID NO: 482748 - DNA, 321 bp, Homo sapiens
gtaagcgggctagagcggctctccaaaagtcaattcaatccccaatgagatagaaggtagaaactcgaataatgcttcagagaaagatcaacatgtgtcacagattccctcccagcttgttcggctctaaggcaggtgattcctttgttccttcagactgaacaccaactcttgattaaaatttggaaactactttggaaaggatgtgatggtctgtaaatatttccagggcaacccttcataaaataacaacattcactagtagtaggaagaggacgcaggtagaagagaaaaaagaagcctcctaaagcttcccaggac

SEQ ID NO: 482749 - DNA, 840 bp, Homo sapiens
  misc_feature (211)..(211): n is a, c, g, or t
  misc_feature (260)..(260): n is a, c, g, or t
  misc_feature (263)..(263): n is a, c, g, or t
  misc_feature (271)..(272): n is a, c, g, or t
  misc_feature (277)..(277): n is a, c, g, or t
  misc_feature (280)..(280): n is a, c, g, or t
  misc_feature (282)..(282): n is a, c, g, or t
  misc_feature (285)..(286): n is a, c, g, or t
  misc_feature (289)..(289): n is a, c, g, or t
  misc_feature (291)..(291): n is a, c, g, or t
  misc_feature (297)..(297): n is a, c, g, or t
  misc_feature (303)..(304): n is a, c, g, or t
  misc_feature (306)..(306): n is a, c, g, or t
  misc_feature (308)..(308): n is a, c, g, or t
  misc_feature (317)..(317): n is a, c, g, or t
  misc_feature (322)..(325): n is a, c, g, or t
  misc_feature (329)..(329): n is a, c, g, or t
  misc_feature (332)..(334): n is a, c, g, or t
  misc_feature (336)..(336): n is a, c, g, or t
  misc_feature (338)..(339): n is a, c, g, or t
  misc_feature (344)..(344): n is a, c, g, or t
  misc_feature (347)..(347): n is a, c, g, or t
  misc_feature (349)..(349): n is a, c, g, or t
  misc_feature (354)..(354): n is a, c, g, or t
  misc_feature (360)..(360): n is a, c, g, or t
  misc_feature (371)..(371): n is a, c, g, or t
  misc_feature (379)..(382): n is a, c, g, or t
  misc_feature (390)..(390): n is a, c, g, or t
  misc_feature (395)..(396): n is a, c, g, or t
  misc_feature (399)..(399): n is a, c, g, or t
  misc_feature (405)..(405): n is a, c, g, or t
  misc_feature (413)..(414): n is a, c, g, or t
  misc_feature (419)..(421): n is a, c, g, or t
  misc_feature (424)..(426): n is a, c, g, or t
  misc_feature (430)..(432): n is a, c, g, or t
  misc_feature (437)..(437): n is a, c, g, or t
  misc_feature (440)..(440): n is a, c, g, or t
  misc_feature (462)..(462): n is a, c, g, or t
  misc_feature (488)..(488): n is a, c, g, or t
  misc_feature (492)..(495): n is a, c, g, or t
  misc_feature (502)..(502): n is a, c, g, or t
  misc_feature (507)..(507): n is a, c, g, or t
  misc_feature (515)..(516): n is a, c, g, or t
  misc_feature (518)..(518): n is a, c, g, or t
  misc_feature (522)..(522): n is a, c, g, or t
  misc_feature (527)..(527): n is a, c, g, or t
  misc_feature (568)..(568): n is a, c, g, or t
  misc_feature (572)..(572): n is a, c, g, or t
  misc_feature (577)..(577): n is a, c, g, or t
  misc_feature (676)..(676): n is a, c, g, or t
  misc_feature (696)..(696): n is a, c, g, or t
  misc_feature (736)..(736): n is a, c, g, or t
  misc_feature (837)..(837): n is a, c, g, or t
tccgagaccagcggatctcggcaaaccctctttctcgaccacccacctaccattcttggaaccatggcggcagtggcggcggcctcggctgaactgctcatcatcggctggtacatcttccgcgtgctgctgcaggtgttcaggtactccctgcagaagctggcatacacggtgtcgcggaccgggcggcaggtgttgggggagcgcaggnagcgagcccccaactgaggccccagctcccagccctgggcggccgtatnatnaggtgctnntgtgnatntnggnnagnangggagnaagtgnngngnaggaatgtngggtnnnntgtnttnnntngnnagagnagnanttggnaaggtnagtgagggganagtagaannnnggagaagnagtannganaatgangaagatannagatnnnttnnnaaannntttgnaanggtaaaaataaggggaggggtngggagggggggggggatagggggagnagannnntgagatntgggnataggcanngnattntgatntggacaaagtcgggacagcaccatcccagccccgaagccanggcnatgcnagcaggccccaccatggaaatcaaaacaccgcaccagccagcagaatggacattctgacatcgccagccgacgccctgaatcttggtgcagcaccaacngcgtgcctgtgtggcgggantggagggcacagttgaggaaggagggtggttaagaaatanagtggggccctctcgctgtcccttgcccagggcacttgcattccagcctcgctgcatttgctctctcgattcccctttcctcctcactgcctcccaagccnacc

SEQ ID NO: 482750 - DNA, 370 bp, Homo sapiens
  misc_feature (299)..(299): n is a, c, g, or t
cctcccaaagtgctgggattacaggtgtgagccactgtgcctggccaggaggtcacttctaaatcttcctgggggctatgcacggtgcctcatgcctgtaatcctagcactttgggaagctgaggtgggaggatcgcttaagcccaggagtttgaggctgcagtgagttatgattgcaccactgcactccagcctgggtgacagagtgagaccttgtctgtaataatagtaacaatcaccatcatcatcatcatcatcatcatcatcatcatcatcatcatcccagcactttgggaggncaaggcaggcggatcacttgaggccaggaatttgagaccagcctggccaacatggtgaaaccccatctcta

SEQ ID NO: 482751 - DNA, 447 bp, Homo sapiens
ttaaccaaatgctttcctgacagcgtcttggccagctcgattgcttccagaccttcacgcactgaaagaggtgtgtgcagtgtccgcaacaaggtagccgggtcggaaatcccggtgaattttgcgaaatcgtcttcatgcatcagcgcctgctcgagaagtaggcacgcagcttcgttgatatgtggaagcgccttgccaatgctttcggtgagcagttctgcactcacctggttggttctaccctggtaaataggaacaacccttccactaccctcagcagcgaccagcgttggattggacaaactcaggcggccgtcgaaggtagtcagttcgccgtaaagattcaccactgtcccaagctcaggattcaaccagctttcgatcgctggttttccaatcacattgatctgaaccctttcgccacgggcgtcagctgcccggagg

SEQ ID NO: 482752 - DNA, 264 bp, Homo sapiens
acgaggggctgaggccacagccgcatcttgatcaggctttctcaagccgtccatcggccccaccagatttccattgtttcccatgaggtccaacacatgagaccccacctccctccctgcctgccagccatagaattgttggagcatagagcccttcctccccaggcataagtatgtggagctctgctttggcagtgccccgcagaggccacgcctatatattctgtttctgttgtattgtttttaacaactttactttgcaca

SEQ ID NO: 482753 - DNA, 173 bp, Homo sapiens
catgaggatccagagccgctgtaaacttaagggagtctgtgggaacaccaagaagccggaatcattcacagaaatgcggagaagccgaactagagaacaccggggcgcagacaccacggctggaacacagagacttggcaacatgcgtggatttgaaccggcggtgcggcgtg

SEQ ID NO: 482754 - DNA, 987 bp, Homo sapiens
cctgtattaaaatttccccgaaataaaaaaagctgtcttttaaaatccaaatctggccctttgaaaccaatccgtacttggaattttccttaagattcattctgaatcccccccctgaccttgtgtcccccaacccaccattatttccaacatgagtaaagccctactttgatgcccatgctagaaattgatcccccataatactaaaattgttcatttccaaaaagatccatttggataccagctatgtataaaatggaaaataaaaattattctatttgcatgaatagttccgactttcccctacccccgccacagccgttacttaaattaggatcttaattttgccatggataaaaggtctcaaggttcatattaattatagctcctcttaaaccctcgtctcttctaagatttttcaccccccgtgattttcccaaaatttgggaaaatgtaaaacccacttgaataataatttaattgataatgttggcttaccacagttcaatcctttctcccacaaataatccacttcacgaagagaaatgtgaaagctctgttgttaaatgagaagagcttataacccctcttgtggtccactttgtggtgtttgcaaaattcacaataccccccacattataaatttctgaacctcatatatgtttgcactcacttaaactttcctaatattacccacgaaccactataccctcttttcacagtaaaagttggcccaatgggatatggccaccttttaatttttgaaaaaatatgtaaccactgaccttaatatttttataattttcacgaattagaaacataggaagggaaaatgttttaattagataagtccacctttttatgtgtctgtagtggtgtactataatacgccaattataaacgccttattaaatgtttataataatttttaatattacctacattatgaatttaacttaaattaagtgtgagttgtatattttttta

SEQ ID NO: 482755 - DNA, 1391 bp, Homo sapiens
tgtctcttctcttgtctttctgcgtttgctcgtgttccttggtcttttcctcgtcgtgtgtgctcttcctgtctccgtctctgctcttcgtcttcgcctagcatctctccgctagcccgcctgtgtcctcctcgtcactgtggcccgcggtgtgccgcgtcccgctccacctgtccgttcgccttcttcggtgcctcctgctgctctcatcgtcgtgctgtcttctttcgtcctggtgttcccggcgggctctgccgtgtgcccgtatcttctgttttatatggctagtgtgtgatgtatatgtgtgggtgtggggttgtcttttgtttatatatgggtgcgatcgggtatagtgtgtgtggtgggtggtggtggtggtgtccttaatgaagctgactcatatttgggatgtggtgtagttgtggggtgtgtattggacagttagtgtattgggggtatgtagtgggtgttttgcgtgctgcgcttggcgttcacgtccttttctcatgtgttgtcggcatgtctcaggatctttcttccgtggctgtctgtgttcagctggtgtctggttggattcctggctatcgtgtctatcagtcttgggtacctgcccaccgtacgacagtgtcttgtgtttgacccaagtgtttgtcctggcatcgtgtgatgttgtgtcaatgtcaatctggtgctttgcagtctccacagggagcatggatgtcttgcttgctgcacgggtccattcagacgatctgccaccatgcaaagtcttgggttgctcatcccatgcgcatcgcatgtcgcgtccttccagtctacctcgccctaccggcatcgcaccggctgtctcctgggctgtgtccaggccagaggcagtttgaggtgtgtctgggtgtcacttggagtccacttgggagcctccttggaggacattcgtccagtgctctgtggtgctttgttccctgatgacggtgatgatggtgtgagagtgcttagtagcaggtgacgcctgtacggaaaggggtacatatccaatggccgcctgtccatcacgctcacagcacaaatcctgctcattgcagtctgtgatgtcttggcatcggggtggctcagtgcagagtggagcctcaatggccccctcggcctcctgggcaatctttggggtacacatggatacatgtggtgttatgtccgctccgtcatctcaaccccaggttatggggtatcacctgatcccatgctggctatcaggcccaggggcaccttcggctggtcctgtggggccctggatcggtggcccatgtggtggatggggctgctcctggctgtggttgtgcgcccggggccttgggatgcaggcctggtcacgctaacgtggcggcgaatgtgtg

SEQ ID NO: 482756 - DNA, 753 bp, Homo sapiens
  misc_feature (1)..(1): n is a, c, g, or t
  misc_feature (233)..(233): n is a, c, g, or t
  misc_feature (248)..(248): n is a, c, g, or t
  misc_feature (269)..(269): n is a, c, g, or t
  misc_feature (436)..(436): n is a, c, g, or t
  misc_feature (465)..(465): n is a, c, g, or t
  misc_feature (534)..(534): n is a, c, g, or t
ntccgagagaggcgccctctcgtaatatggggtgtgtcgctctctccccgggtttcctcaaatcccatttgggaaagactattttgggggcccccaacaaaaagagctcttctctcggagagggtttttttttggtgtgttctctctgggggaaaccactctcccgagagggacacacagagaggccttctataaattccccactcgtagagttttttttggagttgtgcgcnctcggagatggagtncccaccacgccgcgaggagcnccccctcggctttattacactattactaacacgcctgtggagcacaccctgcgcgctctgtgggcggccccccacacgctgggttgtgtggctcctcacaggacacacacagcggggtttggtgttctcggggccacataccaaggtgtaaagaatcacatgctggnccctcgggggagacccaacacactcgtgntataaagagattggggcccccctataagagaggccccctcgcctcgagaccacacgctgaggccacatntgtggagaaccccacaagaatgaggatactggcccacccaccccccacttcctcacgagaccacgaaagggtgtggaagccacgagccgccctgccactgccccacagccacagtctccacaccacgcactaacacacgggtttcccttggcacgctgtatttctggagtctggatgttgctcttctttaagaccctttaattaaattttgtaccaaga

SEQ ID NO: 482757 - DNA, 357 bp, Homo sapiens
tttttttttttgagatggagccttgttctattgtccaggctggagggcaatggcacgatctccactcactgcaacctccaccacccgggttcaagtgattctcctgcctcagcctcccaggtagctgggattacatgcatgtgccaccacgcccggctaacttctgtatttttagcagagacggggtttcactgtgttggccaggctggtctcaaactcctgacctcaagtgatctgtccaccttggcctcccaaagtgctggaattataggcatgagcacaacacccggcccaagattttttttaaagaaagaatactattttcatatgtgtacagtcacatttaaaatatactac

SEQ ID NO: 482758 - DNA, 149 bp, Homo sapiens
tacccgggcatgtgtatggcggatcacaggcatgagccacgatgcaatgcttcacactggaccaagccagcaacaacttggaaggccatgagacaagaagtggaactgcttaagatcactcgatcatcaatgatggaatctaactgagc

SEQ ID NO: 482759 - DNA, 115 bp, Homo sapiens
gagaagccatgagcagcaaagacactcgtgcgacaccccgttacgaggcggtgcgggaaggcccccacgggacccagcgcaagccctgcaagttccctggagacggcgggagttc

SEQ ID NO: 482760 - DNA, 208 bp, Homo sapiens
gcggccgcctactactactactgctcgaattcaagcttctaacgatgtacagggacatggtcgtgtgtgcctgtagtcccagctacttgggaggctgaggtaggaggattgtttgagcccaggagtttgaggcggcagtgagtcaggatcacgccactttactccaacctgggcaacagaatgagaccttgtctctaaaaaagaaaaa

SEQ ID NO: 482761 - DNA, 573 bp, Homo sapiens
tttccctaatccatttcctttgtctggctggctgttcgccctcgccttcttgtttcctcttctcacgagggcatttccaatccggtttgtttcccccctctatggtcgtttccgatttacggttgttagccctagctctcttccgataactcaggctcctcttgcccctccctccttggcccactcctgtggggtgggagcttcttctcgtctatttatgaccccacggtttttctcccggtgccaaaatcacgactctgtcccagcatcctacgcggggtccaccacggtcttcgtttccccgcccctccactaatactgccctcgcgtatcacaatgttgtgcccccacgcacccctactgcgggtgtcccaccacccccccccccccattacccacactctagaccactccgctatctccacgccatatgaacacacctcgtccttattattactcagctcacttcctctcccccatttgatccttcgcttatcatcgcctcacctcacccggcacatactcaatttcaccgggattgtgtctcctcgttaaacaattaacaaaaaaaca

SEQ ID NO: 482762 - DNA, 309 bp, Homo sapiens
  misc_feature (50)..(50): n is a, c, g, or t
  misc_feature (67)..(67): n is a, c, g, or t
  misc_feature (85)..(85): n is a, c, g, or t
  misc_feature (89)..(89): n is a, c, g, or t
  misc_feature (91)..(91): n is a, c, g, or t
  misc_feature (162)..(162): n is a, c, g, or t
  misc_feature (164)..(164): n is a, c, g, or t
  misc_feature (188)..(188): n is a, c, g, or t
  misc_feature (191)..(191): n is a, c, g, or t
  misc_feature (202)..(202): n is a, c, g, or t
  misc_feature (209)..(210): n is a, c, g, or t
  misc_feature (214)..(214): n is a, c, g, or t
  misc_feature (234)..(234): n is a, c, g, or t
  misc_feature (301)..(301): n is a, c, g, or t
caactccggggttgagagataaatgaatgaagagtaccaaaatatttgtngacttctcttcattttncccatacaatcggaagcntttntngactatcatatccccaactcacagcagcgaaagccagttcagatttgagatcagtctccattcacttccangnagcaccacagcaagagtgaccggnggnagagagctctngtggggnnagcnttctaataagcatgtgaagngaaaaagaaccctctagcagcacactgatttagtttgtaagactttaatttacaaattaaaaaagcnatttaata

SEQ ID NO: 482763 - DNA, 576 bp, Homo sapiens
caacgatggtcctctagcttggaaacaaaagtaactgaaataagtctcaatcaatttagaaagtttattttgctaaggttaaggatgcactcatgacacagcctcaggaggtcctgacgacatgtgcctgagggggttggggcacagcttgcttttatacattttggggggacataatacatcaatcagtacacgtaagattcacattggttcaatctggaagggcagaacaactcaaaccagggtgttgggggacttccagctcataggtagatttaaacatattctgattggcagtctgttgaaagcattattatcagtagaaaggaatgtctggctaatttttgtattgttagtagagatggggttttaccaagttgcccaggctggtctcaaactcctcagcacaagcaacccgctggccttggcctccaaaactgctgggattacaggtgtgaaccactgcaccagcctagacataattcctaaatatatcgtgatttactgaataacaagggaatcatgatggtggcaaactgttacagtattctataccagataacaggacgatgcgga

SEQ ID NO: 482764 - DNA, 170 bp, Homo sapiens
ctcccatggatgaggattgctccaaggatgaggattgattttgaccatgagccatctggttggaggtgactgactggaaatacttgaggatctctgaatgggcggtctcaagcgtccagctgggctcttagcaggttctcgtcgatcctctgaatggtttcctccagttt

SEQ ID NO: 482765 - DNA, 821 bp, Homo sapiens
gcaggagggtgctcggaggccacaggagtgtgttcctggctggcctgaggctggccggaggggatggggctagcagcgtgtgtagaccgagggttccatcatgctgggcgcgaccgtggccttgcccttctcggtacacctctgtatggaacgcctactcgcgctctcgcctcgtgtgacactcgttggcccgcgcgcgcgtcacgacgaccctgtccctctggtccttccacgtgaagctaccgcatgtcggtctgctcgtggcgatctgccttagcgcgggcaaaaggctggcggctgcatgcgctcgtggcgtaggtaagccgcgcagagtcggggacgcgagtcttgcacgcgctgttcagacacgaggacgctgtccagcgctctcgcacgcgtgcgtgccacagtgttactttggaggccacgagagaccatgggccacgttgtgtcgattgcgcgacataggtaaacactcgatactgggcttgcccgtaaaagcttggctccaacatcagcatcagcgctccgtgctaaggctaaagccctacgagcagacgaactagatcggcagtatccaatagaagcccactgctgtttcctgacgtgggacatgagacaggtctaccattgacgcataacagtcaatcatggaaatacgtgatcgagtggtgtctcagccctgaaacgcaggtgagaggatcgtacaatgacttccgtcaggacttacggcgttcaccaaagggctgccttacgcggaacgttgcacgttgaaatgaaaggggcaaatgcagagaagcattgtcagttggaactaccga

SEQ ID NO: 482766 - DNA, 201 bp, Homo sapiens
atcgagctcggcaccgttccggcagcaggtcagacgcaggatggatgggggagggcatacccctctgtagatgggcacagtgtgtggtgaccccgtcaccggagtccaccacgatgccatgtggtacgtgccagagtgcgtacagggatagcacagccgtggatagcaactgtacattggcttgggtgtgtttgaagtgtc

SEQ ID NO: 482767 - DNA, 100 bp, Homo sapiens
aaaggacaaatgctctcatactttgattatgtgacgaaggatgagtgtgtgtcaatgcctgtctaacacacagtaatgatccagtaaattagactactat

SEQ ID NO: 482768 - DNA, 202 bp, Homo sapiens
ctgatgtagtactgagctaaactaatctatctagctactactttactgactaagctagctactagcgcgggcgacgtactactaaagccccgtaggggcactaaaatatcccctttaactacgccggcagatagtctaattatctaattaggtaatttatttaattgctttagcgtctaatttctttaactttataagctct

SEQ ID NO: 482769 - DNA, 447 bp, Homo sapiens
ggtcgacctgtagcatgcagtgctgtttgatagcattttacccactatagaacttcttttgaaattggagtcaatcctctgatacagctttatccactaagtttgtgtaatcttctaaatcctttgttgtcatttcagcaatgtaaacagcagcttcaccaggagtacattccatctcaaactgcttctttaattcatccataagaagccattctggctgggcgcggtggctcacgcctgtggtcccagcactttgggaggccgaggcgggcagatcaccagaggtcgggaggttgagaccagcctgaccaacatggagaaaccctgtctctactgaaaatacaaaaattagccaggcgtggtggcacatgcagaggctgaggcaggagaatcgcttgaacttgggcggcggaggttgcggtgagccaagatcgcaccattgcactc

SEQ ID NO: 482770 - DNA, 972 bp, Homo sapiens
tggaaacagagtcttactcaattggctcaggcgggagtgcaggggtggcaatcacggcgtcagtgacaaccatccgaccatcagtgggatccagagcagatacgacctgacggactctcacaacagatactcgtgcgcatgacaggctgcgccaccgagtacacaacaggcgatacactctcggaggagtatctacaacgacaacaacagcacgcggcccctacacacaagtgataggcgccaaagagccagcggcacctacagagaacgaacgcgcgaaacgacacacaagactcgaacccgcgaacccacagctgcaggcccccacaaacagggacgtgagcgaactgaaacaagcgacagctagcagccccaccactatgacacccacgtgcgccccacacaaacaacctgccaaaaacacgtagcccaactacacacaacacaacagaccccaacacacacacaacagagacacacggccactctccataaggagcaacataaataagcaccaccgcgcacccaaaaaagcacgcacctaacaaaaacacagtcacacaagagaacagagagcaaataacagcaccaaagagaaggcgaggggcaccagcgcacaccgagacaaaagggagcaccaaactacccgcgctcgatggggccaccaagacaggcacgatgggccaaaaacgagacgagtcgaccacccaccaagacatgcacacaacacaccagaggagtgatctacgcgacaaaacacaagagacaccgcagcaaaaaatgaaacacgagacacagaatgcacacaaagcacccccacgccacacgaagagaaaaaagtccacaacaaaaaaacagcgacgacagcggacacagcagaggaaaacacaccacaccaacaaagacaaacaagcggcggagacgacacgagaaggagaaacccgacgaaaggagagacacaacaccccaaca

SEQ ID NO: 482771 - DNA, 797 bp, Homo sapiens
ttaaaaggaccataatcttaagcccctctcgagggcagcagctttagttctagtgttccaccggccttaaagatttcgcctcacgaaagttcctgggctacccatggaccgctctctcgaccgtggttaccgttctggtaagaactagccgtaccaaagtcctcgcttcttgcctaggtgtccctgatgccaagattggcattcatgacctgggtcggaaaaaggcataagtggttgagtttccgctttgcggccacatggtgtcagatcaatatcagcagctgtcatatgaagcggtggagtatgacgaaatttgtgccaataagtacatggtattacgttgtgcaaagatggcttccatatccgggtgcggctccaccccttacgtgtcatccgcatcaacaagatgatgtcctgcgctggggttgccaggctccaagcaggcatgctaggtgcctttgtaaagcctcagggcactgtggccagggttctcattggccaagttatcatgtccctccgcaccaaccttcagagccaggagcatgttattgatggccctgcgcagggccaagttcaagttttctggccgccagaagatccacatctcaaagaagtggggcttccctacgttcaatgctgatgaatttgaacacatggtggctgaaaagcggctcatcccatgatggctgtggggtctagtacatccccagtcgtggccctctgatacaagtggcgggccctgcactcatgagggcttacaatgtacagcccccctcttaatactctcccataaattc

SEQ ID NO: 482772 - DNA, 127 bp, Homo sapiens
actaatacactgactggatacccagtctctgcttttagtctcctcaggagaaaacaaatcttgtagcatgaagagcctcacacatttctccaaggagacacgtcagcgctggatttagggctcccag

SEQ ID NO: 482773 - DNA, 110 bp, Homo sapiens
acgcaccacgcataacttagactatcagaagaaatattccagctgggcatggtggctcacgcctgtaatcccagcactttgggaaggctagacgcaggcagatacaccta

SEQ ID NO: 482774 - DNA, 593 bp, Homo sapiens
  misc_feature (41)..(41): n is a, c, g, or t
  misc_feature (66)..(67): n is a, c, g, or t
  misc_feature (99)..(99): n is a, c, g, or t
  misc_feature (116)..(116): n is a, c, g, or t
  misc_feature (123)..(126): n is a, c, g, or t
  misc_feature (128)..(128): n is a, c, g, or t
  misc_feature (133)..(133): n is a, c, g, or t
  misc_feature (135)..(135): n is a, c, g, or t
  misc_feature (138)..(138): n is a, c, g, or t
  misc_feature (176)..(176): n is a, c, g, or t
  misc_feature (190)..(190): n is a, c, g, or t
  misc_feature (203)..(203): n is a, c, g, or t
  misc_feature (241)..(241): n is a, c, g, or t
  misc_feature (252)..(253): n is a, c, g, or t
  misc_feature (255)..(255): n is a, c, g, or t
  misc_feature (261)..(261): n is a, c, g, or t
  misc_feature (263)..(263): n is a, c, g, or t
  misc_feature (281)..(281): n is a, c, g, or t
  misc_feature (286)..(286): n is a, c, g, or t
  misc_feature (301)..(302): n is a, c, g, or t
  misc_feature (305)..(305): n is a, c, g, or t
  misc_feature (317)..(320): n is a, c, g, or t
  misc_feature (322)..(322): n is a, c, g, or t
  misc_feature (349)..(351): n is a, c, g, or t
  misc_feature (369)..(369): n is a, c, g, or t
  misc_feature (373)..(374): n is a, c, g, or t
  misc_feature (381)..(381): n is a, c, g, or t
  misc_feature (384)..(386): n is a, c, g, or t
  misc_feature (399)..(399): n is a, c, g, or t
  misc_feature (405)..(406): n is a, c, g, or t
  misc_feature (414)..(414): n is a, c, g, or t
  misc_feature (417)..(417): n is a, c, g, or t
  misc_feature (420)..(420): n is a, c, g, or t
  misc_feature (422)..(422): n is a, c, g, or t
  misc_feature (424)..(425): n is a, c, g, or t
  misc_feature (438)..(439): n is a, c, g, or t
  misc_feature (443)..(443): n is a, c, g, or t
  misc_feature (453)..(453): n is a, c, g, or t
  misc_feature (455)..(455): n is a, c, g, or t
  misc_feature (479)..(479): n is a, c, g, or t
  misc_feature (488)..(488): n is a, c, g, or t
  misc_feature (490)..(491): n is a, c, g, or t
  misc_feature (499)..(499): n is a, c, g, or t
  misc_feature (508)..(508): n is a, c, g, or t
  misc_feature (521)..(522): n is a, c, g, or t
  misc_feature (528)..(528): n is a, c, g, or t
  misc_feature (570)..(570): n is a, c, g, or t
  misc_feature (574)..(574): n is a, c, g, or t
  misc_feature (583)..(583): n is a, c, g, or t
ccctagttaaattagcatgcctgacattaactctgggttgnaacctacctccgtcaaataacaagnngactctccaagcaaatgtctacacggcaattnaagcagcaactcaagancccagannnncnctggngncgnggccatcactccacttcccagtgcgacaaccacttttntgtaaacacctgtnagatgctaaaaanacggccttacacactaccgtcaccaaagtatataagcnataagatcagnnancggggncngctgcggcccctctgacngtccngggctggggcgctgnnggngggtctccgggnnnngncccctctgcccggtctcgggccgcgcnnngggggtgctgtggcctgntggnngggtggnacnnngccacctacgtgngttttnntgtttggnagnttntngnnttctgcagcttgnngggncccgtttttngntctttcttccactgggtgctgttnggtgggttntnnagcttgtnttcaaatgntagctatgttttnnggttgnttaggcccagctgcaccaccgggttatccaggatggcctganaganaggactgtnggggtcgatg

SEQ ID NO: 482775 - DNA, 282 bp, Homo sapiens
accatgttggccaggctgatcttgaactcctgacctcaggtgatccgcctgcctcagcctcccaaagtgctgggattacaggcgtgagccaccacacctggcctttattacctatttctaatgagtgcttagatattcctaccggtaatttttaaataaaaacattaatactgattatgtattgatcagttgtaactggatgaagaatgtccaagcgaagaaaaataaacacaaacttaggttaaaattgaagataggtctggcttcatgctctagtgagtg

SEQ ID NO: 482776 - DNA, 339 bp, Homo sapiens
agggtattgtgctttgaataaagtgagtgttctgttagcaaggaagtatgcttattacgaaggcaattagaaacatcagccatacgccttttaaaatataagaagattaagtaaactgtgttacgattatgtggtggaaatctgtgtagccattaagaataatgttcttgattaatatttaaggatatggaagcaagctccgtagactgaggggtgggtagcaagacccaaaaacacatataattgtcacagtttcctttaaaatatctatatgaagacagcactgattatggacaattttcgtcttcatactttctctgttttcaagatttttgacaa

SEQ ID NO: 482777 - DNA, 319 bp, Homo sapiens
  misc_feature (52)..(52): n is a, c, g, or t
gacggcaggcaagcttaggtggacggccacgtggcactagatacttcgtcgnagcgcgtacattccgcggtcgctgactgacacgatacctatggcgccagctgcaggcggccgccatatgcatcctaggcctattaatattccggagtatacgtagccggctaacgttaacaaccggtacctctagaactatagctagcatgcgcaaatttaaagcgctgatatcgatcgcgcgcagatctgtcatgatgatcattgcaattggatccatatatagggcccgggttataattacctcaggtcgacgtcccatggccat

SEQ ID NO: 482778 - DNA, 576 bp, Homo sapiens
tccgaagatttcgaacgacattctggctacaatatatttttctgactgcacaacgaatcccaaggtccaacttgtggtctaccttactcaagcttagcgagtgctgacctggtcacttgcaagctttactctacacaactgggactactgaaatgtgtccacattccctcttgcagctcttcttgactgcagacacacagcaacgcatactacgcacgaactctacaccttccacggaagcaccatacagcttgaacactgctgcgtcattctcccttctgcacacaggcacacgtctcatgacattataccctacacacctgcttctgggcacagctatcacatactgactgcagcacacctggacacaccaacacttatgcacgcagaccactttcagcctctgagaatgccagctggcgctcctgcacagcactgcgctcaagcctctgctcttgccctctagcacttcctgactgctcacccatagcaccaaccaccttaacaccctccatactgacaacacacacacactctaaacactaccgcctactctaccacacgctacaacacaac

SEQ ID NO: 482779 - DNA, 194 bp, Homo sapiens
  misc_feature (75)..(75): n is a, c, g, or t
  misc_feature (81)..(81): n is a, c, g, or t
cccatacatgtctgatgacaggatgtccctgcattggctgtatcaattaaacaatctgtccatgggcatacaggntatttnctagtttttttttcctcttagaaaataatactggcgatgactttcctggtagctcagactttttcacgtctgtggttatctcttggggaatgctgaatacatacatttcgaga

SEQ ID NO: 482780 - DNA, 120 bp, Homo sapiens
gaccagaacagcgcccctgcatcccaggcccaggagaggcgagccagcagctgctgcagctaaacgggtcaggttactcagttgtcaccaacgtgtccagtacgtaccacccatcgtatc

SEQ ID NO: 482781 - DNA, 244 bp, Homo sapiens
  misc_feature (45)..(46): n is a, c, g, or t
gggggggggggaaaaaaaaaaaggggggcccctccggggggggtnnatttttttcccccccggggccccacccggcggggcttttggggcgggggccgggggccaaaaggggttccccccggccccccccaagggggcccccggggggtttaaaggaaaattttttaggggccaaaagccaatttgccaagggcccccttcccggtaaataattttgggggaaaaaaaggggggggttttttta

SEQ ID NO: 482782 - DNA, 358 bp, Homo sapiens
agacacagtgctgtcgcactggttcccttcagccatggttgacgcaaggaaagacccgacagacctctgtgtaggccagaaaggccagcccttcaaccgttggtgttagattaagcgtgtaatgaatccatgatggaagccccttgataagcctttgtgggctcaaagcccttacctccagcctgcttctgtctctaggagagtcccagaagttgaagtatgggtatgggggaccccagagttccttacagagaagggagttgcctctcaggacaggggaaaagtttgagtttccacagctcccccctttacagagaagttaatgcttctgcttaagcacctccaaagagagagagag

SEQ ID NO: 482783 - DNA, 149 bp, Homo sapiens
tttagatatttgcaaatacaactttattctgattctaaacgaaaaggaatgtggcagtttaacttcattttttggacctgcatatttatgttttggaacttcgagtttgcgatatatcaagactgctgcagctcacatcataatattca

SEQ ID NO: 482784 - DNA, 92 bp, Homo sapiens
gcccggcggccatcttgagccccgccttttacttcggcccgcttcttctggtcactccgccaccgtagaatcgcctaccatttggtgcaagc

SEQ ID NO: 482785 - DNA, 432 bp, Homo sapiens
  misc_feature (231)..(231): n is a, c, g, or t
  misc_feature (233)..(233): n is a, c, g, or t
  misc_feature (249)..(250): n is a, c, g, or t
  misc_feature (368)..(368): n is a, c, g, or t
  misc_feature (423)..(423): n is a, c, g, or t
agtcggggatcgcggcggccggtctctcgttctcatcgcagacacttctactgcaaacatggtcaacgtaccaaaaacccgaagactttctgtaagaaatgtggcaagcatcagcctcacaaagtgacccagtataagaagggcaaggattccctgtatcgcccaaggaaagcggcgctacggatcgcaagcagagtggctacggtgggcagacaaagccaatctttcgananaaggccaaaaccacanngaagattgtgctcaggcttgagtgtgttgagcccaactgcagagtccaaggaggatgctggccattaagaggtgcaagcattttgaactgggaggcgacaaagaagaggaagggccangtgatccagttctaaaacttggtgttctctgaagaggaaaaatactgaagcagtngagaaatta

SEQ ID NO: 482786 - DNA, 157 bp, Homo sapiens; identical to SEQ ID NO: 480870

SEQ ID NO: 482787 - DNA, 200 bp, Homo sapiens
aggtcgcatctacaggcatccccctcaaggaatcccaaagaattccagcccaacaacaaaaatcccgctgagtggcaaacattgtctggcatctctcaacatgcacctcaaacaacgccaactgcgttttactatgctaccttattggaccactccacttccttcattgcgccctttaacaaacacaatatccaaggttg

SEQ ID NO: 482788 - DNA, 469 bp, Homo sapiens
ggcatcagggcgtagatggtagggcgatgggtccagaaggattcctatgtgggcgaccgaggccgagagccagagaggcatcctcagcctgaagtaccccatcgagcacggcatcgtcaccaactgggacgacatggagaaaatctggcaccacaccttctacaaagagctgcgtgtggcatcccgaggagacaccccgtgactgctgaccgagggcccccactgaatcccgaaggacaaacgcagagaagatgagccagatcatgtgttgagacacttcaacatccccaggcatgtacgttgctatccaggctgtgcctatccctgtacgcctctggacgtaccacgtggcatcgtgatggacatccggtgacggggtcacccaaactgtgcccatctacgaggggtatgccctacccccatgccatcctgagatctggacctggctgtgcgggaccttgactgacta

SEQ ID NO: 482789 - DNA, 950 bp, Homo sapiens
taccaagacttttacattgacctcctcaggtcagagagagaagctttgtggaaaagatgaagaaaacggggaggaagatcatctggtgttctacggctcccagactgtgggactgcagaggagtttgccaaccgcctgtacaaggacagcccacctgctacgtgtgatgccgaggcatgtcagcggaccctgagtgagtatgacctggacctgacctgagcaggccatgccagagatctgacaacagccctggtggttatacttgcatgtgccacctacgtgtgagtggaggaccccacaccgacaagtgccacaggacattctacgaacttgtgctgcatgtgatgacatgacagtggatctctctgtgttgtcaatgttcgctggatgtatatggtccttgtgggaacaatgacctaactgaggcacttcaatgccatggtgcaatgtacgtggacacatgccggcatggcagacaaggctcggcagcccacgagcatctttgagctggggataagggcagacagacgattgtggaacttggagatgagtgacttcatcacctggcctgagagcagtccatgagccgcgccgtgatgtagaaacacctatggaggcgttggaagccactggcgcaggacggtaccagacaatacagccagaacgacagcttgatggaccaccaacgacagatagaatgcagggccaacggcggaacatgaggggagcactgggccggcgagcgcgccactacgaacgaaccagagaaccaccccaaaagatagccaagaaacccgacccctgaactgcaacacaccaccaacagggaacgaaacacaggaacccagcagccacacagtacactgaagtgaaacacggaaaccacaaagcggaaaaatgcagccgcccgcgcgcccacgcgaagagagcagacacaaacaagggaaccc

SEQ ID NO: 482790 - DNA, 345 bp, Homo sapiens
ctccatggcacttcacaccacccactgttgaggtaaatccgactcatcattttcttatatctccccagcggggaaatgaaaaaaatcactggccattccccagttctgttcggccattttaaggagctccaagctccttgtaatatgaccgacggcctccaaaaagaaaaacagtttttgaaaaggtgatttatttccaaaattgctttttcttattgatcactcctctttatttgagaaactgccggccctaacttattcactcctccttacagaatgagccctgactcgaaataaaacccctacaattagccctctgtccatggccatggagtaaatggcagg

SEQ ID NO: 482791 - DNA, 261 bp, Homo sapiens
agagcatcataagggttgtactaccatcacagacggatacgattacacagagcatcacgcaacttgacacgatagacagtgcaatcgcccacgtaaactgactgcttgatgtagatattccactgtctgtgggactaatttacacaaggacgaatcccagccagttacatgcggtttaatttctgtgggacccagccataacgcacctctgtcctccattcaggtgcacttgatccacggtccaccagatcatcttagggc

SEQ ID NO: 482792 - DNA, 123 bp, Homo sapiens
  misc_feature (69)..(69): n is a, c, g, or t
gaaatgtattactgtataaagcaaagctgtaatatactaaacattttttagcagagtaatatttatttngcatagtctatttattgtattcgtatcacactgttattacatactgggatgaat

SEQ ID NO: 482793 - DNA, 959 bp, Homo sapiens
ggatcatacgtgtcactctcggggatgttttcctctctgggttactctgctctggcaagatacattacccaattgggcactctcattacactcggggccccccgtttgcaacagcgagttgccaagttctttttgagaaggcgggggcatactttacggttggagggctctataattctgggatatatggcgggccctcccccctgtcttttatgccgccccccgttccgtcgaacgcatgaagatccgtcgggtgcagtgcctaccttcatgcattgtccttcctagatgggcaggcacgctcctcctcggggataggtggtatcacccccccccaaggcttttccctctggaggataatttggtcccccaggggctctttcctttatccttgcgtgttcgagaaaggcttgccccaaaagtaacatcacgctcggggtaacaatttggccaaggtccgcctgtgtacaacaggaagaagtcgcaagcgcccttctgcgcgaggtgaaaataagatatcagtggcaagatgccttatataattcaggattaagcatgacaggcgaagcaagaacacacaaggagctgtacctcctgacggaacacactcatcgcttaggtgcagtgttgacgagaaatacaagcgccaagtaggacgccctattgtaatagggtcgcgacttcgctccccaagatggtgatgctccaagaaactccaccaccatttcatgggataagtttcaatcccgacaagagtagttgctgaagagtatgatgcaagcctacattgactcttcctcggaaatttatgtatagcaaactaggaggaatgagtctttctgtagttctatccgcaaacagctgggcgagcatcatgctattacgatgaagaaacagttcattttctgtacaatagaaggtgttttaagaaaaaaccagtaaaaaaacacaaataacaa

SEQ ID NO: 482794 - DNA, 881 bp, Homo sapiens
gcagcattgccccccccacgtttcagcacagtgctggccgcagtctgactggacaagggacggagcctatgatggcggcggccgacggcgacgactcgctgtaccccatcgcggtgctcatagacgaatctccgcaatgaggacggttcagcttcgcctcaaacagcagtcaaggaagctgtccatccatcgccttggcccttggcggttgaatatggatcgccgacagtgagcattctgcgcgtttgccttacagtagtaccatctatgatgaagatgaggtcctcctggccctggcagaacagttgggaaccttcactaccctggtgggaggcccagagtacgtgcactgcctgctgccaccgctggagctcgcgtggaccacagtggcacggagacacgtgtgtgcgaggagcaaggcagtggtaggtccttatcgggccatcatcactagctgagtcactcgtgcctctgacctggtaggcgcactttagtggcctgctagtgaagcggctggcgggcggcgactggttcgcctcccgtctcctcggcctgcggactctttctccgtctgctgtccccgagtgttccagtgctgtgagggctggatgtttcgaacatgtacttccggatacctgtgctcagatgacacccgccatggtgcggcgggccgcagtctccaagctgggggagtttgccgaggtgctggagctggacaaggtccagagtgagatcatccccatgttctccaactgggctctgacgagcccggactcggtgcggtgctggcggtggaggcgtgcgtttaactcgcgccagttctgccccaggaggatctggaggcctggtgatgcccactcttggcccgggcgtggaagacc

SEQ ID NO: 482795 - DNA, 569 bp, Homo sapiens
atttatgttaattgactgcccaaattcagttgtaagcagcttcctcagtctctgaagggcccacattctgtgactggcagctagggcactcagctgtgcacaagctgccagcgaggccgcaaggcgagggacgatgcttctgttagaggcaaggttgagtcggaagtctaacagacacgtcaccaagtcccatggatggacaggagaggacgcagcggtcagagaggagttctttagggccagcagctggcatgatgggatagacggtgaagcgccagccccagccattcacagacccatcgctgatgaacttccactttaactcatcccctgggatgcgcagctcgctggaccagtcggaccactctcggcctgaccgcacggagacgatcctgttgacgccgtccatgactgtgagagggtcgtggcgcctctctgtggagcactgccggtcaaattctaccctgagtccttctgcacctggtatcttcactgtgccactggtggaggtgtcgtcggtgtaagggtggctactctccaccaccacaggctgagaagagaggcggccg

SEQ ID NO: 482796 - DNA, 360 bp, Homo sapiens
ctatagatcactgtcagaaagtggtaacatagtcactacatacgtatgcattaggtctctcatgagattcgatgtattacatgggtaagtcgtatagaacatattaatacaagatgaggcataagactccaggtaagacatctcggctctacctgctgactctggggtgtggacattaggctgtagactgtgaggtggctatctacctgtggagtgcagcgcgtcctggcccttggattgaggagaacaaggtcaactatactcacctcactagtatctggctacggtgaccttggacaagtttaacttttctctctcctagtcttagtcttcttgtctgtaagtgacagcaatgatgct

SEQ ID NO: 482797 - DNA, 331 bp, Homo sapiens
ccccacccctccagtagcctgcattttgagcttaagagtgttgtttgcagccgggagcggtggcttacacctgtaatcccagtactttgggagaccgagttgggtggattacttgaggtcatgagttcgagactagcctggccaacatgatgaaaccccctctctattcaaaatacgaaaattagcccggcgtggtggcgcatgcctgccgtcccagctgctagggaggctgaggcaggagaatagcttgaacctgggaggcagaggttgcagtgagctgagatcgcgccactgcactccagcctgggcgagagggagagactccgtctca

SEQ ID NO: 482798 - DNA, 526 bp, Homo sapiens
ccgggcctcaacaattttcttcttaataatttttgttgagttgttaaaaacaaaagatatacacatgggtaacagaagctgtccagaaatgcaagtcagtgatggatcaatatcaggacagcatcactcagaggaacatcaggggatacactgagggcttccagaatttgccacaggttaggtctagacttgggtcatgatgactagagcatctgcctgattatcatgaagctaaacatttactttgtgtgactttctatatcatgatttattgtgcaaaagtagtttgttagaaaaggggagaaaagtgattctaaagcaattctgtaacttctttttataaaatggagatggttgtttctactgaagcaattacagaatcacatcattctgaaggtgggaaaggctgcagctacacgctgggccagcccctgcacctggtatcttcactgtgccactggtggaggtgtcgtcggtgtaagggtggctactctccaccaccacaggctgagaagagaggcggccg

SEQ ID NO: 482799 - DNA, 196 bp, Homo sapiens
acctagatccatatctgacggactaactcatagaacagcacccacatgtaattacatattatcttcagaatagttagaggcaccacgtttaagatttcttcattttctcctctcagtataggcagcaattcaccattttctttcagttccttcacaatatccaatcctcccaccagctcccctttcacatatggcg

SEQ ID NO: 482800 - DNA, 344 bp, Homo sapiens
gtgactctcagaggatcccgaaatggaacgaacagcacagaaaatgagtttcacgaactaacagaagtagccttcagaaggtgaataataacaaacaactccgagctaaaggagcatgttctaacaaatgctaggaagataagaacctagaaaaaaggttagtcgaattgctaattagaataaccaatgtagagaggaacataaatgacctgatggagctaaaaaacagcatgagaactttgtgaagaatactcaagtatcaatagccaaatcaatcaagcggaagaaaggatatcagtgattgaagatcaacttaatgaaataaagagagtgttcgttccatt

SEQ ID NO: 482801 - DNA, 158 bp, Homo sapiens
gtggtgcactaccacacccagctaattttggattctcgtggagatgaggtctcagtatgttcccaggctagggtgaactcctgagctcaagaaatcctccggcctgagtctctgaaagtgctgggattacaggcgtgagccaccacacatggcctatg

SEQ ID NO: 482802 - DNA, 744 bp, Homo sapiens
tgtgccgcccgagtccaggctggtcggacctttcccagggtaattgtgcgaccatttactctgaagggaccccccagttgatcgtgaaggcgccccccgaggaacccctgcgggagggttcttccgatccacctccgatgtgaggaactcccgccttctttggaatagatgtattaattatagaggtctcccgggttgcaccaaatggtggggtcaccagaaaggaactggctcacccgttcggactagtttgtagtccatgtcaccagcaccatgatccagggtgtttaccactgggcttcccgttcaccaagatgaggtctgtgtatgctccacattcccccatccaaccgttgttatcccggagaatgggtctcttgttgaaatccgaaattttcttggggtgaaaaatacactccccacgggttcggatgagaccccggtggttgcttggtccaacgtgattctccagccccgagaagatgatattaatccctctgaaggaaatgacccttggagcttgtttccaattcccgcggctttgattcagccagcccccaaccgtttaaaacccaggatatccggaaatttttggatggtatctatgtctctgaaaaaggaactgttcagcccggctgatgaataagatctaagagttaccccggctaccgaaagaagatccccgatgacccttaagacctaccttgtgatatttaaatgatcccattaaagacctatttgatt

SEQ ID NO: 482803 - DNA, 340 bp, Homo sapiens
tacagtggaccacgaggaacggattctggcaatggttcaggtcttgccaggagcatactgagaatcctaaagtctttgattcaggtccaatcccttacccatggcagaactcccttccagatgtgcatttttccagattcttctgagcatttccagggctgaggaagccacagctttgtgaggcagcctgttccactgttctgtagccccagttgttagaaagtcctccttccagcaggccagaatctaccctcctgtagttacaccctgcagtcccatctctgtctcccagggtcattggggaactactctcttccttcccctgcagggcagctctccc

SEQ ID NO: 482804 - DNA, 393 bp, Homo sapiens
ctcgcgctgagatattcacaaagtagtgcacccatccttagtgtgttattccagaacactatcatcatggccatagtaaatatggggcctagtccgcacctctccatgcctaccttccctttccccagtccctggcaaccattaatctattttctgtctctatggatttgccaattctggacatttcatattaaggaaattacacaatatgtagccttttgtgtctgtctctttcacttagcataatgcttccaaggttcatccacgcagtagtatgcatcaatatttcattactttttatggctaaatacatctgcaaaattttgcttatccattcattactttatggacatttgaattgtttccacttatagacctttatgaataacatca

SEQ ID NO: 482805 - DNA, 187 bp, Homo sapiens
agtgacctgaggatgatacccagatcatgtttgagaccttcaacaccccagccatgtactttgctatgcaggctgtgttatccctgtacgcctctgggcgtaccacatggcagtcgtgataggactccgtgtgacggggttcaccaagatctgtgaccattctacgaggggggtggactcgtctaga

SEQ ID NO: 482806 - DNA, 1614 bp, Homo sapiens
  misc_feature (412)..(412): n is a, c, g, or t
  misc_feature (727)..(727): n is a, c, g, or t
  misc_feature (951)..(951): n is a, c, g, or t
  misc_feature (974)..(974): n is a, c, g, or t
  misc_feature (1004)..(1004): n is a, c, g, or t
  misc_feature (1164)..(1164): n is a, c, g, or t
  misc_feature (1267)..(1267): n is a, c, g, or t
gggcagcaccaccacacagtcacccctccctccctctttcccatccctccacctctcacgtggccctgtccccagccacctaagaacccggtctgcgcactaagctcccgcagattcttgcacgtggtgccgtgcttatcactgtagtggcaactgaagcgtggatcatgatgtagagctcgtgcgagatgtgcactagggagagatgggcatgatggtagcgtgcagtgttgagctgtgcaccttgtcagcccctgaacacgggaagcgatgtacgaactctccacgagttgtcaagatgggttgatcatctttgatcgatcattgccatacggcacctcgttttacatcgagaaacgtctcgagtcaagttcgcccagtgggtgagagcgtctagggggatagatgcgcntgggcgagcctggcggagcgccagtctggcgcttcgcgtcctcgaattgtaataccaagaggtcgaatgccttttgccaccctccgaattcttgagggcctctcgattggggcgcctaacggaaggacgacctcgtcgtgcagcgttcattgcgacatggttagggggcacgatcggtccatttcggtccgccgttagcgggaccccaagtcatcgattgcgcgaccgtaaaggggaacaccaccgttctttgctcgcgattggggccctatggtcggcggtgagacgatactctgtactgtttcggctcctttnctgagttgcgccggtcatagggccgatcctttcggagaaaagctccccaagttcgcttaggaatacgatccgaaactggcgaattggcagcacaacggggtagcggagcacatggcgccggtgcgcgcgcattacacatattggacggcgggatgatcaggagaatactcgaggtgcaacacgctcgtgccagaagctgtccatttcgggcgaccacttggggncacgacccccgcacagaagatgngggattggagataatgcgccgagtgcgacngtggaggcgcacctgtggagctttaccactgccctttatctgcgcaccaccccagagtcttgtcgccgaattgctccatccacttaggcgctcgctgtgggcgaccaacacttgtccctgagagccaatcatggccggcggacgattcccccaaagggcnggagacgctccacgcgtgtcaggcaccacaggaatgcgctatacacaccaaggggacaacacagatcacagttcacatatagcataatcgctggagtacggtnttttcaaaacctgtaggacccgtaacaccaccacatcagagtcaccaccctggcgcgacacacacacactcgacccaccaccacacacataccgtaacagacacgcgccatctagcaccaagagccgcccagtgaagacgctgatcaagttcattaatgccgcattgtgtgcgatatccaggctaaccacacattttccgcctatgatgcgtctgatacactaggagacgacgacagacacgaatggagggcgcgactgaacacagagctacacactatacgtcgaccgcttccgttttgatcacctccccgcactacgcctatagcaacaccttggtgctcagcca

SEQ ID NO: 482807 - DNA, 547 bp, Homo sapiens
aaggatcctataggtcgatcactgtactccagcctgggctacagaagtagacctcatctcaaaaaaaaaaaatgttgaaatggcctggcacaatggttcacacctgtaatcccagccctcaggatgccaaggcaagaggatcacttgagcccaggagtttgagaccagcctgggaaagatggtgagactgtgtctctacaaaatgttttttaaaaattggctgggtgcagtggtgcacaccctgtggtcccagctgctggggaggctgaggcgggaggattgcttgagcctaggttgtggtcccagctgctggggaggctgaggcgggaggattgcttgagcctaggaggttgaggctgcagtgaatcatgttctcagcactgcactccagtctgggcaacacagtgagaccctgtctcaaaaaaaaaaaagagggaaaaaaagagggagggagggaaaaaaaagaattaaagaaagaaagagaaagacagcgaaagagaagagagggagagacaaaaacaaaagacaaaggaaaaagaaagaaaag

SEQ ID NO: 482808 - DNA, 129 bp, Homo sapiens
gtgtattgtgaccagacccggggagctggccatgtagaaagagagagacctcatctttcatgctggcaagtgaaatatgtacggaacatgcacttgccctaataaaaaatcagtgaaagggtctctggt

SEQ ID NO: 482809 - DNA, 164 bp, Homo sapiens
gtattgatgagactggtgcagtataacgttacaggggtactcgaaccccaaaatcctatccagatccaacacgtttcagagttggcttcccagcaatgccaaaaaatggaaataaatttttgagtgtattgttcttatttttgtcgatcagtgattaatttatt

SEQ ID NO: 482810 - DNA, 676 bp, Homo sapiens
ccaggttcaagcagttctcctgcctcagcctcctgagtggctgggactataggtgcccaccaccacacccagctgattttgtatttttagtagagatggggtttcaccatgttgcccaggctggtcttgaactccttacctcgtgatctaccagcctcagcctcccaaagtgctgggatttcaggcgtgagccaccgtgcccagccccaggctagtttttaaaataaaattttagaaatgaggtattgctgtgttgcccaggctggtctggaactctaccacttgaaaatttttagcataaagcaattacattctcactcagaagctattgtctttaacgctaacactttcaacatggtacgtacgattcactcactttacaacgcttaacaccaaaaaacctaaaacaccggctgcttcaactagcatcagcacagctctcacggtacgcactctcttctctacacaacggtgacttcttacatataacaaaaactgctttgtaccttcatcaagcatagctttttctacttatcactacttaatgtatttcaacatgcagctatcactgtgcaaaattaacagggctgtgagaattcggaaagtcaatgttgttttcttgtcagcaaagccaaaataatgtagtcatagtttctgaaataaataacttacattt

SEQ ID NO: 482811 - DNA, 216 bp, Homo sapiens
cgagctggatgatcggtgctgtgcccaaatccatcaaccgttccgtgatcgtcgggctgatgatcagcactaagagcgtggtccgagacatgcggggggatatcacccacacctacaaatacccagagcgggcctcagaggagagggaggccttcacaagggcgaaccacctgaacaaactgtccgagaaggaggagacaggtatgagcatgcgga

SEQ ID NO: 482812 - DNA, 126 bp, Homo sapiens
tgggctgtgtgcggtatggggtgaacctccatgcagtctttaagtgactccatcattcaatctgaagttttgaattttaattccatcatccgacatcttaatccttttagtcacgacagcgcaaaa

SEQ ID NO: 482813 - DNA, 305 bp, Homo sapiens
tccgacgtgctactggttcttgttgagcgccaagctgttccttaagtctttgttctttacttctcccattatggagcctgaagttatttgaacggatccttggagactcttttgtgattgcatgcttggagtaacattcctcgtaacttgtccctgtctccttagaactacaacagacttctgtgattctcccaaggattcataagtcttcatagactgatgacggtggaccgtgacctcagtcgcctgacccatatggtcactctgatagccacgctcgcgagggtaccgatgctcgacattcg

SEQ ID NO: 482814 - DNA, 81 bp, Homo sapiens
agcggagtccactgctgggcctggaacacggagcagtggctgccctgcgaggaggtcctagagcagctccagcaggatggc

SEQ ID NO: 482815 - DNA, 472 bp, Homo sapiens
ccggcaggcacttagaactcttcccttcaatgatgatgtcttgagagctgagattgtgtcttttttgtttgtttttttgagacggagtctcacactgccctcctgggctgggtgcaatggcgtgatctcggctcactgcagcctccgcctcccgggttcaggcgattctcctgcctccgcctccctagtagctgggactacaggcacatgccaccatgcccggctaattttttgtatttttagtagagacgtgttagccaggatggtctcgaccttgacttcgtgatctgccagcactttgggaggccgaggcaggcggatcatgaggtcaggagatcgagaccatcctggctaacacggtgaaaccccgtctctactgaaaaatgcaaaaaattagccgggcgtggtggcgggcgcctgtagtcccagctactcgggaggctgagtcaggagagtggcgtgaacccgggag

SEQ ID NO: 482816 - DNA, 348 bp, Homo sapiens
atggtgttgatgtaggacccgtatgagtgtggaatccagtacatcgaattaagtgttgatactacagcgacccagtcattgtgaatgtgctctagggcgcaaccgagctcgacattgccccctcatacactcatatgaccgccgaggggtgacagtcaggcgtctacctgccatgcagcctctaacccccctgcacagtattcttggctgattgactgggacacagtccagcaacacacaccaagagctctttctctccaacatcactgacgacagaacagcggactctatacctgccacggccaaataactctgccattgggccagctggggggtaacccgagctcg

SEQ ID NO: 482817 - DNA, 243 bp, Homo sapiens
cgtttttaggtcggcgcagccatacatctctgtccgtgtgagacccggctcgccttggttgtatgtagccgcgctggttccgccgtctctctcggtaagtctgtgtgttggtcttggcgatctgtgtctcccggtcccaatactccggcccctcctgctctatccatggcgcccgggtctccttcctcggactcgtggcgtcgctgtcgaccctcataacgaaccgggaatcctcttagagtc

SEQ ID NO: 482818 - DNA, 291 bp, Homo sapiens
ccagatcaaatggtaccagagtggtatgtgatgaatataatgcagtgaaaagtcatctatatgcaagaataattaaagacatggagagggccaggcgcggtggctcacgcctagtaattccagcacttagggaagccgaggcgggtggatcacgaggtcaagagatcgagaccttcctgggctgacatggtgaaaccccgtctctactaaaaatacaaacattagctgggcgtggtggcgggcgcctgtcgtcccagctacttcggaggctgaggcaggagaatcgctaga

SEQ ID NO: 482819 - DNA, 372 bp, Homo sapiens
cactaaggatgggcggacgcctggaccatgaatcacttcaagaagaccacctactgcgacttctgccatatcatgctcatcggcgtccgcatccacgcctgtgctgcacttactgtaaatactctgtccacgaacgctgtgtgtccagaacacattcctggttgtgtcaaaacgtagtctaaagccaaaaggagtggtgagtttcaccgcaaatgtgaattatcaacgttgtgtgacggttgggaactcagagaccacatcttactgtccacctccatattctcccatcacccgggtttgtgctcctgccccggcgagggctgtagcttctcccggttctggtttccgatctatgccgctttccgacgttca

SEQ ID NO: 482820 - DNA, 104 bp, Homo sapiens
cattgcatttcactatcaatgtggagacctgctgcctagggtgtggaggaactgctcagaggccacacttagggagcatccctgctgtggcagcatgcagatgc

SEQ ID NO: 482821 - DNA, 433 bp, Homo sapiens
cacatacacacacgtaggctatgaacttagaaatttttcctagagcctgtttctgtgtactgatgtcaacctggaagtgtagaattagaaagtgttcacatttcactattggcctgctggattcaagtatttgcatgtttgatatgtctttttttaacttttaaaaaatattttttgggataaaaaaatgacatgaaaaagtaatgaaacaagggtaatgtgcataggcggatccaggggaacagagagcagatcgcagccagcgccttccgcatcagtcccatcgcggagccctctgcgcccgacagtacacaccagactctaccctgataaccggccacctctaaaaaagaacataatcatcacaggcacataataaatagacttcaaaaatacaaccctcccccacagataaataaaccctttcacagcc

SEQ ID NO: 482822 - DNA, 424 bp, Homo sapiens
cgtcgacagggagagggggcccagaaccaaggcaagaagggagagggggcccagaaccaaggcaagaagggagagggggcccagaaccaaggcaagaagggagagggggcccaaaaccaaggcaagaagggagagggggcccagaaccaaggcaagaagggagaggggccccagaaccaggccaagaaaggagagggggcccagaaccagggcaagaaagaaaagggggcccagaaccagggcaagaaaggagagggggcccagaaccagggcaaaaaggcagagggggttcaaagtcagagcaagaaaggggaagggaccagagaataagaagcagctctgaatgaactaaagaggtgaacttattcagcagtaagtctgagaggctgaaaacattctaggcatagacaaaattggtcgacgc

SEQ ID NO: 482823 - DNA, 869 bp, Homo sapiens
  misc_feature (3)..(3): n is a, c, g, or t
  misc_feature (6)..(6): n is a, c, g, or t
  misc_feature (8)..(8): n is a, c, g, or t
  misc_feature (20)..(20): n is a, c, g, or t
  misc_feature (26)..(26): n is a, c, g, or t
  misc_feature (36)..(36): n is a, c, g, or t
  misc_feature (38)..(38): n is a, c, g, or t
  misc_feature (55)..(55): n is a, c, g, or t
  misc_feature (58)..(58): n is a, c, g, or t
  misc_feature (64)..(64): n is a, c, g, or t
  misc_feature (67)..(67): n is a, c, g, or t
  misc_feature (89)..(89): n is a, c, g, or t
  misc_feature (92)..(92): n is a, c, g, or t
  misc_feature (147)..(147): n is a, c, g, or t
  misc_feature (159)..(159): n is a, c, g, or t
  misc_feature (170)..(170): n is a, c, g, or t
  misc_feature (201)..(201): n is a, c, g, or t
  misc_feature (204)..(204): n is a, c, g, or t
  misc_feature (216)..(216): n is a, c, g, or t
  misc_feature (266)..(266): n is a, c, g, or t
  misc_feature (279)..(279): n is a, c, g, or t
  misc_feature (282)..(282): n is a, c, g, or t
  misc_feature (288)..(288): n is a, c, g, or t
  misc_feature (291)..(291): n is a, c, g, or t
  misc_feature (312)..(312): n is a, c, g, or t
  misc_feature (316)..(316): n is a, c, g, or t
  misc_feature (388)..(388): n is a, c, g, or t
  misc_feature (400)..(400): n is a, c, g, or t
  misc_feature (443)..(443): n is a, c, g, or t
  misc_feature (460)..(460): n is a, c, g, or t
  misc_feature (473)..(473): n is a, c, g, or t
  misc_feature (476)..(476): n is a, c, g, or t
  misc_feature (577)..(577): n is a, c, g, or t
  misc_feature (579)..(579): n is a, c, g, or t
  misc_feature (582)..(582): n is a, c, g, or t
  misc_feature (584)..(584): n is a, c, g, or t
  misc_feature (586)..(586): n is a, c, g, or t
  misc_feature (663)..(663): n is a, c, g, or t
  misc_feature (807)..(807): n is a, c, g, or t
  misc_feature (854)..(854): n is a, c, g, or t
tcncantnaacttttttaangggtcncaaaattctntnacaaatttttggtcaanttntttccnttnaaaaaaactaattttaaaaacnaanaacttaaaactgccacacgcaaaaaaaaaaaccaaaatggtccacaaaacattcncctttccttctnaaggttttacnatgcattgttatcattaaccagtcttttacnacnaaacttaaatgnccaattaaaacaaacagttctaaaaccgttcttccaccactgattaaaantggggtggcaggnatnaggganaanattcatttacccttcttaccnttcngggcaaacttggtgaccttgccagccccaacacccttcttgtccactgctttgatgacacccaccccaactntctgtctcaaancacgaacagcaaagcgacccaaaggtggatagtctgaaaagcnctcaacacacatgggcntcccaagaaccanatnaacaatggcagcatcaccaaacttcaaaaatttagggccatcttccaactttttaccaaaacggcgatcaatcttttccttcaactcagcaaacttgcatncnatntnanccgtgtggcaatccaatacaggggcatagcggctgcttatttggcctggatggttcaggataatcacctgagcagtnaagccagctgcttccattggtgggtcatttttgctgttaccagcaacgttgccacgacgaacatccttgacagacacattcttgacattgaagcccacattgtccccaggaagagcttcactcaaagcttcatgggtgcatttngacagattttacttccgttgtaacgttgactggagcaaaggtgaccnccataccgggtttga

SEQ ID NO: 482824 - DNA, 502 bp, Homo sapiens
ttagaggatcccgacgtgccctctgtgccttcagaatgctttggggtctctttctgcaaccttctgccatcagttttcatttgcatgaagtgggagaacagcgcaagcgcaactggccctgctctatgtcttctgatatcttcctgaagtgaatccaacagatagttccctaggcataactagacaaggacatacggacttaggagagaatggggatcagttcaggtttgaaagtatgtgtgtactgcttcatggtattttagaacttcaggaaatatatgtcaaattctgatttaataggttcattgagtgtttctttgacaaattctgcaaggtatgcttaagtttaacatttgagtgtatctggggttcacagtcagtaggtttctttttcttttagaacatggttaggtttaaatacaaaaagtagccgcgcatggtggcacaagcctgtagtcccagccactggggaggctgaagtgaacgaattgcttgaccccgg

SEQ ID NO: 482825 - DNA, 349 bp, Homo sapiens
gcaggatacaaggccgctctcacatggccaggcttgctcttgatgatgtgtatgttgtcggtgcaaaacatcgtcatctttgccatgtataacgtaggcctcacagtgtatgttcctatgcgcacatggagtccgatgggtgcggcacttgtcctgagggtgaccacaatgaggcctcagccataaaggtgtggcgcaggtcgtagtgcgcccggagcaagtgcgtgtcctgaaggagctgccagtaacacatgggagtctgagggtgagccagctggagggagtccaggtgcgacaagtgtagggcccggaggtgcatctgggtacgcctcgggggtggggactgcat

SEQ ID NO: 482826 - DNA, 109 bp, Homo sapiens
  misc_feature (1)..(1): n is a, c, g, or t
nctggcgagacgacttgctgtgtgaggaaaaggccgccgtgggaaagaaacctatagcctgagcaaggagagggctggatcgccacgcgccgagatggagaggtcttca

SEQ ID NO: 482827 - DNA, 114 bp, Homo sapiens
cacgagggggaacgggagcagtctacgaattgtcattcgggacaaggcaaagttctgaggtctcactgtgtttcatgaggatcccatcgagtccaaaatatccttcaggttaaa

SEQ ID NO: 482828 - DNA, 194 bp, Homo sapiens
ttgagctcggccccggcactgtttggactctgggcactgtttggactctgggcactgtttggactctgggcactgtttggactctgtgcactgtttggactctgggcactgtttgaactctgggcactgtttggactctgggcactgtttggactctgggcactgtttggactctgggcactgtttggactctg

SEQ ID NO: 482829 - DNA, 252 bp, Homo sapiens
  misc_feature (61)..(61): n is a, c, g, or t
aggtgaggcacagtgtggtgcagcgaacttggagtactgtccgtgtagaaaacggacatgncttatcagccaatactgggagtgctgtctccacaatttcagggcatctgaatgtttgctgtggttgtgtgtgtgtgtatgtatgtgtataatattgaagtggatcatgagatgtaaagacaacaataatggcaatgacttatattcaactctgtatatgtatctttatcactgtactctgctgaggacctt

SEQ ID NO: 482830 - DNA, 442 bp, Homo sapiens
agcggagtgggtgcggatctgtggtggagaaggtatctcattcctctctaacatcatctccactttgcatctgtctctcttagtctgctttttttccacagaatcattacgagcagggagcccgcaggactcatgaggaaaggactatagatcgaggtacatgtgtgcgtaaagggtcatgaaagacacagtatggcagtcatcgacaaacaaataagagtagaccaaatggacaatacaacgaggatcctggacagacgacaagcaagaaagaggcaaccccaaaagggtttacaacacgatcgaggaagaccaggacagcgggtgaccaaggaggagagagaatgaaccaagataccccggagacgacgcaccagaacatagagccatgggaacaaagtgacccgacgtgagatcgacccacgaggacactcgaagaacg

SEQ ID NO: 482831 - DNA, 187 bp, Homo sapiens
gttcattgttgagtggttcaaaataattccccccatgttattattgtgtacacctggggttgtggtccctgtaacatttggagtggtgtggcgacagggaggaaaagtcaccattgtccacatgtccctgtcactctgttcagagcagtgtgcagaatgtaatgctatttaaacttctaaaactagg

SEQ ID NO: 482832 - DNA, 399 bp, Homo sapiens
gtaacctttattatactcctatatctgtttagcgcgcttaatctcacgggtgtgggaagtcgagacgcacactcgatagagggtgattataggtttaaagaattgagcgaagagaatgtcatagccttggagcagaatggctgagctcactatcacaagcagtgtgcatgtgaagatcacgttccattagcgaatgaagtaactgacactgcaagaacatggcatgctgatgagacagctgaggaacgtgacaagagactttatacgactctatggagacattactatgcacagatgctactctgcgtgaaacctatggtgaaagggctgactgctaggcataacacgatccagagagatatgtgctgcttgcagcacgactgacagccatcctcttct

SEQ ID NO: 482833 - DNA, 124 bp, Homo sapiens
tgggtatttttaagtagagacggggtctcactgtgttagctgtattccttaccttgggtataatgttaatattgggcttgggtaatgagaaaataattattttaaaattttagaaaggatggag

SEQ ID NO: 482834 - DNA, 904 bp, Homo sapiens
gtcccaccaattctggaatgatcccaaactgagacgcaggggacctgagttctaggcctggctctgccgtggcttgctgaccttggcgaattggagaagcttgtgccctgtgcgacagtgggatgggggtacccgcttcatctagtatcggggagatcaacagaggtatgggatctgaagaggatggcagactgtgcagtgctggtgcactccggtcttcctaggttgttttctccctccttattctcctcccaggagtctaagcgtgtaagcatagacatgtttggatggagggctggtggcacgtccctagggttcatcccgacttgtatcagctcgttgtacactcatcctctttcttgacgtatcttgtttaggctcgtgcatgggacttgtgatttgccctctatcctctggaatactagcgttgagtctgctggccgtgcgttgtaaacacgcgtttcgccttaccgtgggtgtctgtgctgttgaggcccggtgatcgcccgggcctgacaggagtgccggtgggacgcgcggcggcctgagggtggggcaaattggtgggtccctcggtacttggccgcgttgcgaatgcattcggacgtgtactgtaggcccggtagtactgtcggtgccggctttcttactaatgccgattgcccctgggtttgctgagcccttgctggcgtagttcgggacggtgtattgtcgcgcccaagcgttaggcttaccatttggggcctaagcagcaggactgtcgcggccagctttaatcttctgcttctgcgtgacgctggtttccttggcgctgctgggtgggaacggcctcttttgtctgggtggtaccggtagggcccagtttccccgcgttgcgtcgacggccggccgttgccggctccgt

SEQ ID NO: 482835 - DNA, 979 bp, Homo sapiens
gctggcctttgagactgtcccactcgtctctcccacctggcctgtgggctctggcaccagcaccgtcctgggctccagcagcggaggggccctgaatttcactgtgggcgggtccaccagtttgaatggtcgatgcgagtggctgtcccggctgcatgagtcggcatggtgccgaaccaatacaaccctctgcgtggggagtgtggcgaccgaggtccccctgagcacaacaggccccctccctgcagcatggcatggtaggcccgctgcacagtagtcctagtctgccagcgccctggtcccaaatgatgatgctatcagggtctgcgccagcactcgccggctggccacaccatcctcatctggtgcagacccagacaggtgcgagcgcaacaaaacttacagatgcatcaagcagagacctgcagccagcaaatgattccagcagctagcaaagcctgcagccgtgaccatcacccagcacatggcgcaccttggcgtgagctcagcgagccagcggccacctgggccggagcattcctgagtggagagccagagccagggcagaggtgcagccactgggccccagcagcctggcggtgcagcacgtatttctgccccaggagagccgccgcctgccacgtcgctgacatcctcgtggtcccacccgtgacgcagcgcagtacctgacgcgcgccttcgtgtgacagtacttctcgctgttggatgacagtgccaatcaagtgctacagggggcttgatacactatggtacgcagccctgaatcccctgacagatggacaagatcggtccgaatctaaaagctccgagtggcagaagacttgaacaagactaaaacacgtagagacagaacacgcgagagggagggaacaaacagaaccgactagaaccgggtagtaccaacacgagaataggcctatagacaaaggacacaaacagtaaaacctttaaaaaagcg

SEQ ID NO: 482836 - DNA, 172 bp, Homo sapiens
gcattgctgttgacgtgcaggacacgcccaaatgcctgtgtcaccttcaacttacctgtgtcatgaacagccgagtaactgtggactgcagccgtctcggtccggtctccattccccacgaccacgatctctatccggggctccagcaaccagaagagggaaaagctgtctt

SEQ ID NO: 482837 - DNA, 316 bp, Homo sapiens
cgctgatcagcttagcatctgggctgggacaggaaggcgccctggtttgttttccccagttgtaatagatgccaagcaggcctgattctcgcgattatactcgactcacctcctgtgttgtgctgggagcaggactgattgacttacggaaaatgcctgtaaaatctgagtaagaaactatcatgctggcctgtgtgatcacaagcagtcagcatcattaacaggacacacgtggcaggcacttccatctgtgccatacttgttctagtcatttcgcaaatgcagctcaacttgatttgcttaatctctctgccgg

SEQ ID NO: 482838 - DNA, 158 bp, Homo sapiens
ctatgtatctacgcctagtaggcagccctttactacaagaccaactatgcaccaagaacaagggcccattactccacaatccataacagccaacccaggggtcagaggcccttcctgctatggttcagtcctttgctctccagcatctagatactttt

SEQ ID NO: 482839 - DNA, 87 bp, Homo sapiens
  misc_feature (61)..(61): n is a, c, g, or t
gatttgctggtgcagtacaactaggcttaatagggactaggcttaatagggacaagcttcntaacgttagaaggcttgaattcgagc

SEQ ID NO: 482840 - DNA, 879 bp, Homo sapiens
ccacgcgtcgcccacgcgtcgaaaaaaaaaaaaaagaaaaaaaaaaaaaaaaaaaaaaaaaaaggggggagcacacataaaagattacccccagggggcccacaaaataaacgcctcacccccacatatgaggggaaaacaaggggcccccaaagcggaccgcgcaattataacaacaacagacgagagacacccagcagacacaccgggataacacacggagaaaaaagtgggactcatctgtcggcgatccatatatcgggcacagacgaagctctcatatcccatctgtgctgagccgagtgtgcgacaatatttagtggaggacacaaacatcacccaagaggcatatatatatcaaaagcctttaaaaggagaagatattataccaaatgtataagtgcggctaatacacgggggggttcaacaaagctaagcgggcgacactagcaaacaggatagcggccacctttggcacacctgttgggccactaacaggaaaggacacggacactatcccagagcacaccacctctctcttatcaccaggagaagaaataaacagagcactaaagatatctgaataggtgagagagcgcgagcgagcgggaggggacaggggcaagtggaggtgaaggagaaaacaataggaggaatgacgaggacagcgacgacagcggggaggcaggcgaggacccgagtggtaagcgcagtaggggagggatgcagtaagcaagcaggaagggggccgcggagggggaggaggaagaagagcgacggaaacggagcaaaacagagcaaaaaggcgcgaagagaggaagtgcaccaaaaggtggaggcacaggcaggaggagagagggggaaagagagagagaaacc

SEQ ID NO: 482841 - DNA, 677 bp, Homo sapiens
  misc_feature (233)..(233): n is a, c, g, or t
  misc_feature (235)..(235): n is a, c, g, or t
taagactctggttcacgtcggcgtgggattatgcgcactgtattgtgtcacggtagtatcgactgctggtgtttcagcgccaccccgagcaacgctggcgtgaggtggcagacgtgctggaagagctgaccacgacctggtattttggcgcacgcctgattgtgctgtggctgttgtcccgcgttctggaaaacaactttttgctggcaattgcagggctggcaatccttgcngnccgcggtagtgtctttgctggcgaaagataagaagttacatcaccttacgtctaaacatccgtacgccgctgaccctgtcgtggccgttatcaccagtagcggccacaaactattccacacaatatccagactcgcatccttcaaataaatctgcttggtaatgtccgtaaagtggcgaatagggttaatccacgtcaggttttgcaccataccggcatgttttccaccggagaaacgtaaccggaaaggagaatggcgggcatcataaagacaaacacgccgataaacgcctgctgttgtgttgaacagagtgatgaaatcaacagaccgaatcccaccagcgataaaccataaatcaccatcgtaaagtagaacagcgccagcgatccggcgaaggggatttgatacgcccagataccaatcgccagcacaatggtggcc

SEQ ID NO: 482842 - DNA, 162 bp, Homo sapiens
  misc_feature (130)..(130): n is a, c, g, or t
  misc_feature (138)..(138): n is a, c, g, or t
gacaggccagcatgtgcacaaaccaacccttaaagttgaacaaatgatctatgaagtttgcctcatccaccatattcatctgacctgtggccaaccaactaccacttcttcaagcatctcaacaactttntggcagangaaaacacttctacagggtaccga

SEQ ID NO: 482843 - DNA, 743 bp, Homo sapiens
gccactttcagcctagcgtgaaagagatggagtgtgctattcccacttccctttatgtgtacccgtggaactgatggagcatgcccagggtcatcggcatgttacgtctcgtagacgagtctctctaggtcttcctgcaatggcagcgccgaggttgtatatttctatggtgcaggtatatgattgccatatgagtacaaaatcgtgaataatcatcccaagataagatacaagagacatagtacaagataggtagacgatggctcagataaactgtcttggcagagcgcacacagtttaccctaaaagaaaatcctaaattacatcttgcatgtgtacgagagatctgaaaactgcattcaagcatatatgggtgttcaaatcgtaggtgaccagggagattagggctttgctgaattgcgaagagagaagagcttagtgttctttggaaatgtgcttgtgcaggatagaaaagtgtggtcttaggttttcctgaataggttggattccgtggagaacctttgtggaggcttacgtccttacaggaatggtttaactgaacattttggtactactatgactttaaaaacagtgcctccatttagggaatgtagactgggaagcccaggggttaattagtaggacgtaaaggtaactttagaagatacgagagttacttcctttctctttttgttcaacattttggaaacggaaaaacttatgatttttgagtggaaaactaa

SEQ ID NO: 482844 - DNA, 1038 bp, Homo sapiens
gctccgaaagtggcagctagccagagagggagtcggtgtggacgcggatgagccgggcgcttagaacagagtgcttgcacaggtggagatgtggaagctcgtgtagctgggccatgatgatgtctgttatccgtgtgagacccagggtgtatgatttggtgacacacgatcctgactgttgtgacatgacactctctgaccaaggagcaactgatggggagccaagacgcatcgaggggtctggacgctacgagaacacatctaactatccaccagctgaggaacaagagtatcacgagtgagccatgatgttctcaggaagaatcgagatggcgtcagggcccgaatgcatccctatggctatgcgaggtcgtgctttcggcctagacacgcagaccgaatggacaaagaagctgacaggtagagtgccatagaggtatggttgcctgcacgtgtggctgaagctactctatctcaagacgagatgctggcccaatatggcttcgcgcgcgggcaaaggtacccgcgacgtccgacccaaggcgaccaccggggacactactcagcaggtccagacacacctcaggcctttcgactcaactacacagtgccagaacgttcgagagaaagccaacacgaaatttcgttcgcagaaacacattgaacatagtagtatccatcacgatggagcagtgaagactaggcgctcccgcgaataatccagcgggcataggagcaacaaaagaggcgaacgtaaaccatataggcatagggcaccataagactactgagtgcctttgtcgagtagatttacttgcaacgctgtcaacgccaattgacaacccgtaacaggagcaccgcagaaactacatggcacccaacataggaccgcaattccgccccaagagaagagacaaggtacacctggacaataggagcccccaaagctcggcagacaccttctgcggcagaatcacgtagcaccagcgtatgtacctccggcagacatatctgcggaagttcacccttgctggaccc

SEQ ID NO: 482845 - DNA, 653 bp, Homo sapiens
tccccaaacaaccgcagagggttcacaggggaaatttccgcccccagttgtaccctcggagggttcctggaccttgggtgttgggcatcgcgccaccctctctggcttgggtcccgccattgccgattgtcccgggtaaacctttatacaggggcgcggcgcgcctctccgtgtggacgcttcccaccgtgcttgtacccggctctcatatccgctgcaagggcaggagcgtgggcccccatgcgccccgggtttttggccccacctatacaggtctttggggcgaaaagaatagactgtggcgtctggagattacggctacacaaggcaaagagaccaggagatcgcaaggagatttctcgtggagacggcttgtgtaacaccttttttacacaactcttagactcttagtgtgagttttgtacaagggagacctcgggggggaggaataatactccttcttgtagaaccaagtctcccagggtatatactccttgcggaaaaaaaaatgtcccagggggccacgcctctcttgagatagatgtttggtggcggagacaatttggcgtctttgtccgggcgtccccagtgataacattccttcctcccagtgattagacttctcccttaatgggggacaaccttaaatttcg

SEQ ID NO: 482846 - DNA, 986 bp, Homo sapiens
gcaatacagcaagactgtctcaaaaaaaaaaaaaaaaaaaaaaaatttttgggccgcctgggccctggaaaaagttttttaaaccttccgttgggggcggggccccattgggttagttgaacttggcccattgttgttcccctaaggaatacccgggggtcatatggaactaagtggcttgggtttctcaaccaattaaaaaaaagcgccgggggggcaaaccggagctgttctggaacaatctccagatgggatgtcctggaggtctataacggggtatctaatcaaacgaggagtccaaggcggagctcgaattatcaaatattaacgcgccccggcccgtgggataattcgaaaggtgaaccatactatctgcgcatggaacgccattccacaaacgggcgattgattaaacacacttgaattccgaccaagcgggactttaagaccaccgtggttcgcctttggggcgatgttaatattcgcgcccagtgggttgaaacgggggggcaaaacaagttttgtccatattgggcccacgtttaaatactacaacgcggggtgtgacacctacaccacaggggaattgggttgaaaaaaaaaaacaactattctccaaaacacccctttgcgggaaataggccagaaggtttcaacccggaaacgcgccagcattttggcagacatattggtggtcaacccggccgaaaacgcagggggagtccaccaaaccgagaaaacggtccagaggcccgggaacgggggacagggggaaacattacatatccacaggcaccgtttattggcgcacgaagtccggatgagattccaaggggcacaagtggaatacgccggaacaagggatatacatgcgggctaaaggcgaacaacagacgtggtaagaaatgacaatgagacgccaagttaaccgggaataaggaagaggaaccaaacacgacgacgacgtaattaagtccgacaacggc

SEQ ID NO: 482847 - DNA, 135 bp, Homo sapiens
  misc_feature (24)..(24): n is a, c, g, or t
  misc_feature (48)..(48): n is a, c, g, or t
cctctactctacgtaccttaccgncccctacgtaccgggcgaccgcanacttacccaacacttctactgcacttttactttcttgctactggaccaccttctaccacacctgggggggactcctctacgacgtcg

SEQ ID NO: 482848 - DNA, 469 bp, Homo sapiens
  misc_feature (117)..(117): n is a, c, g, or t
  misc_feature (124)..(124): n is a, c, g, or t
  misc_feature (395)..(395): n is a, c, g, or t
  misc_feature (450)..(450): n is a, c, g, or t
taaaattgttttagaaataagaaagaatattgagatatgcatgaaactgtagttattctgagcttcaggatattactgtacaagtagtaagctaccaaaaataagtagtgaaattanacatggnaaatgagctctaggagtaacctgctgcaaaaccgtggctcacatgacctcactgtaggagttcttgactcagacctttaagctggtgatgagctgtttcacatgattgataatgcagaagctcctctctgaagtcacttttttttttttgttttttttttgggtgacagagtgagactccatctcaaaaaataataataaaataaattaaaattttaaaagataattccttctaaaagagaaggacttcactttagttgtgacttattacntgaaagaaaaatttgatatacttccagtggaggtgtgctgtaaatatatagaaantagcatatagaaaaaaaaa

SEQ ID NO: 482849 - DNA, 457 bp, Homo sapiens
gcggccctgattttatactaatcaatgggacacgtgcctatgtatatacttactaatacgtttaattccatattttagcaagaagtcacattacttttgagaaataaaactgtgtattatgtatacttccaatcatactttaatttcatacaactgaaactgtattagtatatttatcttcatttttcaataataaaaaagtatgtaaaataagaaattattctgataacccaataaatctgaattgggaaatataaggagaaaatactcatgcaatctatgcctatagctttctacttctcctattctaagatttatcaaagttcataaacataattgtttatctgtctctccagcttcaatgcaagctctaggaagataaggactaattgctattatatctccacagtccactggatgatgttcaaaactaattataaatgaatgaataaataaa

SEQ ID NO: 482850 - DNA, 1026 bp, Homo sapiens
cctgtgttgtgtattgaatacacccgtgcgtctcgagttgttgtttgtgctccctcaccgaccaaagaaattgtggtgtgccctctcaccatgttgatgtagtacgaccacgtacttagatttgtgtgaatagtggtgcggcgtcgttgtcacttcatgatgacgcgatctttgttcgaaccacaatgatgtagagaacacctgcggtggttgtacgtagaaatcaactcatcgccctcactgttgtgggttttctggttaaacatgaagccccacccaacacctctggggggtggattaacaacaaaacgtaggtgtgttctatcagtgaatgagattctccttaatatcttgtgtggaccttgttgtgggtatcacactcattcttccgcgtggtgtgattgttgtttttcttgttcgcccacacattgtagataaacatcgtgcgcccgcgcttgtatattttgttgtataccacttctgtgtggggtgtcatagagagattgttcgcctccccgttggtgcccaccttgttggggtcacacagccactgtgggtgaacagaagggagggctgctctttgttgtgtcgtcactccccacgtgggagagtgctccacagttgtgtggcgcgacttgtgtggcagccacgtctgtgtgttatcacacacacgcggggggtgtgtctgtgaataaagcagacgctctacactcacagaggtttttcagcggagaaatttatagcttgtcacactgtggagtgcctttcgagaatcgctggtcgactataaatggggcccccgccgttagagagcctctccatgacgcgccaccccctggtccgagaagagaacactggcctcgataagggtctgtcgcaacgaaagtgttttttctctataccactagtggttgctagctcaaccacaaaagttctccccccccccccccccgcgcgccttttttccatttttttccccccccaagtggggagaaacccccaaataaaaattttttgactctccta

SEQ ID NO: 482851 - DNA, 827 bp, Homo sapiens
tctttttccatctgtcatggtggatcttttctctcttttttcattcttttcgtggtacgtctgttttcttgtccttgttgtggttcgtttgtggtttgtctttttctattgcgtcttttcgttgctctcgtggttctttctttcttcttctgttttggcttttggttcttgtattgctgactttgtttgtttcgttgttgtttctttcgttgtctgtgttatggctttcttcagtagggagcttgggtcccgtatcgcgtgcggcgtgctcccatctgggccgcctaatcgggtcctgcagactcgtgttgtgtcgcccgtgttttcgcgtctttctcttgtcgttgtgtatggatcctgcgtgtgctagatattgagctgaaatgacgctctcgatcgaatgcgttgttttgagtcagtgtttcggttggggccccctcaaagggcatcctgggctacactgagcaccaggtggtctcactctgacttcttacagcgacacccactcctccaccttcgacgctgggggctggcattgccctcaacgaccactttgtcaagctcatttcctggtatgacaactggtatatttggtctcgaaggtggtggacctcatggcccagagggcctccaaggagtaagaccctggaccaccagccccagcaagagcacaagaggaagagagagaccctcactgctggggagtactgccacactcagtcccccaccacactgaatctcccctcctcacagtttccatgtagacccctttcaagaggggagggcttagggagccgcataagccagacatcataactggtcacttc

SEQ ID NO: 482852 - DNA, 399 bp, Homo sapiens
atatgcacggccataacacccgcattgattcaggctcctaatgtgaaggacaatgacctggtgttgggcctgagccatctcaacaactcctacaacttcagttttccacgttgtgatcgggactcacccggaggaaggccagtacagcctgaacttccacaactgcaacaattcagtgccaggaacaggagcctccattcgacgtcacggtgatgatccgggagaagaaccccgatggcttcctgtcggcagcggagatgccccttttcaagctctacatggtcatgtccgcctgcttcctggccgctggcatcttctgggtgtccatcctctgcaggaacacgtacagcgtcttcaagatccactggctcatggcggccttggccttgccatatgcaa

SEQ ID NO: 482853 - DNA, 438 bp, Homo sapiens
tttactgccctccaagtgaggaattcatgtcaagataggactttctttcattctacctggaactgcaatgcttagtactatccctaacaacaaccatgggatgtatgcagttctcccaaatgcaatgcaaagcctttttatgtctcttccagttgtacgattgtcatagcacaagtgaatgctatgaccaaaatttatgccctcctaaataaagacgtttccttctagagagcatatctctcataacatgtcaaaactagaagagaataacaatgcaaggaaaaaacctagataaatatcctaaaatatcaaatgtagtcatttctaaatataagccataattatagctttacctatcgtacttattgttcctatgctgcttctacaatgttacatcaactatacttagctttactctcccaaaatcctggtaatgaa

SEQ ID NO: 482854 - DNA, 124 bp, Homo sapiens
cgggccgtcgttttacacgggccgtcgtttaacactgggccgtcgtttaacactgggccgtcgtttaacaactggccgtcgtttaacactgggccgacggtttaacactgggccgtcgtttaaa

SEQ ID NO: 482855 - DNA, 323 bp, Homo sapiens
ttttttttaagagacaggaacttgctctgttgcccaggctggagtgcagtggtgcaatcatggctcactgcagcctcgagctcctggcctcaattgatctcctctgggccccccaaaatgctgggattacctgcatgagccacttcaccccacccacctcgggcctgtggacatgggctgttcctccctctcccagctgctcctggggcatcctggcccccagcccagcgagctctgctcaggaaatgagcttcgcctgcgttctctctgctgttgggctctggctatatgtggagccctctcaccatgtatttcttgtcgac

SEQ ID NO: 482856 - DNA, 132 bp, Homo sapiens
  misc_feature (39)..(40): n is a, c, g, or t
ttgctcctggtggtctcctcccatgcaggagcatcaggnntgaagtgaagggcgtgtgcacagaagctggcatgtatgccctgcgagaacggcgagtcatgtcactcaggaggatccaccagagagaggcaa

SEQ ID NO: 482857 - DNA, 918 bp, Homo sapiens
agcggctcttttcctccttgagctgtctgaggatagatcgctcatcatgaacgacaccgtgattatccgcggtgacaaagttgatgatcaacccgacctacttcagattggaaacacatggtcgttgatgtccttcatgccgcgtggaaagccacagtgcctaacgacagaaatagcgggaaaaattagacccagaactgtacaataccacaccgcgatgtcatctgttgtattgtcggattcagaactcactatttggtggtggcaagacaagttggttttgtgcatgatttattgacttcccatggagtaaatgcactagatactctagtgaacctcggactagcatatgactttgccagatgacatgtgcctagtacttgacgaatgagctagaggacctcaagacaatgcaatcgaacgagtgagacgcggcactaaccatgagatgaaacgaaacgtcaagggtccaacctgtccgatggtccaaatagaattgcgtgcctggtcaacagcagagtgatgcagggaacgactagggaattcacagaccgacagagaagtaagagcgtagctgcgcatagcatgttggccttgtgcgccacatggggggattcgtgctgacaggaaagcgtttaactaaaacctaaattaaagatctatggagtacaaacggacgaacaacctgagttcagccccgaagagtaggtccggacagccggatacgaggggcagagaacagcctttggcataagtaggtgcgcccacggagtagccccatgtcgcttgagatgacttcgtcaagcatcgagagcggttgaactactgggcagttggaggcaaatacccagtgagtccaaacccggtaaccgttggttagtaacatgcggagtgagaggtcaaaaattccggataaca

SEQ ID NO: 482858 - DNA, 199 bp, Homo sapiens
tacagcggggtgagggtcattaggttaaatgggatggtaatgggcatgtgatcagattgtcagggaaggagtagaaatgtcccatatttgtgggttaaggtggggggatatgagaggaagacgcaaaggaggctttgggttggggagaagggcggcaatgagatgcggctgtagtccaggaatagtcaggaaagcagat

SEQ ID NO: 482859 - DNA, 173 bp, Homo sapiens
aaaaaaaaaaaaagccaaaagggtttttaaaaaaaagcaccccccccccctgggtttgtaaaaagtcagcttattttgggttcaatcgtttgatttttccaaaaaaaagtggaaaatgctgtatcaaggggggggttagctggccctttccaataaaaatgtgagaagcttca

SEQ ID NO: 482860 - DNA, 205 bp, Homo sapiens
gtatgcattagacatctgaacacccatagcttagaccaactgggattagataccccactatgcttagccctaaacctcaacagttaactgcaatctgattgcatttagacccctcaaaaaaaaaaaattgctacccattcctcccattaaaccctcggttagattgcggaaaaccccagcacggctgccctctcggttaactcac

SEQ ID NO: 482861 - DNA, 448 bp, Homo sapiens
tggacctccattactccatggccagtgatgatgagcatttttacatgtgttttttggctgcataaattcttcttttgagaagtgtctgttcatgtccttcgcccactttttgatggggttgtttgtttttttcttgtaaatttgtttgagttcattgtagattctggatattagccctttgtcagatgagtaggttgcgaaaattttctcccatgttgtaggttgcctgttcactctgatggtagtttcttttgctgtgcagaagctctttagtttgttcacttgcttttataaaagctgtgacatgtgtcagtcttcccttttatagtattttgattttgagtcctgcttgggaaacttttccctacatagaggttaaaggggaattcattttttctgcacgtactttgattgttttatcttttttgtattgatagccatggagtaa

SEQ ID NO: 482862 - DNA, 301 bp, Homo sapiens
gatgtgccgcccgtgcccacgccgagcggagactgctgggaaaaagatcttgatgaagctctggaagcaggaagttgtgatcttgaaacgttgagaaatataattcaaggaagaccgctgtctgctgatctgagggccaaagattggaagattgctgttactgtggcaggacaaggcgatagttaggcatcatgggatgggaaattaagactttgccagaacagaccactattcacatagattgcctgcagtatatcgaccagctttgagagccagctgagaaggccccagaatcactgat

SEQ ID NO: 482863 - DNA, 783 bp, Homo sapiens
tctcccctcccccccttcaccattcccctcggaggcgcttccccgggaggggaagccggtctcaccccacagcaacacaccaggaaacaaagcaagaacaaatgcaaacaagagaagacgacacaaaaaaacacgagaacaagaaaagaagaagaaacaaccagcacaaacaaacacaagacacacaaaagagacaaaaaaacccacacgaacagaacaaaaaaaatactaacaactaacaaaaaaaaaaaagatatattaaacaaaaacatatcaaataaacaaatacaacaataccaactaatacaataataacataaagaaacgcacattaattataaacaaaatgagaacataatacaaaatatactagaatatcaacaatatataaaaacactaaaaaatcaaaaaacagaaaaaaacacacaaacgataaaacacaaagaaaagaaaaacaacaaaaaaaaaaaaaacacgactaaacaaacaaaacaacaacacacgcataacaccaatacataatatagcactcatagacataagcagaaaaagaagataaaaaatcatttatcaacgataacacaagagacagaaacacaatgaaagaccaaaccagtacggagattaaaaagagagaacgcaaaactcaaaccacaactaatagaatcacaccgcaacacaaaataattgaaaaaaacaaaagaagacaaaaaaccaacaacgtaaccctgacgaaaacaagcactaagaatggtaaacaaaagcaataaaaatagaaacacc

SEQ ID NO: 482864 - DNA, 347 bp, Homo sapiens
acgcaggcgagctctcgacctgtgtgagcagagacgcgctgtgccaccatgtgcataatattctttaagagtgagcctctccctgtgttcaccttcaaggtagctgacttctgggggaacaacaacgagatcctcaatgggctggacatggaggaaggcgagggaggaagcacatgggtgtgcattagaacacagtggaaggtgtgaggacttaccaacttcctgtgaacgcaactggactgtgaagcccgagaggccagcacagggggagacgtcatttgctactatgggaaccgaggggagcctgagcctatcggtttgacaccagagttgagcctgtgattact

SEQ ID NO: 482865 - DNA, 970 bp, Homo sapiens
gcgccaaggctctgggtgtcatggatgaggcttaagtcgggagggttccgaagagctggctaacgtgtgatatgtgcaccttccagattccggggccgccgtgtccaactggcgcccccaccgacgtgtagatggtgctatgatcctagctgcgaattactcaccccgtgctctgtccttcctgggggcctccttgccacatcatgagctgaggtgggaccacagtccccaggctgcatcggcctgactgtgtttccctcttagcgtgcatttatctttttgatttgtgtccgagtggcatgtaagtgcacaaatgataacaagaggattattctcccgttctcaagggagtcagatcaggggaactattctagggtatgttgcggggtattaagcaggagacactgtgtggtggggggcactgggcttgtttgcgggcgcagaaatgtcgcacgtcctgagcatatcatgctggagcaatgtgcacgagagtaggcagacgtacagcgtctcttgaaccagacccattctcccatgacctggatcttccagcccagggcatgagccctctcattctatacctgctccccattcccccaggtggggactgagttactgaggagaaggcgacctgtccggtggcgacacatgatactaatcaaaacgtcgggtaccacttggtctgagggccctacgttgacagttggtggcgcgccacgggggctgacctggcatcctagccttcctcctccatgttttggactccaactaaatgattactctacattgggcgcctggcagtatgtgtagcgttgcgatgggaaagtggacggggcaagctaaacccgcggttacccaggcctccgctagagaacgtgctgacggacgctggcgaggacactatctggcggactaagggaatacagaccttctaaagagaccagtgcaaggcgctttaaaaaccccaagc

SEQ ID NO: 482866 - DNA, 194 bp, Homo sapiens
  misc_feature (36)..(36): n is a, c, g, or t
  misc_feature (45)..(45): n is a, c, g, or t
  misc_feature (106)..(106): n is a, c, g, or t
ggtttgagtgggcttggcagcacccgcacgcctcgnccgcctggntctgttggggcctcgcctgcggtagtagacagccttcgctttccacctgcgcgtgctggcnacatgctgcggcaccgccctgggctcgcctcccgctcacgctgcgctgggtgcgccagacctccgccagacctctgcctcccgccgcc

SEQ ID NO: 482867 - DNA, 249 bp, Homo sapiens
ctgctcctctcagtctcgtggctcctttcatagcccgtctgcaggcagattctctcctttaatctcagaccaaagcctttatacttcataactaggaaggcttaaaaggtcacttacatctctgaggactcagttccccattcaaaaaaacagttttagagaagaacagtctttcttatattcccattgctcagtaacaagcttggcacaccaggaacatacagaaattggaagtttcccttcctcccc

SEQ ID NO: 482868 - DNA, 436 bp, Homo sapiens
  misc_feature (284)..(284): n is a, c, g, or t
cacgagggctcccggcgggtgaagaatcccaccgagcgctggcgcttccgcgaaaccctgtgtgctaccgccgggaccaccgccgaagtgtcccgggccgccacccgcctgctgcgcgaaatcgccccgccgcccgagcgcgaagacggcgggcgccgcatcctgcacggcgagaaaaccacgctgagctttaccggccccgccgccgaaatggccgatatctgggccaccgcgaaggataatcccctcgcctggctcaccggttcccgcgccgtcgcgccggncagcgtgaccaccaatgtcatcatcgagctgccggattacctgaaagttctgcgcggcgagggctccgaagtccgcctcgccatgactaacggtgccaccatcactggggccgacctcatccgccgcacgctcgccggggccggccttttca

SEQ ID NO: 482869 - DNA, 316 bp, Homo sapiens
agccacacacccccccagcaccgccaggcttggcacggcggtccagcaagctcccaccctctgggcaccaacctgcattgcagttggcaccttaccttccctgggatccccagacttggtccaaggagggagagtgggttctcaatacggtaccaaagcatataatcacctaggtttacaaatatttttaggcctcacgttaactcacatttatacagcagaaatgctatttcgtatgctgcttaactttttctatctgtgtactttttcttacagggaaagattttaatattaaacctggtgcttctcactccac

SEQ ID NO: 482870 - DNA, 298 bp, Homo sapiens
aatttattatttatttatttaaatatgcaatatatgaatgtggtttgaaatttataagacacaatgatgtatacagaggaaatcctcactctcaatcctctcaagtgtttgttaattcctcttgcatatgcaatctcgtttttccagctttgtgtttatctttccagagaagtttactgtttattaatcatatatgtatatctttattcttgctcagtattttcgctattcagcagctaagttcactgttctgaactttattttttaaatttaatatatattgctatgtagttatttt

SEQ ID NO: 482871 - DNA, 489 bp, Homo sapiens
agcggctttctcggcccccggagcggtgacggggtgaacggcgggggaaccgacagtgggtgatgtccgcctgagctcccgagactgcgagcacgcgagccgcgcagccgtaccccgggccgcagtcaacgggtcccggggtcggcgagcacagtcttgaggcctgtattcatttcctatgtatcagggttttcagctagcgatagcatatggcggcacgcaaggtcactgatcgcacagacgcaagatccggggagatagcattagggacacgtacttgcagaggtacgaagcagggaccggtaggagcaatgagcaacgggatagaggagaaagacacacacgagacgcactgaagagcgctaagcacagaagaaaagcgggagggaccgaagagcccctcagatgcagacgagctgagcgctggacacgatgatcccttcacaaggaagggaacggaggcacgcaaacagtgccaccatcacacac

SEQ ID NO: 482872 - DNA, 119 bp, Homo sapiens
cccatctattcggcactcactatcgtagagtcttaggatattaatcatagggtgttgtttgtttgttgttgttgtgtgaaacagggtttgctttgtctcccaggcttcagtgcctgacc

SEQ ID NO: 482873 - DNA, 245 bp, Homo sapiens
ggcgcctacacttcgctgtgcagaagaaggtctgttagacccaatgagacaatgaaatcgcaatgcgactccgtcatgcagatcgggaagctcatcaaagatggctgatcatcgcaagcgtgtgacggtccattcccgggctcgatgccggaaaaacaccttgggccgccggaagggcaggcacattgcgcatagggtaagcggaaagtttgctaggggggtaccgaggctcgaaattcggtaat

SEQ ID NO: 482874 - DNA, 138 bp, Homo sapiens
agcattaaagggcaggtccatactggcccaagtgacattgttagatccatgtcccctccacccaatcactgctgcttgcaagggtgcctcttcacagtatcccatgatggcagcagatagtggcagaggcagaagtgg

SEQ ID NO: 482875 - DNA, 522 bp, Homo sapiens
ggcggccgtggatataaccgcagtcgctacaaaccggtcgtaaagagtgttcctgatcaccccttccccaataaagctaaagctcacctgagttgtaaaaaagtccagtagacacaaaatagactacgaaagtggcgtttaacatatctgaacacacaatagctaagacccaaactgggattagataccccactatgcttagccctaaacctcaacagttaaatcaacaagaactgctcgccagaacactacgagccacagctgaaaactcataggacctggcggggcttcatatccctctagaggagcctgttctgtaatcgataaaccccgatcaaccgtcaccacctctggctcagcctatataccgccatcttcagcaaaccctgaagaaggctacaaagtaagcgcaagtacccacgtaaagacgttaggtcaaggtgtagcccatgaggtggcaagaaatgggctccattttctaccccagaaaactacgatagcccttatgaaaggggacctcta

SEQ ID NO: 482876 - DNA, 150 bp, Homo sapiens
ccttgagacaaatgaagtaaaaatacatatcgcacgattttggtatacactgcacatagttttaagagggaaatttatagctctgagctgttatctgaaaaagaagaatgatcgcaaaaccgtagcttaactttgcattgtaaggaagta

SEQ ID NO: 482877 - DNA, 157 bp, Homo sapiens
gacctagaggccccgtagatcctaacagaaacttagcaaacatttacccaaataaagtatatggcgatagaaattgaaactggcgcaatagatatatgtaccggaagggaaagatgaaaaattatatacccagcataatatagcaaggacataaccc

SEQ ID NO: 482878 - DNA, 605 bp, Homo sapiens
  misc_feature (422)..(422): n is a, c, g, or t
tatcgggaggtttcatgtaagccatttgaagaaggcaacacttggacaaaatgatcgcttcatactttgggaatttgtggcatgttcacgatctatggctagggcagttctaccacagagcactcaattgtgaatatgctgacacctctcttaatagagcgatcctgtagactcacttaataaggcacctgtgagctatgcctcagtcgatcaacgcggatgaagtaccgtcaaattctcatgatatgccatctgtcctcaagtgtgatctacatagggaaatacaatgtaattgatgtacagttccatttctgtgcagctggcattttacttaacactttgggtcaaacgataatgtgattcttatgattgatttctcaacactagactattctccgctccacaaagtccagggaccccantttaaattttccctgaaggccaatgtcaggaaacatactattgtcccaaataactgctaaaaaattaagcttacaatttctgctggaccctactagttaaagaatctgggatgctggactcattgacaagctttccagaagcaattttataacagatttcattttaacaaaatactgatccaa

SEQ ID NO: 482879 - DNA, 196 bp, Homo sapiens
gtagcccccccagttttgccccccccctccctcccatggacccccgcaaagtgaacgagcttggggcctttgtgaaaatgtgtaagcaggatccgagcgttttgccccccgaggaaatgcgcttcctaagggagtgggtggaaagcatgggtggtaaagtcccccctgctcctcagaaagctaaaaaaacaaaaaa

SEQ ID NO: 482880 - DNA, 345 bp, Homo sapiens
taggtgaagaactggatgagaggattggtgttctgggtagaaaatattgcaagcaggccgggtgcggtggctcatgcctgtaatcccagcactttgggaggccgaggcaggtggatcacctgaggtcaggagttcaagaccagcctggccaacatggcgaaaccccgtctctaataagaatacaaaaattagccgggcacggtggcgcatgcctgtagtcccagctactcaggaggctgaggcaggagaatcacttgaacccgggtggcggaggttgcagtgggctgaaatcgtgccactgtactccaggctgggtgacagagcgagactccatctcaaaaaaaa

SEQ ID NO: 482881 - DNA, 533 bp, Homo sapiens
  misc_feature (424)..(424): n is a, c, g, or t
gtgtttgtattacaggcgtgagccactgtgcacagcctaactcatattatttaaaaaacaattaatcaaataagttggttaggattagtttcagtggcataaacagaaacttaaacaatgtgaaagcttatttctgtctccttctgccaggtgaacacacagtgttcatccccttcaggaggacaacacccaaaaaaaatgccccttttttttctgtggaggtaccatcgttggacagcagagaccagccctcattatacacaaacttcctggcacgttgatttgggacttcatagcctctagaactttattcagaggctgctctactgagaagatgaacaaatttcttgtccaaaacaatgtatttttccaagacgtgccactcgggggggcccctcctttcccgtgttgcttcccaactggngattttgggccctggcgaagacaacacttctgaactatattttgacagagcaacataaggtaaaaaaacaaaaggagttagcgggtcatttaaaatgaatctggggaag

SEQ ID NO: 482882 - DNA, 424 bp, Homo sapiens
  misc_feature (13)..(13): n is a, c, g, or t
  misc_feature (62)..(62): n is a, c, g, or t
ccctttttaaagnccccctttttaaacccccccagaagttgaaccaccacactgtgctgcgnctgtgttgtgcaaaggatgagagaagcataaagcaaataacgggctcccttagtgcaaagaacttgccacaggaatagaatgaatgatttgttttgccctttctgtttagttcatttaaaaaattcccagccgcttacatgataatagggtataagctataggagaaacattcacagggaggatagtttagagcacactctgaagaacattaggttgtgggagaaaagaatagaagagtgggccgggcatggtggctcacacctgtaatcccagcactttgggaggctgaggtgggcagattacaaggtcaggagatggagaccatcctggctaacacggtgaaatcccatctctactaaaa

SEQ ID NO: 482883 - DNA, 117 bp, Homo sapiens
accaatatcgtaatacggtggcttccatcaggacagtggtggaggaagtactgagaaagggtaagattctgtattccttttgaacggtacacttgataggatttgctgcaaggctga

SEQ ID NO: 482884 - DNA, 956 bp, Homo sapiens
  misc_feature (90)..(90): n is a, c, g, or t
aagccaaggtaaggcgaaggggaatggggtaggggtgagatgggctgattcaggagtctgaatgagaggccttgagctcatgctactctnggaattgattttagttattatcacccattgttgaatgaatgactcctcaactcaatcatgcaaaatgaatacacttattttatggataaggaaaataagattcaaagaagtcaagtaacctacccaaagccatgtagccagtcagaactaagactgaactggctgaatccaggtctgtccacctcccaaacccctgcatttccattcctccaagatgcctttctcaccaaatatccaataacctatggaagtagttcaagatctgcggagagagagcttaagatacccatcaaagcctttcccaggaccccaggaggatgattttattcagggactctggaagggaactggttgcagtttatttaacacctgctgaagaattccagatgtcttattttggatctccacaggcaggaattcctcagggacacatgtagttcaaacttaagggaggatcagaaaaacagaagtccttctgtggtaggatgttatacgcatagccacatcaagtccttctatccttatgtgcccactccttttacacatgtgaacttgccttttttccccaaccaagaggtaggggtctattttgctaaccccttcagtctgaactaagcccatgacttgctttgaccaatccagtaagagcagaagagatggctgtgtgacctctctaaggcctcaactttcaagaaggtggttgccgcttccgatcctcggtactctatacaaacctctggcatccacgttaagaaacttcagccggacatactatggataagatcttcccaaagatgacgcagagagtttccaatggaggcccggacacattgccgaattgtacgaaagcctttaacaagcaggca

SEQ ID NO: 482885 - DNA, 819 bp, Homo sapiens
gacctcgcaggcagcgcgtttacgtcagagcgcccgagtccatggacctcgcaggcagcgcgtttacgtcagagctcccgagtccacgcacctcgcaggcagtacgtttacctcagagctcccgagtccaccgacctcgcaggcagcgcgtttacgtcagagctcccgagtccacgcacctcgcaggcagtgtatttacatggaaattggatcgaggcactgacgtttaaatcttggctcctgctcctgccgtctagacaaagggcgcacccattgccgtctcagacaccagaggctcccacttgaccagaaacccactcctgcgatgaaggatgaatcttcctgagggcagagctcttaccgcccactcgcccctctaagttcccacctcccaaggccgtgtctctggggatgaagtttccaacacacaaacattgggggcaccttcaagccacggtgtcctgtaaaccagcgttccagcatttgccaaatggtgtttcttttaccaggagataaggactctgatcaggtcctttggaaagagcaagggaagctgttcatgttctatcctgcgtgttctcgagaaagtttgatgaccagaaaacatcacacagaaaggggaaggcatcgcaagtttccagctccatggatttttgcaaactgagcacatttgtgggccaggagtggggcccacagcgagaatatccttcctgctgctcctgccgtccatccaccagcacagccagttcccagctgtggaacacacagagctgtgcactgttgagttgatcacgatgagaacagtgagtgtctctcagc

SEQ ID NO: 482886 - DNA, 264 bp, Homo sapiens
aaggtcgagtgtggcatagtaaaaagagcgatatgatacaccctgtctgagatggaaatatcagtatcttgattatatggatgtcaatatcctaatttcgttcttattgtgttatcctgatgttaccattgtcctcaatagtcaacgtgtatacgtgatctctggtattatttcctataactgcaagtgagtctacaattatctcaaaataaaaattttaattaattttacgaaatattttccccaaatggtggaagttaagtg

SEQ ID NO: 482887 - DNA, 827 bp, Homo sapiens
  misc_feature (6)..(6): n is a, c, g, or t
  misc_feature (68)..(68): n is a, c, g, or t
  misc_feature (76)..(76): n is a, c, g, or t
  misc_feature (88)..(88): n is a, c, g, or t
  misc_feature (90)..(90): n is a, c, g, or t
  misc_feature (92)..(92): n is a, c, g, or t
  misc_feature (137)..(137): n is a, c, g, or t
  misc_feature (147)..(147): n is a, c, g, or t
  misc_feature (159)..(159): n is a, c, g, or t
  misc_feature (274)..(274): n is a, c, g, or t
  misc_feature (278)..(278): n is a, c, g, or t
  misc_feature (331)..(331): n is a, c, g, or t
  misc_feature (333)..(333): n is a, c, g, or t
  misc_feature (683)..(683): n is a, c, g, or t
  misc_feature (746)..(746): n is a, c, g, or t
aatcangcatgccctgctgagagtgtgaggagttgcaacagtatcacgatgcacacattgttgttcanactgcgtntcgcgtatacanancnacattatttctctcacacgtacgcgcacgggtgtgggcgcgtacntatagtatgnctagacatgggntgcgcgcatgtactaataataacgcactctcaacagctcatctgacattgtgtcgtgagtccagtgacagcatatgcatatgtctatcgatgtcacatctcaccgcgctatatcntcantgatgcgttgctccagtcatcactgccgtgctacacacgatgacatatcatcntntacatgatgatatgcataggacacgactacttcgtgtaatagcgccgcacacgatactgatatggaatcgagaggcatcagtaacattgtgctaggctagactctaactatctactctcagtcgtgacattatctggtacgtcggtctattactatgcagtatgagagcgagagtcacatgatgtgcgtgatgtaggatatgtactatcagcatcgtcgaatcgtgtgcgcgcaacatagtcagacagtagtcgcatcaggtatctggatgtactgtcaggacagtgtcatttactatgatacagtcgctagtcggagtctaactactgagtgtgcgtcgtgcatatcangagacgatgcgtcggcactcgctcgtgtgagatatcgagcgtggaagtacacgatacatcganagtactctagtcatatcgcatgaacctacggtatgtgagtcgcctaatctgtaatacgcgtgctagttgattcagtctgcg

SEQ ID NO: 482888 - DNA, 628 bp, Homo sapiens
  misc_feature (353)..(353): n is a, c, g, or t
ttaagcgggcccaattcttggtagaaaaagcaaagaaggaacagcggcagaaaattgtgcagcccgagggtgaggccgaggctgcacaagatgcttggagaagcactgagcaagaaccctggctacatcaaaacttcgcaagattccgagcagcccaagaatatctcacaagacgatcgccacatcacaagaatcgtatctatctcacaagctgacaaccttgtgctgaacatacagggatgaaagtttcacccaggggaagtgacagcctcataaaggttaagaaatgagcctagttaccaagaactccacccccagaggaagtgatctgcttctccagtttttgaggagcnagccaggggtccagcacagccctaccccgccccagtatcatgcgatggtcccccacaccggttccctgaacccctcttggattaaggaagactgaagactagcccccttttttggggaaatactttcctcccccctgtggtaactgggggtggttggggcaaggggggatttttcaagtattttccacaagggtggtcccttcctcaagggtgggaggaaattaacccccacccagggattttccattaatttttttttctttaacttgaaaaaa

SEQ ID NO: 482889 - DNA, 697 bp, Homo sapiens
taaaagtcgatttgattccctaagcttgttataccggtacgcgacggtcgctgggtggtcgtgggtgtgatggggaaacgcaacgccaatgatgtgtgcttgcgagccgctggtactagagtacgttgccagtgctctgcctgggcggttggcactaagctggtcctgagtgctgtggctacttgcatgctccggagctggtggctgccgcgataggagagccgatggccaagtgggtgtgagtgtgagacccacgctggatcgtggaggagcgggcggacgcacaacgcaagtgtgaacaactggcacctggacggagagagatgcttcaaatttggtccacggataagctgaaaacactgttcctgtgcagtgcaggttcaaaatgaagaaggcaagtgtgaggtgactggaagtgagtacgcttgatggagaggcatccattaacgaatacgcaaagggaaacttatcataacttagatgaattggagcgtcaaactacactgagaaggtacgttctagagtcaggaggtacaagtacaaatgtgacatgtggagaataccgcaaatatgtcgtgagttaaaaacagggtggattaacgtgtgagattagttgtgagcccattgccaaaagaatgaggcgtgaagagaaagagtgtaagttgggcgttaagttgaaggggaagaaagtgggtga

SEQ ID NO: 482890 - DNA, 626 bp, Homo sapiens
gcagcactcaaccttctctatatctggcacgaaacgggatcaatataactcaccacttaggaatcatcctccctatatccagagtatacgatctagccttcacaacctctactacatcaagtcaaagattcgcccctcggcatatactatctcttccttactctccttaatgacattaacactattctcaccagacctcctaggcgacccagacaattataccctagccaaacccttaaacacccctcgcccacatcaagcccgaatgatatttccgtattcggctacacaattctccggatccgtcgcctaacaaactaggaggcgatccttgccgctattactatccatcctcatcctagcaataatccccatcctccatatatccaaacaacaaagcataatatttcgcccactaagtccaatcactttattgactcctagccgtcagacctcctcattctaacctgaatcggaggacaaccagtaagctacccgttgttaccatcattggacaagtagcatccgtgactatacttcacaagcaatcctaatcctaataccaagtatctccctaattgaaaagaaaatactcaaatgggcctaaacaaaacacaacagaaaca

SEQ ID NO: 482891 - DNA, 361 bp, Homo sapiens
gacgcagtaaccaggtagtacatgtcatgggccttgggtaagactctgagatctgctagcttcaagctgtgactgagcgcactcccagctgtggtggctatggacagaaactccttctgcttgagaaaagcagagggaagagtaaaggagactttgtcttgtagcttagataccagtttggccatagtggagtacagtaccaagtgggctcttggagtccctaattttaggccttgggacttggacaggatttctgcacctgccctgggccagaggggagccaactgctctaaagggtgggtcccaggtctggcagcattcaccacaagctgactacagaccagttggtcctcggtcgacg

SEQ ID NO: 482892 - DNA, 233 bp, Homo sapiens
cggtcactctaaggatcccgggatgtcgcgtgcatgttgagattggcttttgtgtgaaggcgtgctgcggaactccacatacgtgtgtgctctcattcctgtgcttggccttgatgtgcatctgcagagcattccgtgtcgaggcccggtgcccacactcctcacacacaaacaggttctcaccacggtgcttgaaagcttcactgcaagctggagatctgtccgagacagag

SEQ ID NO: 482893 - DNA, 305 bp, Homo sapiens
catggacgctgttataattatgcctcataggcgatagtacaaggaaggggtaggctatgtgcttagtcaggtggttgagaataagtgtgaggcgtattatatcatagccgcctagtcttaagagtactgcggcaagtactattgacccagcgatgtgggcttcgagatgggcttacagggagtccataagtagaggtccgtaaagaggtatctttactatgaacagctattgtgtaagctagtcatattaagttgttggctcaggagttagatagttcttgggcagaccaggtgcagcgtagaat

SEQ ID NO: 482894 - DNA, 1438 bp, Homo sapiens
  misc_feature (1)..(1): n is a, c, g, or t
  misc_feature (1080)..(1080): n is a, c, g, or t
nggggttcgacgctcggtgtccgcaggcagggctttcttgttcactgcggcctccggttgtttggttagcttctctgttatcggtgtgcctgtggtgcgccgcggtgtgtctttttgctgcgggtcctgggtacccgaggggcccctccgctgggaggtgccgtgtcgtccgcgcgctcgctggtaggtgtgggctgttgatttctcccgactcctccatagccccgggccgcttgtccggatagcccccctggtggggggcttgccaaccctccctcagcactgggctgccaccgcctttccggaggccctgtcggggctcttctcgctttgggtggaggaggagggcgcttccccccgggggtacctccccgggggggcacgccgtttttctgtaaggggaccaacccgttcgacgccgcttgagaacaacccggggctcggttgctaacccaccccggtttgcggtcgcctgtcgtggcggttgtgtgcgggtgttttgtggaaaaagggggaagccccgtcgtgtgcccacgggccaagacgcgcaccgcccctgggtgtgggggctcttggtggttcccctgtgaaacccactcgatggttaacgttgtggtcaaaacaagagaggtctttgtcccacagagggctgttgcgtacccactggtttctcggaggttcttcccgcgtgcgctcgcccattcccccccgcgggaggtttgtcttcgcctgcttgtgtgttggagaaagtttcccggtcttggtgggggattttttgaggacccactgtttgtcgaacactccacgcggtatatattggtgtccaacacctctggggccacggccctttcgcttcgcgaagaaaagctttgttttccccccgctgttgtggagagggagacgcgagggccgcgagactggaaccactcgagtcacactcacggtttccgcccctgccacaggtgttctcccccacatggagccttgagctcacagtgggctctcttgcacattgtgtgtggcgtataaatgtgaggagctcttctccggagttccctgttcacagagggttgtctctcnccacatgtcctgtgagaagaaggagagctcggttggctgtccacgcccctcgggggcccggcacacacaggcctcgggcctctcccctgtgtcgcctccacaagccacgggctcctcgcctccctcgttcgttgggctccactttggggagccacactcggcctctcttctacacgcaccggcctcgtggcctcgttcaaaggcagagaccaccgaacccttgaactcccgcggtggggaaggtggcccaaggaatgctggagctgaatcacgacgctgacacgtttcttcacggcatttttatttcacccatcgaattggacaccttggcccaataaagttgaaattttacccccca

SEQ ID NO: 482895 - DNA, 700 bp, Homo sapiens
gctcttaccttgcctaacgaaaccatggttcgtggtcccaagaaccatctgaagcgggtggctagctccataagcattggatgctgcgattaaattctgaccgagtcgtgttttggctgcctcgtaccaatacacgatccggtccctcatctatagtatcgagaaatagtcgtgcatccgcccctctattcaatatatctcactggagatgaagacagaacttgaaagttatagcatcctgtacgaggcagatagtaaacgctacaagaagcattgtaagctatacgccggacgagttgctatataaataagaatcgtgatgagtgcgcataagggttcgcgtgaatctgggcatcattaataccgtaatccccctcgtctgaggaattcccatgagcgattggtggctattgccaaggcattttggactaagaagaccgagcgacgagacaattgttccccagtcactggaatttctttaattggaaagcaaaaccccaaaattggggggctttccggccttgtttgggccgttagtttaaccaagtctggtgtgatttaacgagccttagtagtggaaggtccccaaggtagcaaaacgtttcgcttgccatagtggtaggaggcacaaagactccttgtgtgaggacacctaaaacggaaatgcccgtacagtctgagtgaacctcgatgatggccc

SEQ ID NO: 482896 - DNA, 153 bp, Homo sapiens
gacactgtactcatatcataattctttatctccaataactccttcatttcacctaagccagcaatttcttttttttttttaattatacttaaagtttaaggatacttgtgcacttggtggcgtgtagttacttatgtttacttttgccaggcg

SEQ ID NO: 482897 - DNA, 351 bp, Homo sapiens
gccccccgatttttttttttacaaaaaccgggggttcatttggtctttttcccctgaggggggcccttttgttgggccctttcgggggggtccttcctttccagcgggccatggggtgaaggggggttccaaaccctggccctgttttcccgggggggcgggttttagaattataaccctttttcctttttgggagggggaccggggccctttgggatccctgtttagaccccaaccccccctgccccggtttttttggggttgggaaatttgggaggccagggttttggaagggtttttaatgaaaaccccccttagcccgtttttttttctgcccataaattttttata

SEQ ID NO: 482898 - DNA, 323 bp, Homo sapiens
gcactgatgagttttgtgaaacacagccttgttttagacaaagcttccctctctctggtgctcttggagaactcttgctcatccctcaggacccagttctgaggttacctcctctgagaagtcttcgcagctccatgaggcagaggattagcccttgcctgatttgtccctctaattcagctcttgccattctgtgatagtaaatgcctcttcctgctgtctccccattgagaggtaaataggtctaatctatttgcctaatatagggtacagtgggttgaattgtgaccccccccaaccccccacccaaaaaaaacaacaac

SEQ ID NO: 482899 - DNA, 143 bp, Homo sapiens
tgctgggattactaggcagaagccaccgcctggccagactgtacttctacaatcagggttaaacctatgtgacaactacacctcacattactctttcactccttttaggcttacccactgcagctctgttacctgctacccag

SEQ ID NO: 482900 - DNA, 220 bp, Homo sapiens
ttcttactggatctcacggatcttctatctggtaatatgcagacaatttgaatacattttaaagaagttcataatcatctgaagcaccaaatgaggtccatggaactgatactaaagatgttgatattaagcaacagccaatcccagagatcattctttttataatgtatacagaaacaaatccatactgcaaatagttgccatgtgcttcatgttggtt

SEQ ID NO: 482901 - DNA, 254 bp, Homo sapiens
caacagagcccggagtacaacagtgccttgtggtaagaagtgggctatggcatttttaatcttatagcgaaagcctataatcactgtgcccgctcataaagggatggccatggctaggtttatatatagttgggtgggtggtgtaaatgaatgaagcaagagttccaagaaggtagttgtggccattaaaatgattaaagatactaattttacagatcaaggtcggcctttaatggtgtgtatgggtatcattt

SEQ ID NO: 482902 - DNA, 100 bp, Homo sapiens
  misc_feature (34)..(34): n is a, c, g, or t
caagccaaaagtcttccagtatggatgcttgatntcccagttgggtcctgcttcaaaggcttccactgcaaaacactaaagatccaagaaggccttcatg

SEQ ID NO: 482903 - DNA, 123 bp, Homo sapiens
aatcgagctcggcccatcctatgaacaataccaggtggattttgtttaaccacatctcttctactgtgtaacggtatattatagtaaatattttgcatatattaattggactcaggtggtgtg

SEQ ID NO: 482904 - DNA, 170 bp, Homo sapiens
tttgagacagagccttgctctttgcccaggctggaatgcagtggtgtgaccttggcttattgcaacctccacctcctgggttcaactaattctcctgccttgcgctcccaagctcccaagttgctgggattacagcacatgcaccacaccggctaattttcttgtattct

SEQ ID NO: 482905 - DNA, 1024 bp, Homo sapiens
  misc_feature (178)..(178): n is a, c, g, or t
  misc_feature (181)..(181): n is a, c, g, or t
  misc_feature (183)..(183): n is a, c, g, or t
  misc_feature (192)..(192): n is a, c, g, or t
  misc_feature (199)..(199): n is a, c, g, or t
  misc_feature (298)..(298): n is a, c, g, or t
  misc_feature (300)..(300): n is a, c, g, or t
  misc_feature (312)..(312): n is a, c, g, or t
  misc_feature (342)..(342): n is a, c, g, or t
  misc_feature (354)..(354): n is a, c, g, or t
  misc_feature (368)..(368): n is a, c, g, or t
  misc_feature (382)..(382): n is a, c, g, or t
  misc_feature (391)..(391): n is a, c, g, or t
  misc_feature (393)..(393): n is a, c, g, or t
  misc_feature (403)..(404): n is a, c, g, or t
  misc_feature (430)..(430): n is a, c, g, or t
  misc_feature (493)..(493): n is a, c, g, or t
  misc_feature (499)..(499): n is a, c, g, or t
  misc_feature (605)..(605): n is a, c, g, or t
  misc_feature (643)..(643): n is a, c, g, or t
  misc_feature (687)..(687): n is a, c, g, or t
  misc_feature (689)..(689): n is a, c, g, or t
  misc_feature (721)..(721): n is a, c, g, or t
  misc_feature (836)..(836): n is a, c, g, or t
  misc_feature (844)..(844): n is a, c, g, or t
  misc_feature (852)..(852): n is a, c, g, or t
  misc_feature (901)..(901): n is a, c, g, or t
  misc_feature (960)..(960): n is a, c, g, or t
  misc_feature (978)..(978): n is a, c, g, or t
atggaggacctggatgccctgctctctgacctggagactaccacctcgcacatgccaaggtcaggggctcccaaagagcgccctgcggacctctcacccctcccccatcctatggccaccagccacagacagggtctggggagtcttcaggagcctcgggggacaaggaccacctgtncancncggtatgcnagcctcngtccccaaagcctgcagccccggtcggcccctctcattctcctcttccagcggtgtcttgggtaccggtgctctgtgagctagttcggttgcttcaggnanttaatgccactnagttcaacatcacatatgatatcttgtttntgttcccatctntctaggtggcttcntgagtgcagaaggnggtccagtntnaagtttagannttacccagcctcccttccagcccgtntcctggcctcccaatggcttctgccacctcagccactctggttctggttagtctgatggtctnactctnttacttccgcgttcaaaaccattcttccagcctctgggtctcttctcagccaccggtggtgagctccacaaatgagggctccccatccccaccagagccgactggnaagggcagcctagacaccatgctggggctgctgcagtncgacctcagccgccggggtgttcccacccaggccaaaggctctntngctcctgcaataaacctattgctgggcaagtngtgacggctctgggccgcgcctggcaccccgagcacttcgtttgcggaggctgttccaccgccctgggaggcagctgcttcttcgagaaggatggagccccttctgccccgagtnctactttnagcgcttntcgccaagatgtggcttctgcaaccagcccatccgacacaagatggtgncgccttgggcactcactggcaccagagcatttctgctgcgtcagttgcggggagccctnggagaagagggtttcacnagcgcgaggccgccctactgcggcgggacttcctgcagcgttcgcc

SEQ ID NO: 482906 - DNA, 243 bp, Homo sapiens
cgtagcgcaacagctatgtatagtcctccttgacctcctgctacggtgacgagtcacaatgccctcccgcatgaacaggccgtaatctatacaaaaaactttgcatactatactcagcatcttaaaacactctggtcaatagaagaattagatcacgcctctgctgtcaaaacgtcccggagtaaacctgatgagatgcgctctcctagcagcagctcccggactgaggtacaggggcaatct

SEQ ID NO: 482907 - DNA, 458 bp, Homo sapiens
  misc_feature (27)..(27): n is a, c, g, or t
  misc_feature (52)..(52): n is a, c, g, or t
  misc_feature (457)..(458): n is a, c, g, or t
caaaaatcaattacctccctcctttgntaattcattgaaatcccttactgtnatcaaccctgtaataatcagggttctcccaaaaaaacagaccctgtaggagatatacaggtatataagaggagacctatcatgggaaattacttacatgattatggaggtcaaaaagttaaacaggcccaggcgcggtggcttacgtctgtaatcccagcactttgaaaggccggcgggggggtggatcatctggggtcaggagttcgagaccagcctgaccaacatggtgaaaccctgtctctactaaaaatacaaaaattaggtgggcgtggtggcaggcacctgtaatcccagctactcaggaggccgaggcaggagaatcgcttgaacccgggaggtggaggtcgcagtgagccatcacaccattgcatgccagcctgggcgacaagagcaaaatccgtcnn

SEQ ID NO: 482908 - DNA, 267 bp, Homo sapiens
ccgtgcgaatataacttcgaagtagtctgtcacactctagatatgtattaatgtcccccaatattaaagattcacatgatacatatttagggaacacatgctactttgttactgtttgaactctcagggaaacaatgttccccttgggtgcgtccgaatagttactattctctggcaacctggaagataactaatacgtacctatctgtgttcaatctcagctttagattattggcactggtgtgttgataaaccaacctggggttc

SEQ ID NO: 482909 - DNA, 426 bp, Homo sapiens
ttttttttttttcccatgccccattatttaatattatctggacgtatatcgctggtccttaatcggtagtgcaggtaggtgaatacgccccagggggttttatagcttaggtttgggggagtgtagtacttgttgacctgacccagttgcaagtcatactggcagttgttatgactatttggatcccgatcgaataggttcgaattctatagaaaccatatggttcgtacgctaggtctgcggagctagtgtataagccctataggttatgccgacgttgacgctagtgggaagtgtgtcccggtggcgaatagacaccggaatatattacgcatctaattaatacgccctgtgccctaagttttgtaagcctgatgtatagccagacacggccggtatggtatagacatgaaatagggaacgtag

SEQ ID NO: 482910 - DNA, 127 bp, Homo sapiens
ccgagcagaaacggaaggatgctgaagcctggtcaggagccggactgaagaattgaaccgggaggtcgctgggcacacggagcagctccagatgagcaggtccgatgttactgacctgcggcgcacc

SEQ ID NO: 482911 - DNA, 381 bp, Homo sapiens
cagaggctagaaattgtttccagtcatcgtcattaaaaaaaagttattaacgccaggcatggtgcctcacgcctgtaatcccagcactttgggaggccgaggcaggcggatcacctgaggtcaggagtttgagaccagcgtggccaacatggtgaaaccccgtctctactacaattacaaaaaattagctgggtgtggtggcgggcacctgtaatcccagctacttgggaggctgaggcaggagaatcgcttgaacccgggaggcagaagttgcagtgagcgaagattgtgccactgcactccagcctaggcaacaagagtgcaactccttcccaaaaaataaataaataaataaaataaatgttattaacatgttttagc

SEQ ID NO: 482912 - DNA, 304 bp, Homo sapiens
aggatccccacgcgttcagagtatctattacctagtgagttttctaaaactcctaccattaataatgtattactcttttactgcgttttgagcttgtatattctattcggcttttccatggtggtaccaaaaataagggttttctgctactgtccaaaaggtaaaagccttgcagataacaattatggctgtgttcctctgcttgaagacagtgaaacaagaaagaataatttgactcttgatcagctacaagataaagtgattacaggaatagcaagagaaaaactaccaaaggtagacattg

SEQ ID NO: 482913 - DNA, 3284 bp, Homo sapiens
  misc_feature (54)..(54): n is a, c, g, or t
gacaggatagtctaggacaggcctgtgttaatcaggagaggccagccgtctgtnctggctgctcgctctgcttcgctgcgccgccactatgctctccctccgtgtcccgctcgcgcccatcacggacccgcagcagctgcagctctcgccgctgaaggggctcagcttggtcgacaaggagaacacgccgccggccctgagcgggacccgcgtcctggccagcaagaccgcgaggaggatcttccaggagcccacggagccgaaaactaaagcagctgcccccggcgtggaggatgagccgctgctgagagaaaacccccgccgctttgtcatcttccccatcgagtaccatgatatctggcagatgtataagaaggcagaggcttccttttggaccgccgaggaggtggacctctccaaggacattcagcactgggaatccctgaaacccgaggagagatattttatatcccatgttctggctttctttgcagcaagcgatggcatagtaaatgaaaacttggtggagcgatttagccaagaagttcagattacagaagcccgctgtttctatggcttccaaattgccatggaaaacatacattctgaaatgtatagtcttcttattgacacttacataaaagatcccaaagaaagggaatttctcttcaatgccattgaaacgatgccttgtgtcaagaagaaggcagactgggccttgcgctggattggggacaaagaggctacctatggtgaacgtgttgtagcctttgctgcagtggaaggcattttcttttccggttcttttgcgtcgatattctggctcaagaaacgaggactgatgcctggcctcacattttctaatgaacttattagcagagatgagggtttacactgtgattttgcttgcctgatgttcaaacacctggtacacaaaccatcggaggagagagtaagagaaataattatcaatgctgttcggatagaacaggagttcctcactgaggccttgcctgtgaagctcattgggatgaattgcactctaatgaagcaatacattgagtttgtggcagacagacttatgctggaactgggttttagcaaggttttcagagtagagaacccatttgactttatggagaatatttcactggaaggaaagactaacttctttgagaagagagtaggcgagtatcagaggatgggagtgatgtcaagtccaacagagaattcttttaccttggatgctgacttctaaatgaactgaagatgtgcccttacttggctgattttttttttccatctcataagaaaaatcagctgaagtgttaccaactagccacaccatgaattgtccgtaatgttcattaacagcatctttaaaactgtgtagctacctcacaaccagtcctgtctgtttatagtgctggtagtatcaccttttgccagaaggcctggctggctgtgacttaccatagcagtgacaatggcagtcttggctttaaagtgaggggtgaccctttagtgagcttagcacagcgggattaaacagtcctttaaccagcacagccagttaaaagatgcagcctcactgcttcaacgcagattttaatgtttacttaaatataaacctggcactttacaaacaaataaacattgtttgtactcacaaggcgataatagcttgatttatttggtttctacaccaaatacattctcctgaccactaatgggagccaattcacaattcactaagtgactaaagtaagttaaacttgtgtagactaagcatgtaatttttaagttttattttaatgaattaaaatatttgttaaccaactttaaagtcagtcctgtgtatacctagatattagtcagttggtgccagatagaagacaggttgtgtttttatcctgtggcttgtgtagtgtcctgggattctctgccccctctgagtagagtgttgtgggataaaggaatctctcagggcaaggagcttcttaagttaaatcactagaaatttaggggtgatctgggccttcatatgtgtgagaagccgtttcattttatttctcactgtattttcctcaacgtctggttgatgagaaaaaattcttgaagagttttcatatgtgggagctaaggtagtattgtaaaatttcaagtcatccttaaacaaaatgatccacctaagatcttgcccctgttaagtggtgaaatcaactagaggtggttcctacaagttgttcattctagttttgtttggtgtaagtaggttgtgtgagttaattcatttatatttactatgtctgttaaatcagaaattttttattatctatgttcttctagattttacctgtagttcatacttcagtcacccagtgtcttattctggcattgtctaaatctgagcattgtctagggggatcttaaactttagtaggaaaccatgagctgttaatacagtttccattcaaatattaatttcagaatgaaacataattttttttttttttttggagatggagtctcgctctgttgcccaggctggagtgcagtggcgcgatttgggctcactgtaacctccatctccggggttcaagcaattctcctgtctcagcctccctagtagctgggactgcaggtatgtgctaccacacctggctaattttggtatttttaagtagagatggagtttcaccatattggtcaggctggtcttgaactcctgacctcaggtgatccacccacctcggcctcccaaagtgctgggattgcaggcgtgataaacaaatattcttaatagggctactttgaattaatctgcctttatgtttgggagaagaaagctgagacattgcatgaaagatgatgagagataaatgttgatcttttggccccatttgttaattgtattcagtatttgaacgtcgtcctgtttattgttagttttcttcatcatttattgtatagacaatttttaaatctctgtaatatgatacattttcctatcttttaagttattgttacctaaagttaatccagattatatggtccttatatgtgtacaacattaaaatgaaaggctttgtcttgcattgtgaggtacaggcggaagttggaatcaggttttaggattctgtctctcattagctgaataatgtgaggattaacttctgccagctcagaccatttcctaatcagttgaaagggaaacaagtatttcagtctcaaaattgaataatgcacaagtcttaagtgattaaaataaaactgttcttatg

SEQ ID NO: 482914 - DNA, 301 bp, Homo sapiens
ttaaaagcccccccctttttttttaaggagaagggcccagtcttttcccaagtccccccagggggggtgaaagcattgctttggggtaaataatgaaaggcaaaatttttttaattttcgcccaaaaacttttttatttggttttattttgaaagaggagccttggggcccccccttcccccttttttgtcccccaacttgaaaggtataagggtttttggtttccctgggggggggggggggcagccggggtttccctgtaccttgatttgagcccagttgaataaaggggcccccctta

SEQ ID NO: 482915 - DNA, 667 bp, Homo sapiens
agagagagagagagagagagagagagagagcgagagagagagagagagagacagtgagtgctagagacgagtgcatgtggaccatatacgcatacttcgctgtatcgctgtctagcgcgatgactcccttgtgcactctggatctcaccctcatcagagtgatgggtattcgatccgaacattgacatgttgtctatcctgacgcacttcacgagactctatggatcgtgtctgtactccgtcatcatgggcgacacatcaggtgacttccctgaagcgactgctaggactctgcggcagagatgtttaaactcacgatccctgaatgacaggactgcactcatcactttgcagacttctaccgttatgtttctacgctgctattatcatcatgtcatgacgcttactaccatgtctaacgcctacagctgcctactagactgtagactgtctgtattattattcatctattagtagccattaggctgctataaagctgtacatggtttttaaagcatctacgatataaacgtaggtcctaaagtcgaaatagttatgtattccatgcttctcagagactgcagcctactttggcgcgtgacagaccttgactatcttaagctatgccgcatttcgtctacgctgacgtttgcttgggagaccgtct

SEQ ID NO: 482916 - DNA, 3270 bp, Homo sapiens
  misc_feature (16)..(16): n is a, c, g, or t
  misc_feature (23)..(23): n is a, c, g, or t
  misc_feature (30)..(31): n is a, c, g, or t
  misc_feature (33)..(34): n is a, c, g, or t
ggacgcgtgggcgacnacgcgtnggtcccnncnngtcctgctggctgctcgctctgcttcgctgcgccgccactatgctctccctccgtgtcccgctcgcgcccatcacggacccgcagcagctgcagctctcgccgctgaaggggctcagcttggtcgacaaggagaacacgccgccggccctgagcgggacccgcgtcctggccagcaagaccgcgaggaggatcttccaggagcccacggagccgaaaactaaagcagctgcccccggcgtggaggatgagccgctgctgagagaaaacccccgccgctttgtcatcttccccatcgagtaccatgatatctggcagatgtataagaaggcagaggcttccttttggaccgccgaggaggtggacctctccaaggacattcagcactgggaatccctgaaacccgaggagagatattttatatcccatgttctggctttctttgcagcaagcgatggcatagtaaatgaaaacttggtggagcgatttagccaagaagttcagattacagaagcccgctgtttctatggcttccaaattgccatggaaaacatacattctgaaatgtatagtcttcttattgacacttacataaaagatcccaaagaaagggaatttctcttcaatgccattgaaacgatgccttgtgtcaagaagaaggcagactgggccttgcgctggattggggacaaagaggctacctatggtgaacgtgttgtagcctttgctgcagtggaaggcattttcttttccggttcttttgcgtcgatattctggctcaagaaacgaggactgatgcctggcctcacattttctaatgaacttattagcagagatgagggtttacactgtgattttgcttgcctgatgttcaaacacctggtacacaaaccatcggaggagagagtaagagaaataattatcaatgctgttcggatagaacaggagttcctcactgaggccttgcctgtgaagctcattgggatgaattgcactctaatgaagcaatacattgagtttgtggcagacagacttatgctggaactgggttttagcaaggttttcagagtagagaacccatttgactttatggagaatatttcactggaaggaaagactaacttctttgagaagagagtaggcgagtatcagaggatgggagtgatgtcaagtccaacagagaattcttttaccttggatgctgacttctaaatgaactgaagatgtgcccttacttggctgattttttttttccatctcataagaaaaatcagctgaagtgttaccaactagccacaccatgaattgtccgtaatgttcattaacagcatctttaaaactgtgtagctacctcacaaccagtcctgtctgtttatagtgctggtagtatcaccttttgccagaaggcctggctggctgtgacttaccatagcagtgacaatggcagtcttggctttaaagtgaggggtgaccctttagtgagcttagcacagcgggattaaacagtcctttaaccagcacagccagttaaaagatgcagcctcactgcttcaacgcagattttaatgtttacttaaatataaacctggcactttacaaacaaataaacattgtttgtactcacaaggcgataatagcttgatttatttggtttctacaccaaatacattctcctgaccactaatgggagccaattcacaattcactaagtgactaaagtaagttaaacttgtgtagactaagcatgtaatttttaagttttattttaatgaattaaaatatttgttaaccaactttaaagtcagtcctgtgtatacctagatattagtcagttggtgccagatagaagacaggttgtgtttttatcctgtggcttgtgtagtgtcctgggattctctgccccctctgagtagagtgttgtgggataaaggaatctctcagggcaaggagcttcttaagttaaatcactagaaatttaggggtgatctgggccttcatatgtgtgagaagccgtttcattttatttctcactgtattttcctcaacgtctggttgatgagaaaaaattcttgaagagttttcatatgtgggagctaaggtagtattgtaaaatttcaagtcatccttaaacaaaatgatccacctaagatcttgcccctgttaagtggtgaaatcaactagaggtggttcctacaagttgttcattctagttttgtttggtgtaagtaggttgtgtgagttaattcatttatatttactatgtctgttaaatcagaaattttttattatctatgttcttctagattttacctgtagttcatacttcagtcacccagtgtcttattctggcattgtctaaatctgagcattgtctagggggatcttaaactttagtaggaaaccatgagctgttaatacagtttccattcaaatattaatttcagaatgaaacataattttttttttttttttggagatggagtctcgctctgttgcccaggctggagtgcagtggcgcgatttgggctcactgtaacctccatctccggggttcaagcaattctcctgtctcagcctccctagtagctgggactgcaggtatgtgctaccacacctggctaattttggtatttttaagtagagatggagtttcaccatattggtcaggctggtcttgaactcctgacctcaggtgatccacccacctcggcctcccaaagtgctgggattgcaggcgtgataaacaaatattcttaatagggctactttgaattaatctgcctttatgtttgggagaagaaagctgagacattgcatgaaagatgatgagagataaatgttgatcttttggccccatttgttaattgtattcagtatttgaacgtcgtcctgtttattgttagttttcttcatcatttattgtatagacaatttttaaatctctgtaatatgatacattttcctatcttttaagttattgttacctaaagttaatccagattatatggtccttatatgtgtacaacattaaaatgaaaggctttgtcttgcattgtgaggtacaggcggaagttggaatcaggttttaggattctgtctctcattagctgaataatgtgaggattaacttctgccagctcagaccatttcctaatcagttgaaagggaaacaagtatttcagtctcaaaattgaataatgcacaagtcttaagtgattaaaataaaactgttcttatg

SEQ ID NO: 482917 - DNA, 3286 bp, Homo sapiens
agcagagagacacatggctaggtctgaggctggggtgaatcggccgaggcgtctgtctggctgctcgctctgcttcgctgcgccgccactatgctctccctccgtgtcccgctcgcgcccatcacggacccgcagcagctgcagctctcgccgctgaaggggctcagcttggtcgacaaggagaacacgccgccggccctgagcgggacccgcgtcctggccagcaagaccgcgaggaggatcttccaggagcccacggagccgaaaactaaagcagctgcccccggcgtggaggatgagccgctgctgagagaaaacccccgccgctttgtcatcttccccatcgagtaccatgatatctggcagatgtataagaaggcagaggcttccttttggaccgccgaggaggtggacctctccaaggacattcagcactgggaatccctgaaacccgaggagagatattttatatcccatgttctggctttctttgcagcaagcgatggcatagtaaatgaaaacttggtggagcgatttagccaagaagttcagattacagaagcccgctgtttctatggcttccaaattgccatggaaaacatacattctgaaatgtatagtcttcttattgacacttacataaaagatcccaaagaaagggaatttctcttcaatgccattgaaacgatgccttgtgtcaagaagaaggcagactgggccttgcgctggattggggacaaagaggctacctatggtgaacgtgttgtagcctttgctgcagtggaaggcattttcttttccggttcttttgcgtcgatattctggctcaagaaacgaggactgatgcctggcctcacattttctaatgaacttattagcagagatgagggtttacactgtgattttgcttgcctgatgttcaaacacctggtacacaaaccatcggaggagagagtaagagaaataattatcaatgctgttcggatagaacaggagttcctcactgaggccttgcctgtgaagctcattgggatgaattgcactctaatgaagcaatacattgagtttgtggcagacagacttatgctggaactgggttttagcaaggttttcagagtagagaacccatttgactttatggagaatatttcactggaaggaaagactaacttctttgagaagagagtaggcgagtatcagaggatgggagtgatgtcaagtccaacagagaattcttttaccttggatgctgacttctaaatgaactgaagatgtgcccttacttggctgattttttttttccatctcataagaaaaatcagctgaagtgttaccaactagccacaccatgaattgtccgtaatgttcattaacagcatctttaaaactgtgtagctacctcacaaccagtcctgtctgtttatagtgctggtagtatcaccttttgccagaaggcctggctggctgtgacttaccatagcagtgacaatggcagtcttggctttaaagtgaggggtgaccctttagtgagcttagcacagcgggattaaacagtcctttaaccagcacagccagttaaaagatgcagcctcactgcttcaacgcagattttaatgtttacttaaatataaacctggcactttacaaacaaataaacattgtttgtactcacaaggcgataatagcttgatttatttggtttctacaccaaatacattctcctgaccactaatgggagccaattcacaattcactaagtgactaaagtaagttaaacttgtgtagactaagcatgtaatttttaagttttattttaatgaattaaaatatttgttaaccaactttaaagtcagtcctgtgtatacctagatattagtcagttggtgccagatagaagacaggttgtgtttttatcctgtggcttgtgtagtgtcctgggattctctgccccctctgagtagagtgttgtgggataaaggaatctctcagggcaaggagcttcttaagttaaatcactagaaatttaggggtgatctgggccttcatatgtgtgagaagccgtttcattttatttctcactgtattttcctcaacgtctggttgatgagaaaaaattcttgaagagttttcatatgtgggagctaaggtagtattgtaaaatttcaagtcatccttaaacaaaatgatccacctaagatcttgcccctgttaagtggtgaaatcaactagaggtggttcctacaagttgttcattctagttttgtttggtgtaagtaggttgtgtgagttaattcatttatatttactatgtctgttaaatcagaaattttttattatctatgttcttctagattttacctgtagttcatacttcagtcacccagtgtcttattctggcattgtctaaatctgagcattgtctagggggatcttaaactttagtaggaaaccatgagctgttaatacagtttccattcaaatattaatttcagaatgaaacataattttttttttttttttggagatggagtctcgctctgttgcccaggctggagtgcagtggcgcgatttgggctcactgtaacctccatctccggggttcaagcaattctcctgtctcagcctccctagtagctgggactgcaggtatgtgctaccacacctggctaattttggtatttttaagtagagatggagtttcaccatattggtcaggctggtcttgaactcctgacctcaggtgatccacccacctcggcctcccaaagtgctgggattgcaggcgtgataaacaaatattcttaatagggctactttgaattaatctgcctttatgtttgggagaagaaagctgagacattgcatgaaagatgatgagagataaatgttgatcttttggccccatttgttaattgtattcagtatttgaacgtcgtcctgtttattgttagttttcttcatcatttattgtatagacaatttttaaatctctgtaatatgatacattttcctatcttttaagttattgttacctaaagttaatccagattatatggtccttatatgtgtacaacattaaaatgaaaggctttgtcttgcattgtgaggtacaggcggaagttggaatcaggttttaggattctgtctctcattagctgaataatgtgaggattaacttctgccagctcagaccatttcctaatcagttgaaagggaaacaagtatttcagtctcaaaattgaataatgcacaagtcttaagtgattaaaataaaactgttcttatg

SEQ ID NO: 482918 - DNA, 3177 bp, Homo sapiens
gctcctctgctgcgacccacggagtgcgacgggacagccacgttttcacatcgggccccgtgaaattgccgccaatggaaaggacttggtccagaaaaacgttagtttcatatggttcgcccggtacttaaatgttttattttctcccccaacagaaaactaaagcagctgcccccggcgtggaggatgagccgctgctgagagaaaacccccgccgctttgtcatcttccccatcgagtaccatgatatctggcagatgtataagaaggcagaggcttccttttggaccgccgaggaggtggacctctccaaggacattcagcactgggaatccctgaaacccgaggagagatattttatatcccatgttctggctttctttgcagcaagcgatggcatagtaaatgaaaacttggtggagcgatttagccaagaagttcagattacagaagcccgctgtttctatggcttccaaattgccatggaaaacatacattctgaaatgtatagtcttcttattgacacttacataaaagatcccaaagaaagggaatttctcttcaatgccattgaaacgatgccttgtgtcaagaagaaggcagactgggccttgcgctggattggggacaaagaggctacctatggtgaacgtgttgtagcctttgctgcagtggaaggcattttcttttccggttcttttgcgtcgatattctggctcaagaaacgaggactgatgcctggcctcacattttctaatgaacttattagcagagatgagggtttacactgtgattttgcttgcctgatgttcaaacacctggtacacaaaccatcggaggagagagtaagagaaataattatcaatgctgttcggatagaacaggagttcctcactgaggccttgcctgtgaagctcattgggatgaattgcactctaatgaagcaatacattgagtttgtggcagacagacttatgctggaactgggttttagcaaggttttcagagtagagaacccatttgactttatggagaatatttcactggaaggaaagactaacttctttgagaagagagtaggcgagtatcagaggatgggagtgatgtcaagtccaacagagaattcttttaccttggatgctgacttctaaatgaactgaagatgtgcccttacttggctgattttttttttccatctcataagaaaaatcagctgaagtgttaccaactagccacaccatgaattgtccgtaatgttcattaacagcatctttaaaactgtgtagctacctcacaaccagtcctgtctgtttatagtgctggtagtatcaccttttgccagaaggcctggctggctgtgacttaccatagcagtgacaatggcagtcttggctttaaagtgaggggtgaccctttagtgagcttagcacagcgggattaaacagtcctttaaccagcacagccagttaaaagatgcagcctcactgcttcaacgcagattttaatgtttacttaaatataaacctggcactttacaaacaaataaacattgtttgtactcacaaggcgataatagcttgatttatttggtttctacaccaaatacattctcctgaccactaatgggagccaattcacaattcactaagtgactaaagtaagttaaacttgtgtagactaagcatgtaatttttaagttttattttaatgaattaaaatatttgttaaccaactttaaagtcagtcctgtgtatacctagatattagtcagttggtgccagatagaagacaggttgtgtttttatcctgtggcttgtgtagtgtcctgggattctctgccccctctgagtagagtgttgtgggataaaggaatctctcagggcaaggagcttcttaagttaaatcactagaaatttaggggtgatctgggccttcatatgtgtgagaagccgtttcattttatttctcactgtattttcctcaacgtctggttgatgagaaaaaattcttgaagagttttcatatgtgggagctaaggtagtattgtaaaatttcaagtcatccttaaacaaaatgatccacctaagatcttgcccctgttaagtggtgaaatcaactagaggtggttcctacaagttgttcattctagttttgtttggtgtaagtaggttgtgtgagttaattcatttatatttactatgtctgttaaatcagaaattttttattatctatgttcttctagattttacctgtagttcatacttcagtcacccagtgtcttattctggcattgtctaaatctgagcattgtctagggggatcttaaactttagtaggaaaccatgagctgttaatacagtttccattcaaatattaatttcagaatgaaacataattttttttttttttttggagatggagtctcgctctgttgcccaggctggagtgcagtggcgcgatttgggctcactgtaacctccatctccggggttcaagcaattctcctgtctcagcctccctagtagctgggactgcaggtatgtgctaccacacctggctaattttggtatttttaagtagagatggagtttcaccatattggtcaggctggtcttgaactcctgacctcaggtgatccacccacctcggcctcccaaagtgctgggattgcaggcgtgataaacaaatattcttaatagggctactttgaattaatctgcctttatgtttgggagaagaaagctgagacattgcatgaaagatgatgagagataaatgttgatcttttggccccatttgttaattgtattcagtatttgaacgtcgtcctgtttattgttagttttcttcatcatttattgtatagacaatttttaaatctctgtaatatgatacattttcctatcttttaagttattgttacctaaagttaatccagattatatggtccttatatgtgtacaacattaaaatgaaaggctttgtcttgcattgtgaggtacaggcggaagttggaatcaggttttaggattctgtctctcattagctgaataatgtgaggattaacttctgccagctcagaccatttcctaatcagttgaaagggaaacaagtatttcagtctcaaaattgaataatgcacaagtcttaagtgattaaaataaaactgttcttatg

SEQ ID NO: 482919 - DNA, 538 bp, Homo sapiens
tttcaaggttaagccaaccccctatccgaggtttaaatctctttaggtctcccagggaaggggaaaaacccctggccggggtagggattggtgtataaacaattgggcaatgaagaaaaacttctctttatggtcaggtccccccgagataaacttccatggggcccctttagcccctttgaccattggccctgggtttaaccaattcccctaaagcccaaaaccccatgggtttttaaccccgggttattttccaaaaagggcctttaaaaaagcggggggaccaaaccggaaaaattcccctccctttttttttgaaaggttaaggctaagaaaggcttttttaaccctttaccccccaacctggaaaccttttggggtttcccccaaaaaaaaaagggggttttttttccccttttggcccccttaaaaaaggccctggggtttcccaggaaaaggaaacctttttttttggggggaaaagcccaggaaaagggggggtgttttttttaaccaataaaaaatttttttttccgga

SEQ ID NO: 482920 - DNA, 3551 bp, Homo sapiens
gccgccgagaccctcaggggctgcggccctggtcccgcgggacctgtgggggcctgggcggcggcgcccccgacccagccagcggacgggccggggggggaaccgggaggtcccggggggcgtccacgggggtgtccccgggggtctccggaaggcgccggcggaggctcccgcgctgcgcttgtcgcgcgcggccccgcggccagcctgggtagggcccaggcgcagccaatgggaagggtcggaggcatggcacagccaatgggaagggccggggcaccaaagccaatgggaagggccgggagcgcgcggcgcgggagatttaaaggctgctggagtgaggggtcgcccgtgcaccctgtcccagccgtcctgtcctggctgctcgctctgcttcgctgcgccgccactatgctctccctccgtgtcccgctcgcgcccatcacggacccgcagcagctgcagctctcgccgctgaaggggctcagcttggtcgacaaggagaacacgccgccggccctgagcgggacccgcgtcctggccagcaagaccgcgaggaggatcttccaggagcccacggagcccccgccgctttgtcatcttccccatcgagtaccatgatatctggcagatgtataagaaggcagaggcttccttttggaccgccgaggaggtggacctctccaaggacattcagcactgggaatccctgaaacccgaggagagatattttatatcccatgttctggctttctttgcagcaagcgatggcatagtaaatgaaaacttggtggagcgatttagccaagaagttcagattacagaagcccgctgtttctatggcttccaaattgccatggaaaacatacattctgaaatgtatagtcttcttattgacacttacataaaagatcccaaagaaagggaatttctcttcaatgccattgaaacgatgccttgtgtcaagaagaaggcagactgggccttgcgctggattggggacaaagaggctacctatggtgaacgtgttgtagcctttgctgcagtggaaggcattttcttttccggttcttttgcgtcgatattctggctcaagaaacgaggactgatgcctggcctcacattttctaatgaacttattagcagagatgagggtttacactgtgattttgcttgcctgatgttcaaacacctggtacacaaaccatcggaggagagagtaagagaaataattatcaatgctgttcggatagaacaggagttcctcactgaggccttgcctgtgaagctcattgggatgaattgcactctaatgaagcaatacattgagtttgtggcagacagacttatgctggaactgggttttagcaaggttttcagagtagagaacccatttgactttatggagaatatttcactggaaggaaagactaacttctttgagaagagagtaggcgagtatcagaggatgggagtgatgtcaagtccaacagagaattcttttaccttggatgctgacttctaaatgaactgaagatgtgcccttacttggctgattttttttttccatctcataagaaaaatcagctgaagtgttaccaactagccacaccatgaattgtccgtaatgttcattaacagcatctttaaaactgtgtagctacctcacaaccagtcctgtctgtttatagtgctggtagtatcaccttttgccagaaggcctggctggctgtgacttaccatagcagtgacaatggcagtcttggctttaaagtgaggggtgaccctttagtgagcttagcacagcgggattaaacagtcctttaaccagcacagccagttaaaagatgcagcctcactgcttcaacgcagattttaatgtttacttaaatataaacctggcactttacaaacaaataaacattgtttgtactcacaaggcgataatagcttgatttatttggtttctacaccaaatacattctcctgaccactaatgggagccaattcacaattcactaagtgactaaagtaagttaaacttgtgtagactaagcatgtaatttttaagttttattttaatgaattaaaatatttgttaaccaactttaaagtcagtcctgtgtatacctagatattagtcagttggtgccagatagaagacaggttgtgtttttatcctgtggcttgtgtagtgtcctgggattctctgccccctctgagtagagtgttgtgggataaaggaatctctcagggcaaggagcttcttaagttaaatcactagaaatttaggggtgatctgggccttcatatgtgtgagaagccgtttcattttatttctcactgtattttcctcaacgtctggttgatgagaaaaaattcttgaagagttttcatatgtgggagctaaggtagtattgtaaaatttcaagtcatccttaaacaaaatgatccacctaagatcttgcccctgttaagtggtgaaatcaactagaggtggttcctacaagttgttcattctagttttgtttggtgtaagtaggttgtgtgagttaattcatttatatttactatgtctgttaaatcagaaattttttattatctatgttcttctagattttacctgtagttcatacttcagtcacccagtgtcttattctggcattgtctaaatctgagcattgtctagggggatcttaaactttagtaggaaaccatgagctgttaatacagtttccattcaaatattaatttcagaatgaaacataattttttttttttttttggagatggagtctcgctctgttgcccaggctggagtgcagtggcgcgatttgggctcactgtaacctccatctccggggttcaagcaattctcctgtctcagcctccctagtagctgggactgcaggtatgtgctaccacacctggctaattttggtatttttaagtagagatggagtttcaccatattggtcaggctggtcttgaactcctgacctcaggtgatccacccacctcggcctcccaaagtgctgggattgcaggcgtgataaacaaatattcttaatagggctactttgaattaatctgcctttatgtttgggagaagaaagctgagacattgcatgaaagatgatgagagataaatgttgatcttttggccccatttgttaattgtattcagtatttgaacgtcgtcctgtttattgttagttttcttcatcatttattgtatagacaatttttaaatctctgtaatatgatacattttcctatcttttaagttattgttacctaaagttaatccagattatatggtccttatatgtgtacaacattaaaatgaaaggctttgtcttgcattgtgaggtacaggcggaagttggaatcaggttttaggattctgtctctcattagctgaataatgtgaggattaacttctgccagctcagaccatttcctaatcagttgaaagggaaacaagtatttcagtctcaaaattgaataatgcacaagtcttaagtgattaaaataaaactgttcttatg

SEQ ID NO: 482921 - DNA, 312 bp, Homo sapiens
aacacgatcacaggctcacagatccaggctttcattgatgacacctcaaatatacaaattcagtcgtagcctgtagacgttgcctacagggaaaaggtgccttgtccttagcctgaaatcagtagtacctattgccagagcatacccgaggctgatcgccagcctggaaaaatattgcgcgctgtcagcaaggattgaagcaggccccttgatgggtgcattgtgggcccctgttttgcgaaggatctggccatgaagaaacgtgttgccttagtgctgggctccggtggggccaggggctacgcccatagt

SEQ ID NO: 482922 - DNA, 3078 bp, Homo sapiens
ctgccattttataaatgtcagcagttggaaaaatcgtcacgcctcagacataaatgcacttggaggttcccgttggcaaggggggctaactgtggggcatagtaagtggtccagcatacttaaagtttgagtgctcagtgtgagtcctgtaggctttactctcttccttttatgctaaaattgtgacttccgaacctcaggtggacctctccaaggacattcagcactgggaatccctgaaacccgaggagagatattttatatcccatgttctggctttctttgcagcaagcgatggcatagtaaatgaaaacttggtggagcgatttagccaagaagttcagattacagaagcccgctgtttctatggcttccaaattgccatggaaaacatacattctgaaatgtatagtcttcttattgacacttacataaaagatcccaaagaaagggaatttctcttcaatgccattgaaacgatgccttgtgtcaagaagaaggcagactgggccttgcgctggattggggacaaagaggctacctatggtgaacgtgttgtagcctttgctgcagtggaaggcattttcttttccggttcttttgcgtcgatattctggctcaagaaacgaggactgatgcctggcctcacattttctaatgaacttattagcagagatgagggtttacactgtgattttgcttgcctgatgttcaaacacctggtacacaaaccatcggaggagagagtaagagaaataattatcaatgctgttcggatagaacaggagttcctcactgaggccttgcctgtgaagctcattgggatgaattgcactctaatgaagcaatacattgagtttgtggcagacagacttatgctggaactgggttttagcaaggttttcagagtagagaacccatttgactttatggagaatatttcactggaaggaaagactaacttctttgagaagagagtaggcgagtatcagaggatgggagtgatgtcaagtccaacagagaattcttttaccttggatgctgacttctaaatgaactgaagatgtgcccttacttggctgattttttttttccatctcataagaaaaatcagctgaagtgttaccaactagccacaccatgaattgtccgtaatgttcattaacagcatctttaaaactgtgtagctacctcacaaccagtcctgtctgtttatagtgctggtagtatcaccttttgccagaaggcctggctggctgtgacttaccatagcagtgacaatggcagtcttggctttaaagtgaggggtgaccctttagtgagcttagcacagcgggattaaacagtcctttaaccagcacagccagttaaaagatgcagcctcactgcttcaacgcagattttaatgtttacttaaatataaacctggcactttacaaacaaataaacattgtttgtactcacaaggcgataatagcttgatttatttggtttctacaccaaatacattctcctgaccactaatgggagccaattcacaattcactaagtgactaaagtaagttaaacttgtgtagactaagcatgtaatttttaagttttattttaatgaattaaaatatttgttaaccaactttaaagtcagtcctgtgtatacctagatattagtcagttggtgccagatagaagacaggttgtgtttttatcctgtggcttgtgtagtgtcctgggattctctgccccctctgagtagagtgttgtgggataaaggaatctctcagggcaaggagcttcttaagttaaatcactagaaatttaggggtgatctgggccttcatatgtgtgagaagccgtttcattttatttctcactgtattttcctcaacgtctggttgatgagaaaaaattcttgaagagttttcatatgtgggagctaaggtagtattgtaaaatttcaagtcatccttaaacaaaatgatccacctaagatcttgcccctgttaagtggtgaaatcaactagaggtggttcctacaagttgttcattctagttttgtttggtgtaagtaggttgtgtgagttaattcatttatatttactatgtctgttaaatcagaaattttttattatctatgttcttctagattttacctgtagttcatacttcagtcacccagtgtcttattctggcattgtctaaatctgagcattgtctagggggatcttaaactttagtaggaaaccatgagctgttaatacagtttccattcaaatattaatttcagaatgaaacataattttttttttttttttggagatggagtctcgctctgttgcccaggctggagtgcagtggcgcgatttgggctcactgtaacctccatctccggggttcaagcaattctcctgtctcagcctccctagtagctgggactgcaggtatgtgctaccacacctggctaattttggtatttttaagtagagatggagtttcaccatattggtcaggctggtcttgaactcctgacctcaggtgatccacccacctcggcctcccaaagtgctgggattgcaggcgtgataaacaaatattcttaatagggctactttgaattaatctgcctttatgtttgggagaagaaagctgagacattgcatgaaagatgatgagagataaatgttgatcttttggccccatttgttaattgtattcagtatttgaacgtcgtcctgtttattgttagttttcttcatcatttattgtatagacaatttttaaatctctgtaatatgatacattttcctatcttttaagttattgttacctaaagttaatccagattatatggtccttatatgtgtacaacattaaaatgaaaggctttgtcttgcattgtgaggtacaggcggaagttggaatcaggttttaggattctgtctctcattagctgaataatgtgaggattaacttctgccagctcagaccatttcctaatcagttgaaagggaaacaagtatttcagtctcaaaattgaataatgcacaagtcttaagtgattaaaataaaactgttcttatg

SEQ ID NO: 482923 - DNA, 134 bp, Homo sapiens
atataacgttgagcaagctgttgcactgaggattttcttaactatattgaaaaactgaagtatgaacaccacctgaaagaatcattgatagcaaatgaatgttggtaaaggtttagaaaataaacgattttgac

SEQ ID NO: 482924 - DNA, 1300 bp, Homo sapiens
  misc_feature (1118)..(1118): n is a, c, g, or t
  misc_feature (1172)..(1172): n is a, c, g, or t
  misc_feature (1191)..(1191): n is a, c, g, or t
gccgccgagaccctcaggggctgcggccctggtcccgcgggacctgtgggggcctgggcggcggcgcccccgacccagccagcggacgggccggggggggaaccgggaggtcccggggggcgtccacgggggtgtccccgggggtctccggaaggcgccggcggaggctcccgcgctgcgcttgtcgcgcgcggccccgcggccagcctgggtagggcccaggcgcagccaatgggaagggtcggaggcatggcacagccaatgggaagggccggggcaccaaagccaatgggaagggccgggagcgcgcggcgcgggagatttaaaggctgctggagtgaggggtcgcccgtgcaccctgtcccagccgtcctgtcctggctgctcgctctgcttcgctgcgccgccactatgctctccctccgtgtcccgctcgcgcccatcacggacccgcagcagctgcagctctcgccgctgaaggggctcagcttggtcgacaaggagaacacgccgccggccctgagcgggacccgcgtcctggccagcaagaccgcgaggaggatcttccaggagcccacggagccgaaaactaaagcagctgcccccggcgtggaggatgagccgctgctgagagaaaacccccgccgctttgtcatcttccccatcgagtaccatgatatctggcagatgtataagaaggcagaggcttccttttggaccgccgaggaggtggacctctccaaggacattcagcactgggaatccctgaaacccgaggagagatattttatatcccatgttctggctttctttgcagcaagcgatggcatagtaaatgaaaacttggtggagcgatttagccaagaagttcagattacagaagcccgctgtttctatggcttccaaattgccatggaaaacatacattctgaaatgtatagtcttcttattgacacttacataaaagatcccaaagaaagggaatttctcttcaatgccattgaaacgatgccttgtgtcaagaagaaggcagactgggccttgcgctggattgggaccaagaggctacctatggtgacgtgttgtagccttgctgccgtggaggctttctttccggncttgcgcgcagtctgcccagaacgggactgtgctggcccccatttatgactttngccgcacaggtcccgggtntgcgccgcgtcccccggtccaacccggggagaggaaacaccgggggaaaagcccccgggcccgggggcctacacacttggccacggcgccccggtagattgggcgcctt

SEQ ID NO: 482925 - DNA, 389 bp, Homo sapiens
aaaataatttaaaattttttggaaaggaagggttggttttcaaattttaagaacataaattttggagggcccaggggtgaaataaaatggtttggttgtgtccccccccaaatcccaatttaatttgtttttcccaaatttcccatattttgtgggagggtcccaggggggggtaattaattcaggggggcttttttcctgggtttttcctaaaaaagtaaatgattttcatgagttttgaggggtttaccaggggtttcccctttggtttttccctcatttttttttcccccccccaggtaaaatgtccttttcccctccccccaattttttgaggcctgcccacccttgtggaagggtaagtccaattaacctttttttttttccca

SEQ ID NO: 482926 - DNA, 819 bp, Homo sapiens
  misc_feature (506)..(506): n is a, c, g, or t
  misc_feature (525)..(526): n is a, c, g, or t
gaggcccgtggatctcatcgaagatggtggcgcgatctgtgtcgggcattaccagaagagtctgcatgtggacagtctcaggtacaccgatgtagagaagttttggtctcgcattcagtaaaagagaaagagtccagtgtgcttgtccgaggacagtagcaagatgaataaacggtaagacctatcctagttgtgtccagctattacgaaagccgtagcatatacatgcacctgaatgatctccagtcgtcgtttggtacatgcttacgtataaaggaagtttattggatttcactctcattctctagctaatgtggcaaggacaagttctccctggcaagcatagttcggtctaacaggttcatatccttcgtggcctcagtatagagctgatgaacttggggttcagtgtacgtcccataacgtgcacagacgtcacagcacagactcgtgcaagggattatgcagagtgttctttgagtattcctatgaaatgtgcccgtatntcagagactaggatgcgtnnataatgtgtgatggcatactcagatgcccagcttaaactagtccaccccgaattctgtaaacattcaaccttgcgaagttagcatagatgcactgttcgcgaagaagaagaccagcattcgaaagatcacgtgtcctttgccctgaagcataggcgggcatggctgcgattagaatctttgcgcatacgttgtacctattgtgtaacactactatcatgaacttgtttctctgaaagcccagcttttgctggtaggaggaaggtgtatcgaatcttttaaagctcgatattcc

SEQ ID NO: 482927 - DNA, 2002 bp, Homo sapiens
gttatggaggggagaagtgggacaaaaaagatgcagttttcccaatacaaaggaaaaccacaccatgaattgtccgtaatgttcattaacagcatctttaaaactgtgtagctacctcacaaccagtcctgtctgtttatagtgctggtagtatcaccttttgccagaaggcctggctggctgtgacttaccatagcagtgacaatggcagtcttggctttaaagtgaggggtgaccctttagtgagcttagcacagcgggattaaacagtcctttaaccagcacagccagttaaaagatgcagcctcactgcttcaacgcagattttaatgtttacttaaatataaacctggcactttacaaacaaataaacattgtttgtactcacaaggcgataatagcttgatttatttggtttctacaccaaatacattctcctgaccactaatgggagccaattcacaattcactaagtgactaaagtaagttaaacttgtgtagactaagcatgtaatttttaagttttattttaatgaattaaaatatttgttaaccaactttaaagtcagtcctgtgtatacctagatattagtcagttggtgccagatagaagacaggttgtgtttttatcctgtggcttgtgtagtgtcctgggattctctgccccctctgagtagagtgttgtgggataaaggaatctctcagggcaaggagcttcttaagttaaatcactagaaatttaggggtgatctgggccttcatatgtgtgagaagccgtttcattttatttctcactgtattttcctcaacgtctggttgatgagaaaaaattcttgaagagttttcatatgtgggagctaaggtagtattgtaaaatttcaagtcatccttaaacaaaatgatccacctaagatcttgcccctgttaagtggtgaaatcaactagaggtggttcctacaagttgttcattctagttttgtttggtgtaagtaggttgtgtgagttaattcatttatatttactatgtctgttaaatcagaaattttttattatctatgttcttctagattttacctgtagttcatacttcagtcacccagtgtcttattctggcattgtctaaatctgagcattgtctagggggatcttaaactttagtaggaaaccatgagctgttaatacagtttccattcaaatattaatttcagaatgaaacataattttttttttttttttggagatggagtctcgctctgttgcccaggctggagtgcagtggcgcgatttgggctcactgtaacctccatctccggggttcaagcaattctcctgtctcagcctccctagtagctgggactgcaggtatgtgctaccacacctggctaattttggtatttttaagtagagatggagtttcaccatattggtcaggctggtcttgaactcctgacctcaggtgatccacccacctcggcctcccaaagtgctgggattgcaggcgtgataaacaaatattcttaatagggctactttgaattaatctgcctttatgtttgggagaagaaagctgagacattgcatgaaagatgatgagagataaatgttgatcttttggccccatttgttaattgtattcagtatttgaacgtcgtcctgtttattgttagttttcttcatcatttattgtatagacaatttttaaatctctgtaatatgatacattttcctatcttttaagttattgttacctaaagttaatccagattatatggtccttatatgtgtacaacattaaaatgaaaggctttgtcttgcattgtgaggtacaggcggaagttggaatcaggttttaggattctgtctctcattagctgaataatgtgaggattaacttctgccagctcagaccatttcctaatcagttgaaagggaaacaagtatttcagtctcaaaattgaataatgcacaagtcttaagtgattaaaataaaactgttcttatg

SEQ ID NO: 482928 - DNA, 233 bp, Homo sapiens
cttagaatatggaaggtcatggagtcctcattttcgtcttgtaactgagttatatgaaagtctggttgagatgtctgtcacttttctgatggagaccaaagtacactgcctcacactagatgagctgtgccatgtacgtattgtgacccctgttgttgtcatatccgcacatcagcgtaagacgctgtccaaggcaaagccataaatgccgagatgaagtctcacgagagggg

SEQ ID NO: 482929 - DNA, 1103 bp, Homo sapiens
  misc_feature (16)..(16): n is a, c, g, or t
  misc_feature (23)..(23): n is a, c, g, or t
  misc_feature (30)..(31): n is a, c, g, or t
  misc_feature (33)..(34): n is a, c, g, or t
ggacgcgtgggcgacnacgcgtnggtcccnncnngtcctgaactagaggtggttcctacaagttgttcattctagttttgtttggtgtaagtaggttgtgtgagttaattcatttatatttactatgtctgttaaatcagaaattttttattatctatgttcttctagattttacctgtagttcatacttcagtcacccagtgtcttattctggcattgtctaaatctgagcattgtctagggggatcttaaactttagtaggaaaccatgagctgttaatacagtttccattcaaatattaatttcagaatgaaacataattttttttttttttttggagatggagtctcgctctgttgcccaggctggagtgcagtggcgcgatttgggctcactgtaacctccatctccggggttcaagcaattctcctgtctcagcctccctagtagctgggactgcaggtatgtgctaccacacctggctaattttggtatttttaagtagagatggagtttcaccatattggtcaggctggtcttgaactcctgacctcaggtgatccacccacctcggcctcccaaagtgctgggattgcaggcgtgataaacaaatattcttaatagggctactttgaattaatctgcctttatgtttgggagaagaaagctgagacattgcatgaaagatgatgagagataaatgttgatcttttggccccatttgttaattgtattcagtatttgaacgtcgtcctgtttattgttagttttcttcatcatttattgtatagacaatttttaaatctctgtaatatgatacattttcctatcttttaagttattgttacctaaagttaatccagattatatggtccttatatgtgtacaacattaaaatgaaaggctttgtcttgcattgtgaggtacaggcggaagttggaatcaggttttaggattctgtctctcattagctgaataatgtgaggattaacttctgccagctcagaccatttcctaatcagttgaaagggaaacaagtatttcagtctcaaaattgaataatgcacaagtcttaagtgattaaaataaaactgttcttatg

SEQ ID NO: 482930 - DNA, 315 bp, Homo sapiens
tctaactctaaatagtaagtaacatccatatcactatgtccaagagacattcagatactttagtaatgtaacgacaggaatgggagcatgtgatgcacaggagagtgacactaatccataaagtcttagagaactaaaccaataaacatatttgtacagctgaggtttccccatcctaatatacatatattaataattcagtcctatatgaactaaatattttacatttttttgacaggaaactatatatatataatttattaaggggaagagtcttgctctgtcaccaggtggagtgagggcatgatctcagct

SEQ ID NO: 482931 - DNA, 1112 bp, Homo sapiens
gccgccgagaccctcaggggctgcggccctggtcccgcgggacctgtgggggcctgggcggcggcgcccccgacccagccagcggacgggccggggggggaaccgggaggtcccggggggcgtccacgggggtgtccccgggggtctccggaaggcgccggcggaggctcccgcgctgcgcttgtcgcgcgcggccccgcggccagcctgggtagggcccaggcgcagccaatgggaagggtcggaggcatggcacagccaatgggaagggccggggcaccaaagccaatgggaagggccgggagcgcgcggcgcgggagatttaaaggctgctggagtgaggggtcgcccgtgcaccctgtcccagccgtcctgtcctggctgctcgctctgcttcgctgcgccgccactatgctctccctccgtgtcccgctcgcgcccatcacggacccgcagcagctgcagctctcgccgctgaaggggctcagcttggtcgacaaggagaacacgccgccggccctgagcgggacccgcgtcctggccagcaagaccgcgaggaggatcttccaggagcccacggagccgaaaactaaagcagctgcccccggcgtggaggatgagccgctgctgagagaaaacccccgccgctttgtcatcttccccatcgagtaccatgatatctggcagatgtataagaaggcagaggcttccttttggaccgccgaggaggtggacctctccaaggacattcagcactgggaatccctgaaacccgaggagagatattttatatcccatgttctggctttctttgcagcaagcgatggcatagtaaatgaaaacttggtgagtttccaaaacatctttcattcatttgacgttgacgatctgaggtcgaactagttcgctttcctcgtcttgtatgtttttccatgctgagtgcatctgtgtgtgtaagctgggttttatattacatggcatttcctgtttgtaacactttgcagttctttcttatggtattttcccgactctagagaagctgagacaatattaagtggtagcaatgtgatgactctttgtggcaccacatctgcccctcttttttgttgagc

SEQ ID NO: 482932 - DNA, 1170 bp, Homo sapiens
ggcccttcgcgcgcagtcccttagggggcgcctggaagcccgcgcatgcgccctgagggctcgctgacctaccgggtgccagagaggctgcggcagggtttctgtggcgtgggtcgggcagcacaggccttggtgtgtgcgagtgccaaggagggcaccgccttcaggatggaggctgtgcaggagggggcggccggggtggagagtgagcaggcggctttgggggaggaggcggtgctgctgttggatgacataatggcggaggtggaggtggtggcggaggaggagggcctcgtggagcggcgggaggaggcccagccccgacagcaggctgtgcctggccctgggcccatgaccccagagtctgcactggaggagctgctggccgttcaggtggagctggagccggttaatgcccaagccaggaaggccttttctcggcagcgggaaaagatggagcggaggcgcaagccccacctagaccgcagaggcgccgtcatccagagcgtccctggcttctgggccaatgttattgcaaaccacccccagatgtcagccctgatcactgacgaagatgaagacatgctgagctacatggtcagcctggaggtggaagaagagaagcatcctgttcatctctgcaagatcatgttgttctttcggagtaacccctacttccagaataaagtgattaccaaggaatatctggtgaacatcacagaatacagggcttctcattccactccaattgagtggtatccggattatgaagtggaggcctatcgccgcagacaccacaacagcagccttaacttcttcaactggttctctgaccacaacttcgcaggatctaacaagattgctgagatcctatgtaaggacctgtggcgcaatcccctgcaatactacaagaggatgaagccacctgaagagggaacagagacgtcaggggactcccagttgttgagttgaatatgatggagcatcagattttacctaatacagcagaactcctaaaaagttacagccatatgcaggacggcagtactcagcatggtcttatgcacaggaactaaaggaaaaagagatcgagtcacaaaaattcaggaagagggggtaaatgtggattgtatggaatgaaaaataaacattctcaaggaaaaaaaaaaa

SEQ ID NO: 482933 - DNA, 555 bp, Homo sapiens
  misc_feature (318)..(318): n is a, c, g, or t
ggggggggatactatttttcccgagggaaggctaggccctttggcctttttggtgcccctttagccaggttgtgcccaaaaccgggtgttgccggtcggggtttccggggaattgtgcacccccgggccgttcttaagaaatgggccgcccccccccaaggtgtgccaaaactccgagggattccgggcccgctacgcctttttagccctcctttcccgggggggggtgccagggaatgggggttttgttttccccccccccctccctgccccctgggtttttccctgtggcggggggggggctggataatttagacngccttttgaaaggcgccagctttttccccccaggtttttttctgggaagggtgggttcccccccaattgggcctgggatttggtacccttttccccccctggggcattatacatgacccccgggtccggggggggacctggggccccccttcccccaagccccccccgcctttgtttgttttggctttcccggttacttttggcccccccccttatttttttttgggttttttggga

SEQ ID NO: 482934 - DNA, 1271 bp, Homo sapiens
ggcccttcgcgcgcagtcccttagggggcgcctggaagcccgcgcatgcgccctgagggctcgctgacctaccgggtgccagagaggctgcggcagggtttctgtggcgtgggtcgggcagcacaggccttggtgtgtgcgagtgccaaggagggcaccgccttcaggatggaggctgtgcaggagggggcggccggggtggagagtgagcaggcggctttgggggaggaggcggtgctgctgttggatgacataatggcggaggtggaggtggtggcggaggaggagggcctcgtggagcggcgggaggaggcccagccccgacagcaggctgtgcctggccctgggcccatgaccccagagtctgcactggaggagctgctggccgttcaggtggagctggagccggttaatgcccaagccaggaaggccttttctcggcagcgggaaaagatggagcggaggcgcaagccccacctagaccgcagaggcgccgtcatccagagcgtccctggcttctgggccaatgttattgcaaaccacccccagatgtcagccctgatcactgacgaagatgaagacatgctgagctacatggtcagcctggaggtggaagaagagaagcatcctgttcatctctgcaagatcatgttgttctttcggagtaacccctacttccagaataaagtgattaccaaggaatatctggtgaacatcacaggtgacaggtggctcccaggatgggtagtgggaggaagatggtgggtggatcattgccaacgggatccagcccccttcccacaaaaactcctgtctctgtagaatacagggcttctcattccactccaattgagtggtatccggattatgaagtggaggcctatcgccgcagacaccacaacagcagccttaacttcttcaactggttctctgaccacaacttcgcaggatctaacaagattgctgagatcctatgtaaggacctgtggcgcaatcccctgcaatactacaagaggatgaagccacctgaagagggaacagagacgtcaggggactcccagttgttgagttgaatatgatggagcatcagattttacctaatacagcagaactcctaaaaagttacagccatatgcaggacggcagtactcagcatggtcttatgcacaggaactaaaggaaaaagagatcgagtcacaaaaattcaggaagagggggtaaatgtggattgtatggaatgaaaaataaacattctcaaggaaaaaaaaaaa

SEQ ID NO: 482935 - DNA, 140 bp, Homo sapiens
tccagatgctgtgagcgcatgatttgattccagctgataaccaaatggcttatttattggacaaataaacaggatgaacaattcattttcattgggaaattaggtcaattaaaatatgtcctctgacccattttcaggcc

SEQ ID NO: 482936 - DNA, 1166 bp, Homo sapiens
aaaaaacacaaaaagcaaacgtacacaggcaacaaatagcacaatgaatggaatagtacctcacatctcaatactaatgtttaatgtaaatggcctaaaaaatgctccacttaggctgggcacggtggctcacgcctgtaatctcagcactttgggaggctgaggtgggcggatcacgaggtcaggagttggagaccatcctggctaacacggtgaaaccctgtgtctactaaaaatacaaaaaaattagccgggcatggtggcgggcgcctatagtcccagccacgcaggaggctgaggcaggagaatggcgtgaagccgggaggtggagcttgcagtgagccaagatggcgccactgcaactccagcctgggggacagagtgagactctatctcaaaaaaaaaagctccacttaacaggataccagaattgcagaaatgcgataagaattcacctgtcaactatctgctgccttcaagagacttacctaacacagaaggactaagcaaaacagcacaaaaatctggaggcatcacattattctgatttcaaattatatacttataaggccatagtcaccaaacagcattggtactggcattaaaaataaggaatttacaccaattggcaatagaattagagaaccccagaaataaagccaaaatacttccaagacaactggatctttggcaacaaaagccaaacaacaagaaacgtgggccgaaaagggcacaccctatttcaacccaatggtgcacggatagccacatgttatgagaagtcacactggagcccagaaatcttcacccttttacacaatcttcccgagagagtcaggacgtacaattgaaaccctgcgaccttaaaaactttaagaaaatgcgtgttgtaaaacccccttctggagcggtggtcaggaaggcgtatcatagacagaagcaccaaagacacagcagaagacaaaatgatcagggaagactagccacaagcgtgcgcgaacggacacgagcggatacaacaacagggagagagaaacaaaatcagagagcaccaaaaagcacgagcacagaaacagcggaggagtaacgatgaaaagatgagataagcgagaatgtggtcgcccttggcctccgtcttgggtccgcgcgagcgcacaggacgacga

SEQ ID NO: 482937 - DNA, 902 bp, Homo sapiens
cgcggtggctcacgcctgcaatcccagcactttgggaggccgaggcggggggaccacgaggtcagaagattgagaccatcctggccaacacggtgaaaccccgtctctaccaaaaatacaaaaaattagccagatgtggtgacatgtgcctgcagtcccagccactcgggaggctgaggcaagagaatcacctggacttgggaggaggaggttgcagtgagtcgagaccgcgccactgcactccagcctgggtgacagagcgagactccgtctcagaaaaataaacaaacaaataaataataaacacctgagccctctgactgactgaacagagccctcttggccaaggtgacccccaaaaaataaaaactaagtttcccggccgtaaggcagatgggaaattgcgcctccgtataccccttcctcactgttaccagggttaaacaaggtctggtttcccaaattaaaccagaaacaagccctggaaaaacaaagcactggaaacaccccctccgatgaccttcaagcaattgcctgctgatgcggcctgactccagaccttttgcagtttcgaagtgacaaactggactaggctacaaaggtattcaaccaatggggctggttctgggctggttcaccgaaggcctgctgtccacagttgtctccgtgtcctgtgtaacaccttttcacaccactacaagaacgcctagcgtgttacgtggcagcttgaaacggtgaatttcttccactcggaaggggtgaacgtggggcactgtatctgtaaccacactaatgattgggtaaatcaagccaaccattattgaccccggttgcactgacatagtcaataagtccccccctttgaaccttgtttgaataatgcgctggtatagcccaccctg

SEQ ID NO: 482938 - DNA, 630 bp, Homo sapiens
  misc_feature (14)..(14): n is a, c, g, or t
  misc_feature (67)..(69): n is a, c, g, or t
  misc_feature (101)..(101): n is a, c, g, or t
  misc_feature (109)..(109): n is a, c, g, or t
  misc_feature (134)..(134): n is a, c, g, or t
  misc_feature (154)..(154): n is a, c, g, or t
  misc_feature (192)..(192): n is a, c, g, or t
  misc_feature (267)..(267): n is a, c, g, or t
  misc_feature (285)..(285): n is a, c, g, or t
  misc_feature (288)..(288): n is a, c, g, or t
  misc_feature (303)..(304): n is a, c, g, or t
  misc_feature (323)..(323): n is a, c, g, or t
  misc_feature (389)..(389): n is a, c, g, or t
  misc_feature (395)..(395): n is a, c, g, or t
  misc_feature (412)..(412): n is a, c, g, or t
  misc_feature (433)..(433): n is a, c, g, or t
  misc_feature (474)..(474): n is a, c, g, or t
  misc_feature (564)..(564): n is a, c, g, or t
tcacctcgtaagangccctcatctctgaaatggccacaccgcccatgacatacacgatgagccgggnnnccgcccgggcttctatgccagccttgttcttntgccagtnaccgaagcgggcactgacagcggcntgggagttggccgtgggggnggggtcggatacgaagggccacaggttcctgtccagcnggtcctccacggcgtcctccattacatccttgatgaccggggtccagcgggacagctgataggtgggctccatgngttctctcggttccagcnggntggaggtccccgagnncccggggttggtgaaagtncctcctagctgctccaggttacggatgaggctgctgtgcgcctgtacattggcatgctggatcagnttgganaggtttttttcactcanaccattccgaagaagatgtanagcaacaggacccggatttttttgtaggcgggcaccgcgcngttccagcagcaccggaacgatcagcttcatggagtccttgatcttctccccctctgcgtcggagcccatggccaggtcctgctccacantacacagcttctccaccgagcccttgaagtgcttcatacaatcatctgctagatgcaggtgcgtag

SEQ ID NO: 482939 - DNA, 373 bp, Homo sapiens
  misc_feature (2)..(2): n is a, c, g, or t
cntcgtaccttctgctctgtttgccacgaaggactagaatttatgacaccccagtagcaatgaacatacccagtgcccagattttggtttctatataggattctccacgtaaaaagtacaaagagctcctatggataaatggctgattctgcggctagggcatggaaaatacaagatgaatctgaaacatcctatatgtagcgggaacgaaagtggtcggcagaacaaaaggataataggcgtgtgacagagacatatattaacaaaacaggaagaacatttcactgggccaaaaactgggaaacaattcgagcccacattataaataacataagtttttaaagttcacaaatccaaagtataaaataaacat

SEQ ID NO: 482940 - DNA, 142 bp, Homo sapiens
gaggtatgaagtcaatatttatttcgagaaagaaaacattattcatatatgtgtaccgattttattacccatactaacagagtgctgaattgcctgtggactttaaaaataaaaattcctagtctggcattaatactaattt

SEQ ID NO: 482941 - DNA, 503 bp, Homo sapiens
  misc_feature (399)..(399): n is a, c, g, or t
  misc_feature (404)..(404): n is a, c, g, or t
  misc_feature (424)..(424): n is a, c, g, or t
  misc_feature (444)..(444): n is a, c, g, or t
  misc_feature (450)..(450): n is a, c, g, or t
  misc_feature (487)..(487): n is a, c, g, or t
tccgtggcttcgggcggggaggtcacaatcacattgagccaaaacgcatccagtgttttctccagttacaaataaaacgaatatgcccatgctgctaccacatcctcaccagcatttcctaaaaggccttttaagagcacctttccgatgttaccacttcatctttcactcaagtactcatctcggatcaggaatcccatgtgctcagccgtttaattctcttgggactgaaaacgccactttgggatgctgctgtcagatgggcttaaagaggaaaattatggtgtacaaacaacctttaaagggaccacacaggaagggactttctggattaaaggaggcaaaggtttgttggggattaaacttttattacttgggttttaattcccagggggcaanggggnctgttttagggcaggagggncattactctttgttgggggntccacnttacagcagggggaaagggggtttggcccgggggggntttttttcagggagtg

SEQ ID NO: 482942 - DNA, 203 bp, Homo sapiens
aggacggacggacggacggacggggccccccgaggtgccccccaacgagccacgctacgagccacacgaagcgccacgcagagagccccacaacgagccacgcaacgggccacacgaagagcctcatagggtggctcatggggtggcgcatcgggtggcacgtcgagtggctcttcgggtggcccttggggtggcgctaaggg

SEQ ID NO: 482943 - DNA, 108 bp, Homo sapiens
  misc_feature (14)..(14): n is a, c, g, or t
  misc_feature (61)..(61): n is a, c, g, or t
gagcacaatcatgngcaagcgcaacagcacacctttatccgagtgagaccactatgcagcngaacagagacttcttatctcttcttcttgatacttgaatactgcccc

SEQ ID NO: 482944 - DNA, 1660 bp, Homo sapiens
  misc_feature (284)..(284): n is a, c, g, or t
  misc_feature (289)..(289): n is a, c, g, or t
  misc_feature (295)..(295): n is a, c, g, or t
  misc_feature (360)..(360): n is a, c, g, or t
  misc_feature (362)..(362): n is a, c, g, or t
  misc_feature (383)..(383): n is a, c, g, or t
  misc_feature (446)..(446): n is a, c, g, or t
  misc_feature (450)..(450): n is a, c, g, or t
  misc_feature (608)..(608): n is a, c, g, or t
  misc_feature (677)..(677): n is a, c, g, or t
  misc_feature (828)..(828): n is a, c, g, or t
gggctatggcggtagcgcatagtccggcgagtcgctcgctgaggcggtcggggtcttcgtggaacggggagtggaacgcctttcagaaatgcgcgcagaatcatggcctagtagtgcgacatcccggatagccagtgctgaacgtcttgactctcctgacgagttcaactaactatcttgatcttcggactcatgtgcatgaggacagcgcatctgagcgcgcatctgttgagcatcgaggtggtagcattgcgctgtgaccgtgtggagagaggcaggacacncagtnttcgcncacggtggatagacgctagcgcagtcccgtttgcgcacgcagaattgggtctttaccagctttcncngttacagcagacaacaaattngcatggtaccagcagattggccttgctgaccatgcgcacgccatcgggcctccgagtgtcccncacngagtgagtcctggggcactccagtcgtcagccggtggcctctgtgtgcgcgctgtgagcccctctgagagagccggcttctgggacagacacccaccagtcgactgtgggcgcttgctgatccagcgagtgatctcccgtcatgtcaccacgcatgangtcatatccgagatgcgtttgttgagctctctgcgagcgcgacagatgagcaagctgattgcatgggcntcggtgaccgtgcgatgacccctgtatggggttgaccgcgtcccattgtgtccacgcctaggggcatggtcccctgccttgtcttctccttgtccatctggcctttcctcttttctcgcgcacactgactttcatatccctcggacgtccngtcgccacagggatcgcgctcacggacacactgattcacaattgccgacagaggattgacacgcgccacgttgcgctgcccgggtcgggggtagatggcgcggggctatgatgacggcaatgaaggtcgttcgtagtcgccagggttgctttagcttgtcacgttgggaccggtgttcgggggatgggctttaggtagcgtccgggtgttcgggattcttggcagcttggttagctcctaagggttgggccggaaggggccgttgggcgccaccggcggccctaggggccatgtcttcagccgagaggggacctatcgggaaggtcgtttggggtcggcccgccgttggtgtggtccccgtgaaggctgcgcgcgcggcctttacaaagggagaggggcgttggaggacaacagtcccccacagagatcaccttgagggccgcccggtttggaagcggagacccggcagtttgtgaacacaaaggccttaggaagggagggtctagtcggattgttgccgcgcacggtcccacagggggtggcaaacaatggtgggtgcccttcattttatggaaagggtgcaggccctggtaatacacaaaccgggcgagaacaggggtgataccccggtgtggttttgtaaaaaatttattatgagcacccaccccgggtagtaggaatttcatcagagccacgagatagtggcggctacaaacaacagaggagaggagggagagaaactcactatatatatccgccccccagtggatcactagactggagcaagcaagaacagagcaccactacctagttgtagagcagccaattcacg

SEQ ID NO: 482945 - DNA, 658 bp, Homo sapiens
  misc_feature (55)..(56): n is a, c, g, or t
aattactgcccagcagccgactaagttgcattccttgaatcttcgcagaaaagannattcttttaatcagagttagtaatgtggacagtacaaaatcgagagagtctggggcttctctctttccctgtgatgattaccatggtctgttgtgcacacagcaccaatgaacccagcaacatgtcatacgtgaaagagacagtggacagattgctcaaaggatatgacattcgcttgcggccggacttcggagggccccccgtcgacgttgggatgcggatcgatgtcgccagcatagacatggtctccgaagtgaatatggtgagtggcctcccgaggggcccggcggttcggcttacgcagatgggaaatggacaggtccctttgccctctgcgtttcattggcggtcacctcgcccctggcccctgaggtcccactccgcacccgctccccgctccggcacacacacccggtcgcccctggtttgtaatttcgacacacacgggctactgcggtgttccagggaaacgtgctcggcactattttgggaaggacgagtgactgttgcgccgtggatctgctggggcggagtctgagcgttactttagctgggtttccctgcgtgtttggatgaggagggcaccatctgctggcagccgg

SEQ ID NO: 482946 - DNA, 475 bp, Homo sapiens
  misc_feature (426)..(426): n is a, c, g, or t
gccagagtagctgggattataggcgcgtgcaccacaaccaactaatttttgtatttttagtggagacgggttttcgccatgttagccaggctggtcttgaactcctgacctcgggtgatccactgccttggcctcccaaagttctggaattataggtgtgagccactgcgcctggccttataagagtattttattatatgggcatgccatagtttatttacctgggcccttttgctcttttggttttttattgagacagagtctcactctgtcaccaaggctggagtacagtggcgtgatctcgctcactgcaccctccgcctcctgggaattaagcaattcttctgcctcagcctcctgagtagctggcactacaggcacactccactgctctctacccagaccttttgagggaaatttagttcnttctgtttaggttgcttctaaggtttttaaaacattgaccatcctgaat

SEQ ID NO: 482947 - DNA, 498 bp, Homo sapiens
cacgcgtccgctcgaactcctgagctcgggtgatccacctgcctcagactcccaagggctgggattacaagtgtaggccaccgctcctggcctttattttcttttccttttttatttttttttttagacgaggtctcattctgtcatccaggctggagtgcagaggcatgatctcagctcactgcaggctctgcctcccgggttcatgccgttctcctgcctcagcctcctgagtggctgggactgcagacacccgccaccatgcccggctattttttgtatttttggtggagatggggtttcgccatgctggccaggatggtctcaatctcttgacctcgtagtccgcccgccttggcctcccaaggtgctgggattgcagtgttgaagcccaccgcacctggcctattttcttttaatgagaacctcagccaggcgcggtggctcagccctgttgtcccggccctttgggaggccgaggcgggaggatcacttgag

SEQ ID NO: 482948 - DNA, 220 bp, Homo sapiens
gacaaaaagaagaaagataagaagaaaaagaaaggagaaaaggaagaaaaagagaaagagaagaaaaaaaggacctagcaaagcccctgttaaagctatgcaagaagctctggctaagcttaaagaggagaaaaaaggacggaaaaaagaaaaggaaaaccgtataaaacggttggaaaaataaaaacccaaccgtaaagaaaaggaccgatgggaccag

SEQ ID NO: 482949 - DNA, 1020 bp, Homo sapiens
  misc_feature (360)..(360): n is a, c, g, or t
  misc_feature (378)..(378): n is a, c, g, or t
  misc_feature (458)..(458): n is a, c, g, or t
  misc_feature (548)..(548): n is a, c, g, or t
  misc_feature (573)..(573): n is a, c, g, or t
  misc_feature (641)..(642): n is a, c, g, or t
  misc_feature (646)..(646): n is a, c, g, or t
  misc_feature (654)..(654): n is a, c, g, or t
  misc_feature (727)..(727): n is a, c, g, or t
  misc_feature (779)..(779): n is a, c, g, or t
  misc_feature (798)..(798): n is a, c, g, or t
  misc_feature (809)..(809): n is a, c, g, or t
  misc_feature (827)..(827): n is a, c, g, or t
  misc_feature (842)..(842): n is a, c, g, or t
  misc_feature (858)..(858): n is a, c, g, or t
  misc_feature (862)..(862): n is a, c, g, or t
  misc_feature (877)..(877): n is a, c, g, or t
  misc_feature (896)..(896): n is a, c, g, or t
  misc_feature (909)..(909): n is a, c, g, or t
  misc_feature (949)..(949): n is a, c, g, or t
  misc_feature (999)..(999): n is a, c, g, or t
  misc_feature (1020)..(1020): n is a, c, g, or t
gattgagcactgaatcccaaccgctccactggcattgcagatctgacgtggattaggaagaagatatgaaagagcgtctagattgcatcacctgagacataaacgtacttttcatagggtatggagagagaccgacgttggatgaacatgcatagaggcggggtgtagcaacgacattgagaagaaacctcgattccaggttaaaccataaatgcagtaggtagctaagacatcgttatgcatgtctgagcaaaagagagtcctgactgaagtgaatcgtctctcacctgagacgactccagtaggttcgaggtaagacgtagacgctttgcagtggacgtacttatagaccacacgttntaactaatcttactcaangatatattaaaaaagaggtaatccacagaggacaacatatatcaaccatccgatggagcacgtagagatacacgaaaatnatcgctagaagaatacatcgtagacaaactgctcattagcagaatgttctctaacaattcgcatgctggaggacaaaatcgtcgcggctngatactgagaactatttgaaccttntatcacatctcaggttaaatgactcgtgttcgtggttgtccctggtattggttggcgagggattagcnntcantactactngattaacgcaatgataggaccaaaacaaaaccctgttaacctctatctccataattataattaacaccacaancatggaacgacactaactattctccagtgagagacgattcggtaaagctaanttatcctatatgacaactntcctacattanttcacctcgttggggaantagtactcccatggngcttaggttgcttacnttcntaactataccatccntggtgccaggtaaggcttntctgaccacattnttctactgcaagaatctgctgggaccatattctggctccnatccaggctatgcgactgtgtaacctttctggaacctagaaatccattcntccattaacaggcacacggcn

SEQ ID NO: 482950 - DNA, 139 bp, Homo sapiens
ggcccgcattcatatgatgaacacatggcagccatgacaggtaatttttcctcacaacagtgcatggctcaaaataaagatctaacaacgatctagtgaacactgcactgcaacgtcaaggtacgtatctatccctgaa

SEQ ID NO: 482951 - DNA, 260 bp, Homo sapiens
tgatctagaggatcccttaatcctaagattgcgtgccctctatggggaagtagaacagttggcaaatgaaactttgtggcatacatttaccagaagaggttcacccgtgctatgaggaggctttattaggtagctctgatgaatatgcagtcttaattaaagcagcagatacgatgtcagcatttatgaaatgcgtcacagaaaaagctgcgggtaatgatgaatttaatgcagcctatgacagtatttataaacgttgg

SEQ ID NO: 482952 - DNA, 571 bp, Homo sapiens
cgaggatctcatggtagtagatataatcccttccgttataaagtactagtcaagaacttacactataccaggcattcttgttaggtatccaggatgcctcaagctcagtgctatggacagttcggaataaatcattctctgtagtgaggaaactgttctgtgcatgacaggacattcagcaccatccctgggctctacccactaaatgtcagcagtacccctcgatcctcgctaagttatgagaagcgaaactgtctcctgacttagccagatatccccaggaaacaaactggacgtctggttacgaagccactggactagatacacaaaaagtgccctgcctactagttgcaatatatgttttatgctccttaaggacagtcagtcctcaaaaactcagtgcattatctggcgtacaggttgtcaaacctcctcttctccatggctgggctactgctgacttctgaccaagtggaggaggttgcgggggttctgggagcatccagttccttactctcagttatgctgtctaagtctctcatcatatccattagcattctgatctttaaga

SEQ ID NO: 482953 - DNA, 143 bp, Homo sapiens
cccccctattttttaaaaaaaccaagttttaaaaatttggtttcaaggggacatgtgtgaaaccaaaattgtatccccccaaagtgacccctgattttttaaaaaaaaaaataaatgttttgggggggttctgttttccccca

SEQ ID NO: 482954 - DNA, 82 bp, Homo sapiens
accctctgccgatggcatttgtgtttttgatatttgtgtctgttactacttttttaatacaaaaagataaaaacgccaaaaa

SEQ ID NO: 482955 - DNA, 930 bp, Homo sapiens
  misc_feature (121)..(121): n is a, c, g, or t
tggaaacagagtttcactcttgggtcacccagggctggagtgtgcaatgggcacgatctcagcttcacgtggaaacttctgtgccttcccagggtccaaggtgattctccgtggcctcagnccttcccaagttagcgtgggattacggggtgcccaccaccagcgcccagcttaagttttttaggggattttaagatagagacaaattttcaccagcgttgggccagggcgggtcttaaactccgtgacctcaaggtgatccacccaggtttagcctcccaaaggggcggggattccggggcggtggagccaccaggtcgggggctcaaatttcctcttcgtggtaagaaacaccgagtcatattgagactcatccattctaagagaacttcatttaaatttaatttacctcttataaagacccgggtatcccaaataccatcacactcagaagtactggggggtaagggcttcaacataggacagtggaccaagggtgaggggataggcgtgcaacacagtacatcccaattggaggctcttaaccagtccatgcaggacatgggacacaggtcagggaaattcctgggaagtcggggacacttggaagacacatttaaccatgaaagccttgcgcatgcccctatagagagtcaccacggggccacaaggtagaacacaccgcgggtgggaaggggggaaagagggatcacaagaaacactcgggaaacctgtagagaggcctcaaatgggttgacaacactctcataaaaaaacatgactccgcgtgaatagcagacccgtgaagcacgagggtataaagacggtgtggcaccaccaaagagaacggagacagcagggagagatagcaagaacagtatcatgcgacaaacaggtgaaacaagggaagggagcccacgaaagagtgcc

SEQ ID NO: 482956 - DNA, 296 bp, Homo sapiens
  misc_feature (179)..(179): n is a, c, g, or t
  misc_feature (206)..(206): n is a, c, g, or t
  misc_feature (209)..(209): n is a, c, g, or t
gggttcacacgccggtccccgcgcggacagtggacgcgagcgtcccccccgcgggcggcgccccttacagggccgagtcggagtcgctggagtccaggctgttcatcagtttgcagctgttgagctgctcccgctgcagcgacaggctatgcgtgctgcggcgcaggcactccaggctntgcaggaacgacttcttggccttctcntcntccatgggggacaccccctcctcctccacctcctggatctcgtcgaaggtcaccggatgcgtcttgaagcgagactggcgcggccgc

SEQ ID NO: 482957 - DNA, 714 bp, Homo sapiens
  misc_feature (132)..(132): n is a, c, g, or t
  misc_feature (164)..(164): n is a, c, g, or t
  misc_feature (257)..(257): n is a, c, g, or t
  misc_feature (283)..(283): n is a, c, g, or t
  misc_feature (298)..(298): n is a, c, g, or t
  misc_feature (304)..(304): n is a, c, g, or t
  misc_feature (308)..(308): n is a, c, g, or t
  misc_feature (311)..(311): n is a, c, g, or t
  misc_feature (347)..(347): n is a, c, g, or t
  misc_feature (359)..(359): n is a, c, g, or t
  misc_feature (379)..(379): n is a, c, g, or t
  misc_feature (405)..(405): n is a, c, g, or t
  misc_feature (428)..(429): n is a, c, g, or t
  misc_feature (441)..(441): n is a, c, g, or t
  misc_feature (482)..(482): n is a, c, g, or t
  misc_feature (498)..(498): n is a, c, g, or t
  misc_feature (506)..(506): n is a, c, g, or t
  misc_feature (517)..(517): n is a, c, g, or t
  misc_feature (580)..(580): n is a, c, g, or t
  misc_feature (615)..(615): n is a, c, g, or t
  misc_feature (624)..(624): n is a, c, g, or t
  misc_feature (714)..(714): n is a, c, g, or t
taaataataggccctcagttaatacccttcagttattgaattaatctagtttgtggaatgaggtgtatcctgccaacttccctctgctcccaagtacactctgagaggtaaaatgctctgggaaatggaacnagaatcgagtggatgctgactctgtgtgcccncctcctcccctgcttgataatggttgaccttgggcaagtcacttctttccatgcctccgttccccatctgtcaaatggggttaataatactgncctacctccccggggtgttgttgtgnggccttgtcaatccnagttantagnctncttccgggtcctctgtggaggctgtcttgcgcccgngtttccgcctgncccccaggctttggtcctcnctgagctgtctccccgactggcactncttagtgactcggcccattttcnncccccccccccncctccaagctgctagttcagatgttgaccgtgttttcctgnatgttggcatcttacnagtcccgncttccttcggntgttgtttgggaaggcacttgggattttctgtgtcttgccttcacagagggaggccatttcanattcaagagcattggattagggaatcgtgaggcanggatgctantgcgtatttctctctgcaggttggggattaaagttcctttccccatgggtttgaagcagactcagactgtctcaggatcaaagcaacccn

SEQ ID NO: 482958 - DNA, 271 bp, Homo sapiens
cgggttggatgttggggggaaatggggacgggttaccattttcccccgggaaccggtttgacatggtttcggattttaatcggccccctaaaagggaattgggcccccagggccaaaatttgggcccagggttcccccacttccaagaggagggaggctaattaaaggccggtcctaattcacgttttcgtagaagggggttccaacctccccttaaccggaaacggggtaggaccccccttaaggccggtgggcctttttaaagggccaa

SEQ ID NO: 482959 - DNA, 328 bp, Homo sapiens
ggcgtgaacccgggaggtggagcttgcagtgagcagagacagcgctactgcactctggcctgggcaaaagagcaagattctgtctccaaaaaaaaaaaaaaagaaagaaattgcagatttccacccggcacgggggctcatgcctgtaatctcagcacttggggaggctgagacagggtggatcacctgaggtcaggagttcgagaaacagccgttggccaacattggtgaaaccccgggttctatttaaaaattacagaaatttagccagggcgtcggtggtgagagtgtgacagcattgctgggcagcccttcgcttcgctctcgg

SEQ ID NO: 482960 - DNA, 2965 bp, Homo sapiens
tctctgagcatcggaccctctgccattccaacctctcatgccgaggcccgtcctgtcagtcactgctttttgtcatcggcttggcaaacgggagagcaaacgaagcttcatgggaaacagcagcaacagttgggttctccccagggaggaagcacaaggctggatgggccaggctgtgcagggagggaccaggacaagcaggtcccatgcatcattccccaagctggagctgggcctgggacaccgtccctccccaacccgggagccgcccacctgctccatctgtctggaaaggcttcgagagcccatctcgctggactgtggccatgacttctgcatccgatgcttcagcacacaccgcatcccaggctgtgagctaccatgctgtcctgaatgccggaagatctgtaagcaaaggaagggcctccgcagtctaggggaaaggatgaaactcctaccacagcggccactgccccctgcactgcaggagacctgtgctgtgagggcagaacgtctgctgttggtacgaatcaatgcctccggaggcctcatcctcaggatgggcgccataaaccgttgcctgaagcatccactggccagggacacacccgtctgcttattggctgtcctgggagagcagcactcaggaaagtccttccttttggaccacttgctcagtggcttaccaagcctggaatctggtgacagcggcaggcccagagcagaggggtctctgcctgggatcagatggggcgctaacggcctcacgaggggtatctggatgtggagtcaccccttcctgctgggaaaagaggggaagaaggtggctgtgttcttagtggacacgggggatgtcatgagcccagaactgagcaaggagacaagggtcaagctctgtgctctcaccatgatgctcagttcctaccagatcctgaatacctcccaagagctgaaggataccgatctgggctatctagagatgttcgttcacgtggctgaggtgatgggcaaacattatgggatggtaccaatccagcatctggatctcttagtccgagactcttcccatcataataagtcagggcaagggcacgtgggtgacatactccagaagctgtccggcaaataccccaaggtccaggagctgctcctcgggaaacgggcccgctgttacctcctccctgctcctgagaggcagtgggtaaacaaagaccaagccagccccagaggcaacacagaagatgacttctcccaccatttccgggcctacatcttggacgtgctgagcacagcccctcagcacgctaagagccgctgtcaagggtactggagtgaggggcgtgccgtggccaggggagacagacgcctgctcacagggcagcagctagcacaggagatcaagaatctctctggctggatggggaagactgggcccagtttcaactctcctgatgagatggctgctcagctccatgatctgaggaaagtggaagccgccaagaaggagttcgaggagtacgtgagacagcaggacatagccaccaagcgcatcttctctgcactacgagtcctgcctgacacgatgaggaacctcctctctacccagaaggatgccatcttggcccgccatggtgtggccctgttgtgcaaggagagagagcagaccttggaggccctggaagccgagctgcaggcagaagccaaggccttcatggactcctacacaatgcgcttctgtggccacctggccgcggtagggggcgctgtaggtgctgggctcatgggcctggcagggggtgtggtgggcgcaggcatggcagcagcggcgttggctgctgaggctgggatggtagcagctggggccgcggtgggggccaccggggctgctgtggttgggggtggtgtgggtgctggtctggccgccactgtgggctgcatggagaaagaggaagatgagagagttcaaggaggggaccgagagcccctactccaggaggaatagcagcaagatgtcgaagcgtgaaatacgtgaaaggcagtaggaagggtgcggacatcagggactcagaggggaccacgtatatactggccttgttgaatgccccatgtcaaacactggctgagctgggggtttacggtgggtccagaaacctgaggaggctttctggccacgaggctgtacttggagtacagcggatagggtgcaaggcctgtttctggctctggataattgctactctctggaacctaggatctcccaccacataaggccccacctcctctacccagttccagtttatttccctggagggcctgggctggaaatttgcccctggatccagaaccccattcgttttacagttgggataggtcccagcataactgactttggagctaggagccccgctaacagggaagaaaaaggaggggtcacagagcagggatggggatgatagacagagctataattctggagtggtgacttgtttccaaaactgctccagaaggccaggcttggctggcctccctgctcttcagttgggtgtccagatgtgtgtcctgaaccgccctgtaccccagcctcctgcagtcctcctaagcctgtgccctgtgccaagcccatttggatggatcaacacagattacatgccaaagaaccacacctccgattgcattctgtgctaaagcagtccgtgccaggttctgccaaagtgtgggaagggaaagtgcaggaaacgagctccgtcttttaacataagcttgagctgtggggcctctgcgccacactgtaagacccccttgatgcagccctctgaacgccaagcctccagaaagcttgtgggcagggggcctctctcgggggatggagatttctaaagagacttctgggctgttaaactataaaagatgttgggcatatgaccctttattttatataaaaataaaatgtgtgcgtgtgaatggt

SEQ ID NO: 482961 - DNA, 120 bp, Homo sapiens
gatggtgctgagagtcaatgacacggagaggaaacgcttcgtgcctgctgacggacagctgccggcctgtgcagtgtagcatgctgcacacgagtgagtggcagctgtgctgtgtgccca

SEQ ID NO: 482962 - DNA, 419 bp, Homo sapiens
aggtcagccgagctcctccatgaggcagcatctggatctgccgaggagtataggtgggccagcagctcgtggtggatgaaggccttcgtatggtatgatcatgaggtgcatgaaggtctttgggatgaggtcgcggatggacttgttgattatggccacgtatgagtccatcaggttgcgaatggtctccagctgccgctccagttgggggtccatggagaaggtgttctcctgggccccatcctcgtattctgcctggtccttctcggggtagacgccagctcggaggaccgaggccttccagctgtccacgtcttcctgggagtcaccggccagctcgatctgccgcatgtccttgtagacgtttctctgctccgtgtagaggatggcgaatacgtgcttgttggacgtgaagccct

SEQ ID NO: 482963 - DNA, 402 bp, Homo sapiens
  misc_feature (298)..(298): n is a, c, g, or t
agctaccttccagacctacttctctgcggagtggcacacatcattttctcacttaggaaaatactaaatgtgtcaagagcccattgcttccaggaagtcacagtgagctaaaagaaatataggctaaagaataatccactggcttgtttaccttttgggcagctcaccacaggactctgggtttatttggagaaatctgcctttgataaacttttggtcttggggtgatattaggtgctattttcaagaggtccagaatgactgggagaggcacgataagatgacaaattttgagccncacaacaattttttggttactacagaggtaaccaaagatttcacttgcaaatgctttttgtgagccagtgtataaaagtagatatttttaaaataaatgtttac

SEQ ID NO: 482964 - DNA, 232 bp, Homo sapiens
cgctagcgcttaagtgaacggccctgccagggccccaatctctccaccagccaggcttggcctgggggacttttaattatgctgaggtccagtgcaccccagatctacaccagaatctctgagggtgggactcaggcatcggccttttggaaaagtctacacgtagtaataacactcagctgaagcatggggagacatgtgcaagccttcgttcacttaatgccgctagcgc

SEQ ID NO: 482965 - DNA, 11720 bp, Homo sapiens
  misc_feature (603)..(603): n is a, c, g, or t
  misc_feature (618)..(618): n is a, c, g, or t
  misc_feature (676)..(676): n is a, c, g, or t
  misc_feature (685)..(685): n is a, c, g, or t
  misc_feature (1078)..(1078): n is a, c, g, or t
  misc_feature (1116)..(1116): n is a, c, g, or t
ttttttttttatagtgcatgcaggaaattgcaattttatttatgtttgtattgatacatatttgtacatatttatggggtgtggtagtttgatatatgcatacaatgtgtaatgatcaaatcagggtgtttaggatatctatcacctcaaacatttatcatttttgtgtttggaacatttctaatctcctagttattttgaaatatataacatattgttaactatagtcaccctactgtgctatcaaacacttgaacttattccttctatctacgtttgtacccattaaccaatctcttccctccctcccccaactccaccttcccagcctctggtacttatctctactccatgagatcaactttttaagctcccacatgagtgagaccatgggatatttgtctttctgtgccagacttatttcacttagaataatgacctccagttccgtaagatgggcagccaggaaaggccttacttagctgatgtttgaattgtgaagttatgtaatcattaagatgagtatacatacaatgggccagctgagtgcacagcaagattcaataaattcaaactaacattactcttattgccaagagagtncctgaaatgacagcncattggaaactggctactttccttccctttccttaggggtttaaggaaagcatgagtnatttcagtnttttgctggagctcctcactgacactcattgcagagcctgagccctcaactctcaatctttgcttaggtcctggcttaggctccactttgtaagaggcaccttcctagtattcactactctctctctcacaatcatgtccttacagacattgctgatcctctttcatactgacaccgggttctagtccgagttccatcactaagtcgctgtttgactttgggcaagttacttctgtggttaattatttttcatcaacaaaatcaaaaggtgaaactagacgaacaactaagaggctccagtattttttcaatctaagagtcccatatcccccactcccttctcacagctcattcaacaatcctaatggcagcgggtgcccgcagtctcaagtntctgccgaagcccaagccgctgtctcggtcagtcacanccgacgaagaggaggaattggaggaagccagcataaccacctcacactgagaacatctgacctttcccagaacgcccgcccactcgacacttcctgtccctccccagatcttgttccggggcacctactcgggtctaatcactcccctcattcactctttagggtccattgctgtttctttgaggaagcggagcatcttctgtcgttgattggtttccgtcattgttgataggttggtaacaaacaaggtgtgcctggtctcctggtaacgtcctgccgatagtcctgattggtcggtgtcttaatcccatcttccgtcccaactgctagtggctgagtccctggcggggcgcggcggtggaaggtgtcgcgtacgggcttcccgagctgacgtggcttgaattgggaggggggcagctggagcctcaggcggcagcgcttctagaaatgctgagccgattatcaggattagcaaatgttgttttgcatgaattatcaggagatgatgacactgatcagaatatgagggctcccctagaccctgaattacaccaagaatctgacatggaatttaataatactacacaagaagatgttcaggagcgcctggcttatgcagagcaattggtggtggagctaaaagatattattagacagaaggatgttcaactgcagcagaaagatgaagctctacaggaagagagaaaagctgctgataacaaaattaaaaaactaaaacttcatgcgaaggccaaattaacttctttgaataaatacatagaagaaatgaaagcacaaggagggactgttctgcctacagaacctcagtcagaggagcaactttccaagcatgacaagagttctacagaggaagagatggaaatagaaaagataaaacataagctccaggagaaggaggaactaatcagcactttgcaagcccagcttactcaggcacaggcagaacaacctgcacagagttctacagagatggaagaatttgtaatgatgaagcaacagctccaggagaaggaagaattcattagcactttacaagcccagctcagccagacacaggcagagcaagctgcacagcaggtggtccgagagaaagatgcccgctttgaaacacaagttcgtcttcatgaagatgagcttcttcagttagtaacccaggcagatgtggaaacagagatgcaacagaaattgagggtgctgcaaaggaagcttgaggaacacgaagaatccttggtgggccgtgctcaggtcgttgacttgctgcaacaggagctgactgctgctgagcagagaaaccagattctctctcagcagttacagcagatggaagctgagcataatactttgaggaacactgtggaaacagaaagagaggagtccaagattctactggaaaagatggaacttgaagtggcagagagaaaattatccttccataatctgcaggaagaaatgcatcatcttttagaacagtttgagcaagcaggccaagcccaggctgaactagagtctcggtatagtgctttggagcagaagcacaaagcagaaatggaagagaagacctctcatattttgagtcttcaaaagactggacaagagctgcagtctgcctgtgatgctctaaaggatcaaaattcaaagcttctccaagataagaatgaacaggcagttcagtcagcccagaccattcagcaactggaagatcagctccagcaaaaatccaaagaaattagccaatttctaaatagactgcccttgcaacaacatgaaacagcatctcagacttctttcccagatgtttataatgagggcacacaggcagtcactgaggagaatattgcttctttgcagaagagagtggtagaactagagaatgaaaagggagccttgctccttagttctatagagctggaggagctgaaagctgagaatgaaaaactgtcttctcagattactctcctagaggctcagaatagaactggggaggcagacagagaagtcagtgagatcagcattgttgatattgccaacaagaggagctcttctgctgaggaaagtggacaagatgttctagaaaacacattttctcagaaacataaagaattatcagttttattgttggaaatgaaagaagctcaagaggaaattgcatttcttaaattacagctccagggaaaaagggctgaggaagcagatcatgaggtccttgaccagaaagaaatgaaacagatggagggtgagggaatagctccaattaaaatgaaagtatttcttgaagatacagggcaagattttcccttaatgccaaatgaagagagcagtcttccagcagttgaaaaagaacaggcgagcactgaacatcaaagtagaacatctgaggaaatatctttaaatgatgctggagtagaattgaaatcaacaaagcaggatggtgataaatccctttctgctgtaccagatattggtcagtgtcatcaggatgagttggaaaggttaaaaagtcaaattttggagctcgagctaaactttcataaagcacaagaaatctatgagaaaaatttagatgagaaagctaaggaaattagcaacctaaaccagttgattgaggagtttaagaaaaatgctgacaacaacagcagtgcattcactgctttgtctgaagaaagagaccagcttctctctcaggtgaaggaacttagcatggtaacagaattgagggctcaggtaaagcaactggaaatgaaccttgcagaagcagaaaggcaaagaagacttgattatgaaagccaaactgcccatgacaacctgctcactgaacagatccatagtctcagcatagaagccaaatctaaagatgtgaaaattgaagttttacagaatgaactggatgatgtgcagcttcagttttctgagcagagtaccctgataagaagcctgcaaagccagctgcaaaataaggaaagtgaagtgcttgagggggcagaacgtgtaaggcatatctcaagtaaagtggaagaactgtcccaggctctttcacagaaggaacttgaaataacaaaaatggatcagctcttactagagaaaaagagagatgtggaaaccctccaacaaaccatcgaggagaaggatcaacaagtgacagaaatcagctttagtatgactgagaaaatggttcagcttaatgaagagaagttttctcttggggttgaaattaagactcttaaagaacagctaaatttattatccagagctgaggaagcaaaaaaagagcaggtggaagaagataatgaagtttcttctggccttaaacaaaattatgatgagatgagcccagcaggacaaataagtaaggaagaacttcagcatgaatttgaccttctgaagaaagaaaatgagcagagaaagagaaagctccaggcagctcttattaacagaaaggagcttctgcaaagagtcagtagattggaagaagaattagccaacttgaaagatgaatctaagaaagaaatcccactcagtgagactgagaggggagaagtggaagaagataaagaaaacaaagaatactcagaaaaatgtgtgacttctaagtgccaagaaatagaaatttatttaaaacagacaatatctgagaaagaagtggaactacagcatataaggaaggatttggaagaaaagctggcagctgaagagcaattccaggctctggtcaaacagatgaatcagaccttgcaagataaaacaaaccaaatagatttgctccaagcagaaatcagtgaaaaccaagcaattatccagaagttaatcacaagtaacacggatgcaagtgatggggactccgtagcacttgtaaaggaaacagtggtgataagtccaccttgtacaggtagtagtgaacactggaaaccagaactagaagaaaagatactggcccttgaaaaagaaaaggagcaacttcaaaagaagctacaggaagccttaacctcccgcaaggcaattcttaaaaaggcacaggagaaagaaagacatctcagggaggagctaaagcaacagaaagatgactataatcgcttgcaagaacagtttgatgagcaaagcaaggaaaatgagaatattggagaccagctaaggcaactccagattcaagtaagggaatccatagacggaaaactcccaagcacagaccagcaggaatcgtgttcttccactccaggtttagaagaacctttattcaaagccacagaacagcatcacactcaacctgttttagagtccaacttgtgcccagactggccttctcattctgaagatgcgagtgctctgcagggcggaacttctgttgcccagattaaggcccagctgaaggaaatagaggctgagaaagtagagttagaattgaaagttagttctacaacaagtgagcttactaaaaaatcagaagaggtatttcagttacaagagcagataaataaacagggtttagaaatcgagagtctaaagacagtatcccatgaagctgaagtccatgccgaaagcctgcagcagaaattggaaagcagccaactacaaattgctggcctagaacatctaagagaattgcaacctaaactggatgaactgcaaaaactcataagcaaaaaggaagaagacgttagctacctttctggacaacttagtgagaaagaagcagctctcactaaaatacagacagagataatagaacaagaagatttaattaaggctctgcatacacagctagaaatgcaagccaaagagcatgatgagaggataaagcagctacaggtggaactttgtgaaatgaagcaaaaaccagaagagattggagaagaaagtagagcaaagcaacaaatacaaaggaaactgcaagctgcccttatttcccgaaaagaagcactaaaagaaaacaaaagtctccaagaggaattgtctttggccagaggtaccattgaacgtctcaccaagtctctggcagatgtggaaagccaagtttctgctcaaaataaagaaaaagatacggtcttaggaaggttagctcttcttcaagaagaaagagacaaactcattacagaaatggacaggtctttattggaaaatcagagtctcagcagctcctgtgaaagtctaaaactagctctagagggtcttactgaagacaaggaaaagttagtgaaggaaattgaatctttgaaatcttctaagattgcagaaagtactgagtggcaagagaaacacaaggagctacaaaaagagtatgaaattcttctgcagtcctatgagaatgttagtaatgaagcagaaaggattcagcatgtggtggaagctgtgaggcaagagaaacaagaactgtatggcaagttaagaagcacagaggcaaacaagaaggagacagaaaagcagttgcaggaagctgagcaagaaatggaggaaatgaaagaaaagatgagaaagtttgctaaatctaaacagcagaaaatcctagagctggaagaagagaatgaccggcttagggcagaggtgcaccctgcaggagatacagctaaagagtgtatggaaacacttctttcttccaatgccagcatgaaggaagaacttgaaagggtcaaaatggagtatgaaaccctttctaagaagtttcagtctttaatgtctgagaaagactctctaagtgaagaggttcaagatttaaagcatcagatagaagataatgtatctaaacaagctaacctagaggccaccgagaaacatgataaccaaacgaatgtcactgaagagggaacacagtctataccaggtgagactgaagagcaagactctctgagtatgagcacaagacctacatgttcagaatcggttccatcagcgaagagtgccaaccctgctgtaagtaaggatttcagctcacatgatgaaattaataactacctacagcagattgatcagctcaaagaaagaattgctggattagaggaggagaagcagaaaaacaaggaatttagccagactttagaaaatgagaaaaataccttactgagtcagatatcaacaaaggatggtgaactaaaaatgcttcaggaggaagtaaccaaaatgaacctgttaaatcagcaaatccaagaagaactctccagagttaccaaactaaaggagacagcagaagaagagaaagatgatttggaagagaggcttatgaatcaattagcagaacttaatggaagcattgggaattactgtcaggatgttacagatgcccaaataaaaaatgagctattggaatctgaaatgaagaaccttaaaaagtgtgtgagtgaattggaagaagaaaagcagcagttagtcaaggaaaaaactaaggtggaatcagaaatacgaaaggaatatttggagaaaatacaaggtgctcagaaagaacccggaaataaaagccatgcaaaggaacttcaggaactgttaaaagaaaaacaacaagaagtaaagcagctacagaaggactgcatcaggtatcaagagaaaattagtgctctggagagaactgttaaagctctagaatttgttcaaactgaatctcaaaaagatttggaaataaccaaagaaaatctggctcaagcagttgaacaccgcaaaaaggcacaagcagaattagctagcttcaaagtcctgctagatgacactcaaagtgaagcagcaagggtcctagcagacaatctcaagttgaaaaaggaacttcagtcaaataaagaatcagttaaaagccagatgaaacaaaaggatgaagatcttgagcgaagactggaacaggcagaagagaagcacctgaaagagaagaagaatatgcaagagaaactggatgctttgcgcagagaaaaagtccacttggaagagacaattggagagattcaggttactttgaacaagaaagacaaggaagttcagcaacttcaggaaaacttggacagtactgtgacccagcttgcagcctttactaagagcatgtcttccctccaggatgatcgtgacagggtgatagatgaagctaagaaatgggagaggaagtttagtgatgcgattcaaagcaaagaagaagaaattagactcaaagaagataattgcagtgttctaaaggatcaacttagacagatgtccatccatatggaagaattaaagattaacatttccaggcttgaacatgacaagcagatttgggagtccaaggcccagacagaggtccagcttcagcagaaggtctgtgatactctacagggggaaaacaaagaacttttgtcccagctagaagagacacgccacctataccacagttctcagaatgaattagctaagttggaatcagaacttaagagtctcaaagaccagttgactgatttaagtaactctttagaaaaatgtaaggaacaaaaaggaaacttggaagggatcataaggcagcaagaggctgatattcaaaattctaagttcagttatgaacaactggagactgatcttcaggcctccagagaactgaccagtaggctgcatgaagaaataaatatgaaagagcaaaagattataagcctgctttctggcaaggaagaggcaatccaagtagctattgctgaactgcgtcagcaacatgataaagaaattaaagagctggaaaacctgctgtcccaggaggaagaggagaatattgttttagaagaggagaacaaaaaggctgttgataaaaccaatcagcttatggaaacactgaaaaccatcaaaaaggaaaacattcagcaaaaggcacagttggattcctttgttaaatccatgtcttctctccaaaatgatcgagaccgcatagtgggtgactatcaacagctggaagagcgacatctctctataatcttggaaaaagaccaactcatccaagaggctgctgcagagaataataagcttaaagaagaaatacgaggcttgagaagtcatatggatgatctcaattctgagaatgccaagctagatgcagaactgatccaatatagagaagacctgaaccaagtgataacaataaaggacagccaacaaaagcagcttcttgaagttcaacttcagcaaaataaggagctggaaaataaatatgctaaattagaagaaaagctgaaggaatctgaggaagcaaatgaggatctgcggaggtcctttaatgccctacaagaagagaaacaagatttatctaaagagattgagagtttgaaagtatctatatcccagctaacaagacaagtaacagccttgcaagaagaaggtactttaggactctatcatgcccagttaaaagtaaaagaagaagaggtacacaggttaagtgctttgttttcctcctctcaaaagagaattgcagaactggaagaagaattggtttgtgttcaaaaggaagctgccaagaaggtaggtgaaattgaagataaactgaagaaagaattaaagcatcttcatcatgatgcagggataatgagaaatgaaactgaaacagcagaagagagagtggcagagctagcaagagatttggtggagatggaacagaaattactcatggtcaccaaagaaaataaaggtctcacagcacaaattcagtcttttggaaggtctatgagttccttgcaaaatagtagagatcatgccaatgaggaacttgatgaactgaaaaggaaatatgatgccagtctgaaggaattggcacagttgaaagaacagggactcttaaacagagagagagatgctcttctttctgaaaccgccttttcaatgaactccactgaggagaatagcttgtctcaccttgagaaacttaaccaacagctcctatccaaagatgagcaattgcttcacttgtcctcacaactagaagattcttataaccaagtgcagtccttttccaaggctatggccagtctgcagaatgagagagatcacctgtggaatgagctggagaaatttcgaaagtcagaggaagggaagcagaggtctgcagctcagccttccaccagcccagctgaagtacagagtttaaaaaaagctatgtcttcactccaaaatgacagagacagactactgaaggaattgaagaatctgcagcagcaatacttacagattaatcaagagatcactgagttacatccactgaaggctcaacttcaggagtatcaagataagacaaaagcatttcagattatgcaagaagagctcaggcaggaaaacctctcctggcagcatgagctgcatcagctcaggatggagaagagttcctgggaaatacatgagaggagaatgaaggaacagtaccttatggctatctcagataaagatcagcagctcagtcatctgcagaatcttataagggaattgaggtcttcttcctcccagactcagcctctcaaagtgcaataccaaagacaggcatccccagagacatcagcttccccagatgggtcacaaaatctggtttatgagacagaacttctcaggacccagctcaatgacagcttaaaggaaattcaccaaaaggagttaagaattcagcaactgaacagcaacttctctcagctactggaagagaaaaacaccctttccattcagctctgcgataccagtcagagtcttcgtgagaaccagcagcactatggtgaccttttaaatcactgtgcagtcttggagaagcaggttcaagagctgcaggcggggccactaaatatagatgttgctccaggagctccccaggaaaagaatggagttcacagaaagagtgaccctgaggaactaagggaaccgcagcaaagcttttctgaagctcagcagcagctatgcaacaccagacaggaagtgaatgaattaaggaagctgctggaagaagaacgagaccaaagagtggctgctgagaatgctctctctgtggccgaggagcagatcagacggttagagcacagtgaatgggactcttcccggactcctatcattggctcctgtggcactcaggagcaggcactgttaatagatcttacaagcaacagttgtcgaaggacccggagtggcgttggatggaagcgagtcctgcgttcactctgtcattcacggacccgagtgccacttctagcagccatctactttctaatgattcatgtcctgctcattctgtgttttacgggccatctatagacttagttgttactctttggaccactcccctcaaaacttggaattctctcacctctaacatcagaacatcaattccagtggaacagtcttcccatttacaggtcttctctccaactcttcacggaaagtgcctgcaaaaacagaggtggatacgaggacaggttggagctgcagggactggcgagtctgctttcttctactgccctgagcctgaacgcttctgcttaatctgagaatcacatttggtttgttgagcctaatatttgttgagattttgcaggaccctgatcttttgtggtcctgtaaaagatactgaggaatgtctttcagccaagccaagaggatggtttcaataaacctaataatctgaagttcag

SEQ ID NO: 482966 - DNA, 11748 bp, Homo sapiens
  misc_feature (603)..(603): n is a, c, g, or t
  misc_feature (618)..(618): n is a, c, g, or t
  misc_feature (676)..(676): n is a, c, g, or t
  misc_feature (685)..(685): n is a, c, g, or t
  misc_feature (1078)..(1078): n is a, c, g, or t
  misc_feature (1116)..(1116): n is a, c, g, or t
ttttttttttatagtgcatgcaggaaattgcaattttatttatgtttgtattgatacatatttgtacatatttatggggtgtggtagtttgatatatgcatacaatgtgtaatgatcaaatcagggtgtttaggatatctatcacctcaaacatttatcatttttgtgtttggaacatttctaatctcctagttattttgaaatatataacatattgttaactatagtcaccctactgtgctatcaaacacttgaacttattccttctatctacgtttgtacccattaaccaatctcttccctccctcccccaactccaccttcccagcctctggtacttatctctactccatgagatcaactttttaagctcccacatgagtgagaccatgggatatttgtctttctgtgccagacttatttcacttagaataatgacctccagttccgtaagatgggcagccaggaaaggccttacttagctgatgtttgaattgtgaagttatgtaatcattaagatgagtatacatacaatgggccagctgagtgcacagcaagattcaataaattcaaactaacattactcttattgccaagagagtncctgaaatgacagcncattggaaactggctactttccttccctttccttaggggtttaaggaaagcatgagtnatttcagtnttttgctggagctcctcactgacactcattgcagagcctgagccctcaactctcaatctttgcttaggtcctggcttaggctccactttgtaagaggcaccttcctagtattcactactctctctctcacaatcatgtccttacagacattgctgatcctctttcatactgacaccgggttctagtccgagttccatcactaagtcgctgtttgactttgggcaagttacttctgtggttaattatttttcatcaacaaaatcaaaaggtgaaactagacgaacaactaagaggctccagtattttttcaatctaagagtcccatatcccccactcccttctcacagctcattcaacaatcctaatggcagcgggtgcccgcagtctcaagtntctgccgaagcccaagccgctgtctcggtcagtcacanccgacgaagaggaggaattggaggaagccagcataaccacctcacactgagaacatctgacctttcccagaacgcccgcccactcgacacttcctgtccctccccagatcttgttccggggcacctactcgggtctaatcactcccctcattcactctttagggtccattgctgtttctttgaggaagcggagcatcttctgtcgttgattggtttccgtcattgttgataggttggtaacaaacaaggtgtgcctggtctcctggtaacgtcctgccgatagtcctgattggtcggtgtcttaatcccatcttccgtcccaactgctagtggctgagtccctggcggggcgcggcggtggaaggtgtcgcgtacgggcttcccgagctgacgtggcttgaattgggaggggggcagctggagcctcaggcggcagcgcttctagaaatgctgagccgattatcaggattagcaaatgttgttttgcatgaattatcaggagatgatgacactgatcagaatatgagggctcccctagaccctgtgagtagttctgttctgatttaaactggaattacaccaagaatctgacatggaatttaataatactacacaagaagatgttcaggagcgcctggcttatgcagagcaattggtggtggagctaaaagatattattagacagaaggatgttcaactgcagcagaaagatgaagctctacaggaagagagaaaagctgctgataacaaaattaaaaaactaaaacttcatgcgaaggccaaattaacttctttgaataaatacatagaagaaatgaaagcacaaggagggactgttctgcctacagaacctcagtcagaggagcaactttccaagcatgacaagagttctacagaggaagagatggaaatagaaaagataaaacataagctccaggagaaggaggaactaatcagcactttgcaagcccagcttactcaggcacaggcagaacaacctgcacagagttctacagagatggaagaatttgtaatgatgaagcaacagctccaggagaaggaagaattcattagcactttacaagcccagctcagccagacacaggcagagcaagctgcacagcaggtggtccgagagaaagatgcccgctttgaaacacaagttcgtcttcatgaagatgagcttcttcagttagtaacccaggcagatgtggaaacagagatgcaacagaaattgagggtgctgcaaaggaagcttgaggaacacgaagaatccttggtgggccgtgctcaggtcgttgacttgctgcaacaggagctgactgctgctgagcagagaaaccagattctctctcagcagttacagcagatggaagctgagcataatactttgaggaacactgtggaaacagaaagagaggagtccaagattctactggaaaagatggaacttgaagtggcagagagaaaattatccttccataatctgcaggaagaaatgcatcatcttttagaacagtttgagcaagcaggccaagcccaggctgaactagagtctcggtatagtgctttggagcagaagcacaaagcagaaatggaagagaagacctctcatattttgagtcttcaaaagactggacaagagctgcagtctgcctgtgatgctctaaaggatcaaaattcaaagcttctccaagataagaatgaacaggcagttcagtcagcccagaccattcagcaactggaagatcagctccagcaaaaatccaaagaaattagccaatttctaaatagactgcccttgcaacaacatgaaacagcatctcagacttctttcccagatgtttataatgagggcacacaggcagtcactgaggagaatattgcttctttgcagaagagagtggtagaactagagaatgaaaagggagccttgctccttagttctatagagctggaggagctgaaagctgagaatgaaaaactgtcttctcagattactctcctagaggctcagaatagaactggggaggcagacagagaagtcagtgagatcagcattgttgatattgccaacaagaggagctcttctgctgaggaaagtggacaagatgttctagaaaacacattttctcagaaacataaagaattatcagttttattgttggaaatgaaagaagctcaagaggaaattgcatttcttaaattacagctccagggaaaaagggctgaggaagcagatcatgaggtccttgaccagaaagaaatgaaacagatggagggtgagggaatagctccaattaaaatgaaagtatttcttgaagatacagggcaagattttcccttaatgccaaatgaagagagcagtcttccagcagttgaaaaagaacaggcgagcactgaacatcaaagtagaacatctgaggaaatatctttaaatgatgctggagtagaattgaaatcaacaaagcaggatggtgataaatccctttctgctgtaccagatattggtcagtgtcatcaggatgagttggaaaggttaaaaagtcaaattttggagctcgagctaaactttcataaagcacaagaaatctatgagaaaaatttagatgagaaagctaaggaaattagcaacctaaaccagttgattgaggagtttaagaaaaatgctgacaacaacagcagtgcattcactgctttgtctgaagaaagagaccagcttctctctcaggtgaaggaacttagcatggtaacagaattgagggctcaggtaaagcaactggaaatgaaccttgcagaagcagaaaggcaaagaagacttgattatgaaagccaaactgcccatgacaacctgctcactgaacagatccatagtctcagcatagaagccaaatctaaagatgtgaaaattgaagttttacagaatgaactggatgatgtgcagcttcagttttctgagcagagtaccctgataagaagcctgcaaagccagctgcaaaataaggaaagtgaagtgcttgagggggcagaacgtgtaaggcatatctcaagtaaagtggaagaactgtcccaggctctttcacagaaggaacttgaaataacaaaaatggatcagctcttactagagaaaaagagagatgtggaaaccctccaacaaaccatcgaggagaaggatcaacaagtgacagaaatcagctttagtatgactgagaaaatggttcagcttaatgaagagaagttttctcttggggttgaaattaagactcttaaagaacagctaaatttattatccagagctgaggaagcaaaaaaagagcaggtggaagaagataatgaagtttcttctggccttaaacaaaattatgatgagatgagcccagcaggacaaataagtaaggaagaacttcagcatgaatttgaccttctgaagaaagaaaatgagcagagaaagagaaagctccaggcagctcttattaacagaaaggagcttctgcaaagagtcagtagattggaagaagaattagccaacttgaaagatgaatctaagaaagaaatcccactcagtgagactgagaggggagaagtggaagaagataaagaaaacaaagaatactcagaaaaatgtgtgacttctaagtgccaagaaatagaaatttatttaaaacagacaatatctgagaaagaagtggaactacagcatataaggaaggatttggaagaaaagctggcagctgaagagcaattccaggctctggtcaaacagatgaatcagaccttgcaagataaaacaaaccaaatagatttgctccaagcagaaatcagtgaaaaccaagcaattatccagaagttaatcacaagtaacacggatgcaagtgatggggactccgtagcacttgtaaaggaaacagtggtgataagtccaccttgtacaggtagtagtgaacactggaaaccagaactagaagaaaagatactggcccttgaaaaagaaaaggagcaacttcaaaagaagctacaggaagccttaacctcccgcaaggcaattcttaaaaaggcacaggagaaagaaagacatctcagggaggagctaaagcaacagaaagatgactataatcgcttgcaagaacagtttgatgagcaaagcaaggaaaatgagaatattggagaccagctaaggcaactccagattcaagtaagggaatccatagacggaaaactcccaagcacagaccagcaggaatcgtgttcttccactccaggtttagaagaacctttattcaaagccacagaacagcatcacactcaacctgttttagagtccaacttgtgcccagactggccttctcattctgaagatgcgagtgctctgcagggcggaacttctgttgcccagattaaggcccagctgaaggaaatagaggctgagaaagtagagttagaattgaaagttagttctacaacaagtgagcttactaaaaaatcagaagaggtatttcagttacaagagcagataaataaacagggtttagaaatcgagagtctaaagacagtatcccatgaagctgaagtccatgccgaaagcctgcagcagaaattggaaagcagccaactacaaattgctggcctagaacatctaagagaattgcaacctaaactggatgaactgcaaaaactcataagcaaaaaggaagaagacgttagctacctttctggacaacttagtgagaaagaagcagctctcactaaaatacagacagagataatagaacaagaagatttaattaaggctctgcatacacagctagaaatgcaagccaaagagcatgatgagaggataaagcagctacaggtggaactttgtgaaatgaagcaaaaaccagaagagattggagaagaaagtagagcaaagcaacaaatacaaaggaaactgcaagctgcccttatttcccgaaaagaagcactaaaagaaaacaaaagtctccaagaggaattgtctttggccagaggtaccattgaacgtctcaccaagtctctggcagatgtggaaagccaagtttctgctcaaaataaagaaaaagatacggtcttaggaaggttagctcttcttcaagaagaaagagacaaactcattacagaaatggacaggtctttattggaaaatcagagtctcagcagctcctgtgaaagtctaaaactagctctagagggtcttactgaagacaaggaaaagttagtgaaggaaattgaatctttgaaatcttctaagattgcagaaagtactgagtggcaagagaaacacaaggagctacaaaaagagtatgaaattcttctgcagtcctatgagaatgttagtaatgaagcagaaaggattcagcatgtggtggaagctgtgaggcaagagaaacaagaactgtatggcaagttaagaagcacagaggcaaacaagaaggagacagaaaagcagttgcaggaagctgagcaagaaatggaggaaatgaaagaaaagatgagaaagtttgctaaatctaaacagcagaaaatcctagagctggaagaagagaatgaccggcttagggcagaggtgcaccctgcaggagatacagctaaagagtgtatggaaacacttctttcttccaatgccagcatgaaggaagaacttgaaagggtcaaaatggagtatgaaaccctttctaagaagtttcagtctttaatgtctgagaaagactctctaagtgaagaggttcaagatttaaagcatcagatagaagataatgtatctaaacaagctaacctagaggccaccgagaaacatgataaccaaacgaatgtcactgaagagggaacacagtctataccaggtgagactgaagagcaagactctctgagtatgagcacaagacctacatgttcagaatcggttccatcagcgaagagtgccaaccctgctgtaagtaaggatttcagctcacatgatgaaattaataactacctacagcagattgatcagctcaaagaaagaattgctggattagaggaggagaagcagaaaaacaaggaatttagccagactttagaaaatgagaaaaataccttactgagtcagatatcaacaaaggatggtgaactaaaaatgcttcaggaggaagtaaccaaaatgaacctgttaaatcagcaaatccaagaagaactctccagagttaccaaactaaaggagacagcagaagaagagaaagatgatttggaagagaggcttatgaatcaattagcagaacttaatggaagcattgggaattactgtcaggatgttacagatgcccaaataaaaaatgagctattggaatctgaaatgaagaaccttaaaaagtgtgtgagtgaattggaagaagaaaagcagcagttagtcaaggaaaaaactaaggtggaatcagaaatacgaaaggaatatttggagaaaatacaaggtgctcagaaagaacccggaaataaaagccatgcaaaggaacttcaggaactgttaaaagaaaaacaacaagaagtaaagcagctacagaaggactgcatcaggtatcaagagaaaattagtgctctggagagaactgttaaagctctagaatttgttcaaactgaatctcaaaaagatttggaaataaccaaagaaaatctggctcaagcagttgaacaccgcaaaaaggcacaagcagaattagctagcttcaaagtcctgctagatgacactcaaagtgaagcagcaagggtcctagcagacaatctcaagttgaaaaaggaacttcagtcaaataaagaatcagttaaaagccagatgaaacaaaaggatgaagatcttgagcgaagactggaacaggcagaagagaagcacctgaaagagaagaagaatatgcaagagaaactggatgctttgcgcagagaaaaagtccacttggaagagacaattggagagattcaggttactttgaacaagaaagacaaggaagttcagcaacttcaggaaaacttggacagtactgtgacccagcttgcagcctttactaagagcatgtcttccctccaggatgatcgtgacagggtgatagatgaagctaagaaatgggagaggaagtttagtgatgcgattcaaagcaaagaagaagaaattagactcaaagaagataattgcagtgttctaaaggatcaacttagacagatgtccatccatatggaagaattaaagattaacatttccaggcttgaacatgacaagcagatttgggagtccaaggcccagacagaggtccagcttcagcagaaggtctgtgatactctacagggggaaaacaaagaacttttgtcccagctagaagagacacgccacctataccacagttctcagaatgaattagctaagttggaatcagaacttaagagtctcaaagaccagttgactgatttaagtaactctttagaaaaatgtaaggaacaaaaaggaaacttggaagggatcataaggcagcaagaggctgatattcaaaattctaagttcagttatgaacaactggagactgatcttcaggcctccagagaactgaccagtaggctgcatgaagaaataaatatgaaagagcaaaagattataagcctgctttctggcaaggaagaggcaatccaagtagctattgctgaactgcgtcagcaacatgataaagaaattaaagagctggaaaacctgctgtcccaggaggaagaggagaatattgttttagaagaggagaacaaaaaggctgttgataaaaccaatcagcttatggaaacactgaaaaccatcaaaaaggaaaacattcagcaaaaggcacagttggattcctttgttaaatccatgtcttctctccaaaatgatcgagaccgcatagtgggtgactatcaacagctggaagagcgacatctctctataatcttggaaaaagaccaactcatccaagaggctgctgcagagaataataagcttaaagaagaaatacgaggcttgagaagtcatatggatgatctcaattctgagaatgccaagctagatgcagaactgatccaatatagagaagacctgaaccaagtgataacaataaaggacagccaacaaaagcagcttcttgaagttcaacttcagcaaaataaggagctggaaaataaatatgctaaattagaagaaaagctgaaggaatctgaggaagcaaatgaggatctgcggaggtcctttaatgccctacaagaagagaaacaagatttatctaaagagattgagagtttgaaagtatctatatcccagctaacaagacaagtaacagccttgcaagaagaaggtactttaggactctatcatgcccagttaaaagtaaaagaagaagaggtacacaggttaagtgctttgttttcctcctctcaaaagagaattgcagaactggaagaagaattggtttgtgttcaaaaggaagctgccaagaaggtaggtgaaattgaagataaactgaagaaagaattaaagcatcttcatcatgatgcagggataatgagaaatgaaactgaaacagcagaagagagagtggcagagctagcaagagatttggtggagatggaacagaaattactcatggtcaccaaagaaaataaaggtctcacagcacaaattcagtcttttggaaggtctatgagttccttgcaaaatagtagagatcatgccaatgaggaacttgatgaactgaaaaggaaatatgatgccagtctgaaggaattggcacagttgaaagaacagggactcttaaacagagagagagatgctcttctttctgaaaccgccttttcaatgaactccactgaggagaatagcttgtctcaccttgagaaacttaaccaacagctcctatccaaagatgagcaattgcttcacttgtcctcacaactagaagattcttataaccaagtgcagtccttttccaaggctatggccagtctgcagaatgagagagatcacctgtggaatgagctggagaaatttcgaaagtcagaggaagggaagcagaggtctgcagctcagccttccaccagcccagctgaagtacagagtttaaaaaaagctatgtcttcactccaaaatgacagagacagactactgaaggaattgaagaatctgcagcagcaatacttacagattaatcaagagatcactgagttacatccactgaaggctcaacttcaggagtatcaagataagacaaaagcatttcagattatgcaagaagagctcaggcaggaaaacctctcctggcagcatgagctgcatcagctcaggatggagaagagttcctgggaaatacatgagaggagaatgaaggaacagtaccttatggctatctcagataaagatcagcagctcagtcatctgcagaatcttataagggaattgaggtcttcttcctcccagactcagcctctcaaagtgcaataccaaagacaggcatccccagagacatcagcttccccagatgggtcacaaaatctggtttatgagacagaacttctcaggacccagctcaatgacagcttaaaggaaattcaccaaaaggagttaagaattcagcaactgaacagcaacttctctcagctactggaagagaaaaacaccctttccattcagctctgcgataccagtcagagtcttcgtgagaaccagcagcactatggtgaccttttaaatcactgtgcagtcttggagaagcaggttcaagagctgcaggcggggccactaaatatagatgttgctccaggagctccccaggaaaagaatggagttcacagaaagagtgaccctgaggaactaagggaaccgcagcaaagcttttctgaagctcagcagcagctatgcaacaccagacaggaagtgaatgaattaaggaagctgctggaagaagaacgagaccaaagagtggctgctgagaatgctctctctgtggccgaggagcagatcagacggttagagcacagtgaatgggactcttcccggactcctatcattggctcctgtggcactcaggagcaggcactgttaatagatcttacaagcaacagttgtcgaaggacccggagtggcgttggatggaagcgagtcctgcgttcactctgtcattcacggacccgagtgccacttctagcagccatctactttctaatgattcatgtcctgctcattctgtgttttacgggccatctatagacttagttgttactctttggaccactcccctcaaaacttggaattctctcacctctaacatcagaacatcaattccagtggaacagtcttcccatttacaggtcttctctccaactcttcacggaaagtgcctgcaaaaacagaggtggatacgaggacaggttggagctgcagggactggcgagtctgctttcttctactgccctgagcctgaacgcttctgcttaatctgagaatcacatttggtttgttgagcctaatatttgttgagattttgcaggaccctgatcttttgtggtcctgtaaaagatactgaggaatgtctttcagccaagccaagaggatggtttcaataaacctaataatctgaagttcag

SEQ ID NO: 482967 - DNA, 837 bp, Homo sapiens
gaacagtatctgactgtggcatgaatctcagttaacaaaaaagcatatccaaatcaccctttaatattaaaatatctgtgcccttaaagggctgatgaaaaccagaagacagcaaatacaactgggaccaaaacaaacacatatcagaatgtctggtattcacatgtttcctctgtatctcagggtgaatcacatgtagtactattctagggacttccaaaatagcatggttaactgttacactgtggcatgggaatccaacctcttggcattaactggtatgagagggctatctacacgggtacatatttctgattaccctggtttcacagaaacctccagcagtcttggaacacatctacagatgactctagtacatggactggctttcaaatggtaaacagggtacctggtcgatcagctcatagtgggctgcctcatagaaccaatccttccaaacctggagaccatggctacatacgagcggcacggcgaacaaagagcgcgcataaaagctcacaacgacaccggatagcggacaaacacaacgagacagcatacaccccctaggaacacacaagaaacaaaagtcccaaaccaggaaacagggcacggcccgataagccatacgggtcatcactcaaccaggtaaaacgagcacacagcccggccataccgcagacattgaccacacgagagcacacaggggcagaacgcaccacacgggcggggacacaaacaattacaaaagcgcaccaggcacggcatttgaagacaccatcgcacagacgacaacccgccgcgaacacacaaccaacatactacccccaggccaca

SEQ ID NO: 482968 - DNA, 2058 bp, Homo sapiens
  misc_feature (603)..(603): n is a, c, g, or t
  misc_feature (618)..(618): n is a, c, g, or t
  misc_feature (676)..(676): n is a, c, g, or t
  misc_feature (685)..(685): n is a, c, g, or t
  misc_feature (1078)..(1078): n is a, c, g, or t
  misc_feature (1116)..(1116): n is a, c, g, or t
  misc_feature (1893)..(1893): n is a, c, g, or t
ttttttttttatagtgcatgcaggaaattgcaattttatttatgtttgtattgatacatatttgtacatatttatggggtgtggtagtttgatatatgcatacaatgtgtaatgatcaaatcagggtgtttaggatatctatcacctcaaacatttatcatttttgtgtttggaacatttctaatctcctagttattttgaaatatataacatattgttaactatagtcaccctactgtgctatcaaacacttgaacttattccttctatctacgtttgtacccattaaccaatctcttccctccctcccccaactccaccttcccagcctctggtacttatctctactccatgagatcaactttttaagctcccacatgagtgagaccatgggatatttgtctttctgtgccagacttatttcacttagaataatgacctccagttccgtaagatgggcagccaggaaaggccttacttagctgatgtttgaattgtgaagttatgtaatcattaagatgagtatacatacaatgggccagctgagtgcacagcaagattcaataaattcaaactaacattactcttattgccaagagagtncctgaaatgacagcncattggaaactggctactttccttccctttccttaggggtttaaggaaagcatgagtnatttcagtnttttgctggagctcctcactgacactcattgcagagcctgagccctcaactctcaatctttgcttaggtcctggcttaggctccactttgtaagaggcaccttcctagtattcactactctctctctcacaatcatgtccttacagacattgctgatcctctttcatactgacaccgggttctagtccgagttccatcactaagtcgctgtttgactttgggcaagttacttctgtggttaattatttttcatcaacaaaatcaaaaggtgaaactagacgaacaactaagaggctccagtattttttcaatctaagagtcccatatcccccactcccttctcacagctcattcaacaatcctaatggcagcgggtgcccgcagtctcaagtntctgccgaagcccaagccgctgtctcggtcagtcacanccgacgaagaggaggaattggaggaagccagcataaccacctcacactgagaacatctgacctttcccagaacgcccgcccactcgacacttcctgtccctccccagatcttgttccggggcacctactcgggtctaatcactcccctcattcactctttagggtccattgctgtttctttgaggaagcggagcatcttctgtcgttgattggtttccgtcattgttgataggttggtaacaaacaaggtgtgcctggtctcctggtaacgtcctgccgatagtcctgattggtcggtgtcttaatcccatcttccgtcccaactgctagtggctgagtccctggcggggcgcggcggtggaaggtgtcgcgtacgggcttcccgagctgacgtggcttgaattgggaggggggcagctggagcctcaggcggcagcgcttctaggtgagtaggggacgctacccaactcttccctctgcgagtccaataacggtcacccccgccagaggggccgcgggagctgcccaagcagctacaccggagtcccctcctcgccccagcctctcccggattcagtcctggatccggcccttcacccgcctccttcacctaccaggcctagttctagtagcccacaagcctcggcctctccggtgggccttcggggtcaccctgcgcagacttggaccacttgctcacggtctgtcccctccccggtacgtttctcctctgggagcgacggggaaaagcgcctaggtcagtcctgtccgcacgcnttgttcctggagcggcctgcctaagtcggcctccgtacgcagccgctgacgtcggaaagaacctgctgggcccctgtgctcaggccctaaacaaacttggtgtcccgaaggggaggcgcgaccaaaagaaatcaaaggtctttagggcggagatcacagaatcat

SEQ ID NO: 482969 - DNA, 443 bp, Homo sapiens
aaattgccactactgcttctgtcttcttctgacaaataaaattttgataatgcatgcaatttccttttgggttcaatggaaactagaaggaaatatggtaggcatttaggttaagcaagaaagggaggtcaaagaattaataatgctcattcttttgcttaaataattttttttccttctatgtcttcggtttgataagagttctacagagatggaagaatttgtaatgatgaagcaacagctccaggagaaggaagaattcattagcactttacaagcccagctcagccagacacaggcagagcaagctgcacaggtagggacctcacaaaattaggataaagagctatgaagtccagtgggttattacgcacaagtcaattcagtgagccgagatggcaccattgcactccagcctgggcaacaagagcaaaactccatct

SEQ ID NO: 482970 - DNA, 1558 bp, Homo sapiens
taaaaaactttggaaaataaaaagggaaatgttgcccttttttggggagtgtgtgtgaaaggtgtgtgtgtgtggggactttgtctctaatatttataggtttctcccaataggaaggtggtaaaactctttgtgttggttatttctctctacaatataaaaaacactatttggggattaattaaaagacgtgtaattagaggggatatttctctttatgagggcgttctataaataaattgtgtgtggtgtggtacacgagtatagagtgttgtgtgagggtgtgcgtttataacatatatatctcctatattcttatataaagagatgtagaaaatgtgttttgtgcggattttataaaatgtgtggggcgaaaatgtttagtcaacatatatagagtatttataaagactctatataaatatatatatgagaaaagagtcattaagtgtgtgaaaaaagagaggggggtataaaaaataacagattaataaaatgagtgtgagaggaggggtgtgagaaagagaatattatgggagagaaagatatataaaaagtgtgatgtttatttaaacacccacgcgatgcgagttgttctcgctggggatgcacaacaccgcggcgagcaatattacgagcaagaaccataatacatttatccacaaatatagaagctactcagaggagaaaatatatttcgacgcgagaatattttctgagcgaaacaacaagcaattattatttgaagggggggaattaatctctaatggggaacacgccaggagcgagcgagaaaataatacccccacaaatataaaaaaatctcttacaccaaactcctttgggccaaaacaacacaaaacatacatcaataaataaaacaaaaaaaacaaacaaacaaaaaaaaacaaaaactaacaagaaaacaacataaaacacaaaaaacaaccaaaacatacaccaatcgacaagagggggcgagtcgcaatcactcacataataacaatacctacactcagtcgaagaacgtaaaactaccagcaagacaatagagcagacaagacacgaaagtactccgagtcaagcagcgaggaagagagagtcacacagaaagagaagaaggagagaagaataaaaaaaacaaagggaagagaggatggcgagacacaattaacaacaaagcagcgagagagagagcagaaaaatctgtaaaaaactacaatgagttcatgatgaagacagagacagcaactatcggggaggaaggaataacaagaaagaagaaagaaagacagcacagggggcaggcagagctagcaggagaggaaataacaacacgtgagctgagattgaggagcgacacaccagcctgtctcggcgcggagagggaggacagcggagcgtgataagaaattaaaggggcaaagagagcaacgaaaggagggcggcaggcggcgggtgtgctgcaggcgcacggcgccgacgcgaccaccacttgtcactacccgcgacccgccggtagaccaaccgagcactaaccgcgcaactgcgtactgac

SEQ ID NO: 482971 - DNA, 10154 bp, Homo sapiens
  misc_feature (603)..(603): n is a, c, g, or t
  misc_feature (618)..(618): n is a, c, g, or t
  misc_feature (676)..(676): n is a, c, g, or t
  misc_feature (685)..(685): n is a, c, g, or t
  misc_feature (1078)..(1078): n is a, c, g, or t
  misc_feature (1116)..(1116): n is a, c, g, or t
ttttttttttatagtgcatgcaggaaattgcaattttatttatgtttgtattgatacatatttgtacatatttatggggtgtggtagtttgatatatgcatacaatgtgtaatgatcaaatcagggtgtttaggatatctatcacctcaaacatttatcatttttgtgtttggaacatttctaatctcctagttattttgaaatatataacatattgttaactatagtcaccctactgtgctatcaaacacttgaacttattccttctatctacgtttgtacccattaaccaatctcttccctccctcccccaactccaccttcccagcctctggtacttatctctactccatgagatcaactttttaagctcccacatgagtgagaccatgggatatttgtctttctgtgccagacttatttcacttagaataatgacctccagttccgtaagatgggcagccaggaaaggccttacttagctgatgtttgaattgtgaagttatgtaatcattaagatgagtatacatacaatgggccagctgagtgcacagcaagattcaataaattcaaactaacattactcttattgccaagagagtncctgaaatgacagcncattggaaactggctactttccttccctttccttaggggtttaaggaaagcatgagtnatttcagtnttttgctggagctcctcactgacactcattgcagagcctgagccctcaactctcaatctttgcttaggtcctggcttaggctccactttgtaagaggcaccttcctagtattcactactctctctctcacaatcatgtccttacagacattgctgatcctctttcatactgacaccgggttctagtccgagttccatcactaagtcgctgtttgactttgggcaagttacttctgtggttaattatttttcatcaacaaaatcaaaaggtgaaactagacgaacaactaagaggctccagtattttttcaatctaagagtcccatatcccccactcccttctcacagctcattcaacaatcctaatggcagcgggtgcccgcagtctcaagtntctgccgaagcccaagccgctgtctcggtcagtcacanccgacgaagaggaggaattggaggaagccagcataaccacctcacactgagaacatctgacctttcccagaacgcccgcccactcgacacttcctgtccctccccagatcttgttccggggcacctactcgggtctaatcactcccctcattcactctttagggtccattgctgtttctttgaggaagcggagcatcttctgtcgttgattggtttccgtcattgttgataggttggtaacaaacaaggtgtgcctggtctcctggtaacgtcctgccgatagtcctgattggtcggtgtcttaatcccatcttccgtcccaactgctagtggctgagtccctggcggggcgcggcggtggaaggtgtcgcgtacgggcttcccgagctgacgtggcttgaattgggaggggggcagctggagcctcaggcggcagcgcttctagaaatgctgagccgattatcaggattagcaaatgttgttttgcatgaattatcaggagatgatgacactgatcagaatatgagggctcccctagaccctgaattacaccaagaatctgacatggaatttaataatactacacaagaagatgttcaggagcgcctggcttatgcagagcaattggtggtggagctaaaagatattattagacagaaggatgttcaactgcagcagaaagatgaagctctacaggaagagagaaaagctgctgataacaaaattaaaaaactaaaacttcatgcgaaggccaaattaacttctttgaataaatacatagaagaaatgaaagaacaggcgagcactgaacatcaaagtagaacatctgaggaaatatctttaaatgatgctggagtagaattgaaatcaacaaagcaggatggtgataaatccctttctgctgtaccagatattggtcagtgtcatcaggatgagttggaaaggttaaaaagtcaaattttggagctcgagctaaactttcataaagcacaagaaatctatgagaaaaatttagatgagaaagctaaggaaattagcaacctaaaccagttgattgaggagtttaagaaaaatgctgacaacaacagcagtgcattcactgctttgtctgaagaaagagaccagcttctctctcaggtgaaggaacttagcatggtaacagaattgagggctcaggtaaagcaactggaaatgaaccttgcagaagcagaaaggcaaagaagacttgattatgaaagccaaactgcccatgacaacctgctcactgaacagatccatagtctcagcatagaagccaaatctaaagatgtgaaaattgaagttttacagaatgaactggatgatgtgcagcttcagttttctgagcagagtaccctgataagaagcctgcaaagccagctgcaaaataaggaaagtgaagtgcttgagggggcagaacgtgtaaggcatatctcaagtaaagtggaagaactgtcccaggctctttcacagaaggaacttgaaataacaaaaatggatcagctcttactagagaaaaagagagatgtggaaaccctccaacaaaccatcgaggagaaggatcaacaagtgacagaaatcagctttagtatgactgagaaaatggttcagcttaatgaagagaagttttctcttggggttgaaattaagactcttaaagaacagctaaatttattatccagagctgaggaagcaaaaaaagagcaggtggaagaagataatgaagtttcttctggccttaaacaaaattatgatgagatgagcccagcaggacaaataagtaaggaagaacttcagcatgaatttgaccttctgaagaaagaaaatgagcagagaaagagaaagctccaggcagctcttattaacagaaaggagcttctgcaaagagtcagtagattggaagaagaattagccaacttgaaagatgaatctaagaaagaaatcccactcagtgagactgagaggggagaagtggaagaagataaagaaaacaaagaatactcagaaaaatgtgtgacttctaagtgccaagaaatagaaatttatttaaaacagacaatatctgagaaagaagtggaactacagcatataaggaaggatttggaagaaaagctggcagctgaagagcaattccaggctctggtcaaacagatgaatcagaccttgcaagataaaacaaaccaaatagatttgctccaagcagaaatcagtgaaaaccaagcaattatccagaagttaatcacaagtaacacggatgcaagtgatggggactccgtagcacttgtaaaggaaacagtggtgataagtccaccttgtacaggtagtagtgaacactggaaaccagaactagaagaaaagatactggcccttgaaaaagaaaaggagcaacttcaaaagaagctacaggaagccttaacctcccgcaaggcaattcttaaaaaggcacaggagaaagaaagacatctcagggaggagctaaagcaacagaaagatgactataatcgcttgcaagaacagtttgatgagcaaagcaaggaaaatgagaatattggagaccagctaaggcaactccagattcaagtaagggaatccatagacggaaaactcccaagcacagaccagcaggaatcgtgttcttccactccaggtttagaagaacctttattcaaagccacagaacagcatcacactcaacctgttttagagtccaacttgtgcccagactggccttctcattctgaagatgcgagtgctctgcagggcggaacttctgttgcccagattaaggcccagctgaaggaaatagaggctgagaaagtagagttagaattgaaagttagttctacaacaagtgagcttactaaaaaatcagaagaggtatttcagttacaagagcagataaataaacagggtttagaaatcgagagtctaaagacagtatcccatgaagctgaagtccatgccgaaagcctgcagcagaaattggaaagcagccaactacaaattgctggcctagaacatctaagagaattgcaacctaaactggatgaactgcaaaaactcataagcaaaaaggaagaagacgttagctacctttctggacaacttagtgagaaagaagcagctctcactaaaatacagacagagataatagaacaagaagatttaattaaggctctgcatacacagctagaaatgcaagccaaagagcatgatgagaggataaagcagctacaggtggaactttgtgaaatgaagcaaaaaccagaagagattggagaagaaagtagagcaaagcaacaaatacaaaggaaactgcaagctgcccttatttcccgaaaagaagcactaaaagaaaacaaaagtctccaagaggaattgtctttggccagaggtaccattgaacgtctcaccaagtctctggcagatgtggaaagccaagtttctgctcaaaataaagaaaaagatacggtcttaggaaggttagctcttcttcaagaagaaagagacaaactcattacagaaatggacaggtctttattggaaaatcagagtctcagcagctcctgtgaaagtctaaaactagctctagagggtcttactgaagacaaggaaaagttagtgaaggaaattgaatctttgaaatcttctaagattgcagaaagtactgagtggcaagagaaacacaaggagctacaaaaagagtatgaaattcttctgcagtcctatgagaatgttagtaatgaagcagaaaggattcagcatgtggtggaagctgtgaggcaagagaaacaagaactgtatggcaagttaagaagcacagaggcaaacaagaaggagacagaaaagcagttgcaggaagctgagcaagaaatggaggaaatgaaagaaaagatgagaaagtttgctaaatctaaacagcagaaaatcctagagctggaagaagagaatgaccggcttagggcagaggtgcaccctgcaggagatacagctaaagagtgtatggaaacacttctttcttccaatgccagcatgaaggaagaacttgaaagggtcaaaatggagtatgaaaccctttctaagaagtttcagtctttaatgtctgagaaagactctctaagtgaagaggttcaagatttaaagcatcagatagaagataatgtatctaaacaagctaacctagaggccaccgagaaacatgataaccaaacgaatgtcactgaagagggaacacagtctataccaggtgagactgaagagcaagactctctgagtatgagcacaagacctacatgttcagaatcggttccatcagcgaagagtgccaaccctgctgtaagtaaggatttcagctcacatgatgaaattaataactacctacagcagattgatcagctcaaagaaagaattgctggattagaggaggagaagcagaaaaacaaggaatttagccagactttagaaaatgagaaaaataccttactgagtcagatatcaacaaaggatggtgaactaaaaatgcttcaggaggaagtaaccaaaatgaacctgttaaatcagcaaatccaagaagaactctccagagttaccaaactaaaggagacagcagaagaagagaaagatgatttggaagagaggcttatgaatcaattagcagaacttaatggaagcattgggaattactgtcaggatgttacagatgcccaaataaaaaatgagctattggaatctgaaatgaagaaccttaaaaagtgtgtgagtgaattggaagaagaaaagcagcagttagtcaaggaaaaaactaaggtggaatcagaaatacgaaaggaatatttggagaaaatacaaggtgctcagaaagaacccggaaataaaagccatgcaaaggaacttcaggaactgttaaaagaaaaacaacaagaagtaaagcagctacagaaggactgcatcaggtatcaagagaaaattagtgctctggagagaactgttaaagctctagaatttgttcaaactgaatctcaaaaagatttggaaataaccaaagaaaatctggctcaagcagttgaacaccgcaaaaaggcacaagcagaattagctagcttcaaagtcctgctagatgacactcaaagtgaagcagcaagggtcctagcagacaatctcaagttgaaaaaggaacttcagtcaaataaagaatcagttaaaagccagatgaaacaaaaggatgaagatcttgagcgaagactggaacaggcagaagagaagcacctgaaagagaagaagaatatgcaagagaaactggatgctttgcgcagagaaaaagtccacttggaagagacaattggagagattcaggttactttgaacaagaaagacaaggaagttcagcaacttcaggaaaacttggacagtactgtgacccagcttgcagcctttactaagagcatgtcttccctccaggatgatcgtgacagggtgatagatgaagctaagaaatgggagaggaagtttagtgatgcgattcaaagcaaagaagaagaaattagactcaaagaagataattgcagtgttctaaaggatcaacttagacagatgtccatccatatggaagaattaaagattaacatttccaggcttgaacatgacaagcagatttgggagtccaaggcccagacagaggtccagcttcagcagaaggtctgtgatactctacagggggaaaacaaagaacttttgtcccagctagaagagacacgccacctataccacagttctcagaatgaattagctaagttggaatcagaacttaagagtctcaaagaccagttgactgatttaagtaactctttagaaaaatgtaaggaacaaaaaggaaacttggaagggatcataaggcagcaagaggctgatattcaaaattctaagttcagttatgaacaactggagactgatcttcaggcctccagagaactgaccagtaggctgcatgaagaaataaatatgaaagagcaaaagattataagcctgctttctggcaaggaagaggcaatccaagtagctattgctgaactgcgtcagcaacatgataaagaaattaaagagctggaaaacctgctgtcccaggaggaagaggagaatattgttttagaagaggagaacaaaaaggctgttgataaaaccaatcagcttatggaaacactgaaaaccatcaaaaaggaaaacattcagcaaaaggcacagttggattcctttgttaaatccatgtcttctctccaaaatgatcgagaccgcatagtgggtgactatcaacagctggaagagcgacatctctctataatcttggaaaaagaccaactcatccaagaggctgctgcagagaataataagcttaaagaagaaatacgaggcttgagaagtcatatggatgatctcaattctgagaatgccaagctagatgcagaactgatccaatatagagaagacctgaaccaagtgataacaataaaggacagccaacaaaagcagcttcttgaagttcaacttcagcaaaataaggagctggaaaataaatatgctaaattagaagaaaagctgaaggaatctgaggaagcaaatgaggatctgcggaggtcctttaatgccctacaagaagagaaacaagatttatctaaagagattgagagtttgaaagtatctatatcccagctaacaagacaagtaacagccttgcaagaagaaggtactttaggactctatcatgcccagttaaaagtaaaagaagaagaggtacacaggttaagtgctttgttttcctcctctcaaaagagaattgcagaactggaagaagaattggtttgtgttcaaaaggaagctgccaagaaggtaggtgaaattgaagataaactgaagaaagaattaaagcatcttcatcatgatgcagggataatgagaaatgaaactgaaacagcagaagagagagtggcagagctagcaagagatttggtggagatggaacagaaattactcatggtcaccaaagaaaataaaggtctcacagcacaaattcagtcttttggaaggtctatgagttccttgcaaaatagtagagatcatgccaatgaggaacttgatgaactgaaaaggaaatatgatgccagtctgaaggaattggcacagttgaaagaacagggactcttaaacagagagagagatgctcttctttctgaaaccgccttttcaatgaactccactgaggagaatagcttgtctcaccttgagaaacttaaccaacagctcctatccaaagatgagcaattgcttcacttgtcctcacaactagaagattcttataaccaagtgcagtccttttccaaggctatggccagtctgcagaatgagagagatcacctgtggaatgagctggagaaatttcgaaagtcagaggaagggaagcagaggtctgcagctcagccttccaccagcccagctgaagtacagagtttaaaaaaagctatgtcttcactccaaaatgacagagacagactactgaaggaattgaagaatctgcagcagcaatacttacagattaatcaagagatcactgagttacatccactgaaggctcaacttcaggagtatcaagataagacaaaagcatttcagattatgcaagaagagctcaggcaggaaaacctctcctggcagcatgagctgcatcagctcaggatggagaagagttcctgggaaatacatgagaggagaatgaaggaacagtaccttatggctatctcagataaagatcagcagctcagtcatctgcagaatcttataagggaattgaggtcttcttcctcccagactcagcctctcaaagtgcaataccaaagacaggcatccccagagacatcagcttccccagatgggtcacaaaatctggtttatgagacagaacttctcaggacccagctcaatgacagcttaaaggaaattcaccaaaaggagttaagaattcagcaactgaacagcaacttctctcagctactggaagagaaaaacaccctttccattcagctctgcgataccagtcagagtcttcgtgagaaccagcagcactatggtgaccttttaaatcactgtgcagtcttggagaagcaggttcaagagctgcaggcggggccactaaatatagatgttgctccaggagctccccaggaaaagaatggagttcacagaaagagtgaccctgaggaactaagggaaccgcagcaaagcttttctgaagctcagcagcagctatgcaacaccagacaggaagtgaatgaattaaggaagctgctggaagaagaacgagaccaaagagtggctgctgagaatgctctctctgtggccgaggagcagatcagacggttagagcacagtgaatgggactcttcccggactcctatcattggctcctgtggcactcaggagcaggcactgttaatagatcttacaagcaacagttgtcgaaggacccggagtggcgttggatggaagcgagtcctgcgttcactctgtcattcacggacccgagtgccacttctagcagccatctactttctaatgattcatgtcctgctcattctgtgttttacgggccatctatagacttagttgttactctttggaccactcccctcaaaacttggaattctctcacctctaacatcagaacatcaattccagtggaacagtcttcccatttacaggtcttctctccaactcttcacggaaagtgcctgcaaaaacagaggtggatacgaggacaggttggagctgcagggactggcgagtctgctttcttctactgccctgagcctgaacgcttctgcttaatctgagaatcacatttggtttgttgagcctaatatttgttgagattttgcaggaccctgatcttttgtggtcctgtaaaagatactgaggaatgtctttcagccaagccaagaggatggtttcaataaacctaataatctgaagttcag

SEQ ID NO: 482972 - DNA, 437 bp, Homo sapiens
  misc_feature (425)..(425): n is a, c, g, or t
tccactccgatcagcacacatggttcgaactaaagcctgccgctcagggctaaattcctggggcaaactttttagggtttcctccaaacaatttggattttaaaccttcccccccccgcccttttgttcccccctggttaaccccaatttcaaaaaaaaaaccccccccccaaaaaaaaacttgcaaaattcccccccgggaaaaccacacaggggcccccaaaaaaaaaaaaaaaaccccctttttttttaaaagaaaaaagaaaaaaaaaaccgtggggaaaaatttcccctttttttaaaaacaaaaaacaaccctttggtgggggttttttttttttttaaaaccccggtggaaaaaaatccgggttttaaagaggggcccccccctcacccacccgccaaggggggggggtcaattttcncggggggggggg

SEQ ID NO: 482973 - DNA, 10266 bp, Homo sapiens
ctcggtacccggtgtttatcgatgccacgtcgcgtacgggcttcccgagctgacgtggcttgaattgggaggggggcagctggagcctcaggcggcagcgcttctagaaatgctgagccgattatcaggattagcaaatgttgttttgcatgaattatcaggagatgatgacactgatcagaatatgagggctcccctagaccctgaattacaccaagaatctgacatggaatttaataatactacacaagaagatgttcaggagcgcctggcttatgcagagcaattggtggtggagctaaaagatattattagacagaaggatgttcaactgcagcagaaagatgaagctctacaggaagagagaaaagctgctgataacaaaattaaaaaactaaaacttcatgcgaaggccaaattaacttctttgaataaatacatagaagaaatgaaagcacaaggagggactgttctgcctacagaacctcagtcagaggagcaactttccaagcatgacaagagttctacagaggaagagatggaaatagaaaagataaaacataagctccaggagaaggaggaactaatcagcactttgcaagcccagcttactcaggcacaggcagaacaacctgcacagagttctacagagatggaagaatttgtaatgatgaagcaacagctccaggagaaggaagaattcattagcactttacaagcccagctcagccagacacaggcagagcaagctgcacagcaggtggtccgagagaaagatgcccgctttgaaacacaagttcgtcttcatgaagatgagcttcttcagttagtaacccaggcagatgtggaaacagagatgcaacagaaattgagggtgctgcaaaggaagcttgaggaacacgaagaatccttggtgggccgtgctcaggtcgttgacttgctgcaacaggagctgactgctgctgagcagagaaaccagattctctctcagcagttacagcagatggaagctgagcataatactttgaggaacactgtggaaacagaaagagaggagtccaagattctactggaaaagatggaacttgaagtggcagagagaaaattatccttccataatctgcaggaagaaatgcatcatcttttagaacagtttgagcaagcaggccaagcccaggctgaactagagtctcggtatagtgctttggagcagaagcacaaagcagaaatggaagagaagacctctcatattttgagtcttcaaaagactggacaagagctgcagtctgcctgtgatgctctaaaggatcaaaattcaaagcttctccaagataagaatgaacaggcagttcagtcagcccagaccattcagcaactggaagatcagctccagcaaaaatccaaagaaattagccaatttctaaatagactgcccttgcaacaacatgaaacagcatctcagacttctttcccagatgtttataatgagggcacacaggcagtcactgaggagaatattgcttctttgcagaagagagtggtagaactagagaatgaaaagggagccttgctccttagttctatagagctggaggagctgaaagctgagaatgaaaaactgtcttctcagattactctcctagaggctcagaatagaactggggaggcagacagagaagtcagtgagatcagcattgttgatattgccaacaagaggagctcttctgctgaggaaagtggacaagatgttctagaaaacacattttctcagaaacataaagaattatcagttttattgttggaaatgaaagaagctcaagaggaaattgcatttcttaaattacagctccagggaaaaagggctgaggaagcagatcatgaggtccttgaccagaaagaaatgaaacagatggagggtgagggaatagctccaattaaaatgaaagtatttcttgaagatacagggcaagattttcccttaatgccaaatgaagagagcagtcttccagcagttgaaaaagaacaggcgagcactgaacatcaaagtagaacatctgaggaaatatctttaaatgatgctggagtagaattgaaatcaacaaagcaggatggtgataaatccctttctgctgtaccagatattggtcagtgtcatcaggatgagttggaaaggttaaaaagtcaaattttggagctcgagctaaactttcataaagcacaagaaatctatgagaaaaatttagatgagaaagctaaggaaattagcaacctaaaccagttgattgaggagtttaagaaaaatgctgacaacaacagcagtgcattcactgctttgtctgaagaaagagaccagcttctctctcaggtgaaggaacttagcatggtaacagaattgagggctcaggtaaagcaactggaaatgaaccttgcagaagcagaaaggcaaagaagacttgattatgaaagccaaactgcccatgacaacctgctcactgaacagatccatagtctcagcatagaagccaaatctaaagatgtgaaaattgaagttttacagaatgaactggatgatgtgcagcttcagttttctgagcagagtaccctgataagaagcctgcaaagccagctgcaaaataaggaaagtgaagtgcttgagggggcagaacgtgtaaggcatatctcaagtaaagtggaagaactgtcccaggctctttcacagaaggaacttgaaataacaaaaatggatcagctcttactagagaaaaagagagatgtggaaaccctccaacaaaccatcgaggagaaggatcaacaagtgacagaaatcagctttagtatgactgagaaaatggttcagcttaatgaagagaagttttctcttggggttgaaattaagactcttaaagaacagctaaatttattatccagagctgaggaagcaaaaaaagagcaggtggaagaagataatgaagtttcttctggccttaaacaaaattatgatgagatgagcccagcaggacaaataagtaaggaagaacttcagcatgaatttgaccttctgaagaaagaaaatgagcagagaaagagaaagctccaggcagctcttattaacagaaaggagcttctgcaaagagtcagtagattggaagaagaattagccaacttgaaagatgaatctaagaaagaaatcccactcagtgagactgagaggggagaagtggaagaagataaagaaaacaaagaatactcagaaaaatgtgtgacttctaagtgccaagaaatagaaatttatttaaaacagacaatatctgagaaagaagtggaactacagcatataaggaaggatttggaagaaaagctggcagctgaagagcaattccaggctctggtcaaacagatgaatcagaccttgcaagataaaacaaaccaaatagatttgctccaagcagaaatcagtgaaaaccaagcaattatccagaagttaatcacaagtaacacggatgcaagtgatggggactccgtagcacttgtaaaggaaacagtggtgataagtccaccttgtacaggtagtagtgaacactggaaaccagaactagaagaaaagatactggcccttgaaaaagaaaaggagcaacttcaaaagaagctacaggaagccttaacctcccgcaaggcaattcttaaaaaggcacaggagaaagaaagacatctcagggaggagctaaagcaacagaaagatgactataatcgcttgcaagaacagtttgatgagcaaagcaaggaaaatgagaatattggagaccagctaaggcaactccagattcaagtaagggaatccatagacggaaaactcccaagcacagaccagcaggaatcgtgttcttccactccaggtttagaagaacctttattcaaagccacagaacagcatcacactcaacctgttttagagtccaacttgtgcccagactggccttctcattctgaagatgcgagtgctctgcagggcggaacttctgttgcccagattaaggcccagctgaaggaaatagaggctgagaaagtagagttagaattgaaagttagttctacaacaagtgagcttactaaaaaatcagaagaggtatttcagttacaagagcagataaataaacagggtttagaaatcgagagtctaaagacagtatcccatgaagctgaagtccatgccgaaagcctgcagcagaaattggaaagcagccaactacaaattgctggcctagaacatctaagagaattgcaacctaaactggatgaactgcaaaaactcataagcaaaaaggaagaagacgttagctacctttctggacaacttagtgagaaagaagcagctctcactaaaatacagacagagataatagaacaagaagatttaattaaggctctgcatacacagctagaaatgcaagccaaagagcatgatgagaggataaagcagctacaggtggaactttgtgaaatgaagcaaaaaccagaagagattggagaagaaagtagagcaaagcaacaaatacaaaggaaactgcaagctgcccttatttcccgaaaagaagcactaaaagaaaacaaaagtctccaagaggaattgtctttggccagaggtaccattgaacgtctcaccaagtctctggcagatgtggaaagccaagtttctgctcaaaataaagaaaaagatacggtcttaggaaggttagctcttcttcaagaagaaagagacaaactcattacagaaatggacaggtctttattggaaaatcagagtctcagcagctcctgtgaaagtctaaaactagctctagagggtcttactgaagacaaggaaaagttagtgaaggaaattgaatctttgaaatcttctaagattgcagaaagtactgagtggcaagagaaacacaaggagctacaaaaagagtatgaaattcttctgcagtcctatgagaatgttagtaatgaagcagaaaggattcagcatgtggtggaagctgtgaggcaagagaaacaagaactgtatggcaagttaagaagcacagaggcaaacaagaaggagacagaaaagcagttgcaggaagctgagcaagaaatggaggaaatgaaagaaaagatgagaaagtttgctaaatctaaacagcagaaaatcctagagctggaagaagagaatgaccggcttagggcagaggtgcaccctgcaggagatacagctaaagagtgtatggaaacacttctttcttccaatgccagcatgaaggaagaacttgaaagggtcaaaatggagtatgaaaccctttctaagaagtttcagtctttaatgtctgagaaagactctctaagtgaagaggttcaagatttaaagcatcagatagaagataatgtatctaaacaagctaacctagaggccaccgagaaacatgataaccaaacgaatgtcactgaagagggaacacagtctataccaggtgagactgaagagcaagactctctgagtatgagcacaagacctacatgttcagaatcggttccatcagcgaagagtgccaaccctgctgtaagtaaggatttcagctcacatgatgaaattaataactacctacagcagattgatcagctcaaagaaagaattgctggattagaggaggagaagcagaaaaacaaggaatttagccagactttagaaaatgagaaaaataccttactgagtcagatatcaacaaaggatggtgaactaaaaatgcttcaggaggaagtaaccaaaatgaacctgttaaatcagcaaatccaagaagaactctccagagttaccaaactaaaggagacagcagaagaagagaaagatgatttggaagagaggcttatgaatcaattagcagaacttaatggaagcattgggaattactgtcaggatgttacagatgcccaaataaaaaatgagctattggaatctgaaatgaagaaccttaaaaagtgtgtgagtgaattggaagaagaaaagcagcagttagtcaaggaaaaaactaaggtggaatcagaaatacgaaaggaatatttggagaaaatacaaggtgctcagaaagaacccggaaataaaagccatgcaaaggaacttcaggaactgttaaaagaaaaacaacaagaagtaaagcagctacagaaggactgcatcaggtatcaagagaaaattagtgctctggagagaactgttaaagctctagaatttgttcaaactgaatctcaaaaagatttggaaataaccaaagaaaatctggctcaagcagttgaacaccgcaaaaaggcacaagcagaattagctagcttcaaagtcctgctagatgacactcaaagtgaagcagcaagggtcctagcagacaatctcaagttgaaaaaggaacttcagtcaaataaagaatcagttaaaagccagatgaaacaaaaggatgaagatcttgagcgaagactggaacaggcagaagagaagcacctgaaagagaagaagaatatgcaagagaaactggatgctttgcgcagagaaaaagtccacttggaagagacaattggagagattcaggttactttgaacaagaaagacaaggaagttcagcaacttcaggaaaacttggacagtactgtgacccagcttgcagcctttactaagagcatgtcttccctccaggatgatcgtgacagggtgatagatgaagctaagaaatgggagaggaagtttagtgatgcgattcaaagcaaagaagaagaaattagactcaaagaagataattgcagtgttctaaaggatcaacttagacagatgtccatccatatggaagaattaaagattaacatttccaggcttgaacatgacaagcagatttgggagtccaaggcccagacagaggtccagcttcagcagaaggtctgtgatactctacagggggaaaacaaagaacttttgtcccagctagaagagacacgccacctataccacagttctcagaatgaattagctaagttggaatcagaacttaagagtctcaaagaccagttgactgatttaagtaactctttagaaaaatgtaaggaacaaaaaggaaacttggaagggatcataaggcagcaagaggctgatattcaaaattctaagttcagttatgaacaactggagactgatcttcaggcctccagagaactgaccagtaggctgcatgaagaaataaatatgaaagagcaaaagattataagcctgctttctggcaaggaagaggcaatccaagtagctattgctgaactgcgtcagcaacatgataaagaaattaaagagctggaaaacctgctgtcccaggaggaagaggagaatattgttttagaagaggagaacaaaaaggctgttgataaaaccaatcagcttatggaaacactgaaaaccatcaaaaaggaaaacattcagcaaaaggcacagttggattcctttgttaaatccatgtcttctctccaaaatgatcgagaccgcatagtgggtgactatcaacagctggaagagcgacatctctctataatcttggaaaaagaccaactcatccaagaggctgctgcagagaataataagcttaaagaagaaatacgaggcttgagaagtcatatggatgatctcaattctgagaatgccaagctagatgcagaactgatccaatatagagaagacctgaaccaagtgataacaataaaggacagccaacaaaagcagcttcttgaagttcaacttcagcaaaataaggagctggaaaataaatatgctaaattagaagaaaagctgaaggaatctgaggaagcaaatgaggatctgcggaggtcctttaatgccctacaagaagagaaacaagatttatctaaagagattgagagtttgaaagtatctatatcccagctaacaagacaagtaacagccttgcaagaagaaggtactttaggactctatcatgcccagttaaaagtaaaagaagaagaggtacacaggttaagtgctttgttttcctcctctcaaaagagaattgcagaactggaagaagaattggtttgtgttcaaaaggaagctgccaagaaggtaggtgaaattgaagataaactgaagaaagaattaaagcatcttcatcatgatgcagggataatgagaaatgaaactgaaacagcagaagagagagtggcagagctagcaagagatttggtggagatggaacagaaattactcatggtcaccaaagaaaataaaggtctcacagcacaaattcagtcttttggaaggtctatgagttccttgcaaaatagtagagatcatgccaatgaggaacttgatgaactgaaaaggaaatatgatgccagtctgaaggaattggcacagttgaaagaacagggactcttaaacagagagagagatgctcttctttctgaaaccgccttttcaatgaactccactgaggagaatagcttgtctcaccttgagaaacttaaccaacagctcctatccaaagatgagcaattgcttcacttgtcctcacaactagaagattcttataaccaagtgcagtccttttccaaggctatggccagtctgcagaatgagagagatcacctgtggaatgagctggagaaatttcgaaagtcagaggaagggaagcagaggtctgcagctcagccttccaccagcccagctgaagtacagagtttaaaaaaagctatgtcttcactccaaaatgacagagacagactactgaaggaattgaagaatctgcagcagcaatacttacagattaatcaagagatcactgagttacatccactgaaggctcaacttcaggagtatcaagataagacaaaagcatttcagattatgcaagaagagctcaggcaggaaaacctctcctggcagcatgagctgcatcagctcaggatggagaagagttcctgggaaatacatgagaggagaatgaaggaacagtaccttatggctatctcagataaagatcagcagctcagtcatctgcagaatcttataagggaattgaggtcttcttcctcccagactcagcctctcaaagtgcaataccaaagacaggcatccccagagacatcagcttccccagatgggtcacaaaatctggtttatgagacagaacttctcaggacccagctcaatgacagcttaaaggaaattcaccaaaaggagttaagaattcagcaactgaacagcaacttctctcagctactggaagagaaaaacaccctttccattcagctctgcgataccagtcagagtcttcgtgagaaccagcagcactatggtgaccttttaaatcactgtgcagtcttggagaagcaggttcaagagctgcaggcggggccactaaatatagatgttgctccaggagctccccaggaaaagaatggagttcacagaaagagtgaccctgaggaactaagggaaccgcagcaaagcttttctgaagctcagcagcagctatgcaacaccagacaggaagtgaatgaattaaggaagctgctggaagaagaacgagaccaaagagtggctgctgagaatgctctctctgtggccgaggagcagatcagacggttagagcacagtgaatgggactcttcccggactcctatcattggctcctgtggcactcaggagcaggcactgttaatagatcttacaagcaacagttgtcgaaggacccggagtggcgttggatggaagcgagtcctgcgttcactctgtcattcacggacccgagtgccacttctagcagccatctactttctaatgattcatgtcctgctcattctgtgttttacgggccatctatagacttagttgttactctttggaccactcccctcaaaacttggaattctctcacctctaacatcagaacatcaattccagtggaacagtcttcccatttacaggtcttctctccaactcttcacggaaagtgcctgcaaaaacagaggtggatacgaggacaggttggagctgcagggactggcgagtctgctttcttctactgccctgagcctgaacgcttctgcttaatctgagaatcacatttggtttgttgagcctaatatttgttgagattttgcaggaccctgatcttttgtggtcctgtaaaagatactgaggaatgtctttcagccaagccaagaggatggtttcaataaacctaataatctgaagttcag

SEQ ID NO: 482974 - DNA, 184 bp, Homo sapiens
acagtgcaggagaaaactcgagtagtctgctttgcggactctaacccaccggcagagtattcttggacaattaatgggaagtttcagctatcaggacaaaagctctttatcccccaagagttactacaaatcatagggggctctatgcttgctctgtgcgtaactcagccagtggcgaggctag

SEQ ID NO: 482975 - DNA, 350 bp, Homo sapiens
  misc_feature (350)..(350): n is a, c, g, or t
aataaggttgttggtaatgttttggacatcatcagttatgagtagggattgtggagtgaaaataattctgtcaagccactgataactaagagaaacatttaattgtttggtagttttattcctcaggatcatgattcttattttactcatacatgaagacatagtcagaagatatacatacactcattttatgattgattgtagatgcatttatatgtcttcaatcacgacaataatcatattttctcattatacctataatcaatagtctgatgacaatatgcttggtgacattagctttgctgtatcttttagcagatctctgagtttctttcagctagcttctaccn

SEQ ID NO: 482976 - DNA, 11915 bp, Homo sapiens
  misc_feature (603)..(603): n is a, c, g, or t
  misc_feature (618)..(618): n is a, c, g, or t
  misc_feature (676)..(676): n is a, c, g, or t
  misc_feature (685)..(685): n is a, c, g, or t
  misc_feature (1078)..(1078): n is a, c, g, or t
  misc_feature (1116)..(1116): n is a, c, g, or t
ttttttttttatagtgcatgcaggaaattgcaattttatttatgtttgtattgatacatatttgtacatatttatggggtgtggtagtttgatatatgcatacaatgtgtaatgatcaaatcagggtgtttaggatatctatcacctcaaacatttatcatttttgtgtttggaacatttctaatctcctagttattttgaaatatataacatattgttaactatagtcaccctactgtgctatcaaacacttgaacttattccttctatctacgtttgtacccattaaccaatctcttccctccctcccccaactccaccttcccagcctctggtacttatctctactccatgagatcaactttttaagctcccacatgagtgagaccatgggatatttgtctttctgtgccagacttatttcacttagaataatgacctccagttccgtaagatgggcagccaggaaaggccttacttagctgatgtttgaattgtgaagttatgtaatcattaagatgagtatacatacaatgggccagctgagtgcacagcaagattcaataaattcaaactaacattactcttattgccaagagagtncctgaaatgacagcncattggaaactggctactttccttccctttccttaggggtttaaggaaagcatgagtnatttcagtnttttgctggagctcctcactgacactcattgcagagcctgagccctcaactctcaatctttgcttaggtcctggcttaggctccactttgtaagaggcaccttcctagtattcactactctctctctcacaatcatgtccttacagacattgctgatcctctttcatactgacaccgggttctagtccgagttccatcactaagtcgctgtttgactttgggcaagttacttctgtggttaattatttttcatcaacaaaatcaaaaggtgaaactagacgaacaactaagaggctccagtattttttcaatctaagagtcccatatcccccactcccttctcacagctcattcaacaatcctaatggcagcgggtgcccgcagtctcaagtntctgccgaagcccaagccgctgtctcggtcagtcacanccgacgaagaggaggaattggaggaagccagcataaccacctcacactgagaacatctgacctttcccagaacgcccgcccactcgacacttcctgtccctccccagatcttgttccggggcacctactcgggtctaatcactcccctcattcactctttagggtccattgctgtttctttgaggaagcggagcatcttctgtcgttgattggtttccgtcattgttgataggttggtaacaaacaaggtgtgcctggtctcctggtaacgtcctgccgatagtcctgattggtcggtgtcttaatcccatcttccgtcccaactgctagtggctgagtccctggcggggcgcggcggtggaaggtgtcgcgtacgggcttcccgagctgacgtggcttgaattgggaggggggcagctggagcctcaggcggcagcgcttctagaaatgctgagccgattatcaggattagcaaatgttgttttgcatgaattatcaggagatgatgacactgatcagaatatgagggctcccctagaccctgaattacaccaagaatctgacatggaatttaataatactacacaagaagatgttcaggagcgcctggcttatgcagagcaattggtggtggagctaaaagatattattagacagaaggatgttcaactgcagcagaaagatgaagctctacaggaagagagaaaagctgctgataacaaaattaaaaaactaaaacttcatgcgaaggccaaattaacttctttgaataaatacatagaagaaatgaaagcacaaggagggactgttctgcctacagaacctcagtcagaggagcaactttccaagcatgacaagagttctacagaggaagagatggaaatagaaaagataaaacataagctccaggagaaggaggaactaatcagcactttgcaagcccagcttactcaggcacaggcagaacaacctgcacagagttctacagagatggaagaatttgtaatgatgaagcaacagctccaggagaaggaagaattcattagcactttacaagcccagctcagccagacacaggcagagcaagctgcacagcaggtggtccgagagaaagatgcccgctttgaaacacaagttcgtcttcatgaagatgagcttcttcagttagtaacccaggcagatgtggaaacagagatgcaacagaaattgagggtgctgcaaaggaagcttgaggaacacgaagaatccttggtgggccgtgctcaggtcgttgacttgctgcaacaggagctgactgctgctgagcagagaaaccagattctctctcagcagttacagcagatggaagctgagcataatactttgaggaacactgtggaaacagaaagagaggagtccaagattctactggaaaagatggaacttgaagtggcagagagaaaattatccttccataatctgcaggaagaaatgcatcatcttttagaacagtttgagcaagcaggccaagcccaggctgaactagagtctcggtatagtgctttggagcagaagcacaaagcagaaatggaagagaagacctctcatattttgagtcttcaaaagactggacaagagctgcagtctgcctgtgatgctctaaaggatcaaaattcaaagcttctccaagataagaatgaacaggcagttcagtcagcccagaccattcagcaactggaagatcagctccagcaaaaatccaaagaaattagccaatttctaaatagactgcccttgcaacaacatgaaacagcatctcagacttctttcccagatgtttataatgagggcacacaggcagtcactgaggagaatattgcttctttgcagaagagagtggtagaactagagaatgaaaagggagccttgctccttagttctatagagctggaggagctgaaagctgagaatgaaaaactgtcttctcagattactctcctagaggctcagaatagaactggggaggcagacagagaagtcagtgagatcagcattgttgatattgccaacaagaggagctcttctgctgaggaaagtggacaagatgttctagaaaacacattttctcagaaacataaagaattatcagttttattgttggaaatgaaagaagctcaagaggaaattgcatttcttaaattacagctccagggaaaaagggctgaggaagcagatcatgaggtccttgaccagaaagaaatgaaacagatggagggtgagggaatagctccaattaaaatgaaagtatttcttgaagatacagggcaagattttcccttaatgccaaatgaagagagcagtcttccagcagttgaaaaagaacaggcgagcactgaacatcaaagtagaacatctgaggaaatatctttaaatgatgctggagtagaattgaaatcaacaaagcaggatggtgataaatccctttctgctgtaccagatattggtcagtgtcatcaggatgagttggaaaggttaaaaagtcaaattttggagctcgagctaaactttcataaagcacaagaaatctatgagaaaaatttagatgagaaagctaaggaaattagcaacctaaaccagttgattgaggagtttaagaaaaatgctgacaacaacagcagtgcattcactgctttgtctgaagaaagagaccagcttctctctcaggtgaaggaacttagcatggtaacagaattgagggctcaggtaaagcaactggaaatgaaccttgcagaagcagaaaggcaaagaagacttgattatgaaagccaaactgcccatgacaacctgctcactgaacagatccatagtctcagcatagaagccaaatctaaagatgtgaaaattgaagttttacagaatgaactggatgatgtgcagcttcagttttctgagcagagtaccctgataagaagcctgcaaagccagctgcaaaataaggaaagtgaagtgcttgagggggcagaacgtgtaaggcatatctcaagtaaagtggaagaactgtcccaggctctttcacagaaggaacttgaaataacaaaaatggatcagctcttactagagaaaaagagagatgtggaaaccctccaacaaaccatcgaggagaaggatcaacaagtgacagaaatcagctttagtatgactgagaaaatggttcagcttaatgaagagaagttttctcttggggttgaaattaagactcttaaagaacagctaaatttattatccagagctgaggaagcaaaaaaagagcaggtggaagaagataatgaagtttcttctggccttaaacaaaattatgatgagatgagcccagcaggacaaataagtaaggaagaacttcagcatgaatttgaccttctgaagaaagaaaatgagcagagaaagagaaagctccaggcagctcttattaacagaaaggagcttctgcaaagagtcagtagattggaagaagaattagccaacttgaaagatgaatctaagaaagaaatcccactcagtgagactgagaggggagaagtggaagaagataaagaaaacaaagaatactcagaaaaatgtgtgacttctaagtgccaagaaatagaaatttatttaaaacagacaatatctgagaaagaagtggaactacagcatataaggaaggatttggaagaaaagctggcagctgaagagcaattccaggctctggtcaaacagatgaatcagaccttgcaagataaaacaaaccaaatagatttgctccaagcagaaatcagtgaaaaccaagcaattatccagaagttaatcacaagtaacacggatgcaagtgatggggactccgtagcacttgtaaaggaaacagtggtgataagtccaccttgtacaggtagtagtgaacactggaaaccagaactagaagaaaagatactggcccttgaaaaagaaaaggagcaacttcaaaagaagctacaggaagccttaacctcccgcaaggcaattcttaaaaaggcacaggagaaagaaagacatctcagggaggagctaaagcaacagaaagatgactataatcgcttgcaagaacagtttgatgagcaaagcaaggaaaatgagaatattggagaccagctaaggcaactccagattcaagtaagggaatccatagacggaaaactcccaagcacagaccagcaggaatcgtgttcttccactccaggtttagaagaacctttattcaaagccacagaacagcatcacactcaacctgttttagagtccaacttgtgcccagactggccttctcattctgaagatgcgagtgctctgcagggcggaacttctgttgcccagattaaggcccagctgaaggaaatagaggctgagaaagtagagttagaattgaaagttagttctacaacaagtgagcttactaaaaaatcagaagaggtatttcagttacaagagcagataaataaacagggtttagaaatcgagagtctaaagacagtatcccatgaagctgaagtccatgccgaaagcctgcagcagaaattggaaagcagccaactacaaattgctggcctagaacatctaagagaattgcaacctaaactggatgaactgcaaaaactcataagcaaaaaggaagaagacgttagctacctttctggacaacttagtgagaaagaagcagctctcactaaaatacagacagagataatagaacaagaagatttaattaaggctctgcatacacagctagaaatgcaagccaaagagcatgatgagaggataaagcagctacaggtggaactttgtgaaatgaagcaaaaaccagaagagattggagaagaaagtagagcaaagcaacaaatacaaaggaaactgcaagctgcccttatttcccgaaaagaagcactaaaagaaaacaaaagtctccaagaggaattgtctttggccagaggtaccattgaacgtctcaccaagtctctggcagatgtggaaagccaagtttctgctcaaaataaagaaaaagatacggtcttaggaaggttagctcttcttcaagaagaaagagacaaactcattacagaaatggacaggtctttattggaaaatcagagtctcagcagctcctgtgaaagtctaaaactagctctagagggtcttactgaagacaaggaaaagttagtgaaggaaattgaatctttgaaatcttctaagattgcagaaagtactgagtggcaagagaaacacaaggagctacaaaaagagtatgaaattcttctgcagtcctatgagaatgttagtaatgaagcagaaaggattcagcatgtggtggaagctgtgaggcaagagaaacaagaactgtatggcaagttaagaagcacagaggcaaacaagaaggagacagaaaagcagttgcaggaagctgagcaagaaatggaggaaatgaaagaaaagatgagaaagtttgctaaatctaaacagcagaaaatcctagagctggaagaagagaatgaccggcttagggcagaggtgcaccctgcaggagatacagctaaagagtgtatggaaacacttctttcttccaatgccagcatgaaggaagaacttgaaagggtcaaaatggagtatgaaaccctttctaagaagtttcagtctttaatgtctgagaaagactctctaagtgaagaggttcaagatttaaagcatcagatagaagataatgtatctaaacaagctaacctagaggccaccgagaaacatgataaccaaacgaatgtcactgaagagggaacacagtctataccaggtgagactgaagagcaagactctctgagtatgagcacaagacctacatgttcagaatcggttccatcagcgaagagtgccaaccctgctgtaagtaaggatttcagctcacatgatgaaattaataactacctacagcagattgatcagctcaaagaaagaattgctggattagaggaggagaagcagaaaaacaaggaatttagccagactttagaaaatgagaaaaataccttactgagtcagatatcaacaaaggatggtgaactaaaaatgcttcaggaggaagtaaccaaaatgaacctgttaaatcagcaaatccaagaagaactctccagagttaccaaactaaaggagacagcagaagaagagaaagatgatttggaagagaggcttatgaatcaattagcagaacttaatggaagcattgggaattactgtcaggatgttacagatgcccaaataaaaaatgagctattggaatctgaaatgaagaaccttaaaaagtgtgtgagtgaattggaagaagaaaagcagcagttagtcaaggaaaaaactaaggtggaatcagaaatacgaaaggaatatttggagaaaatacaaggtgctcagaaagaacccggaaataaaagccatgcaaaggaacttcaggaactgttaaaagaaaaacaacaagaagtaaagcagctacagaaggactgcatcaggtatcaagagaaaattagtgctctggagagaactgttaaagctctagaatttgttcaaactgaatctcaaaaagatttggaaataaccaaagaaaatctggctcaagcagttgaacaccgcaaaaaggcacaagcagaattagctagcttcaaagtcctgctagatgacactcaaagtgaagcagcaagggtcctagcagacaatctcaagttgaaaaaggaacttcagtcaaataaagaatcagttaaaagccagatgaaacaaaaggatgaagatcttgagcgaagactggaacaggcagaagagaagcacctgaaagagaagaagaatatgcaagagaaactggatgctttgcgcagagaaaaagtccacttggaagagacaattggagagattcaggttactttgaacaagaaagacaaggaagttcagcaacttcaggaaaacttggacagtactgtgacccagcttgcagcctttactaagagcatgtcttccctccaggatgatcgtgacagggtgatagatgaagctaagaaatgggagaggaagtttagtgatgcgattcaaagcaaagaagaagaaattagactcaaagaagataattgcagtgttctaaaggatcaacttagacagatgtccatccatatggaagaattaaagattaacatttccaggcttgaacatgacaagcagatttgggagtccaaggcccagacagaggtccagcttcagcagaaggtctgtgatactctacagggggaaaacaaagaacttttgtcccagctagaagagacacgccacctataccacagttctcagaatgaattagctaagttggaatcagaacttaagagtctcaaagaccagttgactgatttaagtaactctttagaaaaatgtaaggaacaaaaaggaaacttggaagggatcataaggcagcaagaggctgatattcaaaattctaagttcagttatgaacaactggagactgatcttcaggcctccagagaactgaccagtaggctgcatgaagaaataaatatgaaagagcaaaagattataagcctgctttctggcaaggaagaggcaatccaagtagctattgctgaactgcgtcagcaacatgataaagaaattaaagagctggaaaacctgctgtcccaggaggaagaggagaatattgttttagaagaggagaacaaaaaggctgttgataaaaccaatcagcttatggaaacactgaaaaccatcaaaaaggaaaacattcagcaaaaggcacagttggattcctttgttaaatccatgtcttctctccaaaatgatcgagaccgcatagtgggtgactatcaacagctggaagagcgacatctctctataatcttggaaaaagaccaactcatccaagaggctgctgcagagaataataagcttaaagaagaaatacgaggcttgagaagtcatatggatgatctcaattctgagaatgccaagctagatgcagaactgatccaatatagagaagacctgaaccaagtgataacaataaaggacagccaacaaaagcagcttcttgaagttcaacttcagcaaaataaggagctggaaaataaatatgctaaattagaagaaaagctgaaggaatctgaggaagcaaatgaggatctgcggaggtcctttaatgccctacaagaagagaaacaagatttatctaaagagattgagagtttgaaagtatctatatcccagctaacaagacaagtaacagccttgcaagaagaaggtactttaggactctatcatgcccagttaaaagtaaaagaagaagaggtacacaggttaagtgctttgttttcctcctctcaaaagagaattgcagaactggaagaagaattggtttgtgttcaaaaggaagctgccaagaaggtaggtgaaattgaagataaactgaagaaagaattaaagcatcttcatcatgatgcagggataatgagaaatgaaactgaaacagcagaagagagagtggcagagctagcaagagatttggtggagatggaacagaaattactcatggtcaccaaagaaaataaaggtctcacagcacaaattcagtcttttggaaggtctatgagttccttgcaaaatagtagagatcatgccaatgaggaacttgatgaactgaaaaggaaatatgatgccagtctgaaggaattggcacagttgaaagaacagggactcttaaacagagagagagatgctcttctttctgaaaccgccttttcaatgaactccactgaggagaatagcttgtctcaccttgagaaacttaaccaacagctcctatccaaagatgagcaattgcttcacttgtcctcacaactagaagattcttataaccaagtgcagtccttttccaaggctatggccagtctgcagaatgagagagatcacctgtggaatgagctggagaaatttcgaaagtcagaggaagggaagcagaggtctgcagctcagccttccaccagcccagctgaagtacagagtttaaaaaaagctatgtcttcactccaaaatgacagagacagactactgaaggaattgaagaatctgcagcagcaatacttacagattaatcaagagatcactgagttacatccactgaaggctcaacttcaggagtatcaagataagacaaaagcatttcagattatgcaagaagagctcaggcaggaaaacctctcctggcagcatgagctgcatcagctcaggatggagaagagttcctgggaaatacatgagaggagaatgaaggaacagtaccttatggctatctcagataaagatcagcagctcagtcatctgcagaatcttataagggaattgaggtcttcttcctcccagactcagcctctcaaagtgcaataccaaagacaggcatccccagagacatcagcttccccagatgggtcacaaaatctggtttatgagacagaacttctcaggacccagctcaatgacagcttaaaggaaattcaccaaaaggagttaagaattcagcaactgaacagcaacttctctcagctactggaagagaaaaacaccctttccattcagctctgcgataccagtcagagtcttcgtgagaaccagcagcactatggtgaccttttaaatcactgtgcagtcttggagaagcaggttcaagagctgcaggcgtggagacagggtttcaccatcttggccaggctggtcttgaactcctgatcttgtgatccacccacctcggcctcccaaagtgctgggattacaggcttgagccacggcgcccggcccagacttaacttttaagaggagaaattcaagaatgagaatctgggagaaaaatctaatcaagacaagagttttatgtaggggccactaaatatagatgttgctccaggagctccccaggaaaagaatggagttcacagaaagagtgaccctgaggaactaagggaaccgcagcaaagcttttctgaagctcagcagcagctatgcaacaccagacaggaagtgaatgaattaaggaagctgctggaagaagaacgagaccaaagagtggctgctgagaatgctctctctgtggccgaggagcagatcagacggttagagcacagtgaatgggactcttcccggactcctatcattggctcctgtggcactcaggagcaggcactgttaatagatcttacaagcaacagttgtcgaaggacccggagtggcgttggatggaagcgagtcctgcgttcactctgtcattcacggacccgagtgccacttctagcagccatctactttctaatgattcatgtcctgctcattctgtgttttacgggccatctatagacttagttgttactctttggaccactcccctcaaaacttggaattctctcacctctaacatcagaacatcaattccagtggaacagtcttcccatttacaggtcttctctccaactcttcacggaaagtgcctgcaaaaacagaggtggatacgaggacaggttggagctgcagggactggcgagtctgctttcttctactgccctgagcctgaacgcttctgcttaatctgagaatcacatttggtttgttgagcctaatatttgttgagattttgcaggaccctgatcttttgtggtcctgtaaaagatactgaggaatgtctttcagccaagccaagaggatggtttcaataaacctaataatctgaagttcag

SEQ ID NO: 482977 - DNA, 145 bp, Homo sapiens
tcacatttgcggcgggctttgtatgattatgggcgttgattagtattattatactggttgaacattgttacgttggtgtatattttgtaatttgaaattgctcgggggaataggttatgtgattaggagtacggtcttggtgatg

SEQ ID NO: 482978 - DNA, 579 bp, Homo sapiens
  misc_feature (45)..(45): n is a, c, g, or t
  misc_feature (50)..(50): n is a, c, g, or t
  misc_feature (69)..(69): n is a, c, g, or t
  misc_feature (86)..(87): n is a, c, g, or t
  misc_feature (89)..(89): n is a, c, g, or t
  misc_feature (97)..(97): n is a, c, g, or t
  misc_feature (103)..(103): n is a, c, g, or t
  misc_feature (114)..(114): n is a, c, g, or t
  misc_feature (131)..(131): n is a, c, g, or t
  misc_feature (135)..(135): n is a, c, g, or t
  misc_feature (142)..(143): n is a, c, g, or t
  misc_feature (145)..(145): n is a, c, g, or t
  misc_feature (154)..(154): n is a, c, g, or t
  misc_feature (158)..(158): n is a, c, g, or t
  misc_feature (162)..(162): n is a, c, g, or t
  misc_feature (179)..(179): n is a, c, g, or t
  misc_feature (186)..(186): n is a, c, g, or t
  misc_feature (190)..(190): n is a, c, g, or t
  misc_feature (201)..(201): n is a, c, g, or t
  misc_feature (204)..(204): n is a, c, g, or t
  misc_feature (213)..(213): n is a, c, g, or t
  misc_feature (225)..(225): n is a, c, g, or t
  misc_feature (236)..(236): n is a, c, g, or t
  misc_feature (238)..(238): n is a, c, g, or t
  misc_feature (247)..(247): n is a, c, g, or t
  misc_feature (270)..(270): n is a, c, g, or t
  misc_feature (280)..(280): n is a, c, g, or t
  misc_feature (283)..(283): n is a, c, g, or t
  misc_feature (297)..(297): n is a, c, g, or t
  misc_feature (301)..(301): n is a, c, g, or t
  misc_feature (311)..(311): n is a, c, g, or t
  misc_feature (329)..(329): n is a, c, g, or t
  misc_feature (339)..(339): n is a, c, g, or t
  misc_feature (348)..(348): n is a, c, g, or t
  misc_feature (378)..(378): n is a, c, g, or t
  misc_feature (401)..(401): n is a, c, g, or t
  misc_feature (407)..(407): n is a, c, g, or t
  misc_feature (412)..(412): n is a, c, g, or t
  misc_feature (422)..(422): n is a, c, g, or t
  misc_feature (429)..(429): n is a, c, g, or t
  misc_feature (434)..(434): n is a, c, g, or t
  misc_feature (451)..(452): n is a, c, g, or t
  misc_feature (459)..(459): n is a, c, g, or t
  misc_feature (467)..(467): n is a, c, g, or t
  misc_feature (476)..(476): n is a, c, g, or t
  misc_feature (484)..(484): n is a, c, g, or t
  misc_feature (523)..(523): n is a, c, g, or t
taggccaactgaaaagtaatactaatattaatcaaccaaaaatangaganaaaaggaaaaaaatgaaanaaacaaacgaaaaaaannanaacataanacaaanagtaaaaaaanttaaacaacagtacggnctgnataaaannangaaaaaaanctanaacntttcttattttggggcnttgaatnaaanaaaaaaacaanaantacaggganttgttcacaaancatgtaggccnanaaaaaggcnccctgaaacccccaacggcaacnggggaacggnaanacaagattgcccanaacnggtatttccnttgcagaggccaacagcnttgaacaaangattcgccnacaacttttttctatatttttttcttttcncttttttcttttttttattttcntttaangcaanaaacaaccgnggccagngaaangaaacaaaaccggcagnntgtccanttgaaaancagacccanttacttcntaatttccacacaaattcccccaaaaaccctaaacatcntggcatccttcatgccttacagccacccagatgcaaaaaaggcattgtacaggaat

SEQ ID NO: 482979 - DNA, 11720 bp, Homo sapiens; identical to SEQ ID NO: 482965
  misc_feature (603)..(603): n is a, c, g, or t
  misc_feature (618)..(618): n is a, c, g, or t
  misc_feature (676)..(676): n is a, c, g, or t
  misc_feature (685)..(685): n is a, c, g, or t
  misc_feature (1078)..(1078): n is a, c, g, or t
  misc_feature (1116)..(1116): n is a, c, g, or t

SEQ ID NO: 482980 - DNA, 928 bp, Homo sapiens
atcctgataggcatccagcagtcattccggccaagattccttgagtgtgggtgaagaattacgacaatgaaaggtttcaagctgtctgccacggaagtccacatctgactggctcaacgccgtgtatgtccctgtccgactcccagtggacatggtggcgtgctccactgaaggacagaatcccagcctctcttgcatcagaaaattggattagtagatggatagcaattgtactctagtggatataaccttacgctcaaacaacgagaactactaaagttctgtcgcatgataattatgtgattcggaggacagctgttgtatagtggtacatcccatctcgcatcacataaattttcaggtgacctataatctttttgcatgaagtctgttgcagacatctcgtcaatggctggacttcctaagtagttcttttccacgtacaggctagtacagatgcttggtaaaagctgccatagtacatgcagacacccctaggctccattattcaatcataccgtgagccactatgttatctaaaggatctgattcatcgatattctcagagatgagtatggataactagaactctcatttcccgttgactcttgttatgccttaggtagtctctgtgtcttttgcactggacatttgtcttgtcacttctctcgaacaacttagagtccttcctaaagtgactctttcatgagaatttcatccagtttagtaatactgaattcttgggtggactagtgacttgcctagtgtgctgatgtgtagcgtattagcgtttcaaatggtgctgatagggggtgatccaagtaggaaagtggggttctatttctggaggcttgggtatacttaagaaaatgtaatataaaaccctgtttggaactcggaactttaagggggaaatttaaaacttgaa

SEQ ID NO: 482981 - DNA, 217 bp, Homo sapiens
tcctagtctgttggaggcgagacagaaggattgctttgagcccaggagtttgagaccagcctgggcaacatggaaaaacaccatctctacaaaaaatacaaaaattagccgagctggtggcacacacctgtagtcccagcaccttgggagggtgaggcaggcaggatctcttggaacccggtgaggtggaacgccgcagctgggcaactgatcactg

SEQ ID NO: 482982 - DNA, 11661 bp, Homo sapiens
  misc_feature (603)..(603): n is a, c, g, or t
  misc_feature (618)..(618): n is a, c, g, or t
  misc_feature (676)..(676): n is a, c, g, or t
  misc_feature (685)..(685): n is a, c, g, or t
  misc_feature (1078)..(1078): n is a, c, g, or t
  misc_feature (1116)..(1116): n is a, c, g, or t
ttttttttttatagtgcatgcaggaaattgcaattttatttatgtttgtattgatacatatttgtacatatttatggggtgtggtagtttgatatatgcatacaatgtgtaatgatcaaatcagggtgtttaggatatctatcacctcaaacatttatcatttttgtgtttggaacatttctaatctcctagttattttgaaatatataacatattgttaactatagtcaccctactgtgctatcaaacacttgaacttattccttctatctacgtttgtacccattaaccaatctcttccctccctcccccaactccaccttcccagcctctggtacttatctctactccatgagatcaactttttaagctcccacatgagtgagaccatgggatatttgtctttctgtgccagacttatttcacttagaataatgacctccagttccgtaagatgggcagccaggaaaggccttacttagctgatgtttgaattgtgaagttatgtaatcattaagatgagtatacatacaatgggccagctgagtgcacagcaagattcaataaattcaaactaacattactcttattgccaagagagtncctgaaatgacagcncattggaaactggctactttccttccctttccttaggggtttaaggaaagcatgagtnatttcagtnttttgctggagctcctcactgacactcattgcagagcctgagccctcaactctcaatctttgcttaggtcctggcttaggctccactttgtaagaggcaccttcctagtattcactactctctctctcacaatcatgtccttacagacattgctgatcctctttcatactgacaccgggttctagtccgagttccatcactaagtcgctgtttgactttgggcaagttacttctgtggttaattatttttcatcaacaaaatcaaaaggtgaaactagacgaacaactaagaggctccagtattttttcaatctaagagtcccatatcccccactcccttctcacagctcattcaacaatcctaatggcagcgggtgcccgcagtctcaagtntctgccgaagcccaagccgctgtctcggtcagtcacanccgacgaagaggaggaattggaggaagccagcataaccacctcacactgagaacatctgacctttcccagaacgcccgcccactcgacacttcctgtccctccccagatcttgttccggggcacctactcgggtctaatcactcccctcattcactctttagggtccattgctgtttctttgaggaagcggagcatcttctgtcgttgattggtttccgtcattgttgataggttggtaacaaacaaggtgtgcctggtctcctggtaacgtcctgccgatagtcctgattggtcggtgtcttaatcccatcttccgtcccaactgctagtggctgagtccctggcggggcgcggcggtggaaggtgtcgcgtacgggcttcccgagctgacgtggcttgaattgggaggggggcagctggagcctcaggcggcagcgcttctagaaatgctgagccgattatcaggattagcaaatgttgttttgcatgaattatcaggagatgatgacactgatcagaatatgagggctcccctagaccctgaattacaccaagaatctgacatggaatttaataatactacacaagaagatgttcaggagcgcctggcttatgcagagcaattggtggtggagctaaaagatattattagacagaaggatgttcaactgcagcagaaagatgaagctctacaggaagagagaaaagctgctgataacaaaattaaaaaactaaaacttcatgcgaaggccaaattaacttctttgaataaatacatagaagaaatgaaagcacaaggagggactgttctgcctacagaacctcagtcagaggagcaactttccaagcatgacaagagttctacagaggaagagatggaaatagaaaagataaaacataagctccaggagaaggaggaactaatcagcactttgcaagcccagcttactcaggcacaggcagaacaacctgcacagagttctacagagatggaagaatttgtaatgatgaagcaacagctccaggagaaggaagaattcattagcactttacaagcccagctcagccagacacaggcagagcaagctgcacagcaggtggtccgagagaaagatgcccgctttgaaacacaagttcgtcttcatgaagatgagcttcttcagttagtaacccaggcagatgtggaaacagagatgcaacagaaattgagggtgctgcaaaggaagcttgaggaacacgaagaatccttggtgggccgtgctcaggtcgttgacttgctgcaacaggagctgactgctgctgagcagagaaaccagattctctctcagcagttacagcagatggaagctgagcataatactttgaggaacactgtggaaacagaaagagaggagtccaagattctactggaaaagatggaacttgaagtggcagagagaaaattatccttccataatctgcaggaagaaatgcatcatcttttagaacagtttgagcaagcaggccaagcccaggctgaactagagtctcggtatagtgctttggagcagaagcacaaagcagaaatggaagagaagacctctcatattttgagtcttcaaaagactggacaagagctgcagtctgcctgtgatgctctaaaggatcaaaattcaaagcttctccaagataagaatgaacaggcagttcagtcagcccagaccattcagcaactggaagatcagctccagcaaaaatccaaagaaattagccaatttctaaatagactgcccttgcaacaacatgaaacagcatctcagacttctttcccagatgtttataatgagggcacacaggcagtcactgaggagaatattgcttctttgcagaagagagtggtagaactagagaatgaaaagggagccttgctccttagttctatagagctggaggagctgaaagctgagaatgaaaaactgtcttctcagattactctcctagaggctcagaatagaactggggaggcagacagagaagtcagtgagatcagcattgttgatattgccaacaagaggagctcttctgctgaggaaagtggacaagatgttctagaaaacacattttctcagaaacataaagaattatcagttttattgttggaaatgaaagaagctcaagaggaaattgcatttcttaaattacagctccagggaaaaagggctgaggaagcagatcatgaggtccttgaccagaaagaaatgaaacagatggagggtgagggaatagctccaattaaaatgaaagtatttcttgaagatacagggcaagattttcccttaatgccaaatgaagagagcagtcttccagcagttgaaaaagaacaggcgagcactgaacatcaaagtagaacatctgaggaaatatctttaaatgatgctggagtagaattgaaatcaacaaagcaggatggtgataaatccctttctgctgtaccagatattggtcagtgtcatcaggatgagttggaaaggttaaaaagtcaaattttggagctcgagctaaactttcataaagcacaagaaatctatgagaaaaatttagatgagaaagctaaggaaattagcaacctaaaccagttgattgaggagtttaagaaaaatgctgacaacaacagcagtgcattcactgctttgtctgaagaaagagaccagcttctctctcaggtgaaggaacttagcatggtaacagaattgagggctcaggtaaagcaactggaaatgaaccttgcagaagcagaaaggcaaagaagacttgattatgaaagccaaactgcccatgacaacctgctcactgaacagatccatagtctcagcatagaagccaaatctaaagatgtgaaaattgaagttttacagaatgaactggatgatgtgcagcttcagttttctgagcagagtaccctgataagaagcctgcaaagccagctgcaaaataaggaaagtgaagtgcttgagggggcagaacgtgtaaggcatatctcaagtaaagtggaagaactgtcccaggctctttcacagaaggaacttgaaataacaaaaatggatcagctcttactagagaaaaagagagatgtggaaaccctccaacaaaccatcgaggagaaggatcaacaagtgacagaaatcagctttagtatgactgagaaaatggttcagcttaatgaagagaagttttctcttggggttgaaattaagactcttaaagaacagctaaatttattatccagagctgaggaagcaaaaaaagagcaggtggaagaagataatgaagtttcttctggccttaaacaaaattatgatgagatgagcccagcaggacaaataagtaaggaagaacttcagcatgaatttgaccttctgaagaaagaaaatgagcagagaaagagaaagctccaggcagctcttattaacagaaaggagcttctgcaaagagtcagtagattggaagaagaattagccaacttgaaagatgaatctaagaaagaaatcccactcagtgagactgagaggggagaagtggaagaagataaagaaaacaaagaatactcagaaaaatgtgtgacttctaagtgccaagaaatagaaatttatttaaaacagacaatatctgagaaagaagtggaactacagcatataaggaaggatttggaagaaaagctggcagctgaagagcaattccaggctctggtcaaacagatgaatcagaccttgcaagataaaacaaaccaaatagatttgctccaagcagaaatcagtgaaaaccaagcaattatccagaagttaatcacaagtaacacggatgcaagtgatggggactccgtagcacttgtaaaggaaacagtggtgataagtccaccttgtacaggtagtagtgaacactggaaaccagaactagaagaaaagatactggcccttgaaaaagaaaaggagcaacttcaaaagaagctacaggaagccttaacctcccgcaaggcaattcttaaaaaggcacaggagaaagaaagacatctcagggaggagctaaagcaacagaaagatgactataatcgcttgcaagaacagtttgatgagcaaagcaaggaaaatgagaatattggagaccagctaaggcaactccagattcaagtaagggaatccatagacggaaaactcccaagcacagaccagcaggaatcgtgttcttccactccaggtttagaagaacctttattcaaagccacagaacagcatcacactcaacctgttttagagtccaacttgtgcccagactggccttctcattctgaagatgcgagtgctctgcagggcggaacttctgttgcccagattaaggcccagctgaaggaaatagaggctgagaaagtagagttagaattgaaagttagttctacaacaagtgagcttactaaaaaatcagaagaggtatttcagttacaagagcagataaataaacagggtttagaaatcgagagtctaaagacagtatcccatgaagctgaagtccatgccgaaagcctgcagcagaaattggaaagcagccaactacaaattgctggcctagaacatctaagagaattgcaacctaaactggatgaactgcaaaaactcataagcaaaaaggaagaagacgttagctacctttctggacaacttagtgagaaagaagcagctctcactaaaatacagacagagataatagaacaagaagatttaattaaggctctgcatacacagctagaaatgcaagccaaagagcatgatgagaggataaagcagctacaggtggaactttgtgaaatgaagcaaaaaccagaagagattggagaagaaagtagagcaaagcaacaaatacaaaggaaactgcaagctgcccttatttcccgaaaagaagcactaaaagaaaacaaaagtctccaagaggaattgtctttggccagaggtaccattgaacgtctcaccaagtctctggcagatgtggaaagccaagtttctgctcaaaataaagaaaaagatacggtcttaggaaggttagctcttcttcaagaagaaagagacaaactcattacagaaatggacaggtctttattggaaaatcagagtctcagcagctcctgtgaaagtctaaaactagctctagagggtcttactgaagacaaggaaaagttagtgaaggaaattgaatctttgaaatcttctaagattgcagaaagtactgagtggcaagagaaacacaaggagctacaaaaagagtatgaaattcttctgcagtcctatgagaatgttagtaatgaagcagaaaggattcagcatgtggtggaagctgtgaggcaagagaaacaagaactgtatggcaagttaagaagcacagaggcaaacaagaaggagacagaaaagcagttgcaggaagctgagcaagaaatggaggaaatgaaagaaaagatgagaaagtttgctaaatctaaacagcagaaaatcctagagctggaagaagagaatgaccggcttagggcagaggtgcaccctgcaggagatacagctaaagagtgtatggaaacacttctttcttccaatgccagcatgaaggaagaacttgaaagggtcaaaatggagtatgaaaccctttctaagaagtttcagtctttaatgtctgagaaagactctctaagtgaagaggttcaagatttaaagcatcagatagaagataatgtatctaaacaagctaacctagaggccaccgagaaacatgataaccaaacgaatgtcactgaagagggaacacagtctataccaggtgagactgaagagcaagactctctgagtatgagcacaagacctacatgttcagaatcggttccatcagcgaagagtgccaaccctgctgtaagtaaggatttcagctcacatgatgaaattaataactacctacagcagattgatcagctcaaagaaagaattgctggattagaggaggagaagcagaaaaacaaggaatttagccagactttagaaaatgagaaaaataccttactgagtcagatatcaacaaaggatggtgaactaaaaatgcttcaggaggaagtaaccaaaatgaacctgttaaatcagcaaatccaagaagaactctccagagttaccaaactaaaggagacagcagaagaagagaaagatgatttggaagagaggcttatgaatcaattagcagaacttaatggaagcattgggaattactgtcaggatgttacagatgcccaaataaaaaatgagctattggaatctgaaatgaagaaccttaaaaagtgtgtgagtgaattggaagaagaaaagcagcagttagtcaaggaaaaaactaaggtggaatcagaaatacgaaaggaatatttggagaaaatacaaggtgctcagaaagaacccggaaataaaagccatgcaaaggaacttcaggaactgttaaaagaaaaacaacaagaagtaaagcagctacagaaggactgcatcaggtatcaagagaaaattagtgctctggagagaactgttaaagctctagaatttgttcaaactgaatctcaaaaagatttggaaataaccaaagaaaatctggctcaagcagttgaacaccgcaaaaaggcacaagcagaattagctagcttcaaagtcctgctagatgacactcaaagtgaagcagcaagggtcctagcagacaatctcaagttgaaaaaggaacttcagtcaaataaagaatcagttaaaagccagatgaaacaaaaggatgaagatcttgagcgaagactggaacaggcagaagagaagcacctgaaagagaagaagaatatgcaagagaaactggatgctttgcgcagagaaaaagtccacttggaagagacaattggagagattcaggttactttgaacaagaaagacaaggaagttcagcaacttcaggaaaacttggacagtactgtgacccagcttgcagcctttactaagagcatgtcttccctccaggatgatcgtgacagggtgatagatgaagctaagaaatgggagaggaagtttagtgatgcgattcaaagcaaagaagaagaaattagactcaaagaagataattgcagtgttctaaaggatcaacttagacagatgtccatccatatggaagaattaaagattaacatttccaggcttgaacatgacaagcagatttgggagtccaaggcccagacagaggtccagcttcagcagaaggtctgtgatactctacagggggaaaacaaagaacttttgtcccagctagaagagacacgccacctataccacagttctcagaatgaattagctaagttggaatcagaacttaagagtctcaaagaccagttgactgatttaagtaactctttagaaaaatgtaaggaacaaaaaggaaacttggaagggatcataaggcagcaagaggctgatattcaaaattctaagttcagttatgaacaactggagactgatcttcaggcctccagagaactgaccagtaggctgcatgaagaaataaatatgaaagagcaaaagattataagcctgctttctggcaaggaagaggcaatccaagtagctattgctgaactgcgtcagcaacatgataaagaaattaaagagctggaaaacctgctgtcccaggaggaagaggagaatattgttttagaagaggagaacaaaaaggctgttgataaaaccaatcagcttatggaaacactgaaaaccatcaaaaaggaaaacattcagcaaaaggcacagttggattcctttgttaaatccatgtcttctctccaaaatgatcgagaccgcatagtgggtgactatcaacagctggaagagcgacatctctctataatcttggaaaaagaccaactcatccaagaggctgctgcagagaataataagcttaaagaagaaatacgaggcttgagaagtcatatggatgatctcaattctgagaatgccaagctagatgcagaactgatccaatatagagaagacctgaaccaagtgataacaataaaggacagccaacaaaagcagcttcttgaagttcaacttcagcaaaataaggagctggaaaataaatatgctaaattagaagaaaagctgaaggaatctgaggaagcaaatgaggatctgcggaggtcctttaatgccctacaagaagagaaacaagatttatctaaagagattgagagtttgaaagtatctatatcccagctaacaagacaagtaacagccttgcaagaagaaggtactttaggactctatcatgcccagttaaaagtaaaagaagaagaggtacacaggttaagtgctttgttttcctcctctcaaaagagaattgcagaactggaagaagaattggtttgtgttcaaaaggaagctgccaagaaggtaggtgaaattgaagataaactgaagaaagaattaaagcatcttcatcatgatgcagggataatgagaaatgaaactgaaacagcagaagagagagtggcagagctagcaagagatttggtggagatggaacagaaattactcatggtcaccaaagaaaataaaggtctcacagcacaaattcagtcttttggaaggtctatgagttccttgcaaaatagtagagatcatgccaatgaggaacttgatgaactgaaaaggaaatatgatgccagtctgaaggaattggcacagttgaaagaacagggactcttaaacagagagagagatgctcttctttctgaaaccgccttttcaatgaactccactgaggagaatagcttgtctcaccttgagaaacttaaccaacagctcctatccaaagatgagcaattgcttcacttgtcctcacaactagaagattcttataaccaagtgcagtccttttccaaggctatggccagtctgcagaatgagagagatcacctgtggaatgagctggagaaatttcgaaagtcagaggaagggaagcagaggtctgcagctcagccttccaccagcccagctgaagtacagagtttaaaaaaagctatgtcttcactccaaaatgacagagacagactactgaaggaattgaagaatctgcagcagcaatacttacagattaatcaagagatcactgagttacatccactgaaggctcaacttcaggagtatcaagataagacaaaagcatttcagattatgcaagaagagctcaggcaggaaaacctctcctggcagcatgagctgcatcagctcaggatggagaagagttcctgggaaatacatgagaggagaatgaaggaacagtaccttatggctatctcagataaagatcagcagctcagtcatctgcagaatcttataagggaattgaggtcttcttcctcccagactcagcctctcaaagtgcaataccaaagacaggcatccccagagacatcagcttccccagatgggtcacaaaatctggtttatgagacagaacttctcaggacccagctcaatgacagcttaaaggaaattcaccaaaaggagttaagaattcagcaactgaacagcaacttctctcagctactggaagagaaaaacaccctttccattcagctctgcgataccagtcagagtcttcgtgagaaccagcagcactatggtgaccttttaaatcactgtgcagtcttggagaagcaggttcaagagctgcaggcggggccactaaatatagatgttgctccaggagctccccagcttttctgaagctcagcagcagctatgcaacaccagacaggaagtgaatgaattaaggaagctgctggaagaagaacgagaccaaagagtggctgctgagaatgctctctctgtggccgaggagcagatcagacggttagagcacagtgaatgggactcttcccggactcctatcattggctcctgtggcactcaggagcaggcactgttaatagatcttacaagcaacagttgtcgaaggacccggagtggcgttggatggaagcgagtcctgcgttcactctgtcattcacggacccgagtgccacttctagcagccatctactttctaatgattcatgtcctgctcattctgtgttttacgggccatctatagacttagttgttactctttggaccactcccctcaaaacttggaattctctcacctctaacatcagaacatcaattccagtggaacagtcttcccatttacaggtcttctctccaactcttcacggaaagtgcctgcaaaaacagaggtggatacgaggacaggttggagctgcagggactggcgagtctgctttcttctactgccctgagcctgaacgcttctgcttaatctgagaatcacatttggtttgttgagcctaatatttgttgagattttgcaggaccctgatcttttgtggtcctgtaaaagatactgaggaatgtctttcagccaagccaagaggatggtttcaataaacctaataatctgaagttcag

SEQ ID NO: 482983 - DNA, 469 bp, Homo sapiens
  misc_feature (23)..(23): n is a, c, g, or t
  misc_feature (390)..(390): n is a, c, g, or t
  misc_feature (443)..(443): n is a, c, g, or t
  misc_feature (461)..(461): n is a, c, g, or t
attctcataggggtgtgaacctnattgtgaaccatgcatgtgagggatctaggttgcccgtatgagactgtaatgcctgatgatctgtcactgacccccatcacccccagatggaccatctagttgcaagaaaacaagctcagggttcccattgattctacattatggtgagttgtagaattatttaattatatattacaaagtaatgatagtagaaataaagtacacaataaatgtaatgtgctagaatcatcctgaaactatcccctttcatcctcccaaatccgtggaaaagttgtcttccatgaaaccagtcccgggtgccaaaaagactaggggaatgctggtctacaaagtacagttcaataaatctaaaatcttacctgttantagttaaaaatgagggggtatccctatggcaggaggattgaaactaggacccngttttgggtcagggtttntttagggg

SEQ ID NO: 482984 - DNA, 352 bp, Homo sapiens
agggccccgcggagcctcagccctaggctccctccttctgcccctggggcctcgagtagccatggcaacggggccagtgttccgtcccttagaagtttcccccttgggccaaaaccccatttccctttagagctggtgttgtttgaagtttttgtatccccgtggttacctgggctttttcctgccaacctacccccccaagctttttttttttccttcccgtatccatggtaccccgtgttgttcccagcgccggggggggttgggccgaaaccctcggggatgctttcgggccccctgttggggttggggagaaccccgccccccttattaaggtgctgcttgggtggga

SEQ ID NO: 482985 - DNA, 7907 bp, Homo sapiens
tctcctcatcagggcgatcctcctcctcctgggcgaaacctcctcctcctgcgactggaaatgaaccttgcagaagcagaaaggcaaagaagacttgattatgaaagccaaactgcccatgacaacctgctcactgaacagatccatagtctcagcatagaagccaaatctaaagatgtgaaaattgaagttttacagaatgaactggatgatgtgcagcttcagttttctgagcagagtaccctgataagaagcctgcaaagccagctgcaaaataaggaaagtgaagtgcttgagggggcagaacgtgtaaggcatatctcaagtaaagtggaagaactgtcccaggctctttcacagaaggaacttgaaataacaaaaatggatcagctcttactagagaaaaagagagatgtggaaaccctccaacaaaccatcgaggagaaggatcaacaagtgacagaaatcagctttagtatgactgagaaaatggttcagcttaatgaagagaagttttctcttggggttgaaattaagactcttaaagaacagctaaatttattatccagagctgaggaagcaaaaaaagagcaggtggaagaagataatgaagtttcttctggccttaaacaaaattatgatgagatgagcccagcaggacaaataagtaaggaagaacttcagcatgaatttgaccttctgaagaaagaaaatgagcagagaaagagaaagctccaggcagctcttattaacagaaaggagcttctgcaaagagtcagtagattggaagaagaattagccaacttgaaagatgaatctaagaaagaaatcccactcagtgagactgagaggggagaagtggaagaagataaagaaaacaaagaatactcagaaaaatgtgtgacttctaagtgccaagaaatagaaatttatttaaaacagacaatatctgagaaagaagtggaactacagcatataaggaaggatttggaagaaaagctggcagctgaagagcaattccaggctctggtcaaacagatgaatcagaccttgcaagataaaacaaaccaaatagatttgctccaagcagaaatcagtgaaaaccaagcaattatccagaagttaatcacaagtaacacggatgcaagtgatggggactccgtagcacttgtaaaggaaacagtggtgataagtccaccttgtacaggtagtagtgaacactggaaaccagaactagaagaaaagatactggcccttgaaaaagaaaaggagcaacttcaaaagaagctacaggaagccttaacctcccgcaaggcaattcttaaaaaggcacaggagaaagaaagacatctcagggaggagctaaagcaacagaaagatgactataatcgcttgcaagaacagtttgatgagcaaagcaaggaaaatgagaatattggagaccagctaaggcaactccagattcaagtaagggaatccatagacggaaaactcccaagcacagaccagcaggaatcgtgttcttccactccaggtttagaagaacctttattcaaagccacagaacagcatcacactcaacctgttttagagtccaacttgtgcccagactggccttctcattctgaagatgcgagtgctctgcagggcggaacttctgttgcccagattaaggcccagctgaaggaaatagaggctgagaaagtagagttagaattgaaagttagttctacaacaagtgagcttactaaaaaatcagaagaggtatttcagttacaagagcagataaataaacagggtttagaaatcgagagtctaaagacagtatcccatgaagctgaagtccatgccgaaagcctgcagcagaaattggaaagcagccaactacaaattgctggcctagaacatctaagagaattgcaacctaaactggatgaactgcaaaaactcataagcaaaaaggaagaagacgttagctacctttctggacaacttagtgagaaagaagcagctctcactaaaatacagacagagataatagaacaagaagatttaattaaggctctgcatacacagctagaaatgcaagccaaagagcatgatgagaggataaagcagctacaggtggaactttgtgaaatgaagcaaaaaccagaagagattggagaagaaagtagagcaaagcaacaaatacaaaggaaactgcaagctgcccttatttcccgaaaagaagcactaaaagaaaacaaaagtctccaagaggaattgtctttggccagaggtaccattgaacgtctcaccaagtctctggcagatgtggaaagccaagtttctgctcaaaataaagaaaaagatacggtcttaggaaggttagctcttcttcaagaagaaagagacaaactcattacagaaatggacaggtctttattggaaaatcagagtctcagcagctcctgtgaaagtctaaaactagctctagagggtcttactgaagacaaggaaaagttagtgaaggaaattgaatctttgaaatcttctaagattgcagaaagtactgagtggcaagagaaacacaaggagctacaaaaagagtatgaaattcttctgcagtcctatgagaatgttagtaatgaagcagaaaggattcagcatgtggtggaagctgtgaggcaagagaaacaagaactgtatggcaagttaagaagcacagaggcaaacaagaaggagacagaaaagcagttgcaggaagctgagcaagaaatggaggaaatgaaagaaaagatgagaaagtttgctaaatctaaacagcagaaaatcctagagctggaagaagagaatgaccggcttagggcagaggtgcaccctgcaggagatacagctaaagagtgtatggaaacacttctttcttccaatgccagcatgaaggaagaacttgaaagggtcaaaatggagtatgaaaccctttctaagaagtttcagtctttaatgtctgagaaagactctctaagtgaagaggttcaagatttaaagcatcagatagaagataatgtatctaaacaagctaacctagaggccaccgagaaacatgataaccaaacgaatgtcactgaagagggaacacagtctataccaggtgagactgaagagcaagactctctgagtatgagcacaagacctacatgttcagaatcggttccatcagcgaagagtgccaaccctgctgtaagtaaggatttcagctcacatgatgaaattaataactacctacagcagattgatcagctcaaagaaagaattgctggattagaggaggagaagcagaaaaacaaggaatttagccagactttagaaaatgagaaaaataccttactgagtcagatatcaacaaaggatggtgaactaaaaatgcttcaggaggaagtaaccaaaatgaacctgttaaatcagcaaatccaagaagaactctccagagttaccaaactaaaggagacagcagaagaagagaaagatgatttggaagagaggcttatgaatcaattagcagaacttaatggaagcattgggaattactgtcaggatgttacagatgcccaaataaaaaatgagctattggaatctgaaatgaagaaccttaaaaagtgtgtgagtgaattggaagaagaaaagcagcagttagtcaaggaaaaaactaaggtggaatcagaaatacgaaaggaatatttggagaaaatacaaggtgctcagaaagaacccggaaataaaagccatgcaaaggaacttcaggaactgttaaaagaaaaacaacaagaagtaaagcagctacagaaggactgcatcaggtatcaagagaaaattagtgctctggagagaactgttaaagctctagaatttgttcaaactgaatctcaaaaagatttggaaataaccaaagaaaatctggctcaagcagttgaacaccgcaaaaaggcacaagcagaattagctagcttcaaagtcctgctagatgacactcaaagtgaagcagcaagggtcctagcagacaatctcaagttgaaaaaggaacttcagtcaaataaagaatcagttaaaagccagatgaaacaaaaggatgaagatcttgagcgaagactggaacaggcagaagagaagcacctgaaagagaagaagaatatgcaagagaaactggatgctttgcgcagagaaaaagtccacttggaagagacaattggagagattcaggttactttgaacaagaaagacaaggaagttcagcaacttcaggaaaacttggacagtactgtgacccagcttgcagcctttactaagagcatgtcttccctccaggatgatcgtgacagggtgatagatgaagctaagaaatgggagaggaagtttagtgatgcgattcaaagcaaagaagaagaaattagactcaaagaagataattgcagtgttctaaaggatcaacttagacagatgtccatccatatggaagaattaaagattaacatttccaggcttgaacatgacaagcagatttgggagtccaaggcccagacagaggtccagcttcagcagaaggtctgtgatactctacagggggaaaacaaagaacttttgtcccagctagaagagacacgccacctataccacagttctcagaatgaattagctaagttggaatcagaacttaagagtctcaaagaccagttgactgatttaagtaactctttagaaaaatgtaaggaacaaaaaggaaacttggaagggatcataaggcagcaagaggctgatattcaaaattctaagttcagttatgaacaactggagactgatcttcaggcctccagagaactgaccagtaggctgcatgaagaaataaatatgaaagagcaaaagattataagcctgctttctggcaaggaagaggcaatccaagtagctattgctgaactgcgtcagcaacatgataaagaaattaaagagctggaaaacctgctgtcccaggaggaagaggagaatattgttttagaagaggagaacaaaaaggctgttgataaaaccaatcagcttatggaaacactgaaaaccatcaaaaaggaaaacattcagcaaaaggcacagttggattcctttgttaaatccatgtcttctctccaaaatgatcgagaccgcatagtgggtgactatcaacagctggaagagcgacatctctctataatcttggaaaaagaccaactcatccaagaggctgctgcagagaataataagcttaaagaagaaatacgaggcttgagaagtcatatggatgatctcaattctgagaatgccaagctagatgcagaactgatccaatatagagaagacctgaaccaagtgataacaataaaggacagccaacaaaagcagcttcttgaagttcaacttcagcaaaataaggagctggaaaataaatatgctaaattagaagaaaagctgaaggaatctgaggaagcaaatgaggatctgcggaggtcctttaatgccctacaagaagagaaacaagatttatctaaagagattgagagtttgaaagtatctatatcccagctaacaagacaagtaacagccttgcaagaagaaggtactttaggactctatcatgcccagttaaaagtaaaagaagaagaggtacacaggttaagtgctttgttttcctcctctcaaaagagaattgcagaactggaagaagaattggtttgtgttcaaaaggaagctgccaagaaggtaggtgaaattgaagataaactgaagaaagaattaaagcatcttcatcatgatgcagggataatgagaaatgaaactgaaacagcagaagagagagtggcagagctagcaagagatttggtggagatggaacagaaattactcatggtcaccaaagaaaataaaggtctcacagcacaaattcagtcttttggaaggtctatgagttccttgcaaaatagtagagatcatgccaatgaggaacttgatgaactgaaaaggaaatatgatgccagtctgaaggaattggcacagttgaaagaacagggactcttaaacagagagagagatgctcttctttctgaaaccgccttttcaatgaactccactgaggagaatagcttgtctcaccttgagaaacttaaccaacagctcctatccaaagatgagcaattgcttcacttgtcctcacaactagaagattcttataaccaagtgcagtccttttccaaggctatggccagtctgcagaatgagagagatcacctgtggaatgagctggagaaatttcgaaagtcagaggaagggaagcagaggtctgcagctcagccttccaccagcccagctgaagtacagagtttaaaaaaagctatgtcttcactccaaaatgacagagacagactactgaaggaattgaagaatctgcagcagcaatacttacagattaatcaagagatcactgagttacatccactgaaggctcaacttcaggagtatcaagataagacaaaagcatttcagattatgcaagaagagctcaggcaggaaaacctctcctggcagcatgagctgcatcagctcaggatggagaagagttcctgggaaatacatgagaggagaatgaaggaacagtaccttatggctatctcagataaagatcagcagctcagtcatctgcagaatcttataagggaattgaggtcttcttcctcccagactcagcctctcaaagtgcaataccaaagacaggcatccccagagacatcagcttccccagatgggtcacaaaatctggtttatgagacagaacttctcaggacccagctcaatgacagcttaaaggaaattcaccaaaaggagttaagaattcagcaactgaacagcaacttctctcagctactggaagagaaaaacaccctttccattcagctctgcgataccagtcagagtcttcgtgagaaccagcagcactatggtgaccttttaaatcactgtgcagtcttggagaagcaggttcaagagctgcaggcggggccactaaatatagatgttgctccaggagctccccaggaaaagaatggagttcacagaaagagtgaccctgaggaactaagggaaccgcagcaaagcttttctgaagctcagcagcagctatgcaacaccagacaggaagtgaatgaattaaggaagctgctggaagaagaacgagaccaaagagtggctgctgagaatgctctctctgtggccgaggagcagatcagacggttagagcacagtgaatgggactcttcccggactcctatcattggctcctgtggcactcaggagcaggcactgttaatagatcttacaagcaacagttgtcgaaggacccggagtggcgttggatggaagcgagtcctgcgttcactctgtcattcacggacccgagtgccacttctagcagccatctactttctaatgattcatgtcctgctcattctgtgttttacgggccatctatagacttagttgttactctttggaccactcccctcaaaacttggaattctctcacctctaacatcagaacatcaattccagtggaacagtcttcccatttacaggtcttctctccaactcttcacggaaagtgcctgcaaaaacagaggtggatacgaggacaggttggagctgcagggactggcgagtctgctttcttctactgccctgagcctgaacgcttctgcttaatctgagaatcacatttggtttgttgagcctaatatttgttgagattttgcaggaccctgatcttttgtggtcctgtaaaagatactgaggaatgtctttcagccaagccaagaggatggtttcaataaacctaataatctgaagttcag

SEQ ID NO: 482986 - DNA, 87 bp, Homo sapiens
gatccgctcatcagaatcacatgagaaacagtcataatactgtgccctagacggtagccagactagttctcagggaatagaccatcc

SEQ ID NO: 482987 - DNA, 129 bp, Homo sapiens
cactatgcgcgagtgcatgggatttccgattagcagctggcgcgatgctcagacgtgcatctttgatatttctgttctacaacccttcctggggcggtgttcggctacggccacgtcgtcttcgagtct

SEQ ID NO: 482988 - DNA, 125 bp, Homo sapiens
  misc_feature (50)..(50): n is a, c, g, or t
  misc_feature (122)..(122): n is a, c, g, or t
tcaggagagagaactggagcagtggatcgctgagagggaggtggtcgcanggtcccatgaactgggacaggactatgagcatgtcacgatgttacaagaacgattccgggagtttgcccgangac

SEQ ID NO: 482989 - DNA, 157 bp, Homo sapiens
actaggtagttatgtactcgtatcaaaccctccatcaggtccccagagtctatctggttatctgccacatcgtgaccagaagttctgaattatgggctcacaggctcacatcagcaaggcttctatttgaatatcctctgattctaactcagagagg

SEQ ID NO: 482990 - DNA, 283 bp, Homo sapiens
catttgagccccttgatgctctatttctattcactgtactatggcatcacgcttatattcccttaatttgcaatgaactctataagctcacatgtctagaatataatcactttggtctatctattcatgtttgaattgtttttcaaccatgtcagatcgagtggtcttagtctaggtgctctgttattgactgttctgtataatgttgaggatacttctatttaacaaataattaatactaataatagtacatcttactgtattatctatatagccattatgc

SEQ ID NO: 482991 - DNA, 522 bp, Homo sapiens
ataaataatagagattcgcataatagatattctttacaatacaatagttataacagacttctggtctaaaaaatagtcagaatcctagttgtgatattacataactagtacatcagcaccacaatttgtggttaggcaaggaaaatcacagaagagattagaatcactcagtggttaactatccatgggggcagacggaccattaaggagccatgatcactttaggcatcatagttctgtgacacattattgattgatcagctattactgtcaacttgaggtcttccaagctgccctcaatgacaacgaaaatttggtgagaagcatggggtgaagaaggaaggtggctggttccttcacaagatacaaggctagagtgaagatgggcagggtccaaccatgtattatctccaatgtgaagatttacattgtatggcgaatctaagattgcatagacatgaaaatatgcacttggtatctccagagtaagacaacatcatactgtgggggaaagagccttga

SEQ ID NO: 482992 - DNA, 1026 bp, Homo sapiens
  misc_feature (1)..(1): n is a, c, g, or t
  misc_feature (67)..(67): n is a, c, g, or t
  misc_feature (92)..(92): n is a, c, g, or t
  misc_feature (94)..(95): n is a, c, g, or t
  misc_feature (127)..(127): n is a, c, g, or t
  misc_feature (129)..(129): n is a, c, g, or t
  misc_feature (135)..(135): n is a, c, g, or t
  misc_feature (137)..(137): n is a, c, g, or t
  misc_feature (151)..(151): n is a, c, g, or t
  misc_feature (153)..(153): n is a, c, g, or t
  misc_feature (171)..(171): n is a, c, g, or t
  misc_feature (182)..(182): n is a, c, g, or t
  misc_feature (202)..(202): n is a, c, g, or t
  misc_feature (226)..(226): n is a, c, g, or t
  misc_feature (286)..(286): n is a, c, g, or t
  misc_feature (289)..(289): n is a, c, g, or t
  misc_feature (295)..(295): n is a, c, g, or t
  misc_feature (299)..(299): n is a, c, g, or t
  misc_feature (315)..(315): n is a, c, g, or t
  misc_feature (331)..(331): n is a, c, g, or t
  misc_feature (337)..(337): n is a, c, g, or t
  misc_feature (340)..(341): n is a, c, g, or t
  misc_feature (343)..(343): n is a, c, g, or t
  misc_feature (348)..(348): n is a, c, g, or t
  misc_feature (351)..(351): n is a, c, g, or t
  misc_feature (357)..(357): n is a, c, g, or t
  misc_feature (367)..(367): n is a, c, g, or t
  misc_feature (381)..(381): n is a, c, g, or t
  misc_feature (386)..(386): n is a, c, g, or t
  misc_feature (413)..(413): n is a, c, g, or t
  misc_feature (417)..(418): n is a, c, g, or t
  misc_feature (421)..(421): n is a, c, g, or t
  misc_feature (423)..(423): n is a, c, g, or t
  misc_feature (427)..(427): n is a, c, g, or t
  misc_feature (435)..(435): n is a, c, g, or t
  misc_feature (438)..(438): n is a, c, g, or t
  misc_feature (444)..(444): n is a, c, g, or t
  misc_feature (449)..(449): n is a, c, g, or t
  misc_feature (464)..(464): n is a, c, g, or t
  misc_feature (480)..(480): n is a, c, g, or t
  misc_feature (483)..(483): n is a, c, g, or t
  misc_feature (489)..(489): n is a, c, g, or t
  misc_feature (495)..(495): n is a, c, g, or t
  misc_feature (499)..(499): n is a, c, g, or t
  misc_feature (502)..(502): n is a, c, g, or t
  misc_feature (507)..(507): n is a, c, g, or t
  misc_feature (510)..(510): n is a, c, g, or t
  misc_feature (521)..(521): n is a, c, g, or t
  misc_feature (526)..(526): n is a, c, g, or t
  misc_feature (548)..(548): n is a, c, g, or t
  misc_feature (551)..(551): n is a, c, g, or t
  misc_feature (556)..(556): n is a, c, g, or t
  misc_feature (560)..(561): n is a, c, g, or t
  misc_feature (565)..(565): n is a, c, g, or t
  misc_feature (567)..(567): n is a, c, g, or t
  misc_feature (569)..(569): n is a, c, g, or t
  misc_feature (576)..(577): n is a, c, g, or t
  misc_feature (579)..(579): n is a, c, g, or t
  misc_feature (586)..(586): n is a, c, g, or t
  misc_feature (589)..(590): n is a, c, g, or t
  misc_feature (592)..(592): n is a, c, g, or t
  misc_feature (600)..(600): n is a, c, g, or t
  misc_feature (613)..(613): n is a, c, g, or t
  misc_feature (631)..(631): n is a, c, g, or t
  misc_feature (668)..(668): n is a, c, g, or t
  misc_feature (671)..(671): n is a, c, g, or t
  misc_feature (755)..(755): n is a, c, g, or t
  misc_feature (761)..(761): n is a, c, g, or t
  misc_feature (780)..(780): n is a, c, g, or t
  misc_feature (798)..(798): n is a, c, g, or t
  misc_feature (803)..(803): n is a, c, g, or t
  misc_feature (814)..(815): n is a, c, g, or t
  misc_feature (830)..(830): n is a, c, g, or t
  misc_feature (835)..(835): n is a, c, g, or t
  misc_feature (932)..(932): n is a, c, g, or t
  misc_feature (942)..(942): n is a, c, g, or t
  misc_feature (958)..(958): n is a, c, g, or t
  misc_feature (1024)..(1024): n is a, c, g, or t
ngcattggttcatttttgtattttaatcattgtacatttacttttgtgaaaacactgcctgcatttnctagtacaaaaaaaacctaaaaatngnntcggggatgtagggaaatatccaacttaaatngngaaaangngcaccataattacngnggcactgcagtcatttcngcaattcccangtttcttaaataactatctngtcagataacacacaatataaagngcaattatgaaaaacagacatttacatatacttctaaagtcttattgggaatatcctgtnggnattggntagncaatcatgggggcggnggcggtggcggggtangcatangcnngnggggncanaccatngggcatattngggacattacttcnggatngcggggggcgatcataaccattcgggnaagnnccngngggnttaccagnccnaaaacnggtcngtataccagcgggcncaaaattccttccaangcncccatnggggtnattngcngcacngtnaacaccattcngggtntttgccccaaaatctcttttangcnggctngggnnaccncngncataatnngncgcgggngcnnangggattanatccacccctttngcccgcagagtatctgtncgcgagcggcgcgtccttcatgcctcctctacccctnggnacgacctgaacctctgtcttcgaccaactgaagcaacttgggattaattgcttgattagcttcacgaagcacagagataaggtngctcanttgctttatgttattaggngtaaagaaagtgtatgcngtgcntgtattggtanngcgagcagttcttcnaattngatgaatataatcctctgaggagttagggtagtcataattgatgacaaatttcacatcttccacatctagccctctggaggccacatctgtagccancagaataggngcttttccatgtttgnattcattagaaccagtcacgctcctgttgactcttgtcacatggataccatggcaggcacccactntc

SEQ ID NO: 482993 - DNA, 210 bp, Homo sapiens
ggtacccctagcatcaaaataccaattcgagttcccacaatttttgaccaaggtaaacatcgcagcacaatgtgaatcggaaagaaaaagaaaacttttagccaagaaattgaaatcccttagagcagaatcacaacaaaacgcaccaaaacctaaaccaactgtaaaaatcatcgacgattatgttgtcaaccaatcaacacagcaatt

SEQ ID NO: 482994 - DNA, 226 bp, Homo sapiens
  misc_feature (1)..(1): n is a, c, g, or t
  misc_feature (23)..(23): n is a, c, g, or t
nttaagcgggagaagtatagggntttatcttattatatatgtccatatagactaggactctttttgttggggtagggttaattgattattttgaccccgcatagcttttttttttttttttttaaacttgggctggttctaactctccagcggctttacaaaccatttttaaaagacattcccacatccctgtgaaatttttttgggaaaaaaaattttggcccct

SEQ ID NO: 482995 - DNA, 183 bp, Homo sapiens
  misc_feature (152)..(152): n is a, c, g, or t
acggaccttctctgatatagacttttgattagcactggcttagagtgtgggtctgagaggggttggtgggagattacgtgggaggagttccagacagtactgtgggagatgggtgagtatataggagtggagtagaatagtcctatagtatntattgagcaactaccactggcgcggttagga

SEQ ID NO: 482996 - DNA, 344 bp, Homo sapiens
ggtgatgatgactagtccaagaatgacttcattgagcagagtaccatgcggttgaacagcctcaagctaggataccggcatgtacacctcacggctaagaacggggaccaggattcattagccaccctctgtgtgaagatctccctccaggactaggctggaggaagccaggggtgtcccgactgagagggctgggccctctgtccacaagacgggaccggcctggggtggctggtcccagcctcttgctcagagctatggcccacgctagaccagcccctgtagctgtccttcattgcgcaaggaatcactgcagccctgtacaccattcggccagagagggt

SEQ ID NO: 482997 - DNA, 455 bp, Homo sapiens
ttaccgttatgtacgttgtgttaagcgagtctgtgtgagagaatatccgtgttgcgctaatgaatgttcttagttctagctgggcactttagtctctgtttcccccatttgtcttacaaggccatcgttggacaaaacctaccagtgtaatttatcattatttgattgctgagtagtttgataaattctggatgcatctccaaaagtctctaatgcctatacgcagagggggaagagtttcacaatttactgagcatcgagcgcctaaagtaaagaattcactctccaggaagagctcgagagtaagtaaagattgactccatggaccttttcatgaagcaaaacttttctcctttttccagcaggtctttgcaacctctttttgacattgcctttgcttaaaaagaaaattatagtcatgtatccaaaactagagtatatacataacggtcacg

SEQ ID NO: 482998 - DNA, 389 bp, Homo sapiens
agtgtgattgaggtggagtagattaggcgtaggtagaagtagaggctcttggggtgaagagttttatggcagtcagaaaaaagagaaaagaaaggacacaataaagaaaaaaaaaaaaaaaagaataagaagagaaggcaaaagaagcacaaagaaacacaaggacacagaacacagcaacacgcacagaaaaacagaacaaaaaaacaacgcgaagggagaagagaagaaagacagatagatagtaagaagaaagagaaagagtagaggacaaagatacggcgatagtagagaagaggtagataaagaggacaaagcgagaagaagagagcaaagaaagaaagagaaaagagatagcagaagaaaagataatcagaaggaatatgaac

SEQ ID NO: 482999 - DNA, 666 bp, Homo sapiens
gcgtgatgtaccttgcgggtggtccgaagcataaatctgcttgaactggcgaggtggcactcgctagggcgcatgttcctgtccacccgtgtacctctaccatgctgtgcgtgcagtgccgtgacatcatgcgatcatatcggaccaatctgcagttgcttgtcactgagggacgccgattctcctcaaagatacaattcggctggcggaatcacgacactgcgcaaagttgctggcatgtggaccaaggagtgcgcgcaatttatatcagcgagtatagtgcaaccgttcatatcggatcatgtacagaagacgtgaatgactagtaggcactttgtatagagtagataatattcaggttggctaattggttgttatctcttagtgatttgggcctgaagtgtcgattggagaaaaattgggatagtctgaagaggacatgctaaggaattttatgatgtggagtcgtgatggggactattgactactcttggatggcctgactatgcccttttgaccttggtgttaatgctgcaagataacgacctgggggttcgattcactctgatacatcgcctcttgtcgcgacttgaactttcgcagtaatcataccgatcacctactgtgatggcgtgcaaggaacggtctcctgggcactgggaccta

SEQ ID NO: 483000 - DNA, 141 bp, Homo sapiens
gatcaccggaggtcagtagttcaagaccagcctggccaacatggtgaaaccccaacctctactaaaaattggtgtatatcctttgtggtgtcttcctgtttatgtgtcccaaggggagtattttccacaaaggtcaaaaca

SEQ ID NO: 483001 - DNA, 713 bp, Homo sapiens
gtggcgccgagcctcccaagatggcggggtgcaatcgcggtgatggccaggagaattaccccctctacattcggaggcacccctagcggagaacgagctgaagttccactacatggggcacacatctctggaggtggtggatgagaagatcgccgcaggggggaaggccctggggcgaccagagggagctggacctgggcctgcgctaccccaacgggggactacaaggaatacggtacgtacaagccaatgtccaaggctgacgtgggtcaggggggtagattcctccaagacagccctgcgagacaacgaaatgcgcagcatgtttccggaagctatcacggactcctgacacagaagcgtgatgtgcatcccttcgtacaagccgggggaccgcaatccagtccagggcctttgataacatggtgacgtcgagtgatgcactgacaggtgtgcatgagtgagctgtgctggcagccatcgtagaggagcccggcacagattgtgggtggggccgtcggtctgctcctggtctgcctcttcctgactgggacgccctggggcttcacaggggcaggcaggctgtgcatgttctcttcaaaatacaggtctggtgagagggcaacaaaccaagatttcagcccaaatacacattcttcgggccaattagcaccttcgaaacctttcttaccaacctggttgatggcgccctg

SEQ ID NO: 483002 - DNA, 779 bp, Homo sapiens
gggtcgtgcggacgtcttgcctgtcgctggagtgagaggtccgggctctccagtgaaggtgtgctgctggcgacaaaatgaacgatattcgtgggcaacgtcgacgcgggcggatacgactccggaggagctggcagaccctcttttgcgccctacggcgacggtcatgacgctgcgccgatcactgaaacagttcgccttcggtgcacatgcgcagaagaaacgcaggggcgcgctgacgcgccaatcgaagccctgacacggccacgacgcctgcaggcctgcgggcagcgcagctcgtggtcggacgatgtccgccgcccacaatggcctcctggaataactgtggacagattggtcgttggtgccaaatgtcgtcggggctggcattgccacccgaacgccaggcaaccttgtcagcgagctgctcctttgcggacgacagcccggatgagaatcggccgatccatgcgaagctcgtcgaaccgatgggttggcaacacggggctacctacggtctaacggtgaatggcgtcgaccagccctgacaccaaactctgggaaaaatcgggaccgcccgcggaggaggcgccttaccaacgacggccaacgcgcatcgaacttcgctgccatccaagctgcctctccgaacggcgaggcacactgcgcctaaaacggggttggctttgggaaactgtggtgtaccaagttgaggttgagagaaaacttttgaccgtggactctatggtcgcacaccattccgggagatgcacgacgga

SEQ ID NO: 483003 - DNA, 850 bp, Homo sapiens
  misc_feature (20)..(20): n is a, c, g, or t
  misc_feature (725)..(725): n is a, c, g, or t
  misc_feature (845)..(845): n is a, c, g, or t
atgggacgagaattagtcgngtcactctgtcaattcctgctcaacgcggtataggtacttggagcgcacgcacgtgagagatgatattacgtcaggtgcgtgacttgactcaggtagcacgattatgcggagctagagcgcgaggcccgcgggccttgcagtacagtaggtcactgtcgaattcgtcagcggtatccttagagaggtgaaaacagatcataatgtacaaaaacaggcaagctcttgcgtgcgcggtggcgaccggagctcaacggtgtacttcttgtcacacatacgcgttctcatagttgcaaagtagttatgccacttgataggggagggggggcaggcagggagcaggcggagggagacaaccatgaatagatttattatatatctttgtggtgttcgtatcagtgctcgcgtggtcgcagctgcctcgcgttctggggcggtgtgttcaatgtaatgttcagctattccgagctatacggatatctatgcgcctcggtgagaactaaatcaactatactaaaaattaagacccagatatactctgccaagtgaaaacgagggagttaaaagtaaactacgtaattataaccgcgggcccaccggtcgctgccggtggcgcggggtgatgtttttagtctccttcccccacgccgttcccgtcccgtcttcttggtttgcgctgtggggggcgttgcgcctgaggtttaaantatataatgtggagtggaggaggtaaaattgataggttcagtagttagaggaggggtagttggcgtgtgttgggggggtgcgggggtgggccgattgattttaaaagaaaaagagagagnggtat

SEQ ID NO: 483004 - DNA, 112 bp, Homo sapiens
gagtggaagctgcatctcgagttgaacagtgagagtccgggcggtgaggaggactcagggggagggcgggcaggactgagaaggggagtgcgaggcaggagttatatgccat

SEQ ID NO: 483005 - DNA, 273 bp, Homo sapiens
cctaggtgaagtagtttgcactatttttgcaatatattcatggaaaacctaccagttacttgttttgtttcttactgtgtgtatatatactaatgctgagagtttggcatagtgttttttcgcctccttacataacccctaacttgcgcaggatgctgtttttctgataaaatatgatgtgaatgatattttatgatgttcttttgtatggtgtcaattttgttttgcctcatagtatgtcagcaaaaaattaaatagaaggacttttattta

SEQ ID NO: 483006 - DNA, 1496 bp, Homo sapiens
  misc_feature (122)..(122): n is a, c, g, or t
gcctagcacctcaacatgacggctctcattgtcctgcggcttgtcctcctcttctgctctacgtgctaccagtggcataggttcatatgcagcacggtgctgcagttgtgccacgaacctcnttcacaagacgatttggcgaagtggcagtggtctcacagggcgacctcatgcctacccaaagctggactgttctctggactacagattgggagacctggttacacaccagacgatgctacgaagaggtactagtgtctggaagaacatgacctcatctggattagtgcggactactctcaagactcagaactaagcgcgcttacttgggcctgctaactggattgcgcccaaatagccgcaagcggagcaatgcgtctcactcgcccctgtgtcactccgtactccctgttcccggcatgcctctttgccctgccccaacgcactcaatccttccggccttggaatgcccatgcctcatagccttttgcttgcccaacaaagacaaagcgtatcgctccacacatagaattgccaatgaacaccgcgacacgttcacccaacgcttatagagcgctcgcacagttggtcaacaacacagctccaactctcgatttcactataaaccaaccaccagaattcagtctgctgtatcaaccctacactccgttccacaaccacgcaacccaaagtcacactcagtaaacaccactcaaccccttaatttccacaccgacacttacactaaccctaagtaccctccacacactcaacaccgctcccttccgttcgtcaccaccccacttaccccacaccacgtacgcaaccatacatgcagcaacactacatgaacgcacctcgtcacacacagagccgttcaaaccgagtatattcagaacctccaaacataactcttgactttcatcccaaaatacatcaaagaactaacgttcggattcaatgcggaccaatgcaaacgcgtaattgaccgccataccccacttgtactgcttcctatgtgcatgcccatatcccctcctaggcgaccccagtgagtaaacccatatggcaactcactacaacaacttaatagcgattccaacattacaaccgacaattcctacgtttcaagcacacggaccacctacacagccacacgtaacttcatctacgggcactttatctaacgcgtcacctaagacgtagcgaccacacgcaacccgcaggtgtgtgaagacagctcagagcatcgacagcattcgaaccccacatctacaaaacgagggacaggacaagacggttgagttcgccccaacgcgtagctcaaagcccaccctagagcaccatatcataagtgcgagcagcagccacactaccagccgaccgcgggcgtgtgggctcacaaggcggcagaccacgccgtccattgagcaccggacaagcatggtgtgttgggaggtcgagtgtcgggctagcaccatacccccaaccgccgt

SEQ ID NO: 483007 - DNA, 1262 bp, Homo sapiens
  misc_feature (421)..(421): n is a, c, g, or t
gatctgtggccagggacaggaacagaggatttgaccccaggtaatattataaaacaatctgatgggcagctaaatgagtatattatccaatctgctatcagctaaaataaatggcttaggttttcatagcagtctatacaagtaaaggaacccctctatttgttctcaggatcatcctaggtctgtttgttcctgtcactgcccaacctactctcctggaacatttttctccttacttatatgtctatgtgtgctttgaatatttgtccaaatttaacctaacaaataacaattgtgcagcaaaatctttaatcctgaaggagaaagtggaaaacaaaaaaaagaggaggagaaggacaagaactcctcattcccttgatgaacttaagaagcagaagcaccagcactgtctgaaaaccanactttaagaagaaataggattagatttattaaaaccttttgagtgtggtatgggactcagcttattcactgggaatgtgcctcaaactcagaaaccaaatccctgtaaatcttaccaatcaactacattgttatgctctttccatttaggaagttaaaaaagtcgtttaggacactatcaaaccacttttaggtacttattttaaaaacatatggataagagttctagaaaacaagagaaaaattggaaagaataaagcagcgtatgtttgttcacagccttgagtttgattcctgttttgttactgtaggaaaaatgtcctatttcagagcagggggggatgggaaggcagccatgggtgccacactggaattcaacccatgtggaggttgaaaaaaacgggtctggacagtggagaagtgaaggtagaatatgaagagccccacgggagaccagctctcttttcctccagtctcctcaacttggctcagtgggctgcttcaaccccatatgcaagctgaagtcaaagaggaaaaaattgtcccaacctcagcacacgaccaggaaagataccagcgcagcttctctagtgtgacctgtgcggctcacatggtgtcatggcgacggcgatgcagggacaggtggtcagaacgagaaaagctgcggttgcagtctgtgcaccgaaaaggcttgatgcctgtgtgcttgcggaaatggcgagtgagctcatctgagcgagcaaatttccaggagcagccatcccaggtgcatttataaggcttctctcctgtatggattctgcggtgagctttcaggtgagagcttttggtgtacactttgc

SEQ ID NO: 483008 - DNA, 476 bp, Homo sapiens
  misc_feature (103)..(104): n is a, c, g, or t
  misc_feature (118)..(119): n is a, c, g, or t
  misc_feature (242)..(242): n is a, c, g, or t
  misc_feature (273)..(273): n is a, c, g, or t
tttcgggagccttaccctgggcatggtagtagaagattagtagcctaaacataagttgtataagtagaggcgatccctgtttgacactctggaagcccacccnnccatctttaccatnncaaactttaatgtgcaaactaactacatgaggataaagtgcagactcaggttcaatgggtctgggaagaggcatgagatcctccgtttctaccaagcctcccacctgcccagtctgttactgngatccaggggccacacggcagctagaatgantaatgtggtgaacagaaataaacttctggaatcagaggctaggcatcaaatctctagaggtctccataacttcttcaacttcaccagggagcagattagactactgagtgttcaaatgagaactacgggctaacatctggtctgacttttgaaagcagtcagaagtctctgatcaaggagagagggttcacgtctcacgggga

SEQ ID NO: 483009 - DNA, 656 bp, Homo sapiens
agcggttgttaatacttgtgattgcattatgaaattcttgtggtgtgttttccaactctagccagtcaatttggttctgttttatactggctatttcaccgatcagcacctgaattattttttgtgtttgttccttagtgatatggtttggctctgtgttcccattcaaatcttatctggaactgtaatccccatgtgttgagagaggaacctggtgggagttgattggatcatgggggtggttcccccgtgctgttctcatgatagtgagtgagttctcatgagatctgatggtttaaaagtgaccgtcccccttcactctctctctcttctgccaccctgtgaagaagttacttgcttctccttcaccttcagctatgattataagttttctgaggcctcccgagcaattcagaactatgagtcaattaaatctttttcctttataaattacccagtctcagaagttctttatagcagggtgataacagactaatacacttagcttccttgaattaggtttcgatgttcccctgaatttcaatgatctttgttcctatctatattctgaaatcaatttatgtcatttcagccatctcagcctagttaagaacccttgctggggaaccagtgtgatctttgggaggacaggagga

SEQ ID NO: 483010 - DNA, 723 bp, Homo sapiens
gtgggctgtcaatgtgcaagaatgtgtctgtcaagggattgttcgtcgatggcaacgtttgctggtgacaggaaaaatgagccacacaactggaagctagtcatggacttcatccatgcatcagtgtgactgatccggtgagatcatccacggccaatataacgcgcgcggctactgccaccggttgattaggagtttgcacatccacggcgtacacactggcaggtgcaagtgttgcatgagctggaagggaataaggatccgatcggccgtctactggtagaaaaagagctgcgaagcatggctccctaacatttcctttggcacagtactgggttagactgactagcgacattcgtggggataactagcgggttttcccctgggaggcctaagggcccacaactggctggtggtttcgaccgaggctttcatctagtacttaataccacaccttctcgggctccgctctcatggcgtggttcggtgatgatcgacgacgagatcacgtctgcggcgtcggcgtgtcactcacaatcgtgcaggtgggacctacaggaacggcatgctggaggctgcgcgcaaggctctagacaaagctcattggtcccaagtaaaacggcgtccagggaaggggccataagaattggaacattaatttagattcccggtacacttagcccttgcacgcgactccccccaaggctcccttttacaaatcca

SEQ ID NO: 483011 - DNA, 475 bp, Homo sapiens
tagatgagcgttgtggacagccggaatggagggttcctaggagggtggaacactggggaggagcttgggaaggacctggaagttccccccccttccctcatatctcaccctctgcagctcttcatctagtgttcattggtatcctttctaatatattttataataaactagcaaccataagtaagtgtttccctgagttctgtgagccactctggcaaattaactgaacctaaggaggaggtcctgggaaccctaattcatagctggttgatcagcagcacaagtaaaacagcctggggcttgcaactggcctccaaagtcaggggcaggggcagttttggggactgagtcatcaacctgtgggacctgacgccatctccaggttgagagtgtgagaagtgaatcagattagagtgcacccactggtgtcagctgcagaatgactggttgcctggtgtgtgggggaaaactcatg

SEQ ID NO: 483012 - DNA, 768 bp, Homo sapiens
ctccccctctcgctctctccctcttcccggctccagctccgccgcagctccagcctttgctccccctcccaaagtcccgctccccggagcggagcgcactagggtccctcatccgacaaccacagagcaaaaagacggtcagaccagaagacacggagaggcacccaccagagaaccagctagccatcacgaatcagcgccatgaccgagggtaacccagagcatgaagactctacacgataccaggagagagcatcatacacaccaaaaacgccaatcatctaatgctacatgctcacaaagtctggaaggtcccaggtcgatagcagcccggacatttcagcgaagaagccaggagtccatagtaataagctcgtgcgtgtgcacctagccgcgagtatctaggacccgtcctgtcaccccaactaccagtctcagctcgtaccaacacgtgttcatgaaagcgtgcgcacctagcagtacgccctgacgtccctgacaaccgaacggacaccagggatgagcacgaaagaacgtcacacgggtgtcaaacgaggccaaccatgtaccgaaaaggggggaacgcccaatggaagccacgggtgcccagaagcgctgacacggcaccccgtggggctccgtataccccaaacaaggcccaatcacgagggacggcataccaaagagataaccaaacaccatgacggattcagccccgcggctggggcaagaacgcccgtcatgggacccaagtcgacaaggcaaaaa

SEQ ID NO: 483013 - DNA, 968 bp, Homo sapiens
agcgggttgacggctgcggttcgaagtggctgtgggtattgctgcggctggtgcgtcgtcgctctaggttttcttccgccgtctgtgacagcttcttgatctgtccccaggaatcctgctttttttttttctttgagacacggtctcgctctgtcacccttgctggagtgcagtggtgcaatcacagatcacggcagggtctaattccggggctcaagtgaacctttggcatcagcctcctgaatagctgagaccacagacagagtctcgctctgtcatccaggctggagtacaatggcacgatctcggctcactgcaacctctgcctcctgagttcaagtgattcggttgcctcggcctcccagaagctgggattacaggcatgtgccagcatgcctggctagtaataaggtattttacatagagatggcgtttggccctgtgggccaggcgggcctgaatcctgacctcaggtgatccacctgcctcggcctcccaaagtgctaggataacaggcgtgagccaccctaccaggatatgaaagatggaagtccagatagaagtaacggaagatattaaaagccaaaagaaaatgccctaagttgccgaagcaagtagagaaggcgtgaaataaggcacaggaatgtggaagcggctgaaagaaggacaatgggaagtagcgcttacccagcgggaatcagagattcaaacctaagaggcgaacataggatgaatacccaatgttgcccctaggagaagggtaaccactggaaatcaaaaaatcataacacgaaaaaaggagctcacgaagaaaacaggaaaaaaaggaagtggaaacacaggaaagtgaacgacaagcacgaagaagccacgcatagacaaggcaagagacaacaagaagacgagaacacgaggggaagcaacacacacggagagcgaaggacacaaaactaaaaagcagaacaaat

SEQ ID NO: 483014 - DNA, 633 bp, Homo sapiens
  misc_feature (633)..(633): n is a, c, g, or t
agttgtgtttacttgatttgaggaagaaaatatttgacttgtgtaaagagtagggtatcagggtgtcttttctgccggggagatgtgtatatatatagtattttggtgtatagtagaaaataagcttgtgcatctgtatttgagatatgttaatgacgtggagtaaagtcagctgtaagactctggaggcaaacaagttgtatatggttcatatggctctatggggaatttaattacctttctgggcactttttttttttttttttttttaaagtaagggggaaagggctcccatgggaaagtttcctaaatagactttccaggaaaaccgagagtcaaaattttgggtgatagtttggaaaatggagggagtagcttggttggggaacgcctttcggggggggggttcccggtggtcggtggtggtctggtgggtgctaactatatggtaatacaacgcctacagatattgggcgacataaaagaaacgctggtcaagaaaaagcgctggcttgctagcgaacgaacagacgcatacttaaaagtctcttcccctggagaactaccaggggggaggggggcgtaaagcatccacatcttcagctagaatacactcgggacaataaacggacn

SEQ ID NO: 483015 - DNA, 133 bp, Homo sapiens
tacgtcatactgcacacgccggcacacgccgagtacccatacctgtgtcaccaaggaggtctgtatggacgaagcaacaacttcgtccacacagacctaggcctggctcgctctgtttggtctgggcactcgg

SEQ ID NO: 483016 - DNA, 329 bp, Homo sapiens
agctaccactcacccactttatgagaatgatcttctgtcttcctgtggagtctgaagagtcatgggcaagttcttatcaggtctaaagctccactctcctttgcattgcattacctggtctctttggctttgggggttcaaggaattactttgacctattagagaatttgaccttgtgtatgcaatggctggtgggtcactggtgagggctgcagttttggaggtagctgacagtggttgcaattaatagttattactgtatgtaggctacttgttgctttgctctattctataaaacgggcatagttgaatacatggagctgtggaat

SEQ ID NO: 483017 - DNA, 877 bp, Homo sapiens
  misc_feature (127)..(127): n is a, c, g, or t
  misc_feature (275)..(275): n is a, c, g, or t
agcgggttattgctccaagacatggctgcagcttcccagggaggagcccacggagccatactccatacactgcagtcgcatttcgcctcacgtgccacgcctctttatagacagattcgaaccaggncacgcgctgctctcatccagctctgcccatccttaggaatcgcatgaagtctcgccacaaggtgcactgtgttcgtgaatagctttgcgtttaaaggggacccactcgccagggcgcacagagagtgaatgcccagtggagaggaagnagacgtgagacaataattacagaggagttcattgaaaatgatgaggatgcacgacactgggcaagacagaataagaactcaaaggttcgaagcacgagccagagaaagaaacagccaccaactgctgtccccaaggcaaatggtgtccgaagaaatcccaccttggcaaaccccaggagcctgtgcaggaggagccctaagacgccgcgctccgtgagtatgacagtccggaggcccacggagagagctggtcgttcaaaagagcctgggcaggccaggcacggtgactcacgtctgtcatcccagcactttggaaggccgaggcgggtaaatctacctgaggttgggagttcacagaccagcctgaccaagcatggagaaaccccatctctactaaaaatacttgacgaattagccaggcgtggtggcgcatgcctgtaatcccagctaacttgggaggctgaggcatgagaattggttgaacctgggaggtggaggttgcagtgagccgagatcgggagcactgactccagcctaggcgacagagcaagactccatctcagaagacaacaagcagaagaaaccaaaatcttccgagccgt

SEQ ID NO: 483018 - DNA, 553 bp, Homo sapiens
  misc_feature (135)..(135): n is a, c, g, or t
  misc_feature (147)..(147): n is a, c, g, or t
  misc_feature (271)..(271): n is a, c, g, or t
aggagagtacatggggttcgtccttcccttgcttgcagaacgggattccttcattagtgccaggaagcctccacccagtgggggaaattaaagtccccagagacagactgggtggcccaagcccactcctgccantggctgccccantctccttgacttccccacactgtttttagcaagagaaggaggtgactttgacctgaggcctgtcttcgaaaggaagaagggacttgagaaggcaggaaagtgtcattcatctggatctcacccntcaggagtgagaaggagcctggggcagctataaactcatgaccacaagaaaagggggaaccattatcttaaataccaagcgctgcagggaaaagctgacaactggtagctccctccccaccgccaattataaaactttctttggcttaaaagaaactcttttgcggccgggcgccggtggctcacgcctctaatcccagcactttgggaggccgaggcgggtggatcatgaggtcaggagatcgagacgatcctcgctaacacggtgaaaccccgtctctac

SEQ ID NO: 483019 - DNA, 418 bp, Homo sapiens
  misc_feature (395)..(395): n is a, c, g, or t
  misc_feature (407)..(407): n is a, c, g, or t
tagagactgggtttcatcatgttggtcgggctggtctccaactcctgacctcaggtgatccacctgccccgccccccaaagtgctagagtgcaatggtgcaatctcagctcactgcaacctccaccccccacccccacaccccgttcaagtaattctcctgcctcagcctcccaaatagctgggattacaggtgtccgccaccacacccagctaatttttgttatttttagtagagatggggtttcactgtgttggtcaggctggtctccaactgttgccctcaggtgagccactgtgccccaccttttcctggggtttcataaggatctggaagtggtgggattccttgtttttgctagtatctcatttaggagttggagatgggaccttaaantcatctgttttnaacttcacttt

SEQ ID NO: 483020 - DNA, 515 bp, Homo sapiens
ggccacccggcctataaagtacgtttaattaaaaaaacagctttgttttaattaaaaaaaaaaaaaaaggccaagcacagtggctcacgcctgtaatcccagcacttcgggaggccaaggtgggcagatcacctgaggttgggagttcgagaccagcctgaccaacatgaagaaaccccgtccctactgaaaatacaaaattagtagtggcgcctgcctatagtcccagctactcgggaggctgaggcgagagaatcacttgaacccaggaggcggaggttgtggtgagtggagatcacaccattgcactcagcctgggcaacaaaagcaaaactccatctctaaatagataactaactaaataaataaataaataaaataaaccaaaatgaagacaggtacagtgactcacgcctgtagccctagctattcggaggctggggcagaggatcgcttgagcccgggagttcaagtccagcctgagcaacatagcacaccccatcctaaaaaaaaaa

SEQ ID NO: 483021 - DNA, 265 bp, Homo sapiens
catcggcaaatcagatctagcaactacacatcaagctcaaagaagtataagggatgctatctcactgacgaacatacctaatagcttcgataactactctatgctgcttgaaaagctagaaattccaaactccaagaaggacaaggaaaacaagaatcctggttgcactgctgttattttgcatcgaatcaaaactctgggttccatgctgtcatttgttaacaaagcggcagtgttctgagcaaagcgcatgaggcctaatacc

SEQ ID NO: 483022 - DNA, 105 bp, Homo sapiens
cataaaataagacaaggccggagggggaacaactatggtatggctctatgtccctattcaaatctcatcttgaattagtactacctatcaggtatgaacacacag

SEQ ID NO: 483023 - DNA, 154 bp, Homo sapiens
agtgtacccacaaacagcgtataaccagtggactgtgactgttataattaaggagatttgtaaggagataagtatagcagaggtagagtatttcctcgtgatagtggttcactggataagtggcgtttgcttgcctgtttgtggaggtagcact

SEQ ID NO: 483024 - DNA, 622 bp, Homo sapiens
ccacgcgtcgaaaaaaaaaaaaaaaaaaaaaaaaaaaaaaaaaaaaaaaaaaaaaaaaaaaaaaaaaaaaaaaaggggggagcaacaaaaaaaaatacacaaaaaaggaccagagaaaaaccgacgaccacaaatgtaatagtaggcgacaacaggggacgcccaaaaagagaggcgcataatataaaaaccgaacaggcagcggggcgcggagtgtaaaacaacgtgcaagcgcggggaacaacgcggcgcacagaggagactctgtgtggaagagggagagcagacctcttatttctttgtgggcgggggtggaaaacataagtagtgggcgacacacagtatcctaccttagaaagagatatattatataaagcctgttgtagagggaaataatattattcaaaattattaaccagaagaggtgtttaataggggggtaaaacaaacaaaacggagcataatatggttgaggaggagggtaagaaaaattatgaggggaatacaagggagagtatatgtgaatttatgtgaaaacatttatttatacccaggggatagtatttgtgaaattaagagaaaatgatagaacacgggagaaaaaaaagaataaagaaaatag

SEQ ID NO: 483025 - DNA, 1002 bp, Homo sapiens
gacccacgcgtcgcggacgcgtgggtcgacccacgcgtccgaaagaaaagaatccccgaagagggcggtttgtgatgctcctgccatcgatcaacgtcacaccacttccgattgctagtccgcaacgcgccttgcaacccagtaggccagtttccatagactccacgccgttcctccaggaattatcgggggtgaatatgaccaaagaccaagcacttccctatgtaggagacccaagtcagttcactcattcctggtcctggggagacgcccagccagtttcctccactgagaccacgctttgatccagttggcccacttccaggacctaaccccatcttgccagggcgaggcggacccaatgacagattaccctttagaacccagcaggggtcggccaactgatggacggactgtcattcacgtgattgattagtaatttcatttctggagctccattagtaagggtttctaaactacagatgtcaactccttggggtgctgatctcgagtgttattttctgattgtggtgtagagagttgcatcccagaacactttaagagatacattatagccacataggggtggtatgaccaaaggttcctctgtgacaaggtaggacttgggaatagtaggatgacaatatcactgcttcttggtacatctctagatcgcaagtagacactgactgctgaacataccaggataaaagaagtgtaatacaacacaaaaaaaagggggacaacaaaagaaacaacaagggcccagacaacagacccaaaagaggaccacaatggaccaataagaagcgaacagcaagccccggccctgaccacccattccccaaaccacacgcggacacaggcaagcatacacgcggcaacgaacccacatcacggagtccccaaaggcaacaccaaggagaaaacaaccagagaccacaacacagccaagcgcgacccacgcctgcgcgccaaaatcaccacagcgaaatgccactc

SEQ ID NO: 483026 - DNA, 385 bp, Homo sapiens
cagtcaacggggtcctatgccttttacgatcccgactccagcatcgtctacctgttgtggcaagggcgacagcagcattcggtactttgagattaccgacgtagcctgcctttcgtgcactacctgaacacgttcagtcagcaagatgagccgcatcggtgcatgggtttcatgcccaaaaggggactggatgtcagtctagtgtgatatcgcccggttctactatctacacgagagaaagtgtgatcctatcatcatgactgtgccccgctatacctcttcctggacgatctgtacccggatacgccaggcccggagccgtccctagacgcggtcgaatggttatccggccaggacgccgaacccgtgctcctttcggtgaagg

SEQ ID NO: 483027 - DNA, 211 bp, Homo sapiens
aggtttggttccccccgttcccccccagggggggggggggggggcgtctaaaacagaccccctccttttcccaacggggttccggagtaacggttttggcgaggggcctttcccaaccccaagggccccatagttttttttttttccaatacccccccgtccctccagtttttcagtttttttaaaaagaggagggggggaaaaaggggga

SEQ ID NO: 483028 - DNA, 235 bp, Homo sapiens
ggcagcgatgctgtggtcgatctgaggatccccgcggcgcagctgcgagccccagccaaaggattatggggacgtttgccaggactgcattcatgattgtgactgacatccagtactgctgtacggaccaatctccacctttgtccaggcctctgatggaacatgtcaaggagtgagtgtgaccgcctgggcccttggcagtggctcgacatatgtccagaacttatatcagacc

SEQ ID NO: 483029 - DNA, 292 bp, Homo sapiens
ccccacttgaggcgcgttctggtaggagtcactagccaatttggacaggtcttgcacgtacgggcccaggatggggtgctcccgagacccgcagagaaccccgcactcttgcgggttcaatgagactctcgctatcccgctcacagtactatctccagtataagcctcaccttccacagtagttaggcatacgctgtagtcatctctggcttctcgactaagcgcatagcagacagcaggtccttcacaagaggctggcggcactgattgcctctgtctgccccttgggctc

SEQ ID NO: 483030 - DNA, 257 bp, Homo sapiens
gcggcgtctagcatgatgaaatggataacctgacacattatgctgagtgagaaaaaccacacacaaaggcacaaaggccacacattgtatgattccatttatactaaacgtccagaacaggcaaagccatagagacagagagtaaattagtggtttccagggactgggggaaaagggtaatgagtgagtgattgctaatgggtgtgggatttcttttgggggtgatgaaaatgttctgaagctagattgtggtgatg

SEQ ID NO: 483031 - DNA, 427 bp, Homo sapiens
ggtcacattttggagactgagctgagcaagtgctggtcacattttggaggactgagctgagcaagtgctggtcacattttggagactgagctgagcaagtgctggtcacattttggagacagaactgagcaagtgctgctcacgtttcagaggactgagctgagcaagtgctggtcacattttggaggactgagctgagcaagtgctggtcacattttggaggactgagctgagcaagtgctggtcacattttggagacagagctgagcaagtgctggtcacattttggaggactgagctgagcaagtgctggtcacattttggaggactgagctgagcaagtgctgatcacattttgaagactgagctgagcaagtgcttgtcacattttggagacagatgagcaagagctggtcacgtttcagag

SEQ ID NO: 483032 - DNA, 1303 bp, Homo sapiens
  misc_feature (382)..(382): n is a, c, g, or t
gcaggctggttgcttggtgtggaatcctaacgtggctggttttgagactggagtgagaccccagtcctaggctgctggttctttctcattatagaggagacggattcagataggggctacatgcaccacaggattgtcagaagacagccgagatcactagtagaatagagacgtctagtagagttaacgatctcctgaatgaggttgcataagttgtttataacttcctaagcccaatgatcagcgaaggcacttcctcgtttacttgcccatcttcctaacaaggctatgaggtgattagacagtcagcgatggagctgtgaagaggataacattcagcagaaggagtacagagtcacagacctccacgagggtgcaaagncctcatgcgtcggcttttagagtcgcggaatcgcagggaattaccggaaggatggagtcggacatggagtgactccacattctagaatacactgatttccttgacttgcggggcattgattgcattgtaccttggatcgggacgtgatcggacgtctccctttcgtgggccaagtcgaggactctactcgcccacactaggcatggaaccgtcattcgagtcgtttttagccccgacgtatgggcctgtctggcgacatgtactcaatgggatacctggcttgccccctgataacagatacaagttacaggttatcacccaggctcgcaacaattgcagtatggaacccgtgtgaactccatggtactcgcctggaaagccacttcacttccatatgcagctcgatacgttattctaacctccaccgcagaaatgttcccagtccgaaactccgttgcgtgaggcgtccaatcccttttggcgcacttgtggccccccacggttggccgcgctagtgggaatgcccgtctctgcagccaaatggctagcgggcttaggacgggaccgcaacggcgggctccgacagcccgataccgtacccggacggccaactccagaaaccccctgtacggcgaagccatgccgccaaccatcctagcgcctctggagcaacgacgaacacttcctctaacggcaaggccacctcacatgacctcagcccccacagccagtcctgcgcacacgttacaccccagggcacaggcacagactggcatcgcaaacggacgaagtaccgcacacagccccttcggacaccagctcgcaatctgtcggaagcccctctccgggaaaactacaccccgtggcactaaagagcaaccccccatggagacacaggatgccacgcacccgcccaagggc

SEQ ID NO: 483033 - DNA, 119 bp, Homo sapiens
cagaggagagctccaggagagggcagctctgaactgctggctgtacagctcagtaggaacaggtgagaggaagtcttctgaggcagtgggctcgacgccagtagcctcctcggcgtaca

SEQ ID NO: 483034 - DNA, 218 bp, Homo sapiens
  misc_feature (8)..(8): n is a, c, g, or t
  misc_feature (107)..(107): n is a, c, g, or t
gagcctgnaggaagcccagataggcatcttcacgctgctgcacttaacttgcctttcccataaaaactgttgagaggaaaatagcaatgttatctagagcctaaagncgaaagatgccaaatccatgcttgctactccacagttcctttatgaaaagtatttcttatagccaaatatcccaattctttgtaccacacatgactaatctcgctactatt

SEQ ID NO: 483035 - DNA, 240 bp, Homo sapiens
ctttcctgttcctcctcctccttgaggtgtgtcttcgtggttccagctgttgagtcctccgtcatcaccttcatcttcctctccagagctgaggctgatgttcattgcctttgctctgttctttcagcttcttggccacctttcgccgaagtttagttctccaggttatagtagcgacctgagctccttgcgccccaacactctgatgtcctgaccgcacacccgttctgtcctcagtgc

SEQ ID NO: 483036 - DNA, 211 bp, Homo sapiens
agacacaatcctggtcacgttgaagttggccagtcggtgaccaccattcccactgtggttttcaacggtggagacggtgacttacaaagaatgtcacgttcaacgtatgggatgtgggcggccaggacaacgatccggccgctctggcggcattactacactgggacccaaggtctcatcttcgtaggtggactgcgccgaccgcgaacgt

SEQ ID NO: 483037 - DNA, 971 bp, Homo sapiens
gacgtgactattctctacaaaccacgaaagaccattggaacaactatacctatattcggcgcatgacgctggagtcctagcacagctctaagcctccttatacgagccgagctgggccgaagccaggcaaccttctaggtaacgaccacatctacaacgttatcgtcacagcccatgcattagtaataatcttcttcatagtattacccatcataatcggaggctttggcaactgactagttcccctaataatcggtgcccccgatatggacgtttcgcccgactataaacagacataatgcttctgacatcttatgcgcccctcgtctccgtactccatgctctgcatctgctatagtggaggccggagcaggaacaggttgaacagtcttaacctctccttaacagggaactactccacacctcctggagcctccgtagacctaaccatcttctccttacacctagcacgtatctcctctatcttaggggccatcaattttcatcacaacaattatcacatattaaacccccatgtccataactcgcaatatcaaacagcccctcttcgtcttgatccgtcctaagtcacatgcagtcctacttcttcctaatctctcccagtcctagctgcattggcatcacgtaatactatgtaacagaaccgccaagcgtcaaacaccatgcttctttcgacccgacggaggacgaagaacccccattctataacaagaatcctatctctgaatttttccggtcgacccctgaaagatttactattccttaatccgtaacagggctttcggaaaaaatctccccatatttgttaacttgaactactccggaaaaacaagacaccctctgggataccatacgctcttgggtcctgagctattacacaccacagtgggctatccacagggtttcatccgggtggagacacacgcacattttttcaggtcggcagtaga

SEQ ID NO: 483038 - DNA, 611 bp, Homo sapiens
ttgagaaagaaatagtggtttctatttacaaatttcaggtgtctgtccacattttgcccatggcctcactttatttttgagaggctctgaaacggattcaatttctctgttcatgaatcgatacaaaatcgtaaggcggttgggacttgtaaacgacatcaatacttggggtgtatgggtagaatcaaactgagaagggcctaggtttgtggcagcagagttccttactttctctctggcatcattaaaactatctgccacgtaatgcaggggctggaacaccgtgacagtgtaattctgaacggctgtcttatacaggtgcattgggataagctatgtcttctctgataatcagaggtgtaatacaccatagcatgacataagcacagctccatatgcctttatagagtctcagtgtctgcagagagctaactacacagtgaatcagtacattgtgtcgagcttagcaatgtattcatagtgtgagtccagaaaggcaagtgcaatgtcctggcagaaatgggcaaagctgagatctgaaagctagggtagatgagcccactgctcatgtcagctcccagttgaggggtatgcgtcgacctgtatacatg

SEQ ID NO: 483039 - DNA, 700 bp, Homo sapiens
gaagaagtcggcagcagccacctcaccagccccacacttgagtggctggacccctgctgggcactgtggggaagtgcgcctgccactgtcactaacctactggtgggcacccctggggtatggggtgcccctgcgccccctgctgtccagttcattgcccatgggtggcccctggtggtgggaccactgcgtggctcaggagcagtgtgctgggagttggcccaattgggccagtacccctgggcatcctgcaaacagtgtgccctggtgcaaggctggtgggaatcacccagtgtacagtacatcctgcccacgctgacccagacagcttcatgtgtggcacctgcgcccagcaccatgcccctgggaccaatggcagctggctcccatgctggcccgtgcaccacaccaccagcatccgtttcaccctcccactctgggcacttccaccgagctgggcaaagtccttggcttgccacttggaacccccaagggtcccttggggcagattcctcccaattcctttggcatgtcctttgtaacccgcttcccggggcatggagagagcaggagaggggccagcaacaggatagcacctgggtgcgacagagcaaaaggcgaaaaacagaacggcgcaggacgagcgagagggagagggcgaggcggagaagggcagagagcgggagagacgacaagggga

SEQ ID NO: 483040 - DNA, 333 bp, Homo sapiens
  misc_feature (132)..(132): n is a, c, g, or t
ggggtttaaactttttttttcccggttttaatttgggaataaaagggggcccctttttggaaaacgggtttaaaaaaaaatttaaataaaatatttaaaaaggaaaaggttcccagggttttttggaaaaanccctggtttcccccggggaaaaaaaaaaaagggtttcccgttttttaaaaaaaaaaaaaatttttttttttttaaggaaaggggcaagggttaaaatttggggccctccccaaggggggaaaatgggaaaatttttttttaaaaggaaaagttaaaaaggtgtttttaaaaacttaaaaaaaaaaatttttttccggggga

SEQ ID NO: 483041 - DNA, 310 bp, Homo sapiens
gtcgacggtgacgataaacagcaagaagccccgtgcaatcagcgccgaacgatgcaggtcggtataggcttcgctgaactcgttggcgatgaccgaagcgatggagctgcttggcatcagcaaggaggccgagaactgttgagcgttacccagtacgaaagtcaccgccatggtttcgcccaatgcccgtcccagtccgaggaaaatgccgccgaccaccgcagagggatgtaaggcaggacgatgtcccagaccacttcccaggtagtgccgcccaacgcgtaggcagactctttgagtggcgtgggaa

SEQ ID NO: 483042 - DNA, 394 bp, Homo sapiens
  misc_feature (22)..(22): n is a, c, g, or t
  misc_feature (57)..(57): n is a, c, g, or t
cagtctcattcctccccagaantaaccttgcttcgggtgcgggggttgggtgcattntcaataaaaaaaacttatttgtttcatttttctttcctgcggggttttcttcaaagcaacacgtccttggagctctcttggcaacccaaaggcttttccctggaaaagctctttcttttcctaaagtatccgaggcccacttctgcaacacctggttggcgagggctttcttttttttaatatacgctcgcgcgtgggtcgccggtcttgacagagctctgtgttttctcagcttcacacctccaggttgtttctccagtgggttgggttttcatacagacgtaaattttgaaagaaaagtcaaaggtgcttcagccttgtactgtgtatatatatt

SEQ ID NO: 483043 - DNA, 563 bp, Homo sapiens
  misc_feature (319)..(320): n is a, c, g, or t
  misc_feature (333)..(333): n is a, c, g, or t
  misc_feature (414)..(414): n is a, c, g, or t
  misc_feature (456)..(456): n is a, c, g, or t
  misc_feature (458)..(458): n is a, c, g, or t
  misc_feature (481)..(481): n is a, c, g, or t
  misc_feature (546)..(546): n is a, c, g, or t
  misc_feature (549)..(549): n is a, c, g, or t
agggggctacgagccgtcttccctgagagatcgcccaaacccagcgtggcggcccccgcttctttttcccaggaccatccagagagcccacactgaagatgaatgggggtataaacaccccacgaccgcccaatgtagaaagctgccctggcccctggagaaaaagcgtgagacccggccccttttggatcattctaagcccactgggttcttgccccgccaccggagcacccccatcttcttgtgacttctcttggagacattaccttcctagatgaggaaatgaaagcttatccagaaagaatgggtgaccaccctnnagcccaacctccnccacggctgggtggccccgaaggctgggctgggcgaagtatcttttcgaaaaggctcaactctccagcaccgactaagaanccttttgagcccacgcgaacttttgaagggccccttgccaantnaatagggcttctgcctaagcctntccctcccgacccataggcagacttttttaactatccttaccagaccttgggcccaatgggaatnaanctttttgaagccca

SEQ ID NO: 483044 - DNA, 257 bp, Homo sapiens
  misc_feature (78)..(78): n is a, c, g, or t
aggcaaaggtcagattggtttaggcaaaaaagatcttcaaactattcttatgacagaccctaaactctaagttttgtnccacagaaataatttactaaagagagacgtcagctgggaggagccaacaaaatgctgagtaaatcagatatgacctcagaaacaaaatgaaaattactttgccttcatatgtaaaacagtgtatttttaataaaataccccatacatttcttggcagtgaatttcaaaactctaaactg

SEQ ID NO: 483045 - DNA, 132 bp, Homo sapiens
  misc_feature (54)..(54): n is a, c, g, or t
ggctgggtgactctagcggagcttattctgcaccacagctggaccagatggtancctttgacaggacatctagggcgcgaggagtgcgcaagcccaagctgttctacgccgaacaccccttcatcttaccta

SEQ ID NO: 483046 - DNA, 477 bp, Homo sapiens
atggccaacattcagagattgcatttcatgaaaggactttggaaatatctgaaatttggggaaatgtacttaggaggtggggtcagtaacagtttaggtcttatatacacaaggacaaaatttcaccctcctcctagaacattagggagatggattaatgggagagatgtgactcaccaagggcaatattacatttataaacactgaaagaatatactagtttagaaagttttatcatcagccctgctttttcagatgtttttattcttgcattttttgcacatttttattatttgctaatgtaattctcctttccaaagaaaatctgacttgcttaaatgaatgtttaaagaagttaaaaactgcacagtggaatccacatttaagaaacccctttatgggcaaaagtatttgtctctttctcaaacagaaattttatgttgctgttaaaacaaaagtggcttgatttcttagata

SEQ ID NO: 483047 - DNA, 426 bp, Homo sapiens
  misc_feature (240)..(240): n is a, c, g, or t
  misc_feature (265)..(265): n is a, c, g, or t
  misc_feature (337)..(337): n is a, c, g, or t
  misc_feature (363)..(363): n is a, c, g, or t
  misc_feature (393)..(393): n is a, c, g, or t
  misc_feature (422)..(422): n is a, c, g, or t
cattccattccattccattccattccattccattccattccataccattccattccattccattctattcaggttgattccagtccattcctttctattccattccattccattcaattccattccattccattccattccgttccattccattccattatattcctcctgagttgtttccattgcatcccattccattccattaaactccattcctttccattacattccattccactngagggggggcccggtaacccaattnggccctatagtgagtggtattaacaattgactgggccgtggttttaacaaacgtcgtgaatggggaaaaccnggggcgttaacccaatttaatcggcntggcaggcacattccccttttgggccagtngggttaaattaggcggaaggagggcccgnaacc

SEQ ID NO: 483048 - DNA, 508 bp, Homo sapiens
ctggagattccgttagtctctgctaaaaatacaaaaattagccaagcatggtggcacaaggctgtaactccagctactcggaaggctgaggcaggagaatcgcccgaacccaggaggcggaggctgcagtgagctgagatctcaccacggcactccagccctgatgacagagcaagattccgtctcaaaaaaaaaaaaaaaagggtagagacgggattctcactatgtggcccgggcgggtctcagaggggctcaacatattcctcccacctctatctcccaaagtgaggggataacgggtgtgagccatgtataccgggtttaagatctagatataaatcaaaagatagggtacaggtggttgggtgtcttttaatggtgggttgtcatggttgggtattggatgtggccttcttaaagggaaaagggggcatctaataaggggtataattccatattcttaaacttaaacgggttaataggggaagggtcctaatacattttattt

SEQ ID NO: 483049 - DNA, 682 bp, Homo sapiens
  misc_feature (10)..(10): n is a, c, g, or t
cacgctggcnggagcggcgcgacttcctgaaggtccgggattggccggagcgcccgccgctcacggtcaggggttgccggatcccgtccgcgggcgatgctgctgcggagggtggtcgagggaggccgggcggtagccgccgcggtccgtggctcggcaagtaccaggacgggtcttggcagcgccgaagggcacgtccgagaggccgctgtccgggggcccgcacgtaccgggaggagccccggcccctccacccgcatgtggggacggagccgggaggatcgcgcgctggccgccgccgaaggacccctcgctcctctcctccatcggctcttaccgagtccccgccccggaatctgtggaggggccgcttagccttgggagaggaagcagcccggtgaacggccactttcctgcatgagtggctgccccaactgcgtgtgggtggagtacgtggctgatgagaacctcaaggccttcctcaggatggagatccggctgcacaccaggtgcggaggctgagccatccctgctggactccctaccgcaggacggagtccaggacgcagccgcagcctccttccttcacaccccctcacagactccttgtgtccaacgggaataggaagaattagttactgacttcacctgagaaaaaaataaattctctatggtggtttca

SEQ ID NO: 483050 - DNA, 116 bp, Homo sapiens
tctagaggtctccaaacacgcatctggactggatagcatatcgctgaggtcaagggccagtatgaggagattgcgagtgctgtgggcgtacggagagcgagttcgtggtatctagg

SEQ ID NO: 483051 - DNA, 489 bp, Homo sapiens
aaatgtgtggtaaggtggggggcatccatatagtcactccaggtttatggagggttcgtgtactattaaggcttttcacttcgaaacgaaggcttctcaaatcatgaaaattattaatattactgctgttagagaaatgaatgagcctacagatgataggatgtttcatgtggtgtatgcatcggggtagtccgagtaacgtcggggcattccggataggccgagaaagtgttgtgggaagaaagttagatttacgccgatgaatatgatagtgaaatggattttggcgtaagtttggtctaaggtgtagcctgagaataggggaaatcagtgaatgaagcctcctatgatggcaaatacagctcctattgataggacatattggaagtgagctacaacgtaatacgtgtcgtgtagtacgatgtctagtgatgagtttgctaatacaatgccagtcaagccacctacggtgaaaagaaagataaatcc

SEQ ID NO: 483052 - DNA, 233 bp, Homo sapiens
gacaccgcaatctcaataaagggttcattgcagccttgactcctggactcaagagatcctcctgcctcggcccctgagtagctaggactacaggtgcataccaccatgcccggctaattcttacacattttagtagagaggaggtctcactaacgtacccaggctggccttgaactccgtgggcttaacgctgtcctcgcaaccttggtccatgccgaaagtgttgggattac

SEQ ID NO: 483053 - DNA, 428 bp, Homo sapiens
  misc_feature (8)..(9): n is a, c, g, or t
  misc_feature (388)..(388): n is a, c, g, or t
  misc_feature (420)..(420): n is a, c, g, or t
  misc_feature (426)..(426): n is a, c, g, or t
gttgaaannagttatatactatatgttaacaatatggaggctgggcgtggtggctcacacctgtaatcccagcactttgggaggcccagactggcggatcacctgaggtcaggagatcgagatcagcctggccaacatggtgaaaccccttctctactgaaaatacaaaaattagccagacgtgatggcacatacctgtaatccaagctgcccagggagctgaggccggagaatcgcttgaacctggggaggtgggaggttgcagtgagccgagatcatgccactgcactccagcctggggcaacagaggcaagactccatcttcgaaaaaaaggaattcctcttgggcagatacttgaagtttattttgaaaatttaatttcgtccnttttttcattgtaatattttcagggttaccantttccntt

SEQ ID NO: 483054 - DNA, 401 bp, Homo sapiens
ctaaccacggtcacccccatggcagccacacccgggctccgacggcgtatgtctatgcaactcattccagccaccctcagcgcaaagccaacagtactgctcacataaaaggccagcccctgccccctccaaaaaaagacagctcctaccatcccagacactgcaaaggaccatactcttacccaggatctactggagcagctgttggagcccatgacgcctgtggggatgcgagaagcgctctaatagccaagacgcagattcgacctggaagctctggggcccctgagaacttgacattcaaggaacgccagcgtctttcctcacacggtcaagaagtgtcccatagagtgaaagcttctcgtatattaacagaactggagaatgaactgtacacgtgg

SEQ ID NO: 483055 - DNA, 244 bp, Homo sapiens
tcaatccacagttggttgaatccacggatgaagaacccaaggatacacaaggccaactgtatgtggaaattttaaaaatatttttctggctgggcacggtggctcatgcccgtaattccaggactctgggaggctaaggtgagcagatcactccaggtcaggagttcaagaccagcctggtcaacatgatgaaaccccgtccctacgaaaaatacaaaaatcagctgggcgtggtggtgtacac

SEQ ID NO: 483056 - DNA, 211 bp, Homo sapiens
aggagttgagacaacccaggcaacatggtgaaatgccatctctacaaacaaacaaccaaacaaaaaaacaggtgtggtggcagatgcctgtggtctcagttactcaggaggctgtggtgggaggatcatttgagcccagtaggtaaaggctgcagtgaactgtgatcgtgtgacagactccagcccgggtgacagagtgagaccctgcctc

SEQ ID NO: 483057 - DNA, 1385 bp, Homo sapiens
  misc_feature (80)..(81): n is a, c, g, or t
  misc_feature (84)..(84): n is a, c, g, or t
  misc_feature (536)..(536): n is a, c, g, or t
  misc_feature (791)..(791): n is a, c, g, or t
  misc_feature (944)..(944): n is a, c, g, or t
  misc_feature (1102)..(1102): n is a, c, g, or t
  misc_feature (1177)..(1177): n is a, c, g, or t
tcgtgcgtgtgtgtgtgtcgtgtgtgtggttggtgtcgtgggtggaggaggggggatggtgggcagacgaggaaaaaaanngtngggctacgtatacttttccgtatgtccctccctttgggtctgtgttgtcgtcgtgtttggtcttcgtccgggctctcttcttgtggtgtgtcttgcctgtttatgttatgttcggtgccgttgtgtggttgttgttttcctctcctcttcctctctcctcttgtgtgtagtttattctgtcgttctcccccgccgcgttgtgtgtggttgtcgcattcactcgctgtgttgcgtcttgatgtgttgtttcacccacgagccgcccgtgcgggtgtcgtgattggtttgttctgttgtgtggacgagagggtgttttttcgcctcctcttcgggcggcggctttgttggtgatcattctctgcggggcgcgtcttttctctccgcctaggaatgtttttgcgtccgccgcttcttggaaggaagcacgcctttgctttggctctgtcacacgncgcgtggtgtttgtcatagaaggtgagttgttcgcccccccctcccccccgccccccgtgtgtgtggtttgataaaatacggcctcctccccgcaaaagccgctgaggaaagatgggggcgcattttctagatggagaacttcttacggctcgtctggtaagacatgttgggcggcgcacgctcaccgagaggggtgtgggaacacatctcttgtccccccctcgctgagtctgtcccccacgtacggaacgtgngggctgatctaagaaattgctctttatctcatggtgactcaccccgcccgcgcccggctcctcttggacccaagggtatctctcggggcgctctctctacgagagagagatacatacagaagactcttcgtctagacaccgcccctctatttntctcgatcgacagagaggtgtcctctctatatcgcgcgtttgctcgaacagcctggggagcccccccactcactctcgcgatagagcccccctctgtgtgagacatatagtgacaaaatatttgtgtgcatatgtctatgtctttttcgcgcgccccncccacgaggctccccgcctgggttactttcagaaaagacatgtgcggctccccggtgaccaactcacagtgcggngaaactctcacatagtgcggcccccccatagatatatcccgcgtgacctatttatggtcgcacacctccattctctttggaatctgtaccgggttctcctcttagcaccccaccacccagcttgtctatgtcacccatgtgtctctaatgttacaatgcgaacaaaatactccccgtcctttgatacacaaacaatagaacaagaaaa

SEQ ID NO: 483058 - DNA, 114 bp, Homo sapiens
ccccagcatccatgtaccgagtgtccggcaaatgaaagcttccagccctggcatctacgggtctccagtgaaggcggccacctggcagtgctgatcccaccctgcaggacagga

SEQ ID NO: 483059 - DNA, 109 bp, Homo sapiens
tataggtgtagagcgtggtgcccagctgacaaccagaactttccgcagaccttgttgctttatggaccttgggtatctctctgcagtgtcaatgccatcctagaccact

SEQ ID NO: 483060 - DNA, 105 bp, Homo sapiens
  misc_feature (25)..(25): n is a, c, g, or t
  misc_feature (98)..(98): n is a, c, g, or t
agggccactcccaaagaccagctgnatcttgtgttctggggtttaggaagttggttgctggagatggtctgtttaagttttagttttagaatttccanggcgaca

SEQ ID NO: 483061 - DNA, 422 bp, Homo sapiens
tttttttttttaagataaggtctcactccattgctcaggctgcatgagttatactactacaaaagttatactacttgactgcatgcgggtaggggggggggatagtgtgagcaccacaacccttgcattgttcaagagtcaactacactttaagaatgaatttaattctatttctcgataaagctgttattaaaaattgtatagtcattctaaattttgaattatgctaattaatctaactctgatatagatatcaaagttttgttgcagttgttattttaactcaggtacttggaaatgtaaatcaatatttcaggtatcccagctcctacgaaattctaacatctaatttcaatttctctccctgcaatttaattccactcaaccttgaggtcgacgcggccgcgaatttagtagtagta

SEQ ID NO: 483062 - DNA, 149 bp, Homo sapiens
gcacatactggggcctggtcacatgtagacctgagctgagactactctcccagcgggtaggggatgcttccagccggatatacatctctccaaatgaggaccagtaactgagaagtagctgaggagaagcaatgccaaaggtgacatgg

SEQ ID NO: 483063 - DNA, 275 bp, Homo sapiens
ctgtcttcagtatcacatagcatcactgctgcttccggtccgcccttctggtgtcttgattgtgtcttggtgaagggaggacatgttggacaatgtcatcttcacatgcaggtggccagaagcatgaggcacacccctgctgctttgccggggttccagtcatcgtcatcgtcctttcctgttctgtgtggtttgtgtctgtgtgtggcttggtgcctgatcgtgtcgtgctcgcttcgcatcacaggtgctggtgtgctcggggggccgatcct

SEQ ID NO: 483064 - DNA, 191 bp, Homo sapiens
gatggtagattggcagcttgacagcatgaggttatggaagaactaaaaaacagttacaactaaaattttgtctttctggaacaatttgttatagaggttacagtttacatcgattataactgcatcataatataaagataaccatgagtattaatttaaagaccttatgttcagtatgttatttcatgaag

SEQ ID NO: 483065 - DNA, 881 bp, Homo sapiens
tgcggtggctcacgcctgtaatcccagcactttgggaggccgaggtgggcggatcatgaggtcaggagatcgagaccatcctggctaacacggtgaaaccccgtctctactaaaaatccaaaaaattagccaagcgtggtggcgggtgcctgtggtcccagctacttgggaggctgaggcaggagaatggcgtgaacccaggaggcggagcttgcagtgagccgagatcgcgccactgcactccagcctgggcgacagagcgagactccgtctccaaaaaaaaaaggaaagaaagaacagagtaaacagataatctacagaataggagaaaatactcacaaactgcacctctgacaaaggtctaatatccagaattcaacaagcacgaaaccaaatactcccattaaaaaacgagcaaaagaacacatacttctcaaacagaagacacactctggggactgtcgtggggtggcgggaggggggagggatagcataggagatatacctatgctacatgacaactcatgggtgccgcacaccagcatggcccaatgtataccgtcctggtaagttaacccgggaacacgtgccaacttgtacgcctaagaacttaacgtatagtactaatacattcaatacttgaccctggaccacaccacgtagacttagtacggcaacacgttcttgaaaagtgctgcattcccatacaatctagaatgcattcatgtcagatttattcagcccacagatatctgcagcagcaggcgtgtggtgaatccaaagggccaaagggggtcttaaccacctggaacatggctccagatcacgctacgccacgctgcagcctggccgctccctgaccctctacaacccccccagcg

SEQ ID NO: 483066 - DNA, 445 bp, Homo sapiens
atgggctagtattcagtatggtctcccttcctatcagtaaaatgaaaaaaaggttttatcaacactcgtcagaaatccaacaggcttaaggatgacggctaacacaatggaggcacaccaagaataatttataacaaagtaaaacaaaccagacttgtctacctcgtgaaatgatcaaaactatctctgtgaaagaacaagaaactcaataaccagtctttgggaaacaagcaatctattctctctgttaacgactgtaatttttgcaaattattccaattattccaggatttttttttttttttggagagggattcccattttgttgcccaggctggagtgtaagggaaatctcagctcattaaaatttccacctcttgagtagatgggactacggacacgcaggaggtgaatttggcagcgagcacaagattgcagacgggaa

SEQ ID NO: 483067 - DNA, 290 bp, Homo sapiens
tgcagtcttctggcccaccgcttccattgcaaccccttgttcgggctctccgtttaccggagaagacaccgtgacagactaagagggcaagttcatattacgtggattgctgccgggatgtgtgtaccacgttcagctcatggcagaaggctacgaccacattgagcgggcgctcccccaccatagggtgattgaggttgtgaactaatgacttccatcatgttcacttcatagttttccggcagattaatcaatttgatttaagtggaactgtgatcgtcgggttgtaa

SEQ ID NO: 483068 - DNA, 336 bp, Homo sapiens
  misc_feature (6)..(6): n is a, c, g, or t
ggcaanccctgtagggaacggggcccttcaaagttagctcaggaggcttggaaagcatcaccctcaggcccaggtgcaagtcgcacgcctatgatcccagcactttgggaggctgaggcgggtggatcacctgaggttaggagttcgagaccagcctggccaacatggtaaaaccccatctctactaaaaatacagaaattagccgggcgtggtggcgggcacctatagtcccagctactcagaagcctgaggctgggaaatcgtttgaacccgggaagcggaggttgcagggagccgagatcacgccactgcactccagcctgggcgacagagcg

SEQ ID NO: 483069 - DNA, 337 bp, Homo sapiens
tacagtgatatcagcgtctgtgattcagatatgagctacatatcatagatggcacatggctgccgtaagtacaaaaatcacactgactgctgggtgggccggcaacagaaaatttgttcttggtgagtcttactcacgtcccggcagtatactattttccaaaatgccccaccaaaggatttcctcttacatcatattagccagaactgggacatattatcaccctttatctggggtagaggcccacatttccacatcacagggaatctgctcaatgcctaaatcaaactggaactcagttacgcaacgaagaaacagaggactggtctttgggtcg

SEQ ID NO: 483070 - DNA, 721 bp, Homo sapiens
ccaaggcgcttctcttggccccggctgttttgaaaagctcgcaaacgtgccccgaaaatatccgattattgtgtccagaagaacactatctgtgtctttagtgccacacgcaatacgccccttatacacctaccctgtgtggggcattattatgtgcgaggcggggtgccctctcgcgcgcccatgttgtgtttctgggtgcacacacaattgacaggtgcgcgccgctgtacatcacgaaggttcccactccccgcgtgatacgacgcgagcaccgcgggaacccgtagcagaatggtcgcggaatgcgccgatagagggggccgagggagatcacacagcaagagacaaaatcccgaaacagcaccgtgccacgacgcactccgagaaaaaagagacgtccacgttttccccaacacctggagaactacagtcacccggggtgaaaactcgggttcccacgggcgcgcccaggatcacccactgactagacaccccacaaaggcgccattcaatctcgatgtcacagacgatgtcgaagcccgtcgtgccccaccgcctaaacaggcaggcataagtcctctgctgatcctcccacaagcgggtgcgttgagaacaacgggtgaatacactggacccgctggggccgagaggcccgggtgcgcacgctccgcccccacgggcccaaaaggaacccatcattttaaccaaacaaaaacaa

SEQ ID NO: 483071 - DNA, 295 bp, Homo sapiens
  misc_feature (119)..(119): n is a, c, g, or t
  misc_feature (125)..(125): n is a, c, g, or t
tgtgaaatgaaaagacgaaaataaggtaagacaaacaaaaaaaaatttcagctgctcgttctgctgccctcatgggctgagccaagtgtgctcacggctgcatctgcaaagggacgtcnaaaaantgggggtggggtgcttgatgtaaaaacagctcttctcccagatgttaatagaacaacctgcacaacctggattttttttttatacaatactgagccatttgctgcatttctttttatattaaatatgtgagtgacaataaaacaattttgacttgaaaaaggggggaaaa

SEQ ID NO: 483072 - DNA, 380 bp, Homo sapiens
ggaaagagcaggatgtcggccaactttttctgtacagggccaaacagtaacagctcaggttatcaggatacacaatctctgttccaaacgtactcaactctagtgttggcgcggtgaatgtcaatgacaagaaagaatatgttaaaaaaaaacaaccaaaaaaaacgggatatggagccaaggcgcagggagctcacgcccaataccagcactatgggaggccaagggagaggggctcactagaggtcgggagtacgaaaccagccggaccaacttggtgaaacccggtctctaccagaaataccaaaaatagccgggcgtgggggcacacacctgatatcccagcaacaagggaggctgcggtgggagaatcgcttgac

SEQ ID NO: 483073 - DNA, 205 bp, Homo sapiens
cagttaaccttcatcgaaacccctcatcaaaccctgaaaaccagtacaccactacattcaattaacgcggttatttgtggggccttcttatattgctttccgcaggttcacaagcaatacccaaataaagggtttgatgaaaccctcagatcaaagttaatgatgtcaatggaaagggtttgatgacagggtttgatgagggttt

SEQ ID NO: 483074 - DNA, 208 bp, Homo sapiens
cccggcccgaagagctggtattgaatggtgtatggaaggactgttgcccgtatcatacatgattggtccctgactgcactacagtggtttatctatgacccgtgaggtctactgtcagcttgcctcgccctcctccacccgagatgccagagtctctgaaggaagaagcttggttaactcagtagttaagatcaaagcaaatgtggac

SEQ ID NO: 483075 - DNA, 313 bp, Homo sapiens
ggaggagcagagctctagttctccctctacgctctgcggtgtgatgcacgggaaggaagtgggcagcatcttctggaagaagggcgagactgtataacggatcccggagccgagccgtgcccggatctaccctctccgggggctcctgccctgaaagcattaacaccatcaacgggtctacagcagctgtcttccatgcagtctccatgattgctttcaaactggatgaggacctttgtgctgctcctgcaaatggtggaaatgtctccaggcctccagtgaccctgcgccttgtcatccctgccagtcagtg

SEQ ID NO: 483076 - DNA, 84 bp, Homo sapiens
tttttttcatggggaaaatgcaaattttgtaccaaaatggttatatggaacacgcctattaaatgaattttactatcttcccta

SEQ ID NO: 483077 - DNA, 107 bp, Homo sapiens
cagactgcgccgctgacctcagctgcctcaggctgcctggcactgtctcctcctccagagcctcccgcagcgtacgatctcgatcggcaggcgctcggccccgtgct

SEQ ID NO: 483078 - DNA, 218 bp, Homo sapiens
  misc_feature (11)..(11): n is a, c, g, or t
  misc_feature (202)..(202): n is a, c, g, or t
  misc_feature (204)..(204): n is a, c, g, or t
ggcggatcacntgaggtcaggagtttgagaccagcctggccggcatgatggagccccgtctttactatgcaagaattggctgggcgtggtggcacgtgcctatagtcccggctacatggagagctggggcaggagtcacttgagccaggctggagtgcagtggtatgatcttggctcatggacgcctctacctcccgggctnangtgtcctcccgcct

SEQ ID NO: 483079 - DNA, 248 bp, Homo sapiens
  misc_feature (43)..(43): n is a, c, g, or t
  misc_feature (47)..(47): n is a, c, g, or t
  misc_feature (66)..(66): n is a, c, g, or t
  misc_feature (156)..(156): n is a, c, g, or t
gtgactctgacgagcttataaatagccgacgaatagatactantatntcactatacttttgaattnatgcaggttaaacattagactttcatataagcttattctttcagcttcatgaatatgttagtttataatttttatcacatttgaaaaatnattttcaggattccagttacacatatcatttccaagactccagttgtacatacatcaagctgcttgaaagttgtcccagaatacactgatgc

SEQ ID NO: 483080 - DNA, 660 bp, Homo sapiens
  misc_feature (318)..(318): n is a, c, g, or t
taggcatggtggctcacacctgtaatcccagcactttgagaggccgaggcgggtgtatcacctgaggtcgggagttcgagactagcctgaccaacatggagaaaccctgtctctactaaaaatacaaaattagctgggtgtgctggtgcatgcctgtaatctcagctacttgggaggctgagacaggagaatcccttgaacctgggaggtggaggttgcagtgagtcgagatcatgccattgcactggacctgggcaacaagagtggaactccggctttacaaatatatagagaatataaaatattaaaacacgcggnttccccccagcaaccggaaaaaaaaacaaagcacacacacagaacaacaacaacaaaaaacggtgtggtgggcaggcccacgggcgacctctgaaaaaaagactattacaaaaacaattgctgtggggggggccaggggaccccgagtagagcacagctcgaaagtggcaccagacgcggatcccccaggaacaccccggagcaggaacagggcggggcgattccaccacataaaaaaaaacccgcggggtcacacgagggttcggacagacaccgacatgagactacagaggaccgaggctcaccacaggggtcaaggacgcatataaaagccccgcgggt

SEQ ID NO: 483081 - DNA, 211 bp, Homo sapiens
ccccgcgggctgctaaggccgaggggatgctcatgctgcagaggtcggacctgtgttctgctctgtggtctcttgcatccctcctgcaggcgcagccatggcacagccaaaggcacggagggagagacagcaagtcacgtggctgggctcagcattaaggggtggggggacaggcctgccactttattgtccgctctgcaaggaacccacg

SEQ ID NO: 483082 - DNA, 809 bp, Homo sapiens
aagacagggcggacgggcgagtggtggaagggaaccacactgtgtaccgcatctcagccccaactccggaagagaaggaagactggatcaaatgcatcaaggctgccatcagcagagaccctttctacgagatgcttgcagcacggaaaaagaaggtctcctccacaaagagacactgagggggcaccagggcatggccagcccatgaggctgtggccctttctcctgcctcccctgagggcgctgtggagccaagcagaggagagcagagggcttctctgccagttcctgccgttccgctcctagagacttgcttcagcttttgcagttttctaagtgggagaagggtgggcggcgagggataggctggagactgcggctgccctcatggctctggagtcgctctcagagccagcagctgccagcagctggttcacagcctcagctcagcagggctgaggcaccacagggagctcgctctttacctctcagtgttcctggccaagggccttcgcctctgtccgagaatgcctgtaaggatgtactctgtgtactaaggagagagggggaaaggaagagaagccacgcactattaagatttattttggttttttttaaagcaaaagtgaacgtagcactgtactctgccctcctgtgcctgttccctaaaaggggggcctgggggctgcgggcaccccaggctgcgggcactccagggcgtgctcatgactgtgtgggccagacggcagagccgactgctggagggccacaaaaaagagctcaggcccacggaggcggttggggtcccc

SEQ ID NO: 483083 - DNA, 761 bp, Homo sapiens
ttattaaatctagtgtagtttatgttggttgttactaagccattgattcccttcgagtttcatagtttgcgaagtacacattaaaggaatccttcatcaggagcgcagggctacggtttcctctgaatctgtcaatcaatttcagggggatcttttaaaaagctaaatgagccttagaacgggactactgcaggatagcagatgcgagcgtctctctaggacatgaagatcattgcagctacgccagccactccgagggtgcactccaaaccgtcgtggtatgtgtgtcgaccacgagagagggcctgctctgtcttgtgttctaatacaagtataggaactgccgatctgtacaatgagagtgccgttgtacacgggaatctgacggaacacatcgcgcgttgtccgagatcgaatcccacacatgttacgtcctgcatccttttgctaccaaggaacgaatgagatccaccttacgtaccctcgtgctccatcgagaactaacagggctaatagtgggagtatttccacccacattttatatatccgaggctcgtcattgcgtgagaggtcaccagtcgaaaagagcatcggcccggcacacgtcttgtagtagcttatgcacctcataggcggatcgcaagcatgaactggaacgcccgccttttagtgtatgtacccagccgtttgccccatgttatgtgaacgatgaaaaaaagcttactgataagagcgtccgtaaacacacagtccggggccgt

SEQ ID NO: 483084 - DNA, 507 bp, Homo sapiens
agcggaggggccttgtcggttctgcggggcgagcgccttcgcggaaacactccaatagtagcctctgttggagccttgttgagtatcttcacacagccttcaggagggacccttttatcatgcgacccatgccgcagtttacagaaggaacgcttggtgcgtgctttgggacgtatggatcacttttaaagctttttcctttgaatgctcagacagcttgcggggggcttgggaaggaagcagctgtcccggcggaggttagaacggcttggagtcaaatgtcactagccctccatacttcttgaagacgtgaaccattgggtgcagtcgcctggacacctgaggccccaagatcgtccagtctgcaaactgtagacccatgcgcttgtgatgcgctcctcggcgctgtatgcaggacgtctttggccaatgatgagttcgtgactgctgagcttggaaggctggatgacgcacacagacagatgcggaggccgcttgaacggacaa

SEQ ID NO: 483085 - DNA, 536 bp, Homo sapiens
ctgcattttattattattattattattattgagacggggtctcgctctgttgcccaggctggagtgcagtggcgcgatcgtgactcactgcagaccttgaactcccgggcccaactgattattctcccacctcagcctcccagagataggtgggaacgcatacatgcaccatgacacctggactaattttctattaggtaaattatatttactgtggagatgggggtctccctgtgtagcccaggactggatctcgaatgcctggaccttaagcaatcactcccaactcggcctcccaaagtgctgggattacacggcatgagacaaacacgcctggacacagatattccatctgggacatgtcccactgcacaagcagatcacattatacaaactggaaatggtatatacgatgagaataaccagaggttgcacgtatgtcattagaaaagtatatatgtaagaaaagcgacggacctggaggaatatatcggtacacctaaagaatatatatggaaagatgtgacgagaatcaa

SEQ ID NO: 483086 - DNA, 411 bp, Homo sapiens
tctcagagagttaacctttattttgagtcagcaggttggaaacactctttttgtaaaatctatggagggacattttggagccaaagaggcctatagtgaaaaccccaatatcccgtgatgaaaactagaaacaagctatcagtgaaaatgctttgaaatgtgtggatttatctcacagagttaaacttttgtattgattcagcagattggacactgtctttttgtacaatctattaatggacatttcaaagcccattgaggcctatagtgaaaaactgaatatcccacgataaaaactagaaacaatctatttgtgaaaatgctttttgacttttggattcattccacagaattaaccttttttttggttcagcaggtttgaaacactcttattgtagaatctataaaggg

SEQ ID NO: 483087 - DNA, 235 bp, Homo sapiens
ccgaagtgaaacccgccaccgggttacccccacaaggggccgctgcgaagaagttcacccacccccgaaaaaataattaaactcgcaggccaggcacggtggctcatgcctgtaatcccagcactttgggaggccaagacgggcggatcttttgaggtcgggagttggaggccagcctggccaaaatggcaaaaccccgcatctactaaaatacaaaaattagccgggcgtggtg

SEQ ID NO: 483088 - DNA, 215 bp, Homo sapiens
aactctagagtatcccctgcggaaccctatccaacccactagcaccaacttgtgcttttatgcttaccctggaaatgaacatgtatgtggttactattacttaagtaacatagtatcattgacattaatcattaaattagaccagaccactgttaactatatacatttgagatctatacattactgttacatagacttgtgcaatagtctttcat

SEQ ID NO: 483089 - DNA, 165 bp, Homo sapiens
ctcgcgaacgtgtatctccctgctgaatgctcgttcccttcaagacgaggggcagggaaggacagtgaccctcaggaattcagtgccttcaacaactgtgaggagaaagagagaagccagccacagacccctggtgagcttcctgctttgaaatgaagcaatgac

SEQ ID NO: 483090 - DNA, 252 bp, Homo sapiens
aaggatccggtaggatctccatcggcttcaagtactgatacaaggtgagctctgactagctgttattcaaaagtcatgtaacatgcattcactctgtcatatgtcattgttcatagaagggtaatttgcaagtcatataagcattcacctccctaagttaaacagcgctctaggaagatgtccacattttgccttgggtttttaatgcttcaatcttcttcaacgccaaaggctatttgacggttgacgaag

SEQ ID NO: 483091 - DNA, 108 bp, Homo sapiens
gctagtctcgccttaccccccactattaaactactgggagaactctctagtagcgtagtaaccacgttctcctgatctaatatatcactctcctacttacagtacacg

SEQ ID NO: 483092 - DNA, 349 bp, Homo sapiens
cgtcgacgccacatcttgtgtcaacgggtgcttggctccccgttctctgcaactgatcgcggccatgatgatggcgcgtgataccaagtaccggtcggctcgactcatctgtgcgacttcgtccgcttcaccgcctgtgatcatcaggatcgcggcaatcagcgtctcgccaagtaagtcccgtttatccagctcgtcgtcctgctcttcgtcatcttccctggcctggaacgtttcatgaaaagacacgtcgtcagtcgatggctcatcatcttggccaagcagggcattgaggagctcgtcatcgggcaggcctgcgttgcttcgtgcctgctgctcgggtcgaagc

SEQ ID NO: 483093 - DNA, 1739 bp, Homo sapiens
gcccccactggctgctctgaaaagccatctttgcagttgttccttcatccgcctccttgctcgccgcagccgcctccgtccgctagctgcctcctccgcccgtccgcggactctcggcgatgcgtttcactcgcgcagcagtccctgtagcctctcgtcttctcttcttctagtcccctgcatcggtactcagccggcgtgctcccagccactgtcagagcgcaggccgatagacatccagtcctccgaacatcaccagccaaggacctataaacggagaacaaggacagcttgtggaacgatggcacgaacaatggaacgagacgcccctgctacaccgggcactgcctacctgacgcacacgaggcgggaggcaggccacgtctgcacacaccgacggtacgacgcaacaaccagcgacgcaagggtggcgcgaccgaccgacgcgaccgcgcgcacgacacgacaggccgaccgggcccaccgccacgacgcgtgcccccgtgccccactgcagggaaggcctcccgtccagcccaccgggccaagcggcgcagcctggcagatgcactcgacggattgacgaatggtcgctcaccgacggaaggcaaaaacaaaccgacgcaggcatgacccaggacccggcaacacacggcgcctcacccgccgccacacacacgagccctctggccccccccgcgccccccaccaaacagcttccacaacccacacgatcgtggcgcccccggcgcccacccagacacacggcggacccgcgccacccgccggcgccacgcagcaacggcgaaagaaccaagccggcgagcgccagcgcacaaagagccccgcggcacccgaggacggcaacaaccccaggaccgcgcgccacgcggcccaccagacccccgccaccgcagccaccccgcgcgccgcccacctacgccccgctcgcccctccccgccgcccacccacgcccccgcgcgccacgctcgccgcgccgcgcggctccgcgccgcccatcgcgatgctctaccgcctgccgacccgcagcgacagcccagccccccctcctccgcctcgcgtcgcccccgctgcttcgccggggccgggcccctgcccgcccgcgcgcacccgcgccgcgcgcgcctccccgccgcgcgcccgctccgctccactccggtcgcgccccgcgcccgcgcctgcccgcctccggcccgcgccccctccgcccacgtctccgggccggctgcgccgcggcctcggcccgccggcgccggtgcgcctctcggctgtctcgccgccgtgcagctgcccgcgtagcgggcgtcgcgccgcgggccggccggcgctgtcgcgcgccgcctgccgctgcggggggccggagcgctctggccgggtgggccggcgccaactggcgcgcggcccggaccgacggtgctccgtcccgtcgccgcgcgcgcgcgggcccgccgccgtctgtgcgcgtcggcccgagcgggccaccggagtgcgccgcgcggtcgcgcggcccccggcgtgagcgggcgcggcggtcccggccgcgccgcgcggccgcgccgcgcgcgccgccccgggcgaccacccctcggcggccgcccccgcgcccgccgcggcgggggggggtgcgcgcgcgctcggcggcgagccgcccgcccgcgcgccggccgtggcagccgccgcggggcctcgcgctgtccgctcgtgctcgcgcggtgcg

SEQ ID NO: 483094 - DNA, 202 bp, Homo sapiens
aagggcgtcggattttaataaaaggggagtctagctctacagcccgcgctggagtgccgtgggccatctcggctcaccgcaacctctgcctcccgggttcaagctgttctcctgcctcggtctcccaaggggctgggattacaggcgcctgccaccacgcccggctaaattttttgtatttttagtcgacgcggccggcaat

SEQ ID NO: 483095 - DNA, 205 bp, Homo sapiens
  misc_feature (76)..(76): n is a, c, g, or t
cctggtgagactgctgagaacgataccatgaggtcaattttagagagataccttcacatgtgctatcgaaagtatncatggggttgggggcaaggttcactacactaacagctccaccgagattcctgaattcccaattgcacctgaaattgcactggaactgctgatggctgcgaacttcttagattgttaaataaaataaatt

SEQ ID NO: 483096 - DNA, 680 bp, Homo sapiens
gagcactgctgggctggagacggcgggagccgctgctctccggctgagggaatcagagacagctccgtccctagtggagcgcaggggaggcagaagtcatgacaggcgaggtgggttctgaggttcacctagaaatcaatgacccaaacgtcatttcacaagaggaagcagatagtccttcagatagtggacagggcagctatgaaacaatggacccttgagtgaaggagattcagatgaagagatatttgtaagtaagaagttgaaaaacaggaaggttctacaagacagtgattccgaaacagaggacacaaatgcctctccagagaaaactacctatgtacagtgccgcaggaggagcaataatcgcgaatttatatgtggggggaaatacctaccaatcatcaggaggatcttaccaaaggtgtggcagacagtgatgacagttcccatggccacagtcttggtatcaggacaactctttgaagcgcagtgaaacctgtttagagctgagtcttcagtctggaaactctacggactttaccactgacagaaagagttcccaaaaggcacatcccgtgaatcacgaagggaacctgcaggacaacgccggcagtacacatccacaaagacgactggggacacgaggcgataacacgccatacctccacaacagccac

SEQ ID NO: 483097 - DNA, 363 bp, Homo sapiens
acgctctacaagagtaggacaatatcagaccaggggagctgactaggggtgtaaggacataagcacgaacctgacaactttataagtagtgccaacaaacggggatagaagtccaatcacctatgaactctccacggagcatgattccctcagaccaatgctaaaatacacgagccatagttaaagctgaggtcaaagcttttaatggaaaagagtatctggcaatgttcccatgatgaacgattcaaacattttcgtttgttgttctttttcttttgcttttttttttttaggaaatgaagcctcactctatcgccagaggttgagtgcaggggtgcattctcgggaaggtcagggcgtatg

SEQ ID NO: 483098 - DNA, 134 bp, Homo sapiens
agtgtcaaaacaaacatcaaaataccttgcaatcagagaacagacttccaacatcaggacacaggtatctagagtgtcattatacaaaacagtactagggagtagaaatacatagtaaaaaaaataaaataaat

SEQ ID NO: 483099 - DNA, 818 bp, Homo sapiens
gcttcattcaaatattcagtgcataaataattgccttaaattgagtctttgctgtggaattgagagtttggaaatcaaaggcccttgtgaaacatttcctgttgccatttatttatagatagcaatagcttcaaatgagtgggaaagtctacttaggtgaagtggtaagatagtcacataatgatggtataaatagcgcattgatgagttgcctaattgtgtttctccaacaataaccactggtccatgtggttcactacttactcaagaaagacatatactgagatggtgtgaaagtgtttaatgcatgtgaacgtttatttgtgaccgtgtgttccggaagaaagagtctccgatgttatggtcttcctttattttccagaaattaagtgcatctaactggtgaatgtgtatatggaaattaccagttatttcagcatatatcagtatattttaacctgcttttgtgcatgctctgtatccaaagattaacagatcatgctgaaaaacatttcaaaacgattcatgtgttttaccgttataaggaagtcgacagtatattcattcctggagtttaatgaacaggaaaaaatctctaactccccagggttccccaccaaccagtttaaagaaaactaacccaggtaaactgttccgctctcggcgggaaagttctcccccaaaaaaaaatcgttataaaacccccacctggaggggggcgacgggccacacatgttcaaggaaacccgcggagttacaccccgtgtttccggaagaaaaacaggcgttccaaggaaaggagcgccagtttaccggaa

SEQ ID NO: 483100 - DNA, 477 bp, Homo sapiens
cacaacaagcaaacaccaaacaaacacacaaaaacataaaaacaaacaaacacaaacgaccgcacacaaaacaaacagagagagcaacacacgccgcgagcacacgacatttgtaaggagagaaagccagacggccgaggcgtcgaactgagatgagagcgaggaagcgaacgtatgcaccatacacacatcgagaagcgacgcagcacgagacagcattcgacacgctgatacgagaaaggacgagcagcacgatgcagacacaaaagagaacgcaagaagaccacacacggagcaagaagagacataacacagctactagaacaggacgagcgacaatgaacgagacgacagcagagacacgcagcagcacagatgcagaatcagaagacagaagacatggccagaaaagacggaccagcacaagcagaactctagcacagatggagaatagcattagagagcagaaagaagaat

SEQ ID NO: 483101 - DNA, 446 bp, Homo sapiens
  misc_feature (183)..(184): n is a, c, g, or t
tttaaaaaaaaatattttctttgaaaaaaaaggggcccctataatggggggggaaaaaaaacccccccccccccaaaaaaaaacttcttttcttttttaaaaaggggttggagccccaaaaaaaaaaaataacccccgcccccccctttaaaaacccttttcatgggtttaaaagggggtttnnaaaaaaatttttttaacccccaaagggggggaaaaaaaaccccccccctttaaaaaagtttttttcccattttttccccccccctttttccccaaaaaaaaaaaagttttttttaaaaaaacaaaaaaatttttcccggggggcccccaaagccctaaaaaaacttgtttttaaaccgccccaaatttcccttttgggtttggcccaattaaaattaaagcttaaatttttccatccagggttaaacaattaaatgattaat

SEQ ID NO: 483102 - DNA, 958 bp, Homo sapiens
ctatacggtgaatcagaaatgagaaatgtgtaaaggcatggtcatgatatgcttgagaattcacactcatagttcccacagtaaaatgagattcttgggaaaaatgtagttcatcttccttgttcactgattaatttgagaatgggtaaagagtctgagcaatattcgtgttcgtgttgcaattagaatgtctcaggggattactcttgggtgaatggttgacaaaatggtagcggttatgacgggagaatttgttacctcgaggggaaaggctatctacggatgaattggaaataattagagtacttgaactgaatcagtagataaggggaataaaactggtggtggtgtcgtcaaagagtattcttgatgcgtatcgcgacatggagaaggtgtattcgaacgatcatggagtagtattgcggttgcattgagaatttactcgaaacctgtagcatagatgtaaaagcttgttttggggaaaaagagcagtattctcttgaaccgcttccgagaagagagcccactatgactatagttgagcacgtgtttgtgaccgattagtagcaatgagatacccccgtaaagggaaaacttgtggtccttgtatagcacaccagatcgtcgctctgtcacagaatacttgtcaaggtgtaacgtgagtacttcctctccgggggccgatggtaccattatcctaaagggaagccttgatttagacttgccatcggggtaaagaaattgcaacttacgcaaacaattggtaggtgtcaacgcttagtccagagttatattgacattcagataaatggaagatacgcctgctggcatgctcagagcccaagggatcgagatgaaaattcttcgtaggtccaataatggcaaagttatgccagatagcccaggccatgacaccattgccataacatcgatagggtggcattataggggccatagt

SEQ ID NO: 483103 - DNA, 171 bp, Homo sapiens
cccccgtggggccctgtttctgggccccggtctgggtggttggtggggttgggggggggggtccttttcccccgggggcccgtttttggggtggggggcttttggtggggccccctttggggggttgggcccggggggcccgggtttccggggcccccaaaaaaagagaga

SEQ ID NO: 483104 - DNA, 117 bp, Homo sapiens
gattcaagtcattcaagaggatcgaatgatcatgtacatattttagatactgaaacatctagctggagccagcctataactagtggttaagcaccttcatctcgtgctgcccatgcc

SEQ ID NO: 483105 - DNA, 221 bp, Homo sapiens
tgaggcaaattttcgctctttttgcccaggctgaattgcaatggcgcaatcttggctcactgaaacctctgcctcccaggtttcaagttgatttctccagcttcagcctctctaaagttacctgggatttacaagcgttgagccaccacgcctcggcttattttgtgtttttttagcaagagaggggggccttcaccatttttggtcaggcgtgttctcga

SEQ ID NO: 483106 - DNA, 335 bp, Homo sapiens
  misc_feature (335)..(335): n is a, c, g, or t
ctggaataaaacagtaagttttagctcagtcgtggtgtgacccccttgcacaggaatgttgggtgagctacagagctctggtcactcagtgattcttgcaagtccctttgtgctttggatgctaaaaaacaatgccattgggggtctcaacttcccccccatttctgaggattgcctggtgacttgctaatgggttacacatataaatgacctgtaaacctttaatattattttagtttttaatctttttaaaataaccatatgaaagttatatattctctttatagagaagtgcatatgaaaataaataccaaaaattttttgtaaaaaaaaan

SEQ ID NO: 483107 - DNA, 832 bp, Homo sapiens
gtggcagacaggtggcccgggccgctgcgtgttgtccacccaagaatggagttcctcctggtggaacccgttccagtcgacacctagtgcggcgcagtgcctcgacaaaggcgaacagatcggctccctagcgaggtgaggattagggacgttgcgattatggatgatctgtgacatcaattcaatgagactggaggaagggccaaatggatggtcctagttcgagccctgaagaagcagtgatcgaacggggtaaccggaagctatcagagcaggtgactgcgtggtgcattaacagctgctgtgatgcaccagtgtgtgagagaacgtggtggtccgaccgtctttcgcaccatccattgttgggcacaaaccgagcattgtcactcgacaagtgttctgtggtcaacaacttagtatctcccaagcaacaagccctcccatcctattgtacatggtacacacagtgtcttgtctctgactccaggtcatggtgcctgtatgccctttcgatagcccgtcctagatcgtcacctggccgttgttgcacatggtcatgcacggagctcgcacatgaggaccggtggtgtttgagtttcccttgcgcagtacttggtactgctctggtctccccttcataccacttccgacaggcggagttgtccgctggccgttggctccgaggctgcggacccatgcgccaggtcccaatgcgctgcccgagggacaagtgccggtccctgtttcgtcggccgctccgtggccctagctccgggcgggggcccaggtctgcgtgttactgggcccccagtcattccaagggttgccggtg

SEQ ID NO: 483108 - DNA, 146 bp, Homo sapiens
  misc_feature (120)..(120): n is a, c, g, or t
caacaggtcaaaaagaacctttattactttttatgattgccacttatgctttctagcagatgctttggagcaggtaattatggcccggagctttttgacccttctgtcgtcttctatgcngccgtatagtagtagtagtcggccgc

SEQ ID NO: 483109 - DNA, 145 bp, Homo sapiens
tggagaggataccagaaggcagcggtgggcccagcggtttaagctagcaaggctcgccgcgcccattcttggagggcgaggcacttcagcgaggagttcttccgaacagaccgtgttgctcatgaacttgcaaaacagcgctcgc

SEQ ID NO: 483110 - DNA, 239 bp, Homo sapiens
acagtgcctcacagcctgcacacggacgcgaggatctgacatgtgcctcacagcctgcacaggacgcgaggatctgactgtgcctcacagccgcacaggactgcgaggtatgcttgacatgtgcctcacagccacacaggacgcaaggatgctgacggtgcctcacagctaatgagctgctgctccgagcttactggagtgcccgtgtacccctggccaacttcccgtgccgcagccag

SEQ ID NO: 483111 - DNA, 1275 bp, Homo sapiens
  misc_feature (1275)..(1275): n is a, c, g, or t
gggctggactggatgccctccacagaccatcccgatctgcctgctgcgcagaatataccttccagtgcagagtggcctggctctgccagtgccacctacgatgtgtgcgagtgtgtgcagggtgcctggtcccactgtgcaaggtgaacccatgacaatggcctggatgtggctgtgaatcacgttggggaatttcttgccagtggcctaggagcatggcttcaggcatcctgccatgctgccccagtgcctctgagtgacaagttcgactgttacaatgtgtcactaggcgagaaggcagccatgtgtggctacggcatctgtgagtacagcaccgacgaggtgtacaagggctacttccacgtgaagggcctgcgtgcacgagatttggggtccttgagatgtggtcctgatggacccaccatgcccttcagtgtacactgggccacttggagatgatgagggccaggcaggcagctgggcttattgcgccacttagcagcgccgagactagcggtgagcacagacgcgcttgaacgcagcctacacctagaaaaattgctgcgcacgcgccatggtcgcggacgaacacagtacaccacagaggccatgcggccaccccaagggcaaggggctgatacatgggtaccaacaggcaacaccgatttgccaaagccggaacaaaaacacgagagcgagacaccgcgggacaatatcatccacgcacagggaaagagagcacaatccacctgaacatagcagagcaaagcataactaccgagcgggaaccccctaaccacttcaaatgtagaacacatacaacaaagcacaaacttatcacaaaactagactatacaacaacaataacagagcaatcatcaccaaaacactatacaacacgaaaaaataaataacaaaacacatagattgtcatagaacaatgaacatacaacacaccaacaaccacaaaacaaccacaatcacacacaccagcacaactaagcctgacgactaacgatcccgcaacgaagaaaacaatgataacaagaacaaatacaacacacaccacacatacaccagaacaaatatgacagtacagagaaaataacacatacggacaactcaacaataacacacgattaatccatcaccaacaacgactgattattactcagagataacattaagactactatacataatccctccgataaacaaacacaatacctcaaaagcacacattaaaccaccactatataacaaacactactaagn

SEQ ID NO: 483112 - DNA, 796 bp, Homo sapiens
gctcgtagagccacatgtatacagtgtagttttggcaaatttcattcatacctctacctccttgtgctgttttccttgaacatagtaaaaattcacatgactttgccgaaatcaagttcttaggagttcttcaacagtatttaaagacaggttctgtcccttttggtttcctgcctaactacaggtacagttaaacatggcaattaaacagacagccttctatgtcaaacatgtgtcatgtaacagatcctagtgatctctggtttcctggacgatactatttagccatttgggagaggatcaacaaaggggcacagcacgcaagcatacctgtagtaagtattattttcccttattttgcttactgtctatcgattagtctttaaattactagtacattttatgataaatttcttgtgattatatatttactcattttagaatggaagctcctcgaaagggcagggaaatctgaagtaggcaggcatttaaaaaatatttacaatgtacagttgggtggaagtttcagtttcaattgcaaattaggtttgtgacattgagaattgtgacaacgggggatcacaatattacgaagcatttaatttaatggcatggacagtttgtaaaatggtcaaaagtgctaatgatttacgtaactcaggagaaccatcaaatttaattatcaagtgcatttaaacatttcaacatgtcttagtgaggaaagtggctaggaaatagattaataggtaaataactttgtcagtgagtgctatttggaaaagaaagggcttagcaa

SEQ ID NO: 483113 - DNA, 123 bp, Homo sapiens
ccatacgtatactatgtggccaggctggtctcaattcctgaccttgtgatccgcccaccttggcctcccaaagttcatggattacaggcttgagcctacgcacccagctgccaatttctttaa

SEQ ID NO: 483114 - DNA, 1248 bp, Homo sapiens
accccccccgacatgagcaagcggacgcagggaaacaagcagcatgtgtgttgacgcgatattttcatttatcatcacctttttctggcacgcttgttttataccctgtgcgtgtctttttggtgcgaccaacctttgtccccgggggacctcttttacacacatttgtttgtgcccccccgttattttttgtctcttaccgttgtggttttctccccaattgtgagcttgtgttcgcggcatagacccccgtgggacacaaagatgtggtcacactattatacccagttggtctctctagggtattcttgtggcgcaccccccaaattttccacgttgggcaataaccctgttactccacccggggattatgtttcacgctgcccctttccgatttgtttttggcgttttcccccccccggccgtccaaagttattttgcctggcttctgccccacccttcccccggtgacccatattgaaatgtatccttgctccagatgcttcttggccccccttagggatttctatctttccctttttccaccgtttaggtgggccctgacctgggcactgtgttaattaagcccaaaacgtgcagtcccctaaggaacctccggtatcttatcaccgaacaccgtaatctaaacccttgtacgacatcaaccgtcccccctaatttgtcccctatccaaatatgggaggcccggtaatttgtggccacatccaataaggaaggacttcacattcacctgattttcccctcagttctcacaggctaacaccccctatgaccccaaacctatccgcccaaaatccactgttcacactaatcaataatttacatccggcggtgaaattttaaacttttctttcccaccacaacacctttttcggcctatccggaaatgccccgagccttatactcggaactatccccgaatgcatacacccaccactgaacactcctatcactctgtaggctcacattcacatttttctaaccaccccgtaaatatttaataattttcactgagtttgagaagccttcgcttcgaagcggaaagtcctaatagtatgaagaaccctccactaaaacctcggaggtgagctatatggagtgccccccacccctaccaccaccacttcgaagaacccgtatacataaaatttagaccaaaaaggaagggatcgagacccccccaacgctggtttcaaacccaccccctggcctccctgactttttcca

SEQ ID NO: 483115 - DNA, 376 bp, Homo sapiens
gaatgggcagtctagtgacctcagagtccatctcctgtttgcgaaaataccagtaatgcactctgtagggacaaagcactgcagataaaatcaccgtgggctcatccgggctgaaatacttggtaaatcagccattccctgcagagacacacaatcatcaagtccctcacagacatatctgttcccagaggagccaggcctgcagctggctgctcaggagatggcctcatacctcctgtactcccagtttgctttccacttaggacaaagccattgatctatatggagggcggggaccggggacagagggaggctgaaatgtatatactgcttctcccgtgtttcatgccatctcgcgtcccccattcctgcacat

SEQ ID NO: 483116 - DNA, 665 bp, Homo sapiens
gggacgcgtggggaaggtagtattccgccccactccgcccccgggttatgagaatgatgctgtctgagaccctgatggtggtggcttagccagatgacgtctgcaaatggaggcccacgggctccccgatggctctgtatcatcagggagggagctccctttatcttgttacctactcccctcttgggcccccttcttcccctgatctaagaagggtgctccggatctcccctctggcctgcgttccatcagccgaagcttcctggaggagccggaggaggccctgtgctcgcatcacatacccgtggcccgaagttggcttcacgggaagctcaggaataggatgcgagaagccctgagacctcccccaactctgccgtacagagtcaccagaccatggcttaaagatggagagacccgattgatcggtcacaccagctgttccccgataattcttgtgtcagaaggggaggctgactacccggacccctggccccacttcccgcccctcccttttgagtacacttcagagggcttctggcacgggtgagggggtcttggtggtgcccccgagagtaaaggtttagcaccccccttgtggagatatttcatggggaccaccccgtgacttcacttgaagtaaagtgggattttcccacccttga

SEQ ID NO: 483117 - DNA, 1874 bp, Homo sapiens
  misc_feature (1263)..(1263): n is a, c, g, or t
  misc_feature (1551)..(1551): n is a, c, g, or t
cggaggaagcgaagaggggagggggagggcggactgcgctcgctggtactgttactgatgggttcctgacttcgtgtatgcagtatgctctgcacttctattgtcgtcagtctttcgttggttttttgtactatacccatcgtgttcttacctgttggtgcgtcgcaccgactgattcttgtgccagggtggggtattttgttgactcgcctcgtcttttattaaatgttcgcctcccggcacgttgttgcctgttgtgtgttgtcatcgaggggtgtttcttctctgtgttgttgttgttgcgttcgtcgctcgctgtgttgttgtttgtgtttcgatgctcctgcgggttgatcttcgaccagtggttatttgtataaggtcgttctacctctctgtgtaggaaggtagtaggctgacctcatggtggtggtttcttgttcaatttttggcgggtactcctctacattttttctcggggcgacaaaatatgtaccccctggcggtgccttgggtctctcttctgtttgttttgttgggaggatatataccatcttgtgcgcacgcacgcgtcgttgtgtagcgtccggccctgtgttaaggcccccagacagtgttaagtgtgccacagtggttgtgatattgtcccccagacggtttataatagatgggttaaataggttcgatgtagaacgtgtcccgcaacccacgaggttgtgtgaagaaaattttttatttcgcgtgccgttcaaaggaaagttatacctccccccggggtgagccgttgattgccgtgttgtccgcggtgcccctctcgtttgataagatggggtcaccctcggggggaatttttcctcgtgtggcaagtgtgagatgtgtgaagtggcgccatacccatgagggagatggtgggagacaccccacaaaattgttctttttgggggcggattacaactatattttgggcgcccatataagtttctgttgatgtttaaaaacttgttctgggcgtgttcactaaagtgtttgagggagaacccccccaccctggattgttattgttgttcactgcccaccgctgtgataccctacgcttcagaggagcagtgtctccacacttgagagtatatagagccccctcctggtgtgggtggagtactcaaccgtggtgatgtggagattgtctcgtgtgtgtcctcaagaactgtcgtggggcgtgtgagagccttcggcctgatagtagaagattgtccctccgagagngcctacttgagagagatatattgtgagaagagactagtgtgggtgtgaaaatacttaggagagtgtggcgctctcttgatcacaaggggagtgttgtgtgagaagttatacagagacccctacgaaatttttttggggggaagatatgtgttttttgaaagtgggagtgtgtcccacgctgatgtcccctgctctgtaggccactgtgatacagtgtataaggtgatataagagaggccacagagtttgggagtgtgtttgtccctgctctctttgtcctcgcgtganatgtgtcctcaagagtgagaattataagagactttatattgaaagtgtgcccactatacgagaattgtgtaagctggatatgtctttatgaacgccacttggtggagtggcctcgtgttggaggtgtgctccccacccactgtgcctctaggatgtctgtattctgtggctacctctgatgtggaactcacccgccacggcttttctgaatgggcttgcaatttccagatttagattgatttttcccacccaattgcctgtcaagtattctccataggctgtattcccccccagtcccataaatgtaccccccgttaaaactc

SEQ ID NO: 483118 - DNA, 597 bp, Homo sapiens
agttatggaaaaaatactagctttaagaaattattttgattgaaaaaatattgtattttaatctttaaagttttataaatggacagacatatttaaattgccccagtattccaataactaatcttcagttgactttcttttaatattacatataagaacaaagttcctgcattgtatcttttgagtagtgaacatttgcaattaattcttaatgttaatttttatctacataaaatttgtaagaaagataggtggctatgtgatcatggatatttgttttagattattttgtctgtcctttagccatgattagatgctctcaaatgaaatttagtttttataaaagtttcaggagaggagatttattgtttaacatatgttctatgaaatattaaatattctgtattaatataaaattgatcaggattttttgaagctacaggactctagataatctaccatgtcacctttaccataatatgtaaagggaactgaaaatctatttcaacataaacttctaatttgttttaattagccaaagcattgtacttaaattgtaatgagtaaatattaaaatttggatcatctttaaaaaaa

SEQ ID NO: 483119 - DNA, 576 bp, Homo sapiens
  misc_feature (57)..(57): n is a, c, g, or t
  misc_feature (92)..(92): n is a, c, g, or t
  misc_feature (136)..(137): n is a, c, g, or t
  misc_feature (150)..(150): n is a, c, g, or t
  misc_feature (192)..(192): n is a, c, g, or t
  misc_feature (203)..(203): n is a, c, g, or t
  misc_feature (205)..(205): n is a, c, g, or t
  misc_feature (210)..(210): n is a, c, g, or t
  misc_feature (228)..(228): n is a, c, g, or t
  misc_feature (248)..(248): n is a, c, g, or t
  misc_feature (351)..(351): n is a, c, g, or t
  misc_feature (458)..(458): n is a, c, g, or t
  misc_feature (470)..(470): n is a, c, g, or t
  misc_feature (480)..(480): n is a, c, g, or t
  misc_feature (488)..(488): n is a, c, g, or t
  misc_feature (490)..(490): n is a, c, g, or t
  misc_feature (492)..(492): n is a, c, g, or t
  misc_feature (495)..(495): n is a, c, g, or t
  misc_feature (500)..(500): n is a, c, g, or t
  misc_feature (504)..(504): n is a, c, g, or t
  misc_feature (506)..(507): n is a, c, g, or t
  misc_feature (516)..(516): n is a, c, g, or t
  misc_feature (538)..(538): n is a, c, g, or t
tccaggaggcaggttgtttgttgttttttggttaatggtatttttggggcgcttctntttttttagacttctttatagggtggggagggganagattttttttttggttgatgctatttagagtggctctggttanntttttttcttcanggcattttttaggctcctttattgctgctcaccacagccccntgcgctcaganantgggnagggtttaggctcttttngttatgattttttaaatgtnatgttttaggtatgagtgtggcttcatgctatttcttgagctacctgccctaccccagtgcaggccactcacgaggcagtgagcgtggagttaagcagcaggntggtgctgattgggtagagctgggccagggtgagcttgctgtgctgggcagagacccctggtgggggctcaggctggaccctggggagaggcccccgagggcaggtntgcacacctgtncctgtgggcncctgcagntngncangccangcancnnactgagccnaagcacgctggcaggggtgagngcccctgggcaatggcaaatgggcgcactggctggagg

SEQ ID NO: 483120 - DNA, 397 bp, Homo sapiens
gaaagcaaagcaaagcacttgatggagaagccaaataaacaatcagctcctagtgcatccagcaactcaaaaccctgcatccataaagaaaaagccagggagctagataaagaggaaaaatctagtgcatcaaagaaagtataaatataacgaactccaaacacatacaggatgaaaaacagtcaagtatagtccacggtaataaagcacaacatgaacaacccttaacccttaaagaaaaaacaaaagctgcacctttgaacactccagatggagaagaaatcgataaacaagataaagatctagacagatacaaagaccgaaaccaacataaagattaagtccaaataaatatcttactcacactaaaatcttgaagcagatcccctaaagctaa

SEQ ID NO: 483121 - DNA, 360 bp, Homo sapiens
gattccatatatatgaaatgtccagaacaggataggcctatcatagacaacagagacacaaagtcgatcagcagttgccaggggaggaggaagacgggaggggtaatgaatgcttcacagggtgatgacagagtgttccggaacgtgacagaggtggagcctacacaactgtctggatgcagtaaatggcgctgaatgttcactttcaagtgattgatatgtaggttatttgaatatcatctcaattaaaaaacccaaacacgcaaactgctcccgccagctcagcccagaacagacggcgcaggccgtggagaatactgaaccacccagggttctctccgccccttctgtcgtcttctc

SEQ ID NO: 483122 - DNA, 1097 bp, Homo sapiens
ggacagtgctgagactacaaggctcggagcttccgggcactcagacatcatgagtcggtccttgctacactcccggaattggaattcgtctacttcatatgctcgttctatttctctctttctaacgatgtgtagctagtatgttgctacgcagagactaacatgcttgcgtcttagatgacaagattcggctagcttatggctccagctaccggtggacatcttgccaggactattcgctgttctacctattatactaaatccgagaaggtcaggacgagaggattcgtactaagtctctcggtaagtacatcgtgtagcatccacagattgtagggaagtaaaaaccatgcagaaaggtcaaactagctgatcataaagccaatccaacgtcaatctttattcattcgcttgatgtgaacgtcagtcatagaatcccaagattagtgagtacggagcagccgttgcgtaaccttgggtaagggtccaagcgcataacacctgtttaccgaaggaacagtggatgaatattactgaaagccagtgcgagtctcttaacgaacagtagaatctacacagttatttccgactctattttcggccacgggacacatgagttagtacattcttcacatgattacatttcaagagaggaatttggtttaataccctgtacaacggaagaaagggtatggcccccaggttctttggaacaacgccactaggtggccaaggaaaacctttggcaaaaggaaccaccggttgccggaatccgcagtgactgattccactgggccgacagagaaatgtgtccgaaagtgaccctttgtgtcactacttcaacgggcgaagcctcataagccatgaaggcgggggcctttagaacttttgactttaaagcgctacttggattaaagggttaaagccaaagtccaagttgctcgtcaggtgctaactgtggtggacacagccggattggggtcctgggggaaatggtgagtcgggactaggtggatttttcaaagtgaaacgggaagaactttcgcgatgggacagggtccgtaggacttttccatctgcgagaaaatcgggcgagt

SEQ ID NO: 483123 - DNA, 105 bp, Homo sapiens
tttgcggcaggtcttggtgaggcaaatagattcctccacacatgattacaggcacatctcaggctgactgtgctgtcctgattgttgctgcgggtcttggtgagg

SEQ ID NO: 483124 - DNA, 496 bp, Homo sapiens
gggaaccccccccaaaaggataccccccttgagggaaacccccaagaccccattaatttgtcaagattcacccaaagttgaaatgaaggggaaaaaattgttaaggggcagccagagagaaagggtcgggttacccccacaaaaggggaaacccccatcaggacttaccagcagatcctcccggaagaaactcctacaagccagaagaaagtgggggccaatattcaacattcttaaagaaaagaattttcaacccagaatttcatatccagccaaactaagcttcataagtgaaggagaaataaaatcctttacagacaagcaaatgctgagagattttgtcaccaccaggtctgccctaaaagagctcctgaaggaagcactgaacatggaaaggaacgaccggtaccagccgctgcaaaatcatgccaaaatgtaaagaccctcgacttagggcgcggtttccaattcgccctatagtgactctttttacgaa

SEQ ID NO: 483125 - DNA, 958 bp, Homo sapiens
ggacccggggcctcgggggacccatggcggattcctcgcccgcactgtccctgcgggaaggcggccccggcgccgggcctcggccccctcgccgcgccggctcgcgctcgggtccgagtccgaggaggccgagctgtcagctgagcctggcccgcacacaagacccgctcgtacgggcagcaccgcaagtgtgcgcgcgcggccgtggggcgccggcgtacatccgagcggcatgggaggcaccggggtccgcacggggggaacaaacggctggcaggggacattcgggggcatcaaaggtacgggggtgcacggagtgggaaacagatttaagggggcgcccaatttaacagcttggtttcacccaagttgatgtgggtaattttttgctggaaagaaaaacttttggacatttcccaggtttatatcaagaaagcacgccttgtgtgtgcgtcacacggggaactttaacccttccattggatcctccaagggaaaagtgaagttggggtataccaggttttcctcaaggcagaagaaggcggcgccaggtggtgtggcgggggaaaggaccttccttctttcccaagttcttcaagagattttggattgtcacaggccttgtgccagcttggagggaaggtggtcaggcaagagattttctggcagaagacttggattgggaggaattaagtgttttcaacacgggcagccaggaagtaaaaggaagagagaggagttgagaaagtcttatgaattccctttatcaagtaggtattggggcataatctaccaaattagttttgttggccttaagatcacaatggagttaaaatctttggtctataggcactaaacaaatgagttacgggaggaggaggtagcccgattaataagattatgggggggggggacacatggggggaacgcaatggaggactttaaagttccagaggtg

SEQ ID NO: 483126 - DNA, 679 bp, Homo sapiens
gtgtcttagacagaacgttttgaatgtaggtccagctttcctcacagtggcgctgacgctggggccactctcttgcctccctgaggcggtgggtcagtggtttccttgcttagcatgattttgtaagatatgttgctgattgtgggttgagggaggaggctgcagggtagggttggaagagcctagatgaagattattcatcctggttgtccccttacacaaccccttctattccttgatccttcgttttcttcgttcgtcaaaagtagtttatgatcagggacagagcagagggctgggagagccaaggtgaccagagtcttgggccctttaagacttcatcgtccagtggcagggacagtcacccatacccaagtacccaaatcatccctggaagctcgggtggggtctgctgggggtgtgtgcaagagtgcagtgaaagcacagggccagaggtggcaggagggatgatgtggacaccaggttgtcttgcctttcttctgctaacagcaacctccttcctttgggaaattgttcctccccaattccttgtggtgcatgggacacgcctactgagtttagccgattaaccaggctgtcaatcacagcatcaggccccacctctactaagtcacagtggacggcacaggaaacaaggctggccatcagagtcttcctg

SEQ ID NO: 483127 - DNA, 329 bp, Homo sapiens
  misc_feature (18)..(18): n is a, c, g, or t
  misc_feature (140)..(140): n is a, c, g, or t
  misc_feature (145)..(145): n is a, c, g, or t
  misc_feature (194)..(194): n is a, c, g, or t
  misc_feature (227)..(227): n is a, c, g, or t
atttgggccaggtgcagnggctcatgtctgtaatcccagcactttgggaggccgaggcaggtggatcacttgaggccaggagtttgacaccagcctggccaacatggcaaacctcgtctctactaaacatttatgtgtgngtggnggtgcatgcgtgtaattccagctacttgggagattgaggcatgataatnacttgaacccaggagctgtgatcgtaccattgngctccagcctgagcaacagagtgagaatttgtttcaaaaaaacaaacacacacataaacacacacaagcaaacaaatcctgttttctttattggtcgttgct

SEQ ID NO: 483128 - DNA, 241 bp, Homo sapiens
cgtcataccacaagctatctataagccaaaaatccgcatcatcattactagacttaatttgactagaaactattctaccaaaaacaacctctttcatccatccatccatagatctagtcatccataaccatctatcatccacccatctatatacccatccatccatccaccatccatcttccatccatccatagatctattcatccataaccatctatcatccacccatctctatacccat

SEQ ID NO: 483129 - DNA, 176 bp, Homo sapiens
gaggttaggcaagcagtcatgatccgactgccgtacatctcatttcttactgccttacgctcatcctgaggtccaccttggcttttaaaaacaccatgtgttctcatgcctccatgtcttttcacacactgttccatttgctcttcctcccacattacattgaaccggatagcttg

SEQ ID NO: 483130 - DNA, 644 bp, Homo sapiens
catcctgagcaaaaagaacaaatctagaggcattacatcacctgacttcaaattatactgcaaaggctatagtaaccaaaacattgtggtactggcataaaagtagacacatagaccaatggaacggaataaagaacccagaaataaattcatccatttacagccaactcatttcaaaaaaggtgccaagaacatacaatggggaaaagacacccttttcaacaaatgctgtggggaatggtagatatttatatgcagaagaatgaaaatagacccctattttttaccatatacaataaccaaatcaaactgaattaaatacttaaatgtaaaatctgaaatttttgaaaccattaaaagaaaacaggtgaaatgcttcaagacatggctgtgggcaaagatttcttgaataagaccttaaagcacaggcaaccaaagcaaaaatggataaatgaaaacacatcaaacttaaaagctcctgcacagaaaagacaataatgaagtgaagagacaactgcataatgaaagacaatattttcaaacctattcaactggatcagtgattaataacccagaatatattaggaactcaaccaaatccatgtcaaaaatcgggagaaacaaaaaacacaaacaacaaacaa

SEQ ID NO: 483131 - DNA, 440 bp, Homo sapiens
tggaaaatttagctcaattttaatgtttcccaagcattatttggaccaggtacccgggttgaaaagatgagtgacagggtctattattttttttaccagtaggggggccccagatcaatgaggcttaacagtttaatcggaggagccccttgcattattttgtgccccgtgtctgtaaccatcctcattgtgcggtagttggaaccgctttggacattctcagacgctcatgttgtggttgatacaaaaaaaggtaccataacacataaccaaagcacaaaaaaaacggggaagtgcgggttgtgcttagactgcttaggaactaattgctcctcttggattgtgcctcaaaaattcgtgggcccatcgctgcagcacttaatatttgggagtgaaactgcaatgcccagcattgtacaattggggcttgaacagtattc

SEQ ID NO: 483132 - DNA, 716 bp, Homo sapiens
  misc_feature (350)..(350): n is a, c, g, or t
attcaaagatagagattgtcagagtctatcaaaagacagacacatcttgattcactgcactttgctttattgtgttttgtgaccatgtgttttacatattgaaggtttgtggccaccctgcaatacgcaggtctcactgcaccattgttcctacagcacgtgctcacttcacgtctctgtgtcacatttcggtcattctcacagtattttaagatttttattattgaatctgttatggtgatctgtaatcagtgatctttaatgctactgttgtcattgttttgggaaccacaaatcacaccaggataagacagcaaacaattgacaaatgcgtttgttctgactgcccnaccaacgggccatttctcttctctctctttttctcaggcttctttttattaatattaaaatgtggccaattaataaccctacaatagcctctatatgttcaagtgaaagaagagttgcatgtctgtcactttaaaccaaaaggaagaaataattaagcttagtgaggaaggcatgctgtaagcaagacaggccagtagctagacctcatgcaacaaacacttagccaagttgtgaatgcaaacgaagtgttctggaaagaaatttaaagtactgctccagtgaacacatgaatgataaaaagctaaacaatcttgctgctgttatgaagaaagtttagttggtctagatagaagatgaaaaaaaaa

SEQ ID NO: 483133 - DNA, 289 bp, Homo sapiens
ctgtagatcgctcacatttacttcaagtgacagtagctttggtaataacacccaaagttgtatacagtggggatgagggattcttctttacaccaacgtatgggataggcaaagaggtggctttcatgttcaggtatgtgttacatggtgctttcttgaaagcgcaagcccagttggcgctgatgaactctttcaatattgaggtgggttgtcgtggtaaagccatctccaacaaagcacactttagtaaccattctcttccatgccttcttctttctctttccggttc

SEQ ID NO: 483134 - DNA, 879 bp, Homo sapiens
  misc_feature (11)..(11): n is a, c, g, or t
  misc_feature (247)..(247): n is a, c, g, or t
  misc_feature (249)..(249): n is a, c, g, or t
  misc_feature (261)..(261): n is a, c, g, or t
  misc_feature (275)..(275): n is a, c, g, or t
  misc_feature (301)..(301): n is a, c, g, or t
  misc_feature (345)..(345): n is a, c, g, or t
  misc_feature (363)..(363): n is a, c, g, or t
  misc_feature (369)..(369): n is a, c, g, or t
  misc_feature (371)..(371): n is a, c, g, or t
  misc_feature (373)..(373): n is a, c, g, or t
  misc_feature (436)..(436): n is a, c, g, or t
  misc_feature (471)..(471): n is a, c, g, or t
  misc_feature (740)..(740): n is a, c, g, or t
  misc_feature (782)..(782): n is a, c, g, or t
  misc_feature (824)..(824): n is a, c, g, or t
ctccgttttcnaaatgctatgaaagtcacaaagtaattaattaaaagacctcagtatcatgacaacaccatcatccttctggtcaacacatttcagtgatgcagggtgtattgtgacagcctgcagatgacacaaaacaatctacattatcatcaaatttcatgtctatactaataataatttttcactgaatgtagcaacaccttttctggctggggttgggctgaggacagaagtgctgttgggngnggaaaaaagggnggaaaaagaatgcnagctggcaactagttaatgaaaatcntaatgatatcagtctttttgcactgggaatatgccctccatcgngctcaaatgggggggggngcgggncncnggtaagactggggggcggggggcgggggtggggcgaaggcataaaatgccttcgcgcacatgnatgcctaccatgttgtgaccaagtgggagggagcngtggtgaggcaggggggagggaaataactcccttagtgtctggcatgatgatgttgaatctcttcagtaatgatttcggtgtggtgtgtggggggtgggagtgtgatgttgctttatgcctgatgcaaagaaatgccttttggctcagattaggttgtgatcacttcagtttggcacctagttaccagtgtcagcatttacagttcattcccagccatgggtgcagtaagtctctgagatctcaaaagctgtaggatgcaacccacatngccttctggccttcgaggaccatgccaaattccttaaagcantgacagctaagggtcataaggcggctctgattcaacctatgncccagtttattacactatgtcagatgcagctcttgcatataaattttgctctata

SEQ ID NO: 483135 - DNA, 262 bp, Homo sapiens
agctcggtacccccagctggcggtgtggagagggcgggcgctgcgcgcggattccgcgccccgtgcgtcagtgtttgcgtcgtgtcgctcccgtgtcgtcgtctaggcatgctcttcgacctcgtcgcgccttctggtgacaccgaatacgacgcggctctcccaagtccggccttggaagccttgggtgtggcatttggcgacactcctgcgcgtttggtagcattcgaagctgcgctcacgctcgcgcgtcgcccgcccg

SEQ ID NO: 483136 - DNA, 889 bp, Homo sapiens
tcctatggtctgaaccatcatatatcagtattaaattatgtgcgcatcattccatcttctgaacctatgttgcttctgaagtgagatgcctgttgagtaggcagtatattaccaatatccaacatgtatgctgccataatgtctcatgcttagctcacgtgttgtggacaagatgattagccgttctgggccagaaatggatatgatctgcatggatggtttagtgctcatccttcgccaggtgcatggcgccgattaaaaacaactgtggaccggacatggtacctcatgtctataatcccagacatgtttggaacggctgatgctgaggccagaattgatcacttgagcccagagaatacgagatcgagtctgggtcttccatgacataagtcctgatatctagctataagcttctaaagtagtgggtgtgcattggtgtagtatgaccaagtaagatcccgagctagttgggaggcagatgagatgaggatcacctggagtacaggatagtcgaggctgcagtgggctagagattgagagtccactggactacaagccttaagtgatggagagtgagagtcgtgtgtcaaaaaaaccaaaagtataaccggggggaggaaagatacaaatatacggcagcgagccgaaaaaaactgattgcccagattgctgaataaaacgaggggccgtatggcgccggcatacatgaatgtccaggacggtgttttaacactgtccgacgtggcaacatgttaacgagcaccttggtagagggcctatatcagggggggccacacttgccagtccctggacttgaaggccaggacaatcaacatcaagttggggcgcacacgccccaccgggcgaaatgcccggcttgaggctc

SEQ ID NO: 483137 - DNA, 426 bp, Homo sapiens
gtaatcaagatgcgggcagataaggggtgattggcaaagcttttaggggagtgttccatctagtgtcatgataagaagtaccctaatatgtttccgataccgtgtatacctaggcctccttgggttaaatagaggactcatgttttcagatatccccagtatggcaaagccagaactcggttctcttttgtataacacggagcttaggactctgttactgttataccacacaccctctacttgacccaccatttagtgggggtgtacattattagttttgtcgcgagcagggtcatatctcataatgtctgagagtcgcgacctaagagccttttgtgtgcccaaaaacatctctaaggaccccggtggacgtggtgggtacccccctgtaatcccggctcttcaaaaggtctgaacaggcgcacc

SEQ ID NO: 483138 - DNA, 195 bp, Homo sapiens
ggtgtggtggctcatgcctgtaagtaagtctcagccctttgggaggccacagcgagaacggattgtttgagcccaggtactcaacagcaggcctggtgcaacatagtgagtgtcgctgtcataaaaaatatcagctcttagtcgtgaagtcctccaagggctggtcgccatcgctagctgtggctctccggtaac

SEQ ID NO: 483139 - DNA, 339 bp, Homo sapiens
  misc_feature (83)..(83): n is a, c, g, or t
  misc_feature (121)..(122): n is a, c, g, or t
  misc_feature (318)..(318): n is a, c, g, or t
  misc_feature (332)..(332): n is a, c, g, or t
ttcggcacagggattcgcctcctggcatagtccgcgctgccttcgaccagcgcatgaagacatggcagcgtggcaggatccanagccacactgcagaagaagcgggaggccgaggctcctnnctgtgggccaacaagcctgataagctgcagcaggccaaggacgagatcctcgagtgggagtctcgggtgactcaatatgaaagggacttcgagaggatttcaacagtggtccgaaaagaagtgatacggtttgagaaagagaaatccaaggactttcaagaaccacgtgatcaagtaccttgagacactcctttantcacagcagcagtnggcaaag

SEQ ID NO: 483140 - DNA, 973 bp, Homo sapiens
ggtgctgtccccctctgtgtaattatttttcatatcatgtcgtctcgtatatcttatctatgtgatgtctgctttgtatgttttgtggtgatcttcttgtttctggatctttttccctttctttccctgtcggatgtgattcctgttttgcatcctttgtggccccttcagtttttctgttcttttctcttctgatttttgggtcattctgcttccagcgggttcatgccttcttactagcctttgtaattccatgaatttatctgtgctttggactactggcagattgagttcgcacactctcgtgatctgccttacccctttgtggtttcattttacttcttccgttcctggttgttgccaggtctggcttcttattcagtgtttatgatatcttccagtttttgcgttcataggtcagagatctatcttgtgttgtgcgttaggacttgtatgagaagggtgtgtacttctgtcagaagtctcttccttcatcacctgaattcagtcaccttggagatgacaactttcaaatgctaacccgatgaccccagaaaacccgtgtgagaacatcgtaccgaagagaccttgtggaatgccctcttgacttaggcccacacctggtcgatagctcgagaaagaatgtgtcttccaaggacaatgtctcggatatgggtcactgtaattgaaagctgttagctttgtctaacacgcattgtcccttgtcactatgggccccgagcctcgaccctcgtgtctgacgcggccacctcatttctggaggggctgaggacagatgtgcctgcttgtggagaccacggctgggcctaagtcgaagggtcatctgcagccccacgcccggagcgtggagcccttggggggtggtcccccccggtgcgttctccgctcgtggtgatgtcaggagctcctcggaggatccagagcggctgtaatacagccgcagtatgtctcc

SEQ ID NO: 483141 - DNA, 344 bp, Homo sapiens
  misc_feature (8)..(8): n is a, c, g, or t
gcacgagnggatgtttctgtaggggtgtttttggatgagatttatgtttatatcagtggactttgagtaaaacagattgctctcgtgatgtgggtaggccttaaccaatcagttgaaggcttaaatagaacaaaaggctgatttacccccaagcaagaggggattctccagcagactgcctttggactcaaagtgcaactccttcctgagtcttcagcctgcctgcctctcccattaggtatttggacttgccaagcctccacaatcacatgagccaattccttaaaatatttttttttttttgagacagggtctcactctgtttcccaggctggacttcttcc

SEQ ID NO: 483142 - DNA, 970 bp, Homo sapiens
ctagtaaccgatggcacgctgcatgatccatcctacttcagcaccccgaccggttagagagtgaggacgccactaactgtctagtagccacaacagcgttatctcggtgactttgtctggctgccatctgtgcaggaagtccgatatttctgtatctcatacctcacgggctttcggaaaatagagtcgtaccctactcactgggtaacgtggacgtactccggaagcccatgaaaacatttggaatacattacgatatgcctgcagaaacctatgatgatccaaaaaggtctgcctcagggttcatatcagttggtgcagccacacaccatatattcatcagccgagccgaataagtacggtataatcctgaagtccctcaccctcaaacttccagtcctcaccaattactaattgatcttattatccacaggcgatctaaagtctatctaaccatagaacatcgacctaaaatctcacaacgaaccgtcaatattgaaatgatctcgcatgaccagctgcctactgaagacgggcatagagacttgaatcttctcaatacctacgctgataccgttggctcagtactgatagtgtataataaaacttcttcgatatcatggtcgcactacaattgacacgatactacgctagttaatttattatcccattaatgttggtactctcctcacgtgagtgagtcgtgtgggcagtcgatatgatagggctttcactgctctgagtattcacccatatgcctctaggcctaaattcttagaaacaaaggctaaagctaaaatccattatcccctatcatattcatctggccgtaaactataagtcttattccttcaaacaatttgtcggactcagtccggcattgaccggtaagtttattgaatgccccgattcatgcacatatttggaaaatcctatcattggaggtccactcattccttcccggagaatt

SEQ ID NO: 483143 - DNA, 382 bp, Homo sapiens
  misc_feature (70)..(70): n is a, c, g, or t
  misc_feature (98)..(98): n is a, c, g, or t
  misc_feature (108)..(108): n is a, c, g, or t
  misc_feature (117)..(117): n is a, c, g, or t
  misc_feature (140)..(140): n is a, c, g, or t
  misc_feature (185)..(185): n is a, c, g, or t
  misc_feature (237)..(237): n is a, c, g, or t
  misc_feature (303)..(303): n is a, c, g, or t
  misc_feature (336)..(336): n is a, c, g, or t
tttttttgggggtgaaaacgtagtttatctacagatggaaatggtcaagtagagaagatcagtgatgtangtaagtctggggtaactgaagaacacantttttgtgtngtgagaganggaaacagagtacggatttgganatgggagcaagtagaattctctcgggctgcttttatttctcaccnaagaaagaatatcatcagttaagattggattggggacactataaatttgaanaaaagaatgggaatattgacttagagaactgaactaggggaagtattaagaaactgtgctgtgctnagaaccactgagtcagtcctggaataaactagnagtgcaattgttatttaccatcatgccactcttgagccaagatatc

SEQ ID NO: 483144 - DNA, 144 bp, Homo sapiens
tcgatctagaggatcgccactttacgcaggacatacttcctattctacaccctagtaggtcccttcccctactcatcggactaatttacactcacaaaaacctagggtcactaaacattctaataatcaatctcaaggccaaga

SEQ ID NO: 483145 - DNA, 127 bp, Homo sapiens
  misc_feature (17)..(17): n is a, c, g, or t
agcggggaacactcacntttggctaggccctagcaaaagtgaacaaataggattacatgaagtgaaaaagcttatgtacagcaaaggaaacaatcaacaaagtgatggttccccgctgggtaccgag

SEQ ID NO: 483146 - DNA, 158 bp, Homo sapiens
gagccggatatcaccgggcttggaaagtatccgtttggaagagaacctcctttaccggttgttaaagagtgttatagttccaccgttttctttcgtgtccagtaagttctcgaaaaaagcctgtgtggatcatatattgttggtcatagtttatctaa

SEQ ID NO: 483147 - DNA, 365 bp, Homo sapiens
catccacgggagtgcaagagcaggcttgggcagtgtgtacatctatctaagcactctacggggctcctatacacagcccccgccatgtaatccatggagagcaagatgggtcggcctgggttggaccacttcggctcatccctccagatgggtagatggcatgtggcatgcacaacttctaccctcagtagcttctagtgggaagcctgttagaacacattgtgctgctgcgggtcaggaccgtcatcaacatcgtccacaagaccttggtgaccaggccagatgtgctggaccctgcactttgcacggacacctcttgtgtgcaagtggagctgtgatttgccttcacaaccagagtgccgggc

SEQ ID NO: 483148 - DNA, 112 bp, Homo sapiens
gagaaagaggatcaatgaaactgcttagctggaatgattaccagacacagaggcaagacagtgtccctggttagctttaggggtctgcctgtgcaggcctcatcactgtggc

SEQ ID NO: 483149 - DNA, 624 bp, Homo sapiens
attctcacatagtaaacttggagttgtgcaggggaaattggccttttccttggatttgatcacctttattaagataaaatttacataacagtataggtttctgagttggaccaaacttatacaggggtataatcattaccaaattcacgatatgaatatttcagtattccaagaagttgtctcatgcatatgcgcagtcaaatattgttctccgacccctagtccctggcaaccattcatctgcattccttcactatagagttgccttttctagaatttcatatgagtggaatcataccataccttgtatgtctccaacttctttgatttagcatgatgcttttaagattcgtgagtgatgatacatgtttcagttattcatgacttttgaatgctaaatactaatccattgaatggatataactgactatcttgaactaggctgctgggaacatcttgtgtacaagtttttgggtggaatatgtatcatttccttagggtaaatcccaggagtggaattgtgtggttgcggttaagatccatgaaattgttaagactgccctgtttacagtgtgcctcagtatttttcgtcctccagcattgatgtcgatcttcgtttgcttt

SEQ ID NO: 483150 - DNA, 683 bp, Homo sapiens
agcaaattacagcaatatgaagagatcatacagtccactgaagaatttgaaaatgccctaaaggaaatgagatttctaaaaggagatactacagattgctgaaatacgctcgtaacatcaattctcattttgcaaacaaaaagtgccaggatgtgattgtggcagccagaaatctaatgacctcagaaattcataacactgtgaagattacttcctgattctaacgactacatgtgccacgagttacccactcctgatgacggataacaacactggcaagtaccacgacaagtatccacatacctcagtaccacgaagtgaatgaattcacgagcctgaacaatacattggaccaacatcccttttccttgcccacatgccgctatcagtgagtcctgctgacagaaactcactggaactcgcctatcagactttactagacggcaacaaccagcacctgatcaatgttgctgttcaactttttctactcagtgaggaactatcttcccatctcgtcccatgatgttgtaccaacatatcacaaggagaaccttcaaaacacttccccagtcggctgctattcatcacaacaactgtatgtacatggcatcaccacttgctgaccctcgggcatcagtccagcatcgcgtcttgccccatactttgtgcatggccctgctact

SEQ ID NO: 483151 - DNA, 354 bp, Homo sapiens
gacatgctgtactaatcaatggttcgagggagttagccccgtgcccagtgtactggcaaagttagctttactcaatcgttgcctgaggtcaggaacactaaaatacctcttagtccaaatagacactttcactgaataagtaaaggtctttcctacagggtctgagaaggccaccgcagtcatttctttccttctgtcagacataattcctcagtttagccttcccacctctatacagtctgataacggaccagcctttattagtcaaatcagccaagcagtttttcaggctcttagtaggtttcagtgaaaactttatatcccttacggtcctccgtcttcaagaaaagtaga

SEQ ID NO: 483152 - DNA, 535 bp, Homo sapiens
agtcatgggagacagcacacaaatgagattcatgacgatgtccaggtttctcctgagcgcatctacatagatggtagacccttcctttggattaggaaagatgacgttaacctctggtacactgtcttggtaagcctggatgagacagacacctcggctctccttgacatagaaagccagcagaactcttaaagccagttgtagtaacggagttgtcagcactcactgaaactcactttacagggaataagagtggtgtggcattttcaatacaatggtatgtaattgccaggcagtgaaggtacaagaagatgagctcatgtcacaggcctaccagatacggtgtcacgagaaagtggtgaggcaaaggatctggttcgaggaatactgatcttggaccaataggtgaacccaacaaactagtgctcgaggcttaggttactgtcatcacaagacttgggatgactccatcataatcctgaggtagtgggtatcagaactacatatggaggtcatgagctggggctggtgtcct

SEQ ID NO: 483153 - DNA, 126 bp, Homo sapiens
agtgggttgaccgtggtctagtgggttgaccgtggctagtagggttgaccgtaggcttgtgggttgaccggggcttgatttcttttggtttttatttttatatattttttttttttttttatatat

SEQ ID NO: 483154 - DNA, 999 bp, Homo sapiens
ctgatacgaatggaatgtatgacaagaatttaaactgtgtatggatcataattgcacctgtaaacaaagtaatatcggaatcctcactcattcaatacatttgcttctggaggcagtatagtaacaaaggcaataggatggctattatgatttattgtgaataggttcatatggattggggtgattaggtgaaacattgccgcatacgtttggagataggaaccgatttcggtgtgatacctacagtaacatagttccttttatgagtcttctatcatggtaaagcgtgtccatataagcggtatcaaattcctatcagatgattataacaattatgaagagggaaggatttaatgcttactattatcaccattcaatggaacattgcctggttggttggtacatcgatacaattgccaatatagtaatcccctaaatagaaaactatgtacatacaaccgcaaactttcagttcgagaaccactaggattgttacccaatcttatcgcatcatcgtattgtattagggtcaatttgattatcacccatccgttatcgagtcagagtccaacgattaaagcagtgatgggcaatttagtatgctagacttacgtaaagattagtagcgcgcagggaatttaatcttaactagttacaggggaactcaacccgtatgggattcatacgggaaattttcaaaagaattttcatggttctagttgggtcatagaaaaaatagtttattcatgactagtaggccaaagtaggtttgtaatgtgcttttctaataggaaggtacgaggaagaatgggtcaacttgtaacaagatactgggagagttttgttgaagagcatgaaacactcgtaagaaattgagatgtaatcaccttattctaaggattggggagatttgggaaaccactgaggacctaattcaccaagggcggttataagggagaaaccctattgagaaaaggcgcctaggaattgggccaggat

SEQ ID NO: 483155 - DNA, 360 bp, Homo sapiens
  misc_feature (112)..(112): n is a, c, g, or t
  misc_feature (210)..(210): n is a, c, g, or t
  misc_feature (260)..(260): n is a, c, g, or t
  misc_feature (280)..(280): n is a, c, g, or t
  misc_feature (292)..(292): n is a, c, g, or t
  misc_feature (331)..(331): n is a, c, g, or t
  misc_feature (355)..(355): n is a, c, g, or t
aaggctgccttggaagacacactgggcagaaacgggagggcgcgctttggagcccagctggcgcatatccagggcgctgatcagcgtattgaagcccagctggcagtggtgncgagctgatagtgagcggcagaatcaggagtaccagcggctcatgggacatcaagtcgcggctggagcaggagattgccacctaccgcagcctgctcngaggggacaggaagatcactacaacaatttgtctggcctccaaggtcctntgaggcagcaggctctgggngcttctgctgtnctttggaaggtgtcttgtggggtagagggatggggaagnaagggaccttaacccccggctgtncttcc

SEQ ID NO: 483156 - DNA, 509 bp, Homo sapiens
aaagtaagatgtagccacgaagcagatgagtatcagggtctcagggtattcacggaatcctgcgggttcactcactcttcgcttcagaacgtatatatgtcttccttccaaattaaccagtatacataagggctaaaactagggatctcagaaccagtatgccaagtgtcggtgcagtttccagtttgaccacggtgacttggggcaagttgctgcttctatgttttttcaacgaaacaacccagtggaaaaacaggtttccctttaaaaagtctaggcgatgagtaacactaccaccaccacaatgaggaaaatacttctggttgtagctttggatctttggtgatctaacttgagatgctctttaatcttggggaataacatttagaagattaaagctgtagtccaataatgaaaacccttggactcttgagaaaacacatgctaacttgtatttataagatgtgaaactcattacccatttacttcagatgagtgaaaggaagttc

SEQ ID NO: 483157 - DNA, 865 bp, Homo sapiens
tctctctctctctctctctctctctctctctctcactctctatgagggacggagtcaaagaaaggatgagagaaactgaaaacaggaaaaagaaagaaaatggaaaatcagatgaaaaaggataaattaataaagcagtaacaaataataaaaataaagaaaaagaaaaagacaaaaaaaaaaaaaaaaaaacaaaaacaaaaaatagagagagaaaacaaaaaaaaaaactgcaaggacggggacggacatcaaatccaaatacgatgataaataaaccaatgaacagggaacaggaagaagaatatacgacggggggaaagcaaaaacaaataggaaaaagagaccaaatgatgacaagaaccaaaatcacacaatgagagtagaaatattcgaaaagggaaaaaagagaaaggcacaaaatatatacttgaacaaggttaaaaattacaatctataagactaattgaatacatgaattaaaaaacatttgaaaaataacagaagatacgaaaacacggaaataaattacagatacaacaaacgactataacacagagtaatcgaaagaaaaatggaaaccaagtacatagagaaacacgagaacccatgaaaacttccaatatctcgaatacaacgataatatataacacccagaataacgagccaaacaagttatatcaataatgacacagacttggaaaaatactaagtatatataaaagagacactatatgacatctcatcgtgagaccctacacgtgagtctcacattagacacaatgagtatgtcaaacacagatgttacgaggacataatgctcactgggaagatgcgcaacaaattatactagaactctctggcc

SEQ ID NO: 483158 - DNA, 933 bp, Homo sapiens
gggggtgaagtgttaactaagatggtgacaatgagaatgaaaagcaggggacacatttgagagggattataaaggaggaatcggcaggtttgggggatggatctgaagggaaatccaagtggaagggatgaatcagagaggattcccagcctttgagcacatataactaggtaggtaatggtactaataacaaatctccaaattttagagttaggaaatatgtttcaaatcatccgattccatgtttcttaaataggctgtaaggagtatccagattggaaaccattatagaaataattgtcaactcatctttatgacttccttccttttgcccttttcccagtggtattttccaggttctggaaatgacctactttatgccaccactatatttaggctgcaaatttcccctgtccatcctgaccaaggtttgaacaatcccatgtggagaggaacttaattgcagaaacccttgccagcgtcttttaatttccctatatgccgggggtacttttggggttgagattgaaaaggaaaaaaatggtaaatgtgtggggaaatgtgttccagctccagacttccttcctcaccccaccaggaagccagtattgatgggtggctttcctgattaaaaaatggcaaaatttggccaggtgcagttgcttaacttaaccccttttaatcccagcacttttggaagcctgaggagggcagatcaaaaaggccaggagatcgagaccatcctggctaacatggtgaaccccgtctctactaaaatacaaaaaatcacccgggctgttggcaggcgcctttagtcccagctactcgggaggccgagtcgggaatggcgtgaaaccgggaggcagagtcttgcagtgagctgagatcacaccactgcactccagcctgggagacagagcaagactctgtctc

SEQ ID NO: 483159 - DNA, 129 bp, Homo sapiens
gtcctcttgatcctttaaattgctttgtctgtgtcacgcaggtgacctcatctcttacatgctccctgtagcaggggtcgttagacatttttaagtcacatccagttctactaatgagaagcagtaaaa

SEQ ID NO: 483160 - DNA, 230 bp, Homo sapiens
tggagactcagaggcacccggcctggtctctgtgatcaatgcacaaggtgcgggaccttgtcccaatgcagcagggtggtcctgcctgggttgagggtgggccagacagtgaccaagccatcagggacctggttctcccgtgctgcggtaccagatgtgatggctgtagatggcacgccatgccatgatgcctgtggatgagactcctgccttgcttgacacgtaaactg

SEQ ID NO: 483161 - DNA, 601 bp, Homo sapiens
  misc_feature (190)..(190): n is a, c, g, or t
  misc_feature (387)..(387): n is a, c, g, or t
  misc_feature (423)..(423): n is a, c, g, or t
cgtattcaagagccgagaccctcaggaaggaaggagtcacactcctgggtaatctcctaaggctgtgctcctgtgctctgacatcctcagtagcattggtgcagaggccctgcttcccatgggctgttcccagccagtgaccagtcacagcaggcacactaaggcaggtcattccggggagacagaggantcctctgatggtgaactgtggctccaggactcctccgtggccttgctcaacccgccttagatttcctgtgttctaggatgtgtcgaacaaaccttgtctcctgtccagcacttggggtcccacttgcaccgtggtctgccgccttttccagggacttttgtctcacttggcatattcccttacaggtgtgttccctnataaaatgccacagaggtgaagctcatcctggcatntgctccttggaggacttggataaaaatatttccatctgcacaccaataacccttacttattccaacctgtaaaatccttctctttatccaacttctgccacccccatagaattgattttgcttggtttgtagtatctctttgagttaacaggtattttttgttttaagcccctaaatc

SEQ ID NO: 483162 - DNA, 194 bp, Homo sapiens
cttataacctcaagagtgtacattcacctcccaccctcctggagcaccagaggggctcctgctttcagtgtggccaacagttgttgggtttgggactgccatcttgaaaacaggcagaatctgaactggtacaaactggccccagtaaacttgcaggaaggtggccctgctcccttgagataagccacggtcaa

SEQ ID NO: 483163 - DNA, 382 bp, Homo sapiens
cccaggcagaagagtttcctaccaatgatgacccaggcagaggagattcctaagaaggtggtttccaaaaaggctccattaaggggggtttttgggaggaaggccccaagtgagtttacttgggtgtgagaaaacatggccgccgcttttgcgccctctcatctgtacatctgtattcccacctccattattcatattgtcacctcgaggcttgggggggtgggggagataagattagaaaccccggctttctttttaacattggggcagcgccaggtatttggaaaacccgccctttcctttagcgcccttcctgcccttcctatactattggggggagggagaccatttcatgtaaaaattacacaacaaccctgtctac

SEQ ID NO: 483164 - DNA, 350 bp, Homo sapiens
atccccaccccccactcccacacacagacacccaactgatacactgaagattaaaattctaactgtagaacctagaatgtaactgtatttggagatggggcctttaaaaaggtaatgaagataaaatgaagtcatatgggtggactccaattccatatgagtggtttccattaagaagagattaggacacagacacacagaaaggtaagaccatgtgaagacactggaggaagatggccatctacaagccaaagagatgtacaggctttagaagaaaccaacactgctgacaccttgatcttggacttctagaagtgtgagaaaataaatttctgttctttaaactaccc

SEQ ID NO: 483165 - DNA, 1631 bp, Homo sapiens
  misc_feature (258)..(258): n is a, c, g, or t
gtgttctaatctaggccgccgatagccgccgttcgagggcgttgtaatgtattatgtgtcgacgggttgtttcagtacgccgccgtggggagaatgggggcttttgtttcgtgttagacacgcagagtgtgtgtctggagtgtcccacaaacgtgtgccccctgtgtgtgttgtgtcggcggaaagacccgcccgttgtttcacacgggtgtgctcttctgttggggggtgatccccgccgggggggtagacaccacnccctcagttgtggttatgtccggtaaacaccctgtgttaacacgtgtttggggagacacagcgcgcccctggttgtgtccccctttccgggcctttataaatccttggtggggatgtactccccaccgggtgttggtgttggtttgttcttggtgaaaagtgggtgaaaagaggggtggtgtgtaaaccctgccacgcggtatatttccccgtggaagaaagagggggtgagcgacccacaccacgtgtgttggaaatataatgttaggcgctaatttcacaccttttctttgaaggggttccaccgaacccacggccccgtgttctagagggagtgtttgctttcgccccacccacgcctccacatgggtggacacatggttacccacagcttttgtgtgggggaagggcaataatatacatcttgttgcgccctctctattaaaatgtgagtcgccccctgtgtattccgcctttcttttttagcccacggaactgagccttataaatgggtcccaaacggagggtgttttaaaacccgccggctgccgtgccaacgggggtttacacaccaccccgtcgtgtggagttagtaaaaaaggagccctcatagtgggccgttttgccccccaccggatatacgtttggacacattgggggggggtcttacacaccataaagtgtttaagataagtgtttgttcctcttgggggagagtaattctcacccacggggagaatatttcaccacattgtacaccccccacgctctttagagacgcccctcatatgtggtaacgcaccaggtgcacccacacactgtacaccctcttgtgggtggttataaagaatgtggtattgagaaatatgcgccgtaatacacgttatggttgaaaaagctggtgtgtaactcgtgaaaccgggggagaaacaccacgaggttctcttggcaattcttgggccctctctactgtgagtttgttataaaggaggtgttctctcgtgcacacctgggtgtcccccccacacccccgccaatgcgttctgtgccacctgtgggctaaacttgttaaataatggtggtaattttgtaccactataaggtgattaatttcttaaactcggagcttgttcttcgtgttaagagctgtgaataacacttaatatttctgagcacttatttgtaactatccgctgtgagtcacgtaagagttcctgtaagagaatactgctttttaaagagaaaaaaataaccactcgctgagaggggtgagcctatatcccactgtgaggtggtcacctttattttaataggatttttaaaacatttttaatgaactaagttgaataaaggccaccatttaaaactgtcga

SEQ ID NO: 483166 - DNA, 223 bp, Homo sapiens
attcgcggccgcgtcgacccatccccatcatgggcatcgatgctggcctggctgtcctgggtgtgctcgctgtccttggagctgtggtcaccggtgtgatgtgttggaggaagagctcaggtggaaaaggagggagctgctgtcatgctgcgtgcagcgacagcgcccagggctctgatgagtctctcatcgcttgtagaggctgagacaggtgcctttgcag

SEQ ID NO: 483167 - DNA, 93 bp, Homo sapiens
  misc_feature (27)..(27): n is a, c, g, or t
  misc_feature (46)..(46): n is a, c, g, or t
tttaaatcccccaagacgagaatttanctcttgatatgctcagagnctggagatgcgaatggcagagatgctcaggctcagctgcaatatccg

SEQ ID NO: 483168 - DNA, 105 bp, Homo sapiens
  misc_feature (70)..(70): n is a, c, g, or t
agcggcgcccttttttgtcctctcttcctttcttcgagcttagtcacacttccaacttccacataaacanattgaaactgtatgccaatctccccactctccaaa

SEQ ID NO: 483169 - DNA, 1963 bp, Homo sapiens
  misc_feature (1)..(1): n is a, c, g, or t
  misc_feature (1030)..(1030): n is a, c, g, or t
  misc_feature (1352)..(1352): n is a, c, g, or t
ncgcgcctgctgtcctagtgttgctcgtgtacgttgtgttcgtgtgatgtgccgtcctatcgcgctggcggctgtctttctgctgcgtatctattcgcagcgttatggggctcctattatatatcagtggtgtgattatgctcgtacgctcttgttgtcgcaactgcttgtggttgcgcccgctgcttgagttcttcctgttgtatgttgtcgcctccgtttggttagtgtttgctgcggtgtaggcgtaacatactcccctgttttgtggtgggcggcttcttctcgttggtgagcctccctccgagatgttgtgctcgctgtgttactcacccccggggtgttcactctcgtggttagttggtggctggtccctccttctcccaacgccagagtggtgtccaccacaaatggttggtgggccgccctctataaggtgcactacagcgagtagtgtggtgcgatgtgtaaagaggtagattataccctttttttcgctctctggctcctaggtgggccctctttgtgggagcatcgcttgggcgctccaccaatagtgggtgtgcccgaacacgaccagcactgtgtggaagccacgcgggatgatgttcaacacgcttggggggtgtccttctcccacacgcgaaggtgaggaaggaattggtcgccagacacgtgggtgtccccacaccaccaggagaggtgtcttctgggatagtcgcctcaacacacaaaggctctcacctttggtaggggtgaagtgtgtgcttgttctaacagaccgttcgctgcgttgcttccttcacatcgccaaaggggatccgctcgcctcactaacccgtcttgatgggggtatgcccaacgtgtttctgttggtgtgcgcctccgcctcatgggttgcctcccgcctggttgtcccccgtctcccgttgaagtagggcgtgttttgctcttgggttgagaatgggagccccccactggcgacacgcttgtcgactatacatcgtctgcacctatgggtcatcctgtngtatccgacggccaaccggtgtgtgtgttcctgcccacgggccacatcgtgtgtccggggggaggactgctacgccgcctccccactcgccacgcgcacagggttgccggtctgtctccgtctcccaacagacggtcacaacacccgttctgtgggggaatagtccgtttgtacgcacattgtgtggtggtcttctcttgggtaatatgagtctcccctgtaatatgtggagaggggccgcacacaagacacacaggaggcacattctctcccacataccactaggaatatagcgcacacaccacttgggacacaggtgtgnggttatagccacacacctctccacagggattgttgggagataaacaccacacctttccacagcccaaccgctcttaatgagacccttggttctgtcaccacagaggaacacacaggggagaagatacaccacaccgcacacctatgggtgcccacccagaacatggcgcccatactccatcttttaatggagagatctctccagacaccagaggcgtggcgtatataggggagattgtgtagatggtgcgcacacacagaccagatgtataagaagagtatctccacacccctggagccatctcacacccagatgcgctgtatagcctccaggtgcaccagaataggccaggacagtgtcccatagccgagagctgcgcccctctacgcccagaagatttgagccccaccctccaggaggggcccagaaacccgggggcccatccaaaagccatcgggatttggccatggttcccagatgagcttttctaacccaacctagtagattgtttgcccttttttgcactcagacctgtgtaaaatatgctcctggaacacccaaaaaaaaaaaatatactcgagcataatcgtcggtcgaaagataatactcag

SEQ ID NO: 483170 - DNA, 1345 bp, Homo sapiens
  misc_feature (10)..(10): n is a, c, g, or t
  misc_feature (639)..(639): n is a, c, g, or t
  misc_feature (755)..(755): n is a, c, g, or t
gacagggganaacaaaggatggagtggtccaaagcctgggtttcctgaaccaacaaataatactccaaaaggaattcttcatttgtctcctgatgtttatcaagagatggaagccagccgccacaaagtaatctctggcactactctaggctatttgtcacccaaagatatgaaccaaccttcaagctctttcttcagtatatctcccacatcgaatagttcagctacaattgccagggaactccttatgaatggaacatcttctacagctgaagccataggtttaaaaggaagttctcctactcccccttgttctccagtacaaccttcaaaacaactggaatatttagcaaggattcaaggctttcaggttcactactgtgatagacaaagtggcaaagagtgtgtgacctgtctgacattagcccctgtgcagatgactttccatgctattggaagctccattgaagccagccatgatcaggtataatatgccactgccattttgctgtgttatggcccagctcggaaatggaaggccatcaaaatggaagctatgtgcgcacatgcagctttgctttccttaatacattatctgctagcaccatctgctagacttgaaaaatcaaaattgtttgngttgggaaattgatatcatagtagatttaaattattttagacttcttgtttgcagttcattattattttaaatatggaattattttatatgaaaaatagttgtcccacagggtatntttatctttaatagttatatatgagaggaagggtcaacaaaacaatatagataacactggagtctcgctgtagtatactcatttggttctgttaaaaagagttttgtattatagaatgtacagtgatgcgtcacttaatgacaaggatatgttgtgagaaatgcatcatcaggtgattttgttgctgtgcaagcatcacagaatgtacttacacaaacctaaatactagagcctaccacacacctaggctatgtggtagagcctcctgctcccactacaaacgtgtacagcatgttactttgctgaataccataggcaattgtaatgcaatggtatctgtatatttaaacatagaaaatgtacagtaaaaatatggtattgtaaccttctgggagcaccattatatttgtggtctgttattgaccaaaacgtcataatgcagcatgtgactgtatgtagaacaactgtgtaaactttcagaaccatcaacttagtcccataacttgggatattattgaaataaagttccagtattgtttttacttttaaaggtttatttctgaaataaagctaaaaatctgaaaagtgaa

SEQ ID NO: 483171 - DNA, 116 bp, Homo sapiens
ggatttgctggtgcagtacaactaggcttaatagggacatgatcaagtgggtttcatatgagggatgaagagatggtttaacatccacaagttaataaatgtgatagaccacataa

SEQ ID NO: 483172 - DNA, 2773 bp, Homo sapiens
  misc_feature (10)..(10): n is a, c, g, or t
gacagggganaacaaaggatggagtggtccaaagcctgggtttcctgaaccaacaaataatactccaaaaggaattcttcatttgtctcctgatgtttatcaagagatggaagccagccgccacaaagtaatctctggcactactctaggctatttgtcacccaaagatatgaaccaaccttcaagctctttcttcagtatatctcccacatcgaatagttcagctacaattgccagggaactccttatgaatggaacatcttctacagctgaagccataggtttaaaaggaagttctcctactcccccttgttctccagtacaaccttcaaaacaactggaatatttagcaaggattcaaggctttcaggtatgaattaaaagcaaaaacaaaaaacaaaacaattcattagcctcagattcttcatctgtatacatcacaaggctcattcttgcctgctagtatggcctacatgccacttacgttttaagttatttaggaacacaaaggacagacaaaaaagccatatgcacatgcctcattttctcttatttttgatctatctagtaattcttttgctgcctgtctcttctccattttccttcttcttttttaagcatttttcatattcttcactgtcttctatttggtcttgattaggtgcatctatctcttcgctctgtcttccacaaacaaaaattctgccttcagacatttggtgttagtatttcacactcagttctccctttttttacataaggattgagtttctttttatgatgattttacctttatagcaattttgaattttgcattctattgctagtattgattcaggtacaccattaagatacaacattctagaagtctattaccttaggagttaattaaacatgatatttgaagaataatgaaatgctttatagttgtttgaggcataacaatgtgtatttgttttactggatcatgttttgaactgactagggagggtagcacctgcctcagatagtaccaacaattctgtttcactgggtagtctaaaactagcttatagtttaacttaacttgttgtgtatgtgaatttagggatggaaactttttttcccctatttattctttgtttccttctgggaaaaaaccccacaaaaatcagcactcctttatggatacattggagcttttgaaagaattgtaaactctaggaaggggaaatatctgtgtcttgatttcttagttgccttgaaaatcatgtactgaactgtaaccgctaacttgactggatgaactagtttgcttgtgtgtagagagtgtattgcttcctcagatttcactgttttcatctccttttccatcttagtctttattccttaagaccaaaaactgtaatatcctttagaaatgctctagaagatctgtattgtgtagaatgatcatgtatttataaatattttacaagtttagattataaaatgaaaaagaaggtcatgtgttttggggggtattttgcatgttcggatttttttttcccttcaccgaacccttctgattctttcaaactattgccaggtagttgttagtgtttctaattggactcttaatatgaacttcaagaagctgttaccagttatcggctctgtcatctgaaattttaaccacttaatttaaagttacaattttagaatttgtttttgttgttttaccttaagaaacacaataaatcactgtttaaaaaagatctcaatttatataaagtactggaaaaaagctaagtaatttttagttctatctataatctccgtaggatgaattagaaataaattgtgatgaaaagaaattaactgcttatttatgaatctaatcatttagaaatgtctgagagtaacactgcattcttatagaaacaaagcacaaattgcattcaagctctgaattgattttttgcttggagctgttgttacagtagctgtaattttgctaccagaatgtcttaattttttaaatttgtttttatttctaagctcttggcaatgacaataattataattttaacatatcttcactgtagtcaacatgtagagtctgcttccctcattattgcattgctaaggcctttttaaaaagcttatgcttacataatatactcttttttatggacacgttatatgtttccaaatctgtgtattgtgatttttacatactaatgaatataaacaggtgattttaaaatattactgtgcttctttggttgaatgagctggtattgatgtaaaatactctgtcattgatggaccactacctgcagctaagcagtgagcagaatctccgggaaatgacttagtctggccacatgcatagcccatcttcataatgtcgcagcagaaggttctttgtggttaaaagttttaaagcctatttctttataggtaaccctctcaggtatatttacctggtagaaaaacatgtagattgtttctattacttaaatgttttaattggactgtagtttagaaattacaggaccagcttgttacagattatacactattctgttacttttatttctgaaacttaaaaacaataaattctttttctgtgtttctaggttagaacttttttattttattgcacactgaacagatactgttgcttattgaatattgtgtaaacccttctttggctttccttgcccattgcaatttgatttaagcctactagagccattgtatgtgacagctatattgtattacaaagtaaaaatatatgagtgtattg

SEQ ID NO: 483173 - DNA, 108 bp, Homo sapiens
taagagggggggttttttttttttcggggggggaaacccccggggggggcccccgggggggggggttgggggggcccccccaaggggggggggggcaccggcccccaa

SEQ ID NO: 483174 - DNA, 2950 bp, Homo sapiens
  misc_feature (10)..(10): n is a, c, g, or t
gacagggganaacaaaggatggagtggtccaaagcctgggtttcctgaaccaacaaataatactccaaaaggaattcttcatttgtctcctgatgtttatcaagagatggaagccagccgccacaaagtaatctctggcactactctaggctatttgtcacccaaagatatgaaccaaccttcaagctctttcttcagtatatctcccacatcgaatagttcagctacaattgccagggaactccttatgaatggaacatcttctacagctgaagccataggtttaaaaggaagttctcctactcccccttgttctccagtacaaccttcaaaacaactggaatatttagcaaggattcaaggctttcaggtatgaattaaaagcaaaaacaaaaaacaaaacaattcattagcctcagattcttcatctgtatacatcacaaggctcattcttgcctgctagtatggcctacatgccacttacgttttaagttatttaggaacacaaaggacagacaaaaaagccatatgcacatgcctcattttctcttatttttgatctatctagtaattcttttgctgcctgtctcttctccattttccttcttcttttttaagcatttttcatattcttcactgtcttctatttggtcttgattaggtgcatctatctcttcgctctgtcttccacaaacaaaaattctgccttcagacatttggtgttagtatttcacactcagttctccctttttttacataaggattgagtttctttttatgatgattttacctttatagcaattttgaattttgcattctattgctagtattgattcaggtacaccattaagatacaacattctagaagtctattaccttaggagttaattaaacatgatatttgaagaataatgaaatgctttatagttgtttgaggcataacaatgtgtatttgttttactggatcatgttttgaactgactagggagggtagcacctgcctcagatagtaccaacaattctgtttcactgggtagtctaaaactagcttatagtttaacttaacttgttgtgtatgtgaatttagggatggaaactttttttcccctatttattctttgtttccttctgggaaaaaaccccacaaaaatcagcactcctttatggatacattggagcttttgaaagaattgtaaactctaggaaggggaaatatctgtgtcttgatttcttagttgccttgaaaatcatgtactgaactgtaaccgctaacttgactggatgaactagtttgcttgtgtgtagagagtgtattgcttcctcagatttcactgttttcatctccttttccatcttagtctttattccttaagaccaaaaactgtaatatcctttagaaatgctctagaagatctgtattgtgtagaatgatcatgtatttataaatattttacaagtttagattataaaatgaaaaagaaggtcatgtgttttggggggtattttgcatgttcggatttttttttcccttcaccgaacccttctgattctttcaaactattgccaggtagttgttagtgtttctaattggactcttaatatgaacttcaagaagctgttaccagttatcggctctgtcatctgaaattttaaccacttaatttaaagttacaattttagaatttgtttttgttgttttaccttaagaaacacaataaatcactgtttaaaaaagatctcaatttatataaagtactggaaaaaagctaagtaatttttagttctatctataatctccgtaggatgaattagaaataaattgtgatgaaaagaaattaactgcttatttatgaatctaatcatttagaaatgtctgagagtaacactgcattcttatagaaacaaagcacaaattgcattcaagctctgaattgattttttgcttggagctgttgttacagtagctgtaattttgctaccagaatgtcttaattttttaaatttgtttttatttctaagctcttggcaatgacaataattataattttaacatatcttcactgtagtcaacatgtagagtctgcttccctcattattgcattgctaaggcctttttaaaaagcttatgcttacataatatactcttttttatggacacgttatatgtttccaaatctgtgtattgtgatttttacatactaatgaatataaacaggtgattttaaaatattactgtgcttctttggttgaatgagctggtattgatgtaaaatactctgtcattgatggaccactacctgcagctaagcagtgagcagaatctccgggaaatgacttagtctggccacatgcatagcccatcttcataatgtcgcagcagaaggttctttgtggttaaaagttttaaagcctatttctttataggtaaccctctcaggtatatttacctggtagaaaaacatgtagattgtttctattacttaaatgttttaattggactgtagtttagaaattacaggaccagcttgttacagattatacactattctgttacttttatttctgaaacttaaaaacaataaattctttttctgtgtttctaggttagaacttttttattttattgcacactgaacagatactgttgcttattgaatattgtgtaaacccttctttggctttccttgcccattgcaatttgatttaagcctactagagccattgtatgtgacagctatattgtattacaaagtaaaaatatatgagtgtattgaaaacaaagttgttttaattttgtttcatcacccagtctttaatttgaatttataaattacaaaaagctactttgatcaactgaatgtaggtatccaagctcaaattcttttaaacctacaaaataggtaaaattattatacaattaaaaaaattacacaactggcttaagagagca

SEQ ID NO: 483175 - DNA, 1828 bp, Homo sapiens
  misc_feature (10)..(10): n is a, c, g, or t
gacagggganaacaaaggatggagtggtccaaagcctgggtttcctgaaccaacaaataatactccaaaaggaattcttcatttgtctcctgatgtttatcaagagatggaagccagccgccacaaagtaatctctggcactactctaggctatttgtcacccaaagatatgaaccaaccttcaagctctttcttcagtatatctcccacatcgaatagttcagctacaattgccagggaactccttatgaatggaacatcttctacagctgaagccataggtttaaaaggaagttctcctactcccccttgttctccagtacaaccttcaaaacaactggaatatttagcaaggattcaaggctttcaggtatgaattaaaagcaaaaacaaaaaacaaaacaattcattagcctcagattcttcatctgtatacatcacaaggctcattcttgcctgctagtatggcctacatgccacttacgttttaagttatttaggaacacaaaggacagacaaaaaagccatatgcacatgcctcattttctcttatttttgatctatctagtaattcttttgctgcctgtctcttctccattttccttcttcttttttaagcatttttcatattcttcactgtcttctatttggtcttgattaggtgcatctatctcttcgctctgtcttccacaaacaaaaattctgccttcagacatttggtgttagtatttcacactcagttctccctttttttacataaggattgagtttctttttatgatgattttacctttatagcaattttgaattttgcattctattgctagtattgattcaggtacaccattaagatacaacattctagaagtctattaccttaggagttaattaaacatgatatttgaagaataatgaaatgctttatagttgtttgaggcataacaatgtgtatttgttttactggatcatgttttgaactgactagggagggtagcacctgcctcagatagtaccaacaattctgtttcactgggtagtctaaaactagcttatagtttaacttaacttgttgtgtatgtgaatttagggatggaaactttttttcccctatttattctttgtttccttctgggaaaaaaccccacaaaaatcagcactcctttatggatacattggagcttttgaaagaattgtaaactctaggaaggggaaatatctgtgtcttgatttcttagttgccttgaaaatcatgtactgaactgtaaccgctaacttgactggatgaactagtttgcttgtgtgtagagagtgtattgcttcctcagatttcactgttttcatctccttttccatcttagtctttattccttaagaccaaaaactgtaatatcctttagaaatgctctagaagatctgtattgtgtagaatgatcatgtatttataaatattttacaagtttagattataaaatgaaaaagaaggtcatgtgttttggggggtattttgcatgttcggatttttttttcccttcaccgaacccttctgattctttcaaactattgccaggtagttgttagtgtttctaattggactcttaatatgaacttcaagaagctgttaccagttatcggctctgtcatctgaaattttaaccacttaatttaaagttacaattttagaatttgtttttgttgttttaccttaagaaacacaataaatcactgtttaaaaaagatctcaatttatataaagtactggaaaaaagctaagtaatttttagttctatctataatctccgtaggatgaattagaaataaattgtgatga

SEQ ID NO: 483176 - DNA, 1080 bp, Homo sapiens
tggggtgttgggtatttcccccgggcccaaaaaattgggcccttttgggtgtgtgtctcttataaaaatttctgtgtctcgctgtgccccacccacggggtatttgtggaaattatctccgctgtgttcctcctctttttgtgtgtattttaaaaaaaaaaaaaaaaaaaaaaattacaaaaaaagggggggtgggcaaacacgctgtgtaaaggggggggcggagtattgtgtgtggcgcgcgtgagtgtgtgtttgtgtgttctctagggcttttttggagaaaaaaacaggcgtgggagccagtgtcattatatttcaccaccccacaactcgcggaaggagaagatatttgtgcgccccacagcgtgtgtgtctgtatatcatatgataccaccccgaggacagagagagggcgagagtgagttttattctccccatgtgtggtgtgtataaatctaaagcgcactattcattcaccgagagaaaaaaattggacaccaaaagaatctccccgtctctattcttacctcccacaagagcgtgacactgtttgagcgatatgtggaattatcctcacggtatataaagaggagtgcgccccttgtggaaaatatatacgagcggggtgaaaatctcttatctcacaattgtgtggtgtgttgctgaatggcgtgtgtccttccatgagttttataaaacagacgcgcctcttataaccgccacccccttcctacaagagaacaacaaaagagggggggccgcgcacacatttctaaccaaacccagaaaaaaaccagcacaacaatatgctccaaaaacaccccccggggaaacaaacacggcgggaacaactatcgagaggcggcgcgaccaaacgcccacgaccacaaacatagtatgcccgtcgggaacaataacaagcaaaatttcacccccgcgaagaaatatatcccaccgaacaaaggcgaagagaaaaagagggagtggaaaaaatagaaacaacaagagcaagacaacacaccccctggcacacaaacgccgggggtatcctccgcacacaccccaggtgatatgaag

SEQ ID NO: 483177 - DNA, 988 bp, Homo sapiens
taaaaaagacaatattctcttaatttctgctggggatacaaatgtccagttgggatgatgaaaatgaggcaagtacgggacaccagggcgggctctccggttggtcccaataaattccaagggaggaagaagctaaccaggtttgggagtggttatgggatcatacgtggcatctaggcttatcacatgtctacagccgtggtcctttcgtggaacaggacttcccgtgccccaggtgatgacagctataaagaggggccaaacattgagcgaaatcccacagtgtaatccgcaggcgcaggcgtgagtgtctccagaagtgttctctaaaaatcctgttattgggttcagagtggggagtgaccaatcagggcgtgcttgccccatttcgtgcctccacggcatcccgatactgcttgtgcctgcctaaggtcgggagagatcaattacaatcgggggggctggttgggggccataagcctgggcagctttgtctgggctaacacacgcactttatatctatagggcctgggggatactccaagtgccgcgacagaacataggcagctctacacaagaattaacgcccaattaacccgtaccgcttcaccaccagaacgttcgccccacacggggaaaggcatctccgaaccacttaaacgtgtttgtggggaaaagccccaacacccacgagacctagaagaaggggggggagcaactccgggtcaccgcccactgggacacttggcctgcaaaccctaacctaccagggacaggtttgaaacatactggcagcatacaccggccgggggagaatactctaatgccactggtcacacacacccctttacaaagccgcggcggggaccacaggcgctcaggagacacggcaaaattcccggacgaccggcaaactcagagggaggacgagtcgggcgtggcaacaaagggagggagacggagaccaacgcaaacggcgcaagaacgt

SEQ ID NO: 483178 - DNA, 562 bp, Homo sapiens
  misc_feature (21)..(21): n is a, c, g, or t
  misc_feature (60)..(60): n is a, c, g, or t
  misc_feature (86)..(86): n is a, c, g, or t
  misc_feature (100)..(100): n is a, c, g, or t
  misc_feature (119)..(119): n is a, c, g, or t
  misc_feature (129)..(129): n is a, c, g, or t
  misc_feature (164)..(164): n is a, c, g, or t
  misc_feature (205)..(205): n is a, c, g, or t
ctgtattcccaccagtttggnaagcttaagccataggatcgtttaaggcttaggagtttnaaaaccagcttgggcaacgttgttanaccccggttttttncaaaaatttaaattttganccagggtgtnatggcatgcccctgtagtcccagccactcaaaggntaagatgggaggatcactttgaacccaggactttgagactncagtgaggtatgattgtatcagattgcatcgctgcactctaggcgagaccctgtctccttaaaaaaaaaaaaaaaaatagccgggtgtgttggctcacgcctgtaatcccagcactttgggaggccgaggcaggtggatcacgaggtcaggagttcaggaccagcctggccaagatggtgaaaccgcgtctctactaaaaatacaaaaattagctgggtgtagtggcaggtacttgtaatcccagctacttgggaggctgagacagagaattgcttgaacccaggaggtggaggttgcagtgagccaaaatcatgccactacactccagcctgggcaacagagcgagactcagtctc

SEQ ID NO: 483179 - DNA, 1101 bp, Homo sapiens
  misc_feature (236)..(236): n is a, c, g, or t
ggcggagtgactcggtcggtcattacctgctgtgtagttgccccgaggactaggagcttaagtgaacgagtcagattctgaggaagatgaatccacaaagaagaaaactagtccttcagggtatccactgagggtactggtttgtctgccttgcttccctaaggctacaagaacctggactgtggaaagagattagacagtgttgctcctgccccaagtgccttactgcccgtganaagcccttcgggaatggctcgccgctggatactgaagcgcctctcagaactgggcttctaaggatccaagatcttccgtcgtcttgcccctgtcgtgggcaccagaagggcaccatctctcagtcagctcctactgactaattcaatggtcttgccttgcctaaggatgttgcttggcctgcaaggtggaacgaaaagcatgactacacttgcctggagagatagacctgagcgagttgaattgagaggaaggttacagcccctcgagagaatctttgttccttcgcgctcgcgctgagataagtgcctgtaggtgcgacgctggacggtttgtaggacccgattaactccatttaactgcactagttctcgcgcatcgtggtacccatggagagaggactgtgctaccaaggtccatcgggaatcgcaagaagcccggacttttgcccagtgtagcggagtgcagtccgaatgtcacccccttggaattcccaagatttgtggcttggcctatggcgttcgacccgtttggtgtggccccgccttttgtggattggcccttcacatgtctcctagggtggggaacagaacctttaaccagggcttttaacaccattaccgatgggctttctgcccaagcaattaatttgtggcgctgaattgggccctaaaaattggcccctgggctagcgttgggccttttactttcacttccccgtgtgcatttttaattctaacgaaagggtgggggttgtggcttaaccgtaattaaaccttaagctaagcaatgggaaaccccccggaggcgccccttttgtggttccccgcctctcgctgccgaagtgcaagaaagttgggcccccag

SEQ ID NO: 483180 - DNA, 231 bp, Homo sapiens
tctttatcgtctaacgtcgaacacctccattcacgaactccactctactcatcgattcatcaaacatgttatcaaagtacgtaggaagcaatcaaggttgccgaaaattaaaagaaccctagggtccgagattcaacaggccttgaagctcacgaaatgcttaccgtcaacctcccaagcgaaagaaagtacaacatcgatccattgacattggcataacaccacacaatt

SEQ ID NO: 483181 - DNA, 577 bp, Homo sapiens
aactacagttgttcagaacgtgtgctatggtttgaatgtgtccccttcaaaattcaggtgttgccaatgtgacagtattaaaaggtggagcctttacgaggtgattgagtcatgagggcacggcctcatgaataggattaggtgccctcatgaaaggatttgtttttttatttgttttttttgggctctgttgtggcaccaggcggggatgtggctgtcggagcacaagtctgcggctcattggagaaatctaccggtgtcccgagttgcaacgcaatgctccgtgggtaacacgcctccaaaaggagctggggattacaggcgggactgttgccattacaaccccaggttgaccttttctggtgatttgttggtaaggtaacggaggattggagttttccaccaatttgggccaggggtaattccttcgaagtttccgtaaccctcagggttagtccgaccccacccttgggccgtccaaagatggcgttggggattacacaggggcggttacgcacacgggggcccagcctctatcaacagacatttgggagtggaggggatttccaacggctcg

SEQ ID NO: 483182 - DNA, 884 bp, Homo sapiens
gatcttccccgtcttcaggtgacctgtgtctatgaagctcatttcgcgtctgtggatctggtccgcgtggtcgtcaagtcatgtctgaagccaatcagatccctagtaattaggcagcacctagcgtcaacatgagcactattcacttgtgtagtgcacgctagcttgttaccattgcagtctagtcttgtgctgaattctccgccatatacatttcttgttctgtccggatatcagccccactggatgggtcgtcctggatcggtgtcctaaatgattcccgttggccagcaacgtgtgcctcgttccccttccttgggtagcatgtcatcgtaacacgataatgaatcacgtctgccttcaagagacctgggaatgtgggtcatcccttgttgaggcatcgattgcgcacccgaaaggggtgcggcatttggaagaccaattacacgacttggagctgagaagcccaatactgtggcagcaatctttcaaactctcctagatgtgtggcgaagcccattaagatagaaattaccgccacacgaaagtcagttaccggttactcggttgtgccgctaaatccaagtcaataccagctcttgcctgagctgcttccaagtcagctccatccattccccctaaggagacacttcagtttgctttgactcgtttgaatcacacccgaggctacaagctcacaattgctctttaaacacttggtgtgactgctaatgaattgtaacggactgtctattatcctggggggaaccatttcttcgactcagtattccagcatgtcagccatgcaagtgacattgcaaggcacagaagtggtggtcatgcaagcccggaactatgaagcgggtccgggaattgtctcattc

SEQ ID NO: 483183 - DNA, 933 bp, Homo sapiens
acccagtggatcctgcaccagaagctgcaggtggagctacctgccagtcccacgccctgtgcccacactcctcagcccttggctggttgatgggactgggcgctgtggagcagggggcggcgctcggggaggctcaggccgcacaggagcccacggagttcggggaggctcaggcatggcgggctgcaggtcctgagccctgccctgtgggaaggcagctaaggccctgtgagaaattgagcacagcagctgctggcccgggtgctaaaagcccctcactgctccggcggtggggccagctggctgctccgagcgcagggtccgctgagcccacgcccacccggaactcgcactggcctgcaagcactgtgcgcagccccggttcccgcccatgcctctccctccacacctctccacacctccccgcaagctgagtgtgagcccggctccgccttggccagccgagaaaggggctcccacagtgcagcggcgggctgaagtggctcctcaagtgccgccaaagtggaagcccaggcagaggaggtgctgagagtgagtgaggggtgtgagggctgccagtgcgctgtcacctctcactaatttccccttagtttattttttgtttaaaatggagtttcgctctttgttgcccagggctggagtgcaatggcgaaatcttggctcactgtaacctcccacctcctaggttcaagcaattctcggtgcttcagcctccccagtaagctgggattacaggccccacacctggtaattttgtttttagaacagaagggattccccggtagccggtggtttcaactcctgactcagtatccactgcgtggcgcccagtgtggattcagcgttgcccgcccagccccctaatatccggctactggtgcgctcacattccaactggggggttagggcgtc

SEQ ID NO: 483184 - DNA, 342 bp, Homo sapiens
gaatcgagctcgtaccagcaggggtggcgtggtgctgcagctgatacatcaggcgctgtggccactcggaaaacttcttcttcatcgaggtgggcctgttctgccgtgacggggcccggggagttctggatgcaggtggatgactctgtgtgtggcccatgaacatgcactgagaccactcctgtgaggccatgctgggccatgatgtgatgagttcctgccctctgcagcaatgagccatgtcctctgtccaacgtgctctatacccctatcagctgtcccacctgctgcctggcgaccatctcaacgaatccccctgcccagccatggtggtggctgacc

SEQ ID NO: 483185 - DNA, 313 bp, Homo sapiens
cttgaggtaaagagttgagaccagcctggctagcatggcgaaacccagtctctactaaaaatacaaaaattagccgggtgaaattagccgggcgtggtggtgtgtgcttgtaatcccagctactcgggaggctgaggcaggagaatcgcttgaatccgggaggcagaggttgcagtgagccaagatcaggccactgcactccagcctcggggtcaagagcgaaactctgtctcaaacaaaaagaaagaaaggaaggaaggaaggagggaaggaaggaaggaaagagagaaagaaaagaaagaaagaaagaaag

SEQ ID NO: 483186 - DNA, 137 bp, Homo sapiens
agacgcatcatacaaaaatttaaaaatttgccgggcatagtggtgtgctactgtagtccagctactcagaaggctgaggtgggaggatcgtttgaccctgcctgggaggttgaggttgcagtgagtcgagattgtac

SEQ ID NO: 483187 - DNA, 393 bp, Homo sapiens
atgtattacctctgctgggagcagctgggactaggtccccatttagcgggccagacaagctcataggggatggggtcaccaggaaagcaaagacaccatggggtggccgggctgtccaggggcaccgagaagctgaagtgctgacagggagtgaaaaaggagagctcatgcggccagggctcccgaggcatgcacggggctgtgagaaaggcaggaagcctcggttacaaagtggcctggcatccaggaagtttcgggtggaagcggagggctttcccagacggctaccttcacaccgatgaaggtggtgatgaggtcgttccttaggatgcggaaccctgacttcatgtacgggatgtcatatgggtacacccaggggacgatgtcccaaag

SEQ ID NO: 483188 - DNA, 804 bp, Homo sapiens
  misc_feature (400)..(400): n is a, c, g, or t
taaggcatgttcaggcggccgggaacgggcggtggggagcgggcggagctggccctgcctctgcctggccggcgccgcagtcggtgcgggccgtgcccgtcgccgccaactgccctgagctgcttgctgaggccgagggagacgtcggggcctgcacctggagggagcctgccgcgctggccccgaggagggggcgttgccatggctgactgcctctcccgctgctgactggggggcggggtgcggccctgggaaggagggctggtctcctggccccgcgcccctcccctttactctcccctggtacttggtatgggcccgtagttgggtggcaacgacctccgggcattggggcatttccagcgtctcactagaaccattcagctatccgccagatgcncggtcttggtcatcttccgaacgtaaggacgagttttaagagtgcttcgtggagtgttcagatgctaagcaccctttactagacttggatgcaggctcgaattttacttcggtatatacctttcgaagagcaagtaaaatgtgcttgggctcccacgttattttctcccgtgtggtgttccaggagttcctgatccgatatccaccgagacaagcttggcggcccacgggctttggcgcgatccatggctggcaagtggtgtccttccgctccccagaggtatcacgtagcttatagtgctggactttgaggccacgtgcgacaagccacagattcatcctcaggaaatcatcgagttccccatcctaaagctaaatggccggaccatggagattgagtctagc

SEQ ID NO: 483189 - DNA, 632 bp, Homo sapiens
aagtcgatgaactgccttgtattggaatctttgcaaggcctcttacattacagggaactctcacaattacttgactttgaacatccttgatctgagatagttttagagtttttatacagccatctgtcagatttggggaaaaggaagtaaaggaatttaatacagatttagtaattactgctggaagtaagacttcacaattgaaaattctggatattactgcggagaacactttttaaaaagctcacttaatattgcaaataatttccttgtggagatgaagaatatactgttttaagaacgattttcaaaaccacctgccctaatgttatttaacctttttatgcctctgctccatcagatataaaacaggaatacaggaagagtacccaccacagaggctcagtgtgtagatgagtgagttgtgtatgtgaagtgcttttagaagagcacttaccaaaaataaagcacttaaagtgtttgccactattttattagtatgaagtcagattacacctgcttcttacttttatgtttttccctaagtgtgtatcttaaaccaggctactcattcttcctgacaggccccctgtgtgtcagagtatggacatccaatggaagcagaactatga

SEQ ID NO: 483190 - DNA, 186 bp, Homo sapiens
ccaggtaatatgatgggatggtggcaggatgtgattcaccctgagtatcaggagtttcaagaccaactggccaacatgcagaaaccccatctctactaataaatacaaaaattagactggacatggtggcacgtgcctgattatcccacgctacttgaacaaactgaggcaggagactcgctttga

SEQ ID NO: 483191 - DNA, 796 bp, Homo sapiens
  misc_feature (117)..(117): n is a, c, g, or t
  misc_feature (199)..(199): n is a, c, g, or t
  misc_feature (277)..(277): n is a, c, g, or t
  misc_feature (336)..(336): n is a, c, g, or t
  misc_feature (434)..(434): n is a, c, g, or t
  misc_feature (473)..(473): n is a, c, g, or t
  misc_feature (508)..(508): n is a, c, g, or t
  misc_feature (511)..(511): n is a, c, g, or t
  misc_feature (536)..(536): n is a, c, g, or t
  misc_feature (604)..(604): n is a, c, g, or t
  misc_feature (786)..(786): n is a, c, g, or t
gaaatatgggggctaggactgaagtcccctaacttttggtggctcttgtgaacagagacagttgagacttcaacatttcaaccccatagaaggcaaggaagtgcagccaggggaatngggaggcagggaagaggcatgaggtgtgccgggagagcgattatgtgcatctcttcccaactctgagttcagtgcattcagngatgctggcagcatgacatgggacactgctgggagaatttacaccacagaagctgcccaaatgcaataaatcagggcntttttcccctcccagagaactggtttactatagacgtgtgacacaccgtcccgagctantgctgaacccacccaagcctggctactgtgacaagctgtcacctccccactcggggggagtgccaactcccagccctgcacatccctacaatcagcanaacagagtggggctgagcaaaggaaagggaccagaattnggcaacccattccctgcctggagtccacttcgccncanctgggctggcttgcagcccaagacnaaagttggtgtccaacagaaaggcagcttggggctacagatagcctcctgtgcagtggctcgtggcanggagtggggaaagaagggcatgtgcaccacccagagataaggaggggtggccacccgggctggatgcccccccggcaaaggatggctgtgcccatgagaagagtggcccttcctctgctggccatcagggtggagtaggagtgactcgtggcagatcccgggaatcgggatttttctggagntgctggctaa

SEQ ID NO: 483192 - DNA, 403 bp, Homo sapiens
ttgggaaaccacaggtagccaactagggaggaaatgtactgaatgctagtaccccaagaccttggagcaggaaagtcaccccagacacctctgctttcttttgccatctgacctgcagcactgtcaggacatggcctgtggctgtgtgttcaaacacccctcccacaggactcactttgtcccaacaattcagattgcctagaaatacctttctcttacctgtttgttatttatcaatttttcccagtatttttatacggaaaaaattgtattgaagacactttgtatgcagttgataagaggaattcagtataattatggttggtgattatttttataagcacatgccaacgctttactactgtggaaagacaagtgttttaataaaaagatttacattcca

SEQ ID NO: 483193 - DNA, 387 bp, Homo sapiens
ctcttcatacaccaccctgagttgcaagtgctgtgagccatctttctatggtgaggtctggcctgaggagtcacatggaatgtccgcaagccccacagcctggatttcagagatggccccatggggcaatgctacatactctccgaacgagctacgggccccatggtctgaatcgcgatgacggttgatgtccattttggagagcactgctagcggcagatccacacggcagcgggctgctaatgccaccaagtagatgacgacgtcactaagctcctcttgaagggctgcccgttccctgggggaccagccttgggggccacgttccccatcggatttccactgaaagagttctgccagctaccccactttccccgtagtcagacc

SEQ ID NO: 483194 - DNA, 860 bp, Homo sapiens
gcgccttgcccgcggtcctgggctcgccttttcccaggtcttctcgttgctctgcgcgcctttccccggtccggcagggcctgttccccgcttcctgtcatgcatcccccttcgagtgggactcggccgcgcactttccagcttttggaagtgtgccagcgcccccgcttgctccatacaggtgtcccaccgcggccagtcttcccgcgtttttcgagcccactcgataggtccctcggtggtacggtggatctttaaggaaggtttgctacgaagagagatagggtaagcatagcagggcgcattgtctcactatgtgtagtgacatagtacgtccccgtgtggagctcaatagcatacctaagcggcccttttcgccccacggggcttgtatcttggggtcctaggcaaccttgcagccaaccccgtcacttgacaatggcaactggacgatatggctacgtttggtcccgtgtttctcttggttgtgtcctccgcattctctctatcgtccatgacgctctcgtcattaccactagggtgtcgagcctccctcaccctggctggcacagggctggtctcagcccaggcgaacccattgtgtccctgccatcatacatcagtcggtcccatgtgagaaggagtgacatcaggcacgtttgtaagtgcaagatcgtttacttcaaggcgcaagtaggctgaacctgcttaccccactttggtcctgggagctccccttgtggaagagaatagtggagaggcttggcgtcagccggcgcggggggaaccggtgccccaccctgcagagtgctagctgagttaacctgccacaattacttccgaggtctgggataaaatca

SEQ ID NO: 483195 - DNA, 940 bp, Homo sapiens
  misc_feature (1)..(1): n is a, c, g, or t
  misc_feature (334)..(334): n is a, c, g, or t
  misc_feature (500)..(500): n is a, c, g, or t
  misc_feature (508)..(508): n is a, c, g, or t
  misc_feature (523)..(523): n is a, c, g, or t
  misc_feature (549)..(549): n is a, c, g, or t
  misc_feature (580)..(580): n is a, c, g, or t
  misc_feature (586)..(586): n is a, c, g, or t
  misc_feature (588)..(588): n is a, c, g, or t
  misc_feature (632)..(632): n is a, c, g, or t
naattcccgggatggggcttttgccagcggcgccgcgggcctgcgtgctggggcagcgggcacttcttcgacctcgtcctcctcgtcctgtgcggccggccgggtgaggccgggcccgcgtagggggcagtcggcggctgcctccggcggaggtgcctcgcggcgcccgggccggcccgcgcctcggcggcgtgctccatgcatccggagcccgccccgcccccgagccgcagcagtcccgagcttcccccaagcggcggcagcaccaccagcggcagccgccggagccgccgccgcagcggggacggggagcccccgggggccccgccaccgncgccgtccgccgtcacctacccggactggatcggccagagttactccgaggtgatgagcctcaacgagcactccatgcaggcgctgtcctggcgcaagctctacttgagccgcgcaaagcttaaaagcctccagaccggacctcggctctgctctccggcttcgcnatggtggnaatggtggaggtgangctggacgctgaccacggatacccanccggggctgctcatcgccttcagtgcctgancacagntnctggtggctggtgcaccggtttgcgctcatgatcagcacctgantccctgcccaaacaatcgaaggcgggtgagcaaacgatgcacaaatctcaacctcggtcaaaggagtcccccacatgagcgcattgcaccgccacatcgagctgggctggggacttactccaccggtaattggcaccgctggactatctaacctgacgtggtcgtgcacctgatggggcaaggtcttgccccatcaagacccagccaggcacgccaaggcccaccaaggaggcccccgacagaggcgcaccaaaccaaggaaggaccaacgggatcaccagagaccagcagaagcacacgagaaccac

SEQ ID NO: 483196 - DNA, 160 bp, Homo sapiens
gacatagagtaggaggtagtacttatcttcttgtactcaaaaaggtcaaagggagcccgacgaggaataaatagcaatgccctgaaattccaactagaccttctacagaaaagtgctcagactgccaagctggtcttcccagatcattacgtgaggctct

SEQ ID NO: 483197 - DNA, 881 bp, Homo sapiens
taaaaacccttcatcaataaatggaaactatacaaaaatagtcaacccacttctacaaaatgtcagtaatcaggcgggggtcttcaaacccaaagtgtatgttgggtatgttaacagggtgaacattatttacgttgtgggcggagtgaagcacaaaatagtatgaggaacagtttgagcccaataatgtgacggtgaagtctccggttggcaacccgtggtggcctaccaaaaaacagtggttgagcccgtagaagtgcccgcctgcggaaatgtggctgaaggagaaactcgaaagtactcgtgaggctgttgtatagcggagcggacttaaaaatacaagcaccccagtataaaaatgtgtgcatactgtgagcaaggtgctatggaaattacattgtgggatatcccgggagtggatattctcttatttatagaactatatgtgcggtgacgcctcagggtgtggattgtgatatactctccgtgaagtcgcgagataatatacggaaagtggtgtacacagagaaggtggagactctcataggagggcattaacgcggggaggatgatcgccgtgttgggggcgcccagtgagcccctcctaaaatgggggggggatagggcgcaaaggctgggagggggttagaaaagggcgtccaacaaaaaattcccgtgggaaggaaaaaaaaaacttccggagaggttactaaacagacgggataaccccgtattcgaaaggcccttttgggaccagtgtgcggtggtggtgggggcccaggaaatggcgggcaaacccgcggttaacttgggccccccactgggcataaggcgagaggcgtcgggcaaaaaaggccaaataaagacacaaaagcagcgaa

SEQ ID NO: 483198 - DNA, 350 bp, Homo sapiens
catacccattcttctaggttccctagagacacatcaccccaacgacagcacgaagcagccggatatcacaacaaccctattcctgctttgccatcacctctttctaattttttttcttttttaattaaaccaaaacaggggaatgttagcattctgtctaaactccaccacacagagagacaagcgaaaatggagaatcattaaaatatatattgagctcccacttcctgtagacaatccattatgtggaatacatattgaaattttgaaataaaattaaaatttttcccttttagaaaagttaaactaaattgaaaatgagaaagtctagaaatcaaaagggtcgacgc

SEQ ID NO: 483199 - DNA, 281 bp, Homo sapiens
aaacaattattacctaatgccatagtattgcaccggatctaaccccatataccttctgctatatgaattatacttgaaataactttgccaggagagccaacgctaagacccccgaaacctagacgagctaccttagaacagctaaaagagctctcccgtctattatgcagaatattgggaagatttataggtagaggcgacgaacctaccgagcctgtgtgtattgctggttgtcctacgatagaatcttagttcatctttctttttgccctttctggtgt

SEQ ID NO: 483200 - DNA, 455 bp, Homo sapiens
  misc_feature (10)..(10): n is a, c, g, or t
  misc_feature (14)..(14): n is a, c, g, or t
  misc_feature (38)..(38): n is a, c, g, or t
  misc_feature (90)..(90): n is a, c, g, or t
  misc_feature (92)..(93): n is a, c, g, or t
  misc_feature (97)..(98): n is a, c, g, or t
  misc_feature (193)..(193): n is a, c, g, or t
  misc_feature (234)..(234): n is a, c, g, or t
  misc_feature (416)..(417): n is a, c, g, or t
  misc_feature (447)..(447): n is a, c, g, or t
agatggcggngcgngcatacagcttttcgctgactacnttcagcccgtctggtaaacttgtccagattgaatatgctttggctgctgtantnnaggnnccccgtccgtgggaattaaagctgcaaatggtgtggtattagcaactgagaaaaaacagaaatccattctgtatgataagctgcttgtaaagctnagtagaaccaattaccaagcatataggtttggtgtacagtngcatgggcccgattacagagtgcttgtgcacagaagctcgaaaactagctcaacaatactatcttgtgtaccaagaacccattcctacagctcagctggtacagagagtagcttctgtgatgcaagaatatactcagtcaggttggtgttccgtccatttggaagtttccttacctaattgnnggttggaatgaagggaccgaccataattanttccagtc

SEQ ID NO: 483201 - DNA, 398 bp, Homo sapiens
ccgagtcgttggatctgtggataggtagtgagactgtggattgcctgaattcatggagggctggacagacgcctccgcgcagggagagcaggtgaactgggccacttgttcccacagctgcccatagtggcttcttccatcgtatccttgtacttcctggagctgaccgagctcttcacgaccgggcaaagtgggcttccagtgctatgaacggaatctctccatgcactacgtggagaccaaagaggagctcatcccgctgctgatgctgctcagcttggacttcgcgggccctgccgcctcggtggtgacctgcaccggggactgtgccagactgtgggcaccacggctgtggagccaacccacgacaactcggtgaacatcctccaaggtgccga

SEQ ID NO: 483202 - DNA, 287 bp, Homo sapiens
aaaaatttttttttcccccgggggcccaaaaggaaaaaggaattttggtttaaactgggggcccctggaaccccaggtttttaaagggatccctttcaaatttaaaaaatcccggggggaaaattttttttaaaggaaaaattttccaaaaaacccgaattttttaccctgttaaatttcagaaaaaagggggggtttttttttttaagtttttgattggggtttattcccgtaaatcccccccccgattttttggggggggggaaaaaaaagggggttttggccca

SEQ ID NO: 483203 - DNA, 381 bp, Homo sapiens
ctcatttcttgtctttggcatttatgttctgtatctgtgcaatacttgggttggccaggagatgttactaagggagttccttaaaggtctgttctgtgtcaaaagtgcagtttggttgtctcggtgtgtcatgagtgcacatgaagagacctagatgctgcattttttagctctgagattccttaggtatcctgaggcagctcgttcagatgatcagcattagggtaaaaccaagggccctccatggtgacattagaagggcagggttcaaggtggcgttggttgacgaccctagccattgccctctttgttcatgttttccaaagttgtaactttgatgctgattttcgtagcaggttctagtagctcctcgttccaggc

SEQ ID NO: 483204 - DNA, 302 bp, Homo sapiens
  misc_feature (142)..(142): n is a, c, g, or t
  misc_feature (155)..(155): n is a, c, g, or t
  misc_feature (242)..(242): n is a, c, g, or t
ctgggcttagaaggccgtcgaggggggaaatggcgtcctccggggagcgggcagcctgccctcagaccgcccgggacccagggccaccgtcctgccgagacagcggcattagccaccactcaccgtgcgggagtaaaaacgnctctctggttgcnacggccaccagccgtctccccccagcgtcagtttgaatttgtgcagaccattcctagcccagactcaacccaacagattcgtccttnccctgaggtgaagccttgtttgagaaccaaataataaaattaacaaacctaaaaaaaaaa

SEQ ID NO: 483205 - DNA, 725 bp, Homo sapiens
cggccgcgcgacatttttttatttatgacttcatgactaccattaagaaaatataacctgttgggaaactgtttctgccttgatgatgttgtacagacaagagataaacagtgaggaatatgcttagatgtatgggaaagacacgggtctgtggcatgtcacaagggtacacgaatactgagagtgaatgctgaaggaatgatccccattggtggtgaccctcaggtgagactagggtgcctgtgtttcagcaaagcctgggcaattggaatgcagggctcctaagattccatgacacccccaccttctaattctgttattgcaactgcagacggttacctggcacgctggccacaatctacctcactcttatcagagtctgagctactggcagtgctttcagctctgagttgaggcacctcgaaccttgtttttgtggtgaaggatcctaaagtgctgtggggagtgatcacatttttcacaacagtaagtccctgactccacctcttctgccacaaacgtcagcatggtggtatcagccggccctttgtccagcgagaaggcagagatgaacattctagaaatcaatgagaaattgcgcccccagctggcagagaagaaacagcagttcagaaacctcaaagagaaatgttttgtataaactctgaattattttcttgtgcttttttcttagaaacaaaatgagaactagaaaagaaaaaaaa

SEQ ID NO: 483206 - DNA, 1296 bp, Homo sapiens
gatcgctactgacaagacctccctggaacccttctgatcgtcttacatcactgtgtgtgtgcaatcacccacggaaagcctcacttatgtgtggaaccgtcagaggacaaaatgatccagatgggacacggttggggatgatctgtcagttcaagcatccgtgtccttcaatcaccgaaggatcagctcgccatctccagttttcaggaaaggctcatgacctggcgttgcgagggcaagccatctgctcttgtgcattgcacatgtgactcagaatccatctccagcaagtcgaattgagaccgggtgattcacccgcaatcccaagcccgaaaggcgtttggtgacagctgccaggatgtcttatgcaacgggatccttgctgtagggtgcttgggggtgcatgtccaaaggcatcttcatagatagggcaggacggaagctcgatcctcttaaccgcaaatttggggccttctgtgtacgggggggcaggcaacggacaagaatagaacatgctccagttccataatatttatgtaacaacaaaggcagtcgttgagagtcttcgtggagcgaattaaggactgctacaatacgagaaagagcgccaatattagacatctacggcttttgggcgtgctacgctcgccaaaataccgtcgtacttgagtgtccatcatcttggtggcatggctcaccggaagttgacaccttggttttagaaccgagcgaagggcataaagttcttagaaaacgaagataggcgcaattcttgggtctttgtacggcgcgcacgattagtaaaggacgcgtgctcgagaacgccactttatatagggacactacacctggggtgggaacacgtggttggggccccaggacgcaatttgccccagaggcccacggctcattcctaggttcaggaccactcttttaaggtgtcagtaaattataagccccaaagagatttccccaaggtagccccttataattccccaacataaacccccggagggggtcatttggcgaaaacacgggcaaagggggtaaatttctgggcgaaaattcaacctagcacaccgtccccggggattaatcggtttgggctcccaacagtgtaaaaaacatcctttgtgtcgcctttggaacacaggaagcggcaagggtccgtttacttttgaagcaaatggggattgaaggcgttggacggttttcagtggggccttttctattcaataggtaagcccacgggtcccattggtcccgctgggacccagttgcccaattggttggaat

SEQ ID NO: 483207 - DNA, 256 bp, Homo sapiens
tgtttagaggatgatcattagaatacaggatatttatactcttgaaaaccgctttcccaagtacttcttcattataagtaaggtgtctctaaaagggacagatctctacactgcaaattttgggtctcaatttttactgtgcctttgtttttactagtgtctgctgttgcaaaaagaagaaaacattctctgcctgagttttaatttttgtccaaagttaattttaatctatacaattaaaaccttttgcctatca

SEQ ID NO: 483208 - DNA, 529 bp, Homo sapiens
cctggcgagttgatcagtaagtagaagcgccattaccaagtaagtttaaaacacacttcttgcatatttaacaatgttacaatgtaaagtatcccaatccccccagctaatttggggaactgagcaagaagagaacattcttcagtttttacatgactttttttgttttttgggagaatggggtcctgctcgtgtagcctaggctagagttgcagtggcttgatcagcctcacgtgcaaccttcaaactcctgtgggctcaagcaattttcccaccttcaacctccttagttgctgggactacgggttgttgtgccaccatccccagctacttttatattaaattttctttttagagacagagtcttccttttttgcccaggctggtcttgaactccgtgggctcaagcagtcttccgtgcctcggcctcccaaagtgctggaattacaggcttgagccaccacattcagccttaattgaagattttgtaaggaattgagctttcaattaaactcgtttttgtgagatg

SEQ ID NO: 483209 - DNA, 1147 bp, Homo sapiens
  misc_feature (141)..(141): n is a, c, g, or t
tccaaatggacttaaatttactcatcggaagcaacctaatgggaacaccttacaataaaaaaaatattccttggttcaggtgtcttttgtgggaaaaactgtgagcgtgggaacagaaagagggcatgtggggggtgtgcncccccaacctgtaactccctttctgtgaaacaaagaacgtctccacgaggtgttccctgtggacacctcgtggctctcaggaaaaaggggagaagactcttgtgcggtggttactgtgcgtcgcattgtagaatgatacgcctgtgtgcctatagcactctcatctctctctgtggcgcaagcatctcaggagacgcccccggcctgtgtgccgggctctctgtgcgctcatctcgcgcctatttctcttttgtgtgtggtgggcccccgtgacaacagcgaatgtgtctcatctacaatattgcgcacagatataagcgacagaaagagtgtggcgcggatctctcccagcgtgggtgtgtgctttataataaagtgctgcgtgcacgagctttctacacagaagtgcccagagtgggtgctctcccccatatatgtgtcccccgagtctctcccctgctcgtgtgtctccccccccgatagatgtattacccccggtgtctcttccccacctgtttataaacaccgcgcgagggtgctctctccccgggttctcttcgcgtggggtgtggtgtcgtgtggccccgcgagaggggagagggatacaagttaaacacggaatgtgtgtgtgcgctgtgggaccaccaaaaagatttctctgtgggaatctccaggggtaataccgaaaggaacagtgacacactctctataggggggcccccgtgtggcacaaaaagaagaccgcgtgtttatgtggggcccactgtggggtctcccaacaaacacgagactacagtgggccatgggcgaaaataaaaacgggtggtcagagggcctagtgggggcccaaaacagacacaattctctcggagaagggcccccaaaacaccccccgtgggacaaaccacacaagagttgaagggggtctccacagggggaagaacaacatcttggggagaaacaaacaacattgtgggcaacatgggaacacaacccagtgaggaag

SEQ ID NO: 483210 - DNA, 4989 bp, Homo sapiens
  misc_feature (56)..(56): n is a, c, g, or t
  misc_feature (459)..(459): n is a, c, g, or t
agcttgcagagcagctcaagcaagctgaggagctcaggcaatataaagtcctggtncactccaggaacgagagctgacgcagtaaaggagaagttacaggaagggagagatgcctcccgctcattgaatgagcatctccaggccctcctcactctggatgagccggacaagtcccaggggcaggacctccaagaacagctggctgaggggtgtagactggcacagcaccttgtccaaaagctcagcccagggaggtgcagaaggctgaagagagcaaagtccctgaggactcactggaggaatgtgccatcacttgttcaaatagccacggcccttgtgactccaaccagcctcacaagaacatcaaaatcacatttgaggaagacgaagtcaactcaactctggttgtagacagagaatcctctcatgatgaatgtcaggatgctctaaacattctcncagtccccggccccacctcttctgccacaaacgtcagcatggtggtatcagccggccctttgtccagcgagaaggcagagatgaacattctagaaatcaatgagaaattgcgcccccagctggcagagaagaaacagcagttcagaaacctcaaagagaaatgttttctaactcaactggccggcttcctggccaaccagcagaacaaatacaaatatgaagagtgcaaagacctcataaaatctatgctgaggaatgagcgacagttcaaggaggagaagcttgcagagcagctcaagcaagctgaggagctcaggcaatataaagtcctggttcacgctcaggaacgagagctgacccagttaagggagaagttacgggaagggagagatgcctcccgctcattgaatgagcatctccaggccctcctcactccggatgagccggacaagtcccaggggcaggacctccaagaacagctggctgaggggtgtagactggcacagcaccttgtccaaaagctcagcccagaaaatgacaacgatgacgatgaagatgttcaagttgaggtggctgagaaagtgcagaaatcgtctgcccccagggagatgcagaaggctgaagaaaaggaagtccctgaggactcactggaggaatgtgccatcacttgttcaaatagccatggcccttatgactccaaccagccacataggaaaaccaaaatcacatttgaggaagacaaagtcgactcaactctcattggctcatcctctcatgttgaatgggaggatgctgtacacattattccagaaaatgaaagtgatgatgaggaagaggaagaaaaagggccagtgtctcccaggaatctgcaggagtctgaagaggaggaagtcccccaggagtcctgggatgaaggttattcgactctctcaattcctcctgaaatgttggcctcgtaccagtcttacagcagcacatttcactcattagaggaacagcaagtctgcatggctgttgacataggcagacatcggtgggatcaagtgaaaaaggaggaccaagaggcaacaggtcccaggctcagcagggagctgctggatgagaaagggcctgaagtcttgcaggactcactggatagatgttattcaactccttcaggttgtcttgaactgactgactcatgccagccctacagaagtgccttttacgtattggagcaacagcgtgttggcttggctgttgacatggatgaaattgaaaagtaccaagaagtggaagaagaccaagacccatcatgccccaggctcagcagggagctgctggatgagaaagagcctgaagtcttgcaggactcactggatagatgttattcgactccttcaggttatcttgaactgcctgacttaggccagccctacagcagtgctgtttactcattggaggaacagtaccttggcttggctcttgacgtggacagaattaaaaaggaccaagaagaggaagaagaccaaggcccaccatgccccaggctcagcagggagctgctggaggtagtagagcctgaagtcttgcaggactcactggatagatgttattcaactccttccagttgtcttgaacagcctgactcctgccagccctatggaagttccttttatgcattggaggaaaaacatgttggcttttctcttgacgtgggagaaattgaaaagaaggggaaggggaagaaaagaaggggaagaagatcaaagaaggaaagaagaaggggaagaaaagaaggggaagaagatcaaaacccaccatgccccaggctcagcagggagctgctggatgagaaagggcctgaagtcttgcaggactcactggatagatgttattcaactccttcaggttgtcttgaactgactgactcatgccagccctacagaagtgccttttacatattggagcaacagcgtgttggcttggctgttgacatggatgaaattgaaaagtaccaagaagtggaagaagaccaagacccatcatgccccaggctcagcggggagctgttggatgagaaagagcctgaagtcttgcaggagtcactggatagatgctattcaactccttcaggttgtcttgaactgactgactcatgccagccctacagaagtgccttttacatattggagcaacagcgtgttggcttggctgttgacatggatgaaattgaaaagtaccaagaagtggaagaagaccaagacccatcatgccccaggctcagcagggagctgctggatgagaaagagcctgaagtcttgcaggactcactggatagatgttattcgactccttcaggttatcttgaactgcctgacttaggccagccctacagcagtgctgtttactcattggaggaacagtaccttggcttggctcttgacgtggacagaattaaaaaggaccaagaagaggaagaagaccaaggcccaccatgccccaggctcagcagggagctgctggaggtagtagagcctgaagtcttgcaggactcactggatagatgttattcaactccttccagttgtcttgaacagcctgactcctgccagccctatggaagttccttttatgcattggaggaaaaacatgttggcttttctcttgacgtgggagaaattgaaaagaaggggaaggggaagaaaagaaggggaagaagatcaaagaaggaaagaagaaggggaagaaaagaaggggaagaagatcaaaacccaccatgccccaggctcaacggcgtgctgatggaagtggaagagcctgaagtcttacaggactcactggatagatgttattcgactccgtcaatgtactttgaactacctgactcattccagcactacagaagtgtgttttactcatttgaggaacagcacatcagcttcgccctttacgtggacaataggttttttactttgacggtgacaagtctccacctggtgttccagatgggagtcatattcccacaataagcagcccttactaagccgagagatgtcattcctgcaggcaggacctataggcacgtgaagatttgaatgaaactacagttccatttggaagcccagacataggatgggtcagtgggcatggctctattcctattctcaaaccatgccagtggcaacctgtgctcagtctgaagacaatggacccacgttaggtgtgacacgttcacataactgtgcagcacatgccgggagtgatcagtcagacattttaatttgaaccacgtatctctgggtagctacaaaattcctcagggatttcattttgcaggcatgtctctgagcttctatacctgctcaaggtcattgtcatctttgtgtttagctcatccaaaggtgttaccctggtttcaatgaacctaacctcattctttgtgtcttcagtgttggcttgttttagctgatccatctgtaacacaggagggatccttggctgaggattgtatttcagaaccaccaactgctcttgacaattgttaacccgctaggctcctttggttagagaagccacagtccttcagcctccaattggtgtcagtacttaggaagaccacagctagatggacaaacagcattgggaggccttagccctgctcctctcaattccatcctgtagagaacaggagtcaggagccgctggcaggagacagcatgtcacccaggactctgccggtgcagaatatgaacaatgccatgttcttgcagaaaacgcttagcctgagtttcataggaggtaatcaccagacaactgcagaatgtagaacactgagcaggacaactgacctgtctccttcacatagtccatatcaccacaaatcacacaacaaaaaggagaagagatattttgggttcaaaaaaagtaaaaagataatgtagctgcatttctttagttattttgaaccccaaatatttcctcatctttttgttgttgtcatggatggtggtgacatggacttgtttatagaggacaggtcagctgtctggctcagtgatctacattctgaagttgtctgaaaatgtcttcatgattaaattcagcctaaacgttttgccgggaacactgcagagacaatgctgtgagtttccaacctcagcccatctgcgggcagagaaggtctagtttgtccatcaccatttatgatatcaggactggttacttggttaaggaggggtctaggagatctgtcccttttagagacaccttacttataatgaagtacttgggaaagcggttttcaagagtataaatatcctgtattctaatgatcatcctctaaacattttatcatttattaatcctccctgcctgtgtctattattatattcatatctctacactgcaaattttgggtctcaatttttactgtgcctttgtttttactagtgtctgctgttgcaaaaagaagaaaacattctctgcctgagttttaatttttgtccaaagttaattttaatctatacaattaaaaccttttgcctatca

SEQ ID NO: 483211 - DNA, 355 bp, Homo sapiens
  misc_feature (34)..(34): n is a, c, g, or t
  misc_feature (228)..(228): n is a, c, g, or t
  misc_feature (250)..(250): n is a, c, g, or t
  misc_feature (276)..(276): n is a, c, g, or t
gtgaaatgcaagaggcagtttaagatagctcttncacacagagttggaacattttcaacccagagtgtgacttccccgcagccctggcccaggccctctcacaaggaggaggccaggagcacgtgcaactgaacaagctgtgaagccagccgggcacagaacccccggggtggaaggctcccctgtgaaaatgcaagaggaaaggcgcaaagggaatcttcccaactntctacctggaagcatcctcatntgtggacatgaagcaaagaacagtgncttcccgtgcaggctctttttgggattacaccagaacatagggcatgctcaattaaatgggcagctatttgcaaaaaaa

SEQ ID NO: 483212 - DNA, 6356 bp, Homo sapiens
  misc_feature (56)..(56): n is a, c, g, or t
  misc_feature (459)..(459): n is a, c, g, or t
  misc_feature (2171)..(2171): n is a, c, g, or t
  misc_feature (3096)..(3096): n is a, c, g, or t
  misc_feature (3098)..(3098): n is a, c, g, or t
  misc_feature (3100)..(3100): n is a, c, g, or t
  misc_feature (3108)..(3108): n is a, c, g, or t
  misc_feature (3114)..(3114): n is a, c, g, or t
  misc_feature (3120)..(3120): n is a, c, g, or t
agcttgcagagcagctcaagcaagctgaggagctcaggcaatataaagtcctggtncactccaggaacgagagctgacgcagtaaaggagaagttacaggaagggagagatgcctcccgctcattgaatgagcatctccaggccctcctcactctggatgagccggacaagtcccaggggcaggacctccaagaacagctggctgaggggtgtagactggcacagcaccttgtccaaaagctcagcccagggaggtgcagaaggctgaagagagcaaagtccctgaggactcactggaggaatgtgccatcacttgttcaaatagccacggcccttgtgactccaaccagcctcacaagaacatcaaaatcacatttgaggaagacgaagtcaactcaactctggttgtagacagagaatcctctcatgatgaatgtcaggatgctctaaacattctcncagtccccggccccacctcttctgccacaaacgtcagcatggtggtatcagccggccctttgtccagcgagaaggcagagatgaacattctagaaatcaatgagaaattgcgcccccagctggcagagaagaaacagcagttcagaaacctcaaagagaaatgttttctaactcaactggccggcttcctggccaaccagcagaacaaatacaaatatgaagagtgcaaagacctcataaaatctatgctgaggaatgagcgacagttcaaggaggagaagcttgcagagcagctcaagcaagctgaggagctcaggcaatataaagtcctggttcacgctcaggaacgagagctgacccagttaagggagaagttacgggaagggagagatgcctcccgctcattgaatgagcatctccaggccctcctcactccggatgagccggacaagtcccaggggcaggacctccaagaacagctggctgaggggtgtagactggcacagcaccttgtccaaaagctcagcccagaaaatgacaacgatgacgatgaagatgttcaagttgaggtggctgagaaagtgcagaaatcgtctgcccccagggagatgcagaaggctgaagaaaaggaagtccctgaggactcactggaggaatgtgccatcacttgttcaaatagccatggcccttatgactccaaccagccacataggaaaaccaaaatcacatttgaggaagacaaagtcgactcaactctcattggctcatcctctcatgttgaatgggaggatgctgtacacattattccagaaaatgaaagtgatgatgaggaagaggaagaaaaagggccagtgtctcccaggaatctgcaggagtctgaagaggaggaagtcccccaggagtcctgggatgaaggttattcgactctctcaattcctcctgaaatgttggcctcgtaccagtcttacagcagcacatttcactcattagaggaacagcaagtctgcatggctgttgacataggcagacatcggtgggatcaagtgaaaaaggaggaccaagaggcaacaggtcccaggctcagcagggagctgctggatgagaaagggcctgaagtcttgcaggactcactggatagatgttattcaactccttcaggttgtcttgaactgactgactcatgccagccctacagaagtgccttttacgtattggagcaacagcgtgttggcttggctgttgacatggatgaaattgaaaagtaccaagaagtggaagaagaccaagacccatcatgccccaggctcagcagggagctgctggatgagaaagagcctgaagtcttgcaggactcactggatagatgttattcgactccttcaggttatcttgaactgcctgacttaggccagccctacagcagtgctgtttactcattggaggaacagtaccttggcttggctcttgacgtggacagtgagtaccttactgtgaaggtgataagcctccacctggtcttccagataggggtgatattcctgttccaagtggcccttactgacccgagagatgtcattgccgcaggcaggacctatgggcgcatataggttgtaatgaaactgtagtctcagttggaagcctagacatgaaatgggtcagtgagcaaggctctattcctagtctccagccatgcctgtggcaacctgagcccnctctcagcacattggacccaggcagatgtaaaaaattcacagaactatgatttggactcaagggtttgtagatttcctccttcattctaatttcagtgtctaaaattcttgcatccatgaacgagctgggcatttgatgagacagggctgaatactgcagttttcctcctagaaatcatctggggcattttctttgaactgatgggaacaataaggcataactgtttgcacaaacttgggataaatgattttgggataacgatctaccagaatagggatatttcacccttggttctgagatgcaaaccaaagaatatcatgaccagctttcaggcctcctgaagtatatctctcacattgtcctgttctcatgctgaggagcctgagatccctgtgtggggattagacagtggactgttatgggtgtaggtgaattggcttattttgtctgtccctgtctgaatgtattgcaggaattaaaaaggaccaagaagaggaagaagaccaaggcccaccatgccccaggtaactgagcaattgtgaacagctacttctgtgttgacatctggagactcctggttcagggaaaacagagcgggctgacattatcgattacatcttttcaaccaagcctgaattattcctactaacattgctgttggttttcattgcagtagatatttaggtttccatttcttcctccccttatcatttactaacctactgtaggtggaccagacttcaaaaactgtattctcatggcgactgcatggaaacttgagcacattttatggaaaattattgagcacagtcttttcatgatccctgtatgctgtgtgtcctgagggcactaactcagagtgtcctgttactccctcatcagtgtgtcacctggacaattcactgagctcgttctctctctctntntntgtgtgtntgtgtntgtgtntgtgtgtgtgtgtgtgtgtgtgtgtgtgtctgtgtgtctatctgtctttctctttcattcttttccatttggccctgttctgtcccaacatgaaggcaataatttgttacctcattaatggatctatccttttagtttcttaaccacttccctatgctacccatgaaacctagttggggctctgttgtgtgtgatttcccctggcttattctttactttttcctccttttccaggctcagcagggagctgctggaggtagtagagcctgaagtcttgcaggactcactggatagatgttattcaactccttccagttgtcttgaacagcctgactcctgccagccctatggaagttccttttatgcattggaggaaaaacatgttggcttttctcttgacgtgggagaaattgaaaagaaggggaaggggaagaaaagaaggggaagaagatcaaagaaggaaagaagaaggggaagaaaagaaggggaagaagatcaaaacccaccatgccccaggctcagcagggagctgctggatgagaaagggcctgaagtcttgcaggactcactggatagatgttattcaactccttcaggttgtcttgaactgactgactcatgccagccctacagaagtgccttttacatattggagcaacagcgtgttggcttggctgttgacatggatgaaattgaaaagtaccaagaagtggaagaagaccaagacccatcatgccccaggctcagcggggagctgttggatgagaaagagcctgaagtcttgcaggagtcactggatagatgctattcaactccttcaggttgtcttgaactgactgactcatgccagccctacagaagtgccttttacatattggagcaacagcgtgttggcttggctgttgacatggatgaaattgaaaagtaccaagaagtggaagaagaccaagacccatcatgccccaggctcagcagggagctgctggatgagaaagagcctgaagtcttgcaggactcactggatagatgttattcgactccttcaggttatcttgaactgcctgacttaggccagccctacagcagtgctgtttactcattggaggaacagtaccttggcttggctcttgacgtggacagaattaaaaaggaccaagaagaggaagaagaccaaggcccaccatgccccaggctcagcagggagctgctggaggtagtagagcctgaagtcttgcaggactcactggatagatgttattcaactccttccagttgtcttgaacagcctgactcctgccagccctatggaagttccttttatgcattggaggaaaaacatgttggcttttctcttgacgtgggagaaattgaaaagaaggggaaggggaagaaaagaaggggaagaagatcaaagaaggaaagaagaaggggaagaaaagaaggggaagaagatcaaaacccaccatgccccaggctcaacggcgtgctgatggaagtggaagagcctgaagtcttacaggactcactggatagatgttattcgactccgtcaatgtactttgaactacctgactcattccagcactacagaagtgtgttttactcatttgaggaacagcacatcagcttcgccctttacgtggacaataggttttttactttgacggtgacaagtctccacctggtgttccagatgggagtcatattcccacaataagcagcccttactaagccgagagatgtcattcctgcaggcaggacctataggcacgtgaagatttgaatgaaactacagttccatttggaagcccagacataggatgggtcagtgggcatggctctattcctattctcaaaccatgccagtggcaacctgtgctcagtctgaagacaatggacccacgttaggtgtgacacgttcacataactgtgcagcacatgccgggagtgatcagtcagacattttaatttgaaccacgtatctctgggtagctacaaaattcctcagggatttcattttgcaggcatgtctctgagcttctatacctgctcaaggtcattgtcatctttgtgtttagctcatccaaaggtgttaccctggtttcaatgaacctaacctcattctttgtgtcttcagtgttggcttgttttagctgatccatctgtaacacaggagggatccttggctgaggattgtatttcagaaccaccaactgctcttgacaattgttaacccgctaggctcctttggttagagaagccacagtccttcagcctccaattggtgtcagtacttaggaagaccacagctagatggacaaacagcattgggaggccttagccctgctcctctcaattccatcctgtagagaacaggagtcaggagccgctggcaggagacagcatgtcacccaggactctgccggtgcagaatatgaacaatgccatgttcttgcagaaaacgcttagcctgagtttcataggaggtaatcaccagacaactgcagaatgtagaacactgagcaggacaactgacctgtctccttcacatagtccatatcaccacaaatcacacaacaaaaaggagaagagatattttgggttcaaaaaaagtaaaaagataatgtagctgcatttctttagttattttgaaccccaaatatttcctcatctttttgttgttgtcatggatggtggtgacatggacttgtttatagaggacaggtcagctgtctggctcagtgatctacattctgaagttgtctgaaaatgtcttcatgattaaattcagcctaaacgttttgccgggaacactgcagagacaatgctgtgagtttccaacctcagcccatctgcgggcagagaaggtctagtttgtccatcaccatttatgatatcaggactggttacttggttaaggaggggtctaggagatctgtcccttttagagacaccttacttataatgaagtacttgggaaagcggttttcaagagtataaatatcctgtattctaatgatcatcctctaaacattttatcatttattaatcctccctgcctgtgtctattattatattcatatctctacactgcaaattttgggtctcaatttttactgtgcctttgtttttactagtgtctgctgttgcaaaaagaagaaaacattctctgcctgagttttaatttttgtccaaagttaattttaatctatacaattaaaaccttttgcctatca

SEQ ID NO: 483213 - DNA, 6695 bp, Homo sapiens
  misc_feature (56)..(56): n is a, c, g, or t
  misc_feature (459)..(459): n is a, c, g, or t
  misc_feature (2171)..(2171): n is a, c, g, or t
agcttgcagagcagctcaagcaagctgaggagctcaggcaatataaagtcctggtncactccaggaacgagagctgacgcagtaaaggagaagttacaggaagggagagatgcctcccgctcattgaatgagcatctccaggccctcctcactctggatgagccggacaagtcccaggggcaggacctccaagaacagctggctgaggggtgtagactggcacagcaccttgtccaaaagctcagcccagggaggtgcagaaggctgaagagagcaaagtccctgaggactcactggaggaatgtgccatcacttgttcaaatagccacggcccttgtgactccaaccagcctcacaagaacatcaaaatcacatttgaggaagacgaagtcaactcaactctggttgtagacagagaatcctctcatgatgaatgtcaggatgctctaaacattctcncagtccccggccccacctcttctgccacaaacgtcagcatggtggtatcagccggccctttgtccagcgagaaggcagagatgaacattctagaaatcaatgagaaattgcgcccccagctggcagagaagaaacagcagttcagaaacctcaaagagaaatgttttctaactcaactggccggcttcctggccaaccagcagaacaaatacaaatatgaagagtgcaaagacctcataaaatctatgctgaggaatgagcgacagttcaaggaggagaagcttgcagagcagctcaagcaagctgaggagctcaggcaatataaagtcctggttcacgctcaggaacgagagctgacccagttaagggagaagttacgggaagggagagatgcctcccgctcattgaatgagcatctccaggccctcctcactccggatgagccggacaagtcccaggggcaggacctccaagaacagctggctgaggggtgtagactggcacagcaccttgtccaaaagctcagcccagaaaatgacaacgatgacgatgaagatgttcaagttgaggtggctgagaaagtgcagaaatcgtctgcccccagggagatgcagaaggctgaagaaaaggaagtccctgaggactcactggaggaatgtgccatcacttgttcaaatagccatggcccttatgactccaaccagccacataggaaaaccaaaatcacatttgaggaagacaaagtcgactcaactctcattggctcatcctctcatgttgaatgggaggatgctgtacacattattccagaaaatgaaagtgatgatgaggaagaggaagaaaaagggccagtgtctcccaggaatctgcaggagtctgaagaggaggaagtcccccaggagtcctgggatgaaggttattcgactctctcaattcctcctgaaatgttggcctcgtaccagtcttacagcagcacatttcactcattagaggaacagcaagtctgcatggctgttgacataggcagacatcggtgggatcaagtgaaaaaggaggaccaagaggcaacaggtcccaggctcagcagggagctgctggatgagaaagggcctgaagtcttgcaggactcactggatagatgttattcaactccttcaggttgtcttgaactgactgactcatgccagccctacagaagtgccttttacgtattggagcaacagcgtgttggcttggctgttgacatggatgaaattgaaaagtaccaagaagtggaagaagaccaagacccatcatgccccaggctcagcagggagctgctggatgagaaagagcctgaagtcttgcaggactcactggatagatgttattcgactccttcaggttatcttgaactgcctgacttaggccagccctacagcagtgctgtttactcattggaggaacagtaccttggcttggctcttgacgtggacagtgagtaccttactgtgaaggtgataagcctccacctggtcttccagataggggtgatattcctgttccaagtggcccttactgacccgagagatgtcattgccgcaggcaggacctatgggcgcatataggttgtaatgaaactgtagtctcagttggaagcctagacatgaaatgggtcagtgagcaaggctctattcctagtctccagccatgcctgtggcaacctgagcccnctctcagcacattggacccaggcagatgtaaaaaattcacagaactatgatttggactcaagggtttgtagatttcctccttcattctaatttcagtgtctaaaattcttgcatccatgaacgagctgggcatttgatgagacagggctgaatactgcagttttcctcctagaaatcatctggggcattttctttgaactgatgggaacaataaggcataactgtttgcacaaacttgggataaatgattttgggataacgatctaccagaatagggatatttcacccttggttctgagatgcaaaccaaagaatatcatgaccagctttcaggcctcctgaagtatatctctcacattgtcctgttctcatgctgaggagcctgagatccctgtgtggggattagacagtggactgttatgggtgtaggtgaattggcttattttgtctgtccctgtctgaatgtattgcaggaattaaaaaggaccaagaagaggaagaagaccaaggcccaccatgccccaggtaactgagcaattgtgaacagctacttctgtgttgacatctggagactcctggttcagggaaaacagagcgggctgacattatcgattacatcttttcaaccaagcctgaattattcctactaacattgctgttggttttcattgcagtagatatttaggtttccatttcttcctccccttatcatttactaacctactgtaggtggaccagacttcaaaaactgtattctcatggcgactgcatggaaacttgagcacattttatggaaaattattgagcacagtcttttcatgatccctgtatgctgtgtgtcctgagggcactaactcagagtgtcctgttactccctcatcagtgtgtcacctggacaattcactgagctcgttctctctctctgtgtgtgtgtgtctgtgtgtctatctgtctttctctttcattcttttccatttggccctgttctgtcccaacatgaaggcaataatttgttacctcattaatggatctatccttttagtttcttaaccacttccctatgctacccatgaaacctagttggggctctgttgtgtgtgatttcccctggcttattctttactttttcctccttttccaggctcagcagggagctgctggaggtagtagagcctgaagtcttgcaggactcactggatagatgttattcaactccttccagttgtcttgaacagcctgactcctgccagccctatggaagttccttttatgcattggaggaaaaacatgttggcttttctcttgacgtgggagaaattgaaaagaaggggaaggggaagaaaagaaggggaagaagatcaaagaaggaaagaagaaggggaagaaaagaaggggaagaagatcaaaacccaccatgccccaggctcagcagggagctgctggatgagaaagggcctgaagtcttgcaggactcactggatagatgttattcaactccttcaggttgtcttgaactgactgactcatgccagccctacagaagtgccttttacatattggagcaacagcgtgttggcttggctgttgacatggatgaaattgaaaagtaccaagaagtggaagaagaccaagacccatcatgccccaggactttcagcaattgtggatgcttaattctgtgttaacacctggaggcaacagattcagggaaaccagagtgtgtttgatgacatgttttcaacgaaggctgaattactcctactgtcattgctgttggttttcattgcagtagatgtttaggtttccatttcttcctccccttatcatttcctaacgtaccataggttgaccatacttcaaaagctgtactctcatggccactgcatcgaattttgagcatattttatggaaaactattgagctcactcttttcatgatcacagtttgctgtgtgtcatgagggcactaactcagagtgtcctttgactcccttaccagtatgtcacctggccaattcactaggtcactttctctctgtctctgtctctgtctctgtctctctctgtctttctctttcattgttttctacctggccctgttctatcccaacataaaggcaataatttattacctcattaatggatctgtcctttttcttttctaaacacttccttatgtgacttctgaaatctagtggggctctgtggtgtctgattttccctggctgcttctttagttttgtctccttttccaggctcagcagggagctgctggatgagaaagagcctgaagtcttgcaggactcactggatagatgttattcgactccttcaggttatcttgaactgcctgacttaggccagccctacagcagtgctgtttactcattggaggaacagtaccttggcttggctcttgacgtggacagaattaaaaaggaccaagaagaggaagaagaccaaggcccaccatgccccaggctcagcagggagctgctggaggtagtagagcctgaagtcttgcaggactcactggatagatgttattcaactccttccagttgtcttgaacagcctgactcctgccagccctatggaagttccttttatgcattggaggaaaaacatgttggcttttctcttgacgtgggagaaattgaaaagaaggggaaggggaagaaaagaaggggaagaagatcaaagaaggaaagaagaaggggaagaaaagaaggggaagaagatcaaaacccaccatgccccaggctcaacggcgtgctgatggaagtggaagagcctgaagtcttacaggactcactggatagatgttattcgactccgtcaatgtactttgaactacctgactcattccagcactacagaagtgtgttttactcatttgaggaacagcacatcagcttcgccctttacgtggacaataggttttttactttgacggtgacaagtctccacctggtgttccagatgggagtcatattcccacaataagcagcccttactaagccgagagatgtcattcctgcaggcaggacctataggcacgtgaagatttgaatgaaactacagttccatttggaagcccagacataggatgggtcagtgggcatggctctattcctattctcaaaccatgccagtggcaacctgtgctcagtctgaagacaatggacccacgttaggtgtgacacgttcacataactgtgcagcacatgccgggagtgatcagtcagacattttaatttgaaccacgtatctctgggtagctacaaaattcctcagggatttcattttgcaggcatgtctctgagcttctatacctgctcaaggtcattgtcatctttgtgtttagctcatccaaaggtgttaccctggtttcaatgaacctaacctcattctttgtgtcttcagtgttggcttgttttagctgatccatctgtaacacaggagggatccttggctgaggattgtatttcagaaccaccaactgctcttgacaattgttaacccgctaggctcctttggttagagaagccacagtccttcagcctccaattggtgtcagtacttaggaagaccacagctagatggacaaacagcattgggaggccttagccctgctcctctcaattccatcctgtagagaacaggagtcaggagccgctggcaggagacagcatgtcacccaggactctgccggtgcagaatatgaacaatgccatgttcttgcagaaaacgcttagcctgagtttcataggaggtaatcaccagacaactgcagaatgtagaacactgagcaggacaactgacctgtctccttcacatagtccatatcaccacaaatcacacaacaaaaaggagaagagatattttgggttcaaaaaaagtaaaaagataatgtagctgcatttctttagttattttgaaccccaaatatttcctcatctttttgttgttgtcatggatggtggtgacatggacttgtttatagaggacaggtcagctgtctggctcagtgatctacattctgaagttgtctgaaaatgtcttcatgattaaattcagcctaaacgttttgccgggaacactgcagagacaatgctgtgagtttccaacctcagcccatctgcgggcagagaaggtctagtttgtccatcaccatttatgatatcaggactggttacttggttaaggaggggtctaggagatctgtcccttttagagacaccttacttataatgaagtacttgggaaagcggttttcaagagtataaatatcctgtattctaatgatcatcctctaaacattttatcatttattaatcctccctgcctgtgtctattattatattcatatctctacactgcaaattttgggtctcaatttttactgtgcctttgtttttactagtgtctgctgttgcaaaaagaagaaaacattctctgcctgagttttaatttttgtccaaagttaattttaatctatacaattaaaaccttttgcctatca

SEQ ID NO: 483214 - DNA, 199 bp, Homo sapiens
gatgttcatgctgtgattgttcatgttgtgattgttcatgatgtgattgtcatgatgtgattgttcatgatgtgattgttcatgatgtgattgttgagcccattccaattggacaagctgctaaggactatttaaatttacatataatgccaactctgcttgtccaattgtagaagaaccttattaaaaaaaaaatcct

SEQ ID NO: 483215 - DNA, 4764 bp, Homo sapiens
  misc_feature (56)..(56): n is a, c, g, or t
  misc_feature (459)..(459): n is a, c, g, or t
agcttgcagagcagctcaagcaagctgaggagctcaggcaatataaagtcctggtncactccaggaacgagagctgacgcagtaaaggagaagttacaggaagggagagatgcctcccgctcattgaatgagcatctccaggccctcctcactctggatgagccggacaagtcccaggggcaggacctccaagaacagctggctgaggggtgtagactggcacagcaccttgtccaaaagctcagcccagggaggtgcagaaggctgaagagagcaaagtccctgaggactcactggaggaatgtgccatcacttgttcaaatagccacggcccttgtgactccaaccagcctcacaagaacatcaaaatcacatttgaggaagacgaagtcaactcaactctggttgtagacagagaatcctctcatgatgaatgtcaggatgctctaaacattctcncagtccccggccccacctcttctgccacaaacgtcagcatggtggtatcagccggccctttgtccagcgagaaggcagagatgaacattctagaaatcaatgagaaattgcgcccccagctggcagagaagaaacagcagttcagaaacctcaaagagaaatgttttctaactcaactggccggcttcctggccaaccagcagaacaaatacaaatatgaagagtgcaaagacctcataaaatctatgctgaggaatgagcgacagttcaaggaggagaagcttgcagagcagctcaagcaagctgaggagctcaggcaatataaagtcctggttcacgctcaggaacgagagctgacccagttaagggagaagttacgggaagggagagatgcctcccgctcattgaatgagcatctccaggccctcctcactccggatgagccggacaagtcccaggggcaggacctccaagaacagctggctgaggggtgtagactggcacagcaccttgtccaaaagctcagcccagaaaatgacaacgatgacgatgaagatgttcaagttgaggtggctgagaaagtgcagaaatcgtctgcccccagggagatgcagaaggctgaagaaaaggaagtccctgaggactcactggaggaatgtgccatcacttgttcaaatagccatggcccttatgactccaaccagccacataggaaaaccaaaatcacatttgaggaagacaaagtcgactcaactctcattggctcatcctctcatgttgaatgggaggatgctgtacacattattccagaaaatgaaagtgatgatgaggaagaggaagaaaaagggccagtgtctcccaggaatctgcaggagtctgaagaggaggaagtcccccaggagtcctgggatgaaggttattcgactctctcaattcctcctgaaatgttggcctcgtaccagtcttacagcagcacatttcactcattagaggaacagcaagtctgcatggctgttgacataggcagacatcggtgggatcaagtgaaaaaggaggaccaagaggcaacaggtcccaggctcagcagggagctgctggatgagaaagggcctgaagtcttgcaggactcactggatagatgttattcaactccttcaggttgtcttgaactgactgactcatgccagccctacagaagtgccttttacgtattggagcaacagcgtgttggcttggctgttgacatggatgaaattgaaaagtaccaagaagtggaagaagaccaagacccatcatgccccaggctcagcagggagctgctggatgagaaagagcctgaagtcttgcaggactcactggatagatgttattcgactccttcaggttatcttgaactgcctgacttaggccagccctacagcagtgctgtttactcattggaggaacagtaccttggcttggctcttgacgtggacagaattaaaaaggaccaagaagaggaagaagaccaaggcccaccatgccccaggctcagcagggagctgctggaggtagtagagcctgaagtcttgcaggactcactggatagatgttattcaactccttccagttgtcttgaacagcctgactcctgccagccctatggaagttccttttatgcattggaggaaaaacatgttggcttttctcttgacgtgggagaaattgaaaagaaggggaaggggaagaaaagaaggggaagaagatcaaagaaggaaagaagaaggggaagaaaagaaggggaagaagatcaaaacccaccatgccccaggctcagcggggagctgttggatgagaaagagcctgaagtcttgcaggagtcactggatagatgctattcaactccttcaggttgtcttgaactgactgactcatgccagccctacagaagtgccttttacatattggagcaacagcgtgttggcttggctgttgacatggatgaaattgaaaagtaccaagaagtggaagaagaccaagacccatcatgccccaggctcagcagggagctgctggatgagaaagagcctgaagtcttgcaggactcactggatagatgttattcgactccttcaggttatcttgaactgcctgacttaggccagccctacagcagtgctgtttactcattggaggaacagtaccttggcttggctcttgacgtggacagaattaaaaaggaccaagaagaggaagaagaccaaggcccaccatgccccaggctcagcagggagctgctggaggtagtagagcctgaagtcttgcaggactcactggatagatgttattcaactccttccagttgtcttgaacagcctgactcctgccagccctatggaagttccttttatgcattggaggaaaaacatgttggcttttctcttgacgtgggagaaattgaaaagaaggggaaggggaagaaaagaaggggaagaagatcaaagaaggaaagaagaaggggaagaaaagaaggggaagaagatcaaaacccaccatgccccaggctcaacggcgtgctgatggaagtggaagagcctgaagtcttacaggactcactggatagatgttattcgactccgtcaatgtactttgaactacctgactcattccagcactacagaagtgtgttttactcatttgaggaacagcacatcagcttcgccctttacgtggacaataggttttttactttgacggtgacaagtctccacctggtgttccagatgggagtcatattcccacaataagcagcccttactaagccgagagatgtcattcctgcaggcaggacctataggcacgtgaagatttgaatgaaactacagttccatttggaagcccagacataggatgggtcagtgggcatggctctattcctattctcaaaccatgccagtggcaacctgtgctcagtctgaagacaatggacccacgttaggtgtgacacgttcacataactgtgcagcacatgccgggagtgatcagtcagacattttaatttgaaccacgtatctctgggtagctacaaaattcctcagggatttcattttgcaggcatgtctctgagcttctatacctgctcaaggtcattgtcatctttgtgtttagctcatccaaaggtgttaccctggtttcaatgaacctaacctcattctttgtgtcttcagtgttggcttgttttagctgatccatctgtaacacaggagggatccttggctgaggattgtatttcagaaccaccaactgctcttgacaattgttaacccgctaggctcctttggttagagaagccacagtccttcagcctccaattggtgtcagtacttaggaagaccacagctagatggacaaacagcattgggaggccttagccctgctcctctcaattccatcctgtagagaacaggagtcaggagccgctggcaggagacagcatgtcacccaggactctgccggtgcagaatatgaacaatgccatgttcttgcagaaaacgcttagcctgagtttcataggaggtaatcaccagacaactgcagaatgtagaacactgagcaggacaactgacctgtctccttcacatagtccatatcaccacaaatcacacaacaaaaaggagaagagatattttgggttcaaaaaaagtaaaaagataatgtagctgcatttctttagttattttgaaccccaaatatttcctcatctttttgttgttgtcatggatggtggtgacatggacttgtttatagaggacaggtcagctgtctggctcagtgatctacattctgaagttgtctgaaaatgtcttcatgattaaattcagcctaaacgttttgccgggaacactgcagagacaatgctgtgagtttccaacctcagcccatctgcgggcagagaaggtctagtttgtccatcaccatttatgatatcaggactggttacttggttaaggaggggtctaggagatctgtcccttttagagacaccttacttataatgaagtacttgggaaagcggttttcaagagtataaatatcctgtattctaatgatcatcctctaaacattttatcatttattaatcctccctgcctgtgtctattattatattcatatctctacactgcaaattttgggtctcaatttttactgtgcctttgtttttactagtgtctgctgttgcaaaaagaagaaaacattctctgcctgagttttaatttttgtccaaagttaattttaatctatacaattaaaaccttttgcctatca

SEQ ID NO: 483216 - DNA, 4769 bp, Homo sapiens
  misc_feature (56)..(56): n is a, c, g, or t
  misc_feature (459)..(459): n is a, c, g, or t
agcttgcagagcagctcaagcaagctgaggagctcaggcaatataaagtcctggtncactccaggaacgagagctgacgcagtaaaggagaagttacaggaagggagagatgcctcccgctcattgaatgagcatctccaggccctcctcactctggatgagccggacaagtcccaggggcaggacctccaagaacagctggctgaggggtgtagactggcacagcaccttgtccaaaagctcagcccagggaggtgcagaaggctgaagagagcaaagtccctgaggactcactggaggaatgtgccatcacttgttcaaatagccacggcccttgtgactccaaccagcctcacaagaacatcaaaatcacatttgaggaagacgaagtcaactcaactctggttgtagacagagaatcctctcatgatgaatgtcaggatgctctaaacattctcncagtccccggccccacctcttctgccacaaacgtcagcatggtggtatcagccggccctttgtccagcgagaaggcagagatgaacattctagaaatcaatgagaaattgcgcccccagctggcagagaagaaacagcagttcagaaacctcaaagagaaatgttttctaactcaactggccggcttcctggccaaccagcagaacaaatacaaatatgaagagtgcaaagacctcataaaatctatgctgaggaatgagcgacagttcaaggaggagaagcttgcagagcagctcaagcaagctgaggagctcaggcaatataaagtcctggttcacgctcaggaacgagagctgacccagttaagggagaagttacgggaagggagagatgcctcccgctcattgaatgagcatctccaggccctcctcactccggatgagccggacaagtcccaggggcaggacctccaagaacagctggctgaggggtgtagactggcacagcaccttgtccaaaagctcagcccagaaaatgacaacgatgacgatgaagatgttcaagttgaggtggctgagaaagtgcagaaatcgtctgcccccagggagatgcagaaggctgaagaaaaggaagtccctgaggactcactggaggaatgtgccatcacttgttcaaatagccatggcccttatgactccaaccagccacataggaaaaccaaaatcacatttgaggaagacaaagtcgactcaactctcattggctcatcctctcatgttgaatgggaggatgctgtacacattattccagaaaatgaaagtgatgatgaggaagaggaagaaaaagggccagtgtctcccaggaatctgcaggagtctgaagaggaggaagtcccccaggagtcctgggatgaaggttattcgactctctcaattcctcctgaaatgttggcctcgtaccagtcttacagcagcacatttcactcattagaggaacagcaagtctgcatggctgttgacataggcagacatcggtgggatcaagtgaaaaaggaggaccaagaggcaacaggtcccaggctcagcagggagctgctggatgagaaagggcctgaagtcttgcaggactcactggatagatgttattcaactccttcaggttgtcttgaactgactgactcatgccagccctacagaagtgccttttacgtattggagcaacagcgtgttggcttggctgttgacatggatgaaattgaaaagtaccaagaagtggaagaagaccaagacccatcatgccccaggctcagcagggagctgctggatgagaaagagcctgaagtcttgcaggactcactggatagatgttattcgactccttcaggttatcttgaactgcctgacttaggccagccctacagcagtgctgtttactcattggaggaacagtaccttggcttggctcttgacgtggacagaattaaaaaggaccaagaagaggaagaagaccaaggcccaccatgccccaggctcagcagggagctgctggaggtagtagagcctgaagtcttgcaggactcactggatagatgttattcaactccttccagttgtcttgaacagcctgactcctgccagccctatggaagttccttttatgcattggaggaaaaacatgttggcttttctcttgacgtgggagaaattgaaaagaaggggaaggggaagaaaagaaggggaagaagatcaaagaaggaaagaagaaggggaagaaaagaaggggaagaagatcaaaacccaccatgccccaggctcagcagggagctgctggatgagaaagggcctgaagtcttgcaggactcactggatagatgttattcaactccttcaggttgtcttgaactgactgactcatgccagccctacagaagtgccttttacatattggagcaacagcgtgttggcttggctgttgacatggatgaaattgaaaagtaccaagaagtggaagaagaccaagacccatcatgccccaggccaggctcagcagggagctgctggatgagaaagagcctgaagtcttgcaggactcactggatagatgttattcgactccttcaggttatcttgaactgcctgacttaggccagccctacagcagtgctgtttactcattggaggaacagtaccttggcttggctcttgacgtggacagaattaaaaaggaccaagaagaggaagaagaccaaggcccaccatgccccaggctcagcagggagctgctggaggtagtagagcctgaagtcttgcaggactcactggatagatgttattcaactccttccagttgtcttgaacagcctgactcctgccagccctatggaagttccttttatgcattggaggaaaaacatgttggcttttctcttgacgtgggagaaattgaaaagaaggggaaggggaagaaaagaaggggaagaagatcaaagaaggaaagaagaaggggaagaaaagaaggggaagaagatcaaaacccaccatgccccaggctcaacggcgtgctgatggaagtggaagagcctgaagtcttacaggactcactggatagatgttattcgactccgtcaatgtactttgaactacctgactcattccagcactacagaagtgtgttttactcatttgaggaacagcacatcagcttcgccctttacgtggacaataggttttttactttgacggtgacaagtctccacctggtgttccagatgggagtcatattcccacaataagcagcccttactaagccgagagatgtcattcctgcaggcaggacctataggcacgtgaagatttgaatgaaactacagttccatttggaagcccagacataggatgggtcagtgggcatggctctattcctattctcaaaccatgccagtggcaacctgtgctcagtctgaagacaatggacccacgttaggtgtgacacgttcacataactgtgcagcacatgccgggagtgatcagtcagacattttaatttgaaccacgtatctctgggtagctacaaaattcctcagggatttcattttgcaggcatgtctctgagcttctatacctgctcaaggtcattgtcatctttgtgtttagctcatccaaaggtgttaccctggtttcaatgaacctaacctcattctttgtgtcttcagtgttggcttgttttagctgatccatctgtaacacaggagggatccttggctgaggattgtatttcagaaccaccaactgctcttgacaattgttaacccgctaggctcctttggttagagaagccacagtccttcagcctccaattggtgtcagtacttaggaagaccacagctagatggacaaacagcattgggaggccttagccctgctcctctcaattccatcctgtagagaacaggagtcaggagccgctggcaggagacagcatgtcacccaggactctgccggtgcagaatatgaacaatgccatgttcttgcagaaaacgcttagcctgagtttcataggaggtaatcaccagacaactgcagaatgtagaacactgagcaggacaactgacctgtctccttcacatagtccatatcaccacaaatcacacaacaaaaaggagaagagatattttgggttcaaaaaaagtaaaaagataatgtagctgcatttctttagttattttgaaccccaaatatttcctcatctttttgttgttgtcatggatggtggtgacatggacttgtttatagaggacaggtcagctgtctggctcagtgatctacattctgaagttgtctgaaaatgtcttcatgattaaattcagcctaaacgttttgccgggaacactgcagagacaatgctgtgagtttccaacctcagcccatctgcgggcagagaaggtctagtttgtccatcaccatttatgatatcaggactggttacttggttaaggaggggtctaggagatctgtcccttttagagacaccttacttataatgaagtacttgggaaagcggttttcaagagtataaatatcctgtattctaatgatcatcctctaaacattttatcatttattaatcctccctgcctgtgtctattattatattcatatctctacactgcaaattttgggtctcaatttttactgtgcctttgtttttactagtgtctgctgttgcaaaaagaagaaaacattctctgcctgagttttaatttttgtccaaagttaattttaatctatacaattaaaaccttttgcctatca

SEQ ID NO: 483217 - DNA, 5647 bp, Homo sapiens
  misc_feature (56)..(56): n is a, c, g, or t
  misc_feature (459)..(459): n is a, c, g, or t
  misc_feature (2387)..(2387): n is a, c, g, or t
  misc_feature (2389)..(2389): n is a, c, g, or t
  misc_feature (2391)..(2391): n is a, c, g, or t
  misc_feature (2399)..(2399): n is a, c, g, or t
  misc_feature (2405)..(2405): n is a, c, g, or t
  misc_feature (2411)..(2411): n is a, c, g, or t
agcttgcagagcagctcaagcaagctgaggagctcaggcaatataaagtcctggtncactccaggaacgagagctgacgcagtaaaggagaagttacaggaagggagagatgcctcccgctcattgaatgagcatctccaggccctcctcactctggatgagccggacaagtcccaggggcaggacctccaagaacagctggctgaggggtgtagactggcacagcaccttgtccaaaagctcagcccagggaggtgcagaaggctgaagagagcaaagtccctgaggactcactggaggaatgtgccatcacttgttcaaatagccacggcccttgtgactccaaccagcctcacaagaacatcaaaatcacatttgaggaagacgaagtcaactcaactctggttgtagacagagaatcctctcatgatgaatgtcaggatgctctaaacattctcncagtccccggccccacctcttctgccacaaacgtcagcatggtggtatcagccggccctttgtccagcgagaaggcagagatgaacattctagaaatcaatgagaaattgcgcccccagctggcagagaagaaacagcagttcagaaacctcaaagagaaatgttttctaactcaactggccggcttcctggccaaccagcagaacaaatacaaatatgaagagtgcaaagacctcataaaatctatgctgaggaatgagcgacagttcaaggaggagaagcttgcagagcagctcaagcaagctgaggagctcaggcaatataaagtcctggttcacgctcaggaacgagagctgacccagttaagggagaagttacgggaagggagagatgcctcccgctcattgaatgagcatctccaggccctcctcactccggatgagccggacaagtcccaggggcaggacctccaagaacagctggctgaggggtgtagactggcacagcaccttgtccaaaagctcagcccagaaaatgacaacgatgacgatgaagatgttcaagttgaggtggctgagaaagtgcagaaatcgtctgcccccagggagatgcagaaggctgaagaaaaggaagtccctgaggactcactggaggaatgtgccatcacttgttcaaatagccatggcccttatgactccaaccagccacataggaaaaccaaaatcacatttgaggaagacaaagtcgactcaactctcattggctcatcctctcatgttgaatgggaggatgctgtacacattattccagaaaatgaaagtgatgatgaggaagaggaagaaaaagggccagtgtctcccaggaatctgcaggagtctgaagaggaggaagtcccccaggagtcctgggatgaaggttattcgactctctcaattcctcctgaaatgttggcctcgtaccagtcttacagcagcacatttcactcattagaggaacagcaagtctgcatggctgttgacataggcagacatcggtgggatcaagtgaaaaaggaggaccaagaggcaacaggtcccaggctcagcagggagctgctggatgagaaagggcctgaagtcttgcaggactcactggatagatgttattcaactccttcaggttgtcttgaactgactgactcatgccagccctacagaagtgccttttacgtattggagcaacagcgtgttggcttggctgttgacatggatgaaattgaaaagtaccaagaagtggaagaagaccaagacccatcatgccccaggctcagcagggagctgctggatgagaaagagcctgaagtcttgcaggactcactggatagatgttattcgactccttcaggttatcttgaactgcctgacttaggccagccctacagcagtgctgtttactcattggaggaacagtaccttggcttggctcttgacgtggacagaattaaaaaggaccaagaagaggaagaagaccaaggcccaccatgccccaggtaactgagcaattgtgaacagctacttctgtgttgacatctggagactcctggttcagggaaaacagagcgggctgacattatcgattacatcttttcaaccaagcctgaattattcctactaacattgctgttggttttcattgcagtagatatttaggtttccatttcttcctccccttatcatttactaacctactgtaggtggaccagacttcaaaaactgtattctcatggcgactgcatggaaacttgagcacattttatggaaaattattgagcacagtcttttcatgatccctgtatgctgtgtgtcctgagggcactaactcagagtgtcctgttactccctcatcagtgtgtcacctggacaattcactgagctcgttctctctctctntntntgtgtgtntgtgtntgtgtntgtgtgtgtgtgtgtgtgtgtgtgtgtgtctgtgtgtctatctgtctttctctttcattcttttccatttggccctgttctgtcccaacatgaaggcaataatttgttacctcattaatggatctatccttttagtttcttaaccacttccctatgctacccatgaaacctagttggggctctgttgtgtgtgatttcccctggcttattctttactttttcctccttttccaggctcagcagggagctgctggaggtagtagagcctgaagtcttgcaggactcactggatagatgttattcaactccttccagttgtcttgaacagcctgactcctgccagccctatggaagttccttttatgcattggaggaaaaacatgttggcttttctcttgacgtgggagaaattgaaaagaaggggaaggggaagaaaagaaggggaagaagatcaaagaaggaaagaagaaggggaagaaaagaaggggaagaagatcaaaacccaccatgccccaggctcagcagggagctgctggatgagaaagggcctgaagtcttgcaggactcactggatagatgttattcaactccttcaggttgtcttgaactgactgactcatgccagccctacagaagtgccttttacatattggagcaacagcgtgttggcttggctgttgacatggatgaaattgaaaagtaccaagaagtggaagaagaccaagacccatcatgccccaggctcagcggggagctgttggatgagaaagagcctgaagtcttgcaggagtcactggatagatgctattcaactccttcaggttgtcttgaactgactgactcatgccagccctacagaagtgccttttacatattggagcaacagcgtgttggcttggctgttgacatggatgaaattgaaaagtaccaagaagtggaagaagaccaagacccatcatgccccaggctcagcagggagctgctggatgagaaagagcctgaagtcttgcaggactcactggatagatgttattcgactccttcaggttatcttgaactgcctgacttaggccagccctacagcagtgctgtttactcattggaggaacagtaccttggcttggctcttgacgtggacagaattaaaaaggaccaagaagaggaagaagaccaaggcccaccatgccccaggctcagcagggagctgctggaggtagtagagcctgaagtcttgcaggactcactggatagatgttattcaactccttccagttgtcttgaacagcctgactcctgccagccctatggaagttccttttatgcattggaggaaaaacatgttggcttttctcttgacgtgggagaaattgaaaagaaggggaaggggaagaaaagaaggggaagaagatcaaagaaggaaagaagaaggggaagaaaagaaggggaagaagatcaaaacccaccatgccccaggctcaacggcgtgctgatggaagtggaagagcctgaagtcttacaggactcactggatagatgttattcgactccgtcaatgtactttgaactacctgactcattccagcactacagaagtgtgttttactcatttgaggaacagcacatcagcttcgccctttacgtggacaataggttttttactttgacggtgacaagtctccacctggtgttccagatgggagtcatattcccacaataagcagcccttactaagccgagagatgtcattcctgcaggcaggacctataggcacgtgaagatttgaatgaaactacagttccatttggaagcccagacataggatgggtcagtgggcatggctctattcctattctcaaaccatgccagtggcaacctgtgctcagtctgaagacaatggacccacgttaggtgtgacacgttcacataactgtgcagcacatgccgggagtgatcagtcagacattttaatttgaaccacgtatctctgggtagctacaaaattcctcagggatttcattttgcaggcatgtctctgagcttctatacctgctcaaggtcattgtcatctttgtgtttagctcatccaaaggtgttaccctggtttcaatgaacctaacctcattctttgtgtcttcagtgttggcttgttttagctgatccatctgtaacacaggagggatccttggctgaggattgtatttcagaaccaccaactgctcttgacaattgttaacccgctaggctcctttggttagagaagccacagtccttcagcctccaattggtgtcagtacttaggaagaccacagctagatggacaaacagcattgggaggccttagccctgctcctctcaattccatcctgtagagaacaggagtcaggagccgctggcaggagacagcatgtcacccaggactctgccggtgcagaatatgaacaatgccatgttcttgcagaaaacgcttagcctgagtttcataggaggtaatcaccagacaactgcagaatgtagaacactgagcaggacaactgacctgtctccttcacatagtccatatcaccacaaatcacacaacaaaaaggagaagagatattttgggttcaaaaaaagtaaaaagataatgtagctgcatttctttagttattttgaaccccaaatatttcctcatctttttgttgttgtcatggatggtggtgacatggacttgtttatagaggacaggtcagctgtctggctcagtgatctacattctgaagttgtctgaaaatgtcttcatgattaaattcagcctaaacgttttgccgggaacactgcagagacaatgctgtgagtttccaacctcagcccatctgcgggcagagaaggtctagtttgtccatcaccatttatgatatcaggactggttacttggttaaggaggggtctaggagatctgtcccttttagagacaccttacttataatgaagtacttgggaaagcggttttcaagagtataaatatcctgtattctaatgatcatcctctaaacattttatcatttattaatcctccctgcctgtgtctattattatattcatatctctacactgcaaattttgggtctcaatttttactgtgcctttgtttttactagtgtctgctgttgcaaaaagaagaaaacattctctgcctgagttttaatttttgtccaaagttaattttaatctatacaattaaaaccttttgcctatca

SEQ ID NO: 483218 - DNA, 270 bp, Homo sapiens
gcctgttttttaaaaaaaaaaaaacccttgggttaggcccgcatataaatgtaataagttccccccgggatataacccaaccaatgtttgtccgggataagaattactaaattcccaaggccatttccttttaacttttgggttaagtttgggcctgaaattttaatgaagggccatcctgggggggcccccttttcttgccccggtaaacatattggaagggcccgggccataaacccccgggccctttttttccagtgataaagtcta

SEQ ID NO: 483219 - DNA, 5145 bp, Homo sapiens
  misc_feature (56)..(56): n is a, c, g, or t
  misc_feature (459)..(459): n is a, c, g, or t
agcttgcagagcagctcaagcaagctgaggagctcaggcaatataaagtcctggtncactccaggaacgagagctgacgcagtaaaggagaagttacaggaagggagagatgcctcccgctcattgaatgagcatctccaggccctcctcactctggatgagccggacaagtcccaggggcaggacctccaagaacagctggctgaggggtgtagactggcacagcaccttgtccaaaagctcagcccagggaggtgcagaaggctgaagagagcaaagtccctgaggactcactggaggaatgtgccatcacttgttcaaatagccacggcccttgtgactccaaccagcctcacaagaacatcaaaatcacatttgaggaagacgaagtcaactcaactctggttgtagacagagaatcctctcatgatgaatgtcaggatgctctaaacattctcncagtccccggccccacctcttctgccacaaacgtcagcatggtggtatcagccggccctttgtccagcgagaaggcagagatgaacattctagaaatcaatgagaaattgcgcccccagctggcagagaagaaacagcagttcagaaacctcaaagagaaatgttttctaactcaactggccggcttcctggccaaccagcagaacaaatacaaatatgaagagtgcaaagacctcataaaatctatgctgaggaatgagcgacagttcaaggaggagaagcttgcagagcagctcaagcaagctgaggagctcaggcaatataaagtcctggttcacgctcaggaacgagagctgacccagttaagggagaagttacgggaagggagagatgcctcccgctcattgaatgagcatctccaggccctcctcactccggatgagccggacaagtcccaggggcaggacctccaagaacagctggctgaggggtgtagactggcacagcaccttgtccaaaagctcagcccagaaaatgacaacgatgacgatgaagatgttcaagttgaggtggctgagaaagtgcagaaatcgtctgcccccagggagatgcagaaggctgaagaaaaggaagtccctgaggactcactggaggaatgtgccatcacttgttcaaatagccatggcccttatgactccaaccagccacataggaaaaccaaaatcacatttgaggaagacaaagtcgactcaactctcattggctcatcctctcatgttgaatgggaggatgctgtacacattattccagaaaatgaaagtgatgatgaggaagaggaagaaaaagggccagtgtctcccaggaatctgcaggagtctgaagaggaggaagtcccccaggagtcctgggatgaaggttattcgactctctcaattcctcctgaaatgttggcctcgtaccagtcttacagcagcacatttcactcattagaggaacagcaagtctgcatggctgttgacataggcagacatcggtgggatcaagtgaaaaaggaggaccaagaggcaacaggtcccaggctcagcagggagctgctggatgagaaagggcctgaagtcttgcaggactcactggatagatgttattcaactccttcaggttgtcttgaactgactgactcatgccagccctacagaagtgccttttacgtattggagcaacagcgtgttggcttggctgttgacatggatgaaattgaaaagtaccaagaagtggaagaagaccaagacccatcatgccccaggctcagcagggagctgctggatgagaaagagcctgaagtcttgcaggactcactggatagatgttattcgactccttcaggttatcttgaactgcctgacttaggccagccctacagcagtgctgtttactcattggaggaacagtaccttggcttggctcttgacgtggacagaattaaaaaggaccaagaagaggaagaagaccaaggcccaccatgccccaggctcagcagggagctgctggaggtagtagagcctgaagtcttgcaggactcactggatagatgttattcaactccttccagttgtcttgaacagcctgactcctgccagccctatggaagttccttttatgcattggaggaaaaacatgttggcttttctcttgacgtgggagaaattgaaaagaaggggaaggggaagaaaagaaggggaagaagatcaaagaaggaaagaagaaggggaagaaaagaaggggaagaagatcaaaacccaccatgccccaggactttcagcaattgtggatgcttaattctgtgttaacacctggaggcaacagattcagggaaaccagagtgtgtttgatgacatgttttcaacgaaggctgaattactcctactgtcattgctgttggttttcattgcagtagatgtttaggtttccatttcttcctccccttatcatttcctaacgtaccataggttgaccatacttcaaaagctgtactctcatggccactgcatcgaattttgagcatattttatggaaaactattgagctcactcttttcatgatcacagtttgctgtgtgtcatgagggcactaactcagagtgtcctttgactcccttaccagtatgtcacctggccaattcactaggtcactttctctctgtctctgtctctgtctctgtctctctctgtctttctctttcattgttttctacctggccctgttctatcccaacataaaggcaataatttattacctcattaatggatctgtcctttttcttttctaaacacttccttatgtgacttctgaaatctagtggggctctgtggtgtctgattttccctggctgcttctttagttttgtctccttttccaggctcagcagggagctgctggatgagaaagagcctgaagtcttgcaggactcactggatagatgttattcgactccttcaggttatcttgaactgcctgacttaggccagccctacagcagtgctgtttactcattggaggaacagtaccttggcttggctcttgacgtggacagaattaaaaaggaccaagaagaggaagaagaccaaggcccaccatgccccaggctcagcagggagctgctggaggtagtagagcctgaagtcttgcaggactcactggatagatgttattcaactccttccagttgtcttgaacagcctgactcctgccagccctatggaagttccttttatgcattggaggaaaaacatgttggcttttctcttgacgtgggagaaattgaaaagaaggggaaggggaagaaaagaaggggaagaagatcaaagaaggaaagaagaaggggaagaaaagaaggggaagaagatcaaaacccaccatgccccaggctcaacggcgtgctgatggaagtggaagagcctgaagtcttacaggactcactggatagatgttattcgactccgtcaatgtactttgaactacctgactcattccagcactacagaagtgtgttttactcatttgaggaacagcacatcagcttcgccctttacgtggacaataggttttttactttgacggtgacaagtctccacctggtgttccagatgggagtcatattcccacaataagcagcccttactaagccgagagatgtcattcctgcaggcaggacctataggcacgtgaagatttgaatgaaactacagttccatttggaagcccagacataggatgggtcagtgggcatggctctattcctattctcaaaccatgccagtggcaacctgtgctcagtctgaagacaatggacccacgttaggtgtgacacgttcacataactgtgcagcacatgccgggagtgatcagtcagacattttaatttgaaccacgtatctctgggtagctacaaaattcctcagggatttcattttgcaggcatgtctctgagcttctatacctgctcaaggtcattgtcatctttgtgtttagctcatccaaaggtgttaccctggtttcaatgaacctaacctcattctttgtgtcttcagtgttggcttgttttagctgatccatctgtaacacaggagggatccttggctgaggattgtatttcagaaccaccaactgctcttgacaattgttaacccgctaggctcctttggttagagaagccacagtccttcagcctccaattggtgtcagtacttaggaagaccacagctagatggacaaacagcattgggaggccttagccctgctcctctcaattccatcctgtagagaacaggagtcaggagccgctggcaggagacagcatgtcacccaggactctgccggtgcagaatatgaacaatgccatgttcttgcagaaaacgcttagcctgagtttcataggaggtaatcaccagacaactgcagaatgtagaacactgagcaggacaactgacctgtctccttcacatagtccatatcaccacaaatcacacaacaaaaaggagaagagatattttgggttcaaaaaaagtaaaaagataatgtagctgcatttctttagttattttgaaccccaaatatttcctcatctttttgttgttgtcatggatggtggtgacatggacttgtttatagaggacaggtcagctgtctggctcagtgatctacattctgaagttgtctgaaaatgtcttcatgattaaattcagcctaaacgttttgccgggaacactgcagagacaatgctgtgagtttccaacctcagcccatctgcgggcagagaaggtctagtttgtccatcaccatttatgatatcaggactggttacttggttaaggaggggtctaggagatctgtcccttttagagacaccttacttataatgaagtacttgggaaagcggttttcaagagtataaatatcctgtattctaatgatcatcctctaaacattttatcatttattaatcctccctgcctgtgtctattattatattcatatctctacactgcaaattttgggtctcaatttttactgtgcctttgtttttactagtgtctgctgttgcaaaaagaagaaaacattctctgcctgagttttaatttttgtccaaagttaattttaatctatacaattaaaaccttttgcctatca

SEQ ID NO: 483220 - DNA, 6136 bp, Homo sapiens
  misc_feature (56)..(56): n is a, c, g, or t
  misc_feature (459)..(459): n is a, c, g, or t
  misc_feature (2171)..(2171): n is a, c, g, or t
  misc_feature (3096)..(3096): n is a, c, g, or t
  misc_feature (3098)..(3098): n is a, c, g, or t
  misc_feature (3100)..(3100): n is a, c, g, or t
  misc_feature (3108)..(3108): n is a, c, g, or t
  misc_feature (3114)..(3114): n is a, c, g, or t
  misc_feature (3120)..(3120): n is a, c, g, or t
agcttgcagagcagctcaagcaagctgaggagctcaggcaatataaagtcctggtncactccaggaacgagagctgacgcagtaaaggagaagttacaggaagggagagatgcctcccgctcattgaatgagcatctccaggccctcctcactctggatgagccggacaagtcccaggggcaggacctccaagaacagctggctgaggggtgtagactggcacagcaccttgtccaaaagctcagcccagggaggtgcagaaggctgaagagagcaaagtccctgaggactcactggaggaatgtgccatcacttgttcaaatagccacggcccttgtgactccaaccagcctcacaagaacatcaaaatcacatttgaggaagacgaagtcaactcaactctggttgtagacagagaatcctctcatgatgaatgtcaggatgctctaaacattctcncagtccccggccccacctcttctgccacaaacgtcagcatggtggtatcagccggccctttgtccagcgagaaggcagagatgaacattctagaaatcaatgagaaattgcgcccccagctggcagagaagaaacagcagttcagaaacctcaaagagaaatgttttctaactcaactggccggcttcctggccaaccagcagaacaaatacaaatatgaagagtgcaaagacctcataaaatctatgctgaggaatgagcgacagttcaaggaggagaagcttgcagagcagctcaagcaagctgaggagctcaggcaatataaagtcctggttcacgctcaggaacgagagctgacccagttaagggagaagttacgggaagggagagatgcctcccgctcattgaatgagcatctccaggccctcctcactccggatgagccggacaagtcccaggggcaggacctccaagaacagctggctgaggggtgtagactggcacagcaccttgtccaaaagctcagcccagaaaatgacaacgatgacgatgaagatgttcaagttgaggtggctgagaaagtgcagaaatcgtctgcccccagggagatgcagaaggctgaagaaaaggaagtccctgaggactcactggaggaatgtgccatcacttgttcaaatagccatggcccttatgactccaaccagccacataggaaaaccaaaatcacatttgaggaagacaaagtcgactcaactctcattggctcatcctctcatgttgaatgggaggatgctgtacacattattccagaaaatgaaagtgatgatgaggaagaggaagaaaaagggccagtgtctcccaggaatctgcaggagtctgaagaggaggaagtcccccaggagtcctgggatgaaggttattcgactctctcaattcctcctgaaatgttggcctcgtaccagtcttacagcagcacatttcactcattagaggaacagcaagtctgcatggctgttgacataggcagacatcggtgggatcaagtgaaaaaggaggaccaagaggcaacaggtcccaggctcagcagggagctgctggatgagaaagggcctgaagtcttgcaggactcactggatagatgttattcaactccttcaggttgtcttgaactgactgactcatgccagccctacagaagtgccttttacgtattggagcaacagcgtgttggcttggctgttgacatggatgaaattgaaaagtaccaagaagtggaagaagaccaagacccatcatgccccaggctcagcagggagctgctggatgagaaagagcctgaagtcttgcaggactcactggatagatgttattcgactccttcaggttatcttgaactgcctgacttaggccagccctacagcagtgctgtttactcattggaggaacagtaccttggcttggctcttgacgtggacagtgagtaccttactgtgaaggtgataagcctccacctggtcttccagataggggtgatattcctgttccaagtggcccttactgacccgagagatgtcattgccgcaggcaggacctatgggcgcatataggttgtaatgaaactgtagtctcagttggaagcctagacatgaaatgggtcagtgagcaaggctctattcctagtctccagccatgcctgtggcaacctgagcccnctctcagcacattggacccaggcagatgtaaaaaattcacagaactatgatttggactcaagggtttgtagatttcctccttcattctaatttcagtgtctaaaattcttgcatccatgaacgagctgggcatttgatgagacagggctgaatactgcagttttcctcctagaaatcatctggggcattttctttgaactgatgggaacaataaggcataactgtttgcacaaacttgggataaatgattttgggataacgatctaccagaatagggatatttcacccttggttctgagatgcaaaccaaagaatatcatgaccagctttcaggcctcctgaagtatatctctcacattgtcctgttctcatgctgaggagcctgagatccctgtgtggggattagacagtggactgttatgggtgtaggtgaattggcttattttgtctgtccctgtctgaatgtattgcaggaattaaaaaggaccaagaagaggaagaagaccaaggcccaccatgccccaggtaactgagcaattgtgaacagctacttctgtgttgacatctggagactcctggttcagggaaaacagagcgggctgacattatcgattacatcttttcaaccaagcctgaattattcctactaacattgctgttggttttcattgcagtagatatttaggtttccatttcttcctccccttatcatttactaacctactgtaggtggaccagacttcaaaaactgtattctcatggcgactgcatggaaacttgagcacattttatggaaaattattgagcacagtcttttcatgatccctgtatgctgtgtgtcctgagggcactaactcagagtgtcctgttactccctcatcagtgtgtcacctggacaattcactgagctcgttctctctctctntntntgtgtgtntgtgtntgtgtntgtgtgtgtgtgtgtgtgtgtgtgtgtgtctgtgtgtctatctgtctttctctttcattcttttccatttggccctgttctgtcccaacatgaaggcaataatttgttacctcattaatggatctatccttttagtttcttaaccacttccctatgctacccatgaaacctagttggggctctgttgtgtgtgatttcccctggcttattctttactttttcctccttttccaggctcagcagggagctgctggaggtagtagagcctgaagtcttgcaggactcactggatagatgttattcaactccttccagttgtcttgaacagcctgactcctgccagccctatggaagttccttttatgcattggaggaaaaacatgttggcttttctcttgacgtgggagaaattgaaaagaaggggaaggggaagaaaagaaggggaagaagatcaaagaaggaaagaagaaggggaagaaaagaaggggaagaagatcaaaacccaccatgccccaggctcagcagggagctgctggatgagaaagggcctgaagtcttgcaggactcactggatagatgttattcaactccttcaggttgtcttgaactgactgactcatgccagccctacagaagtgccttttacatattggagcaacagcgtgttggcttggctgttgacatggatgaaattgaaaagtaccaagaagtggaagaagaccaagacccatcatgccccaggccaggctcagcagggagctgctggatgagaaagagcctgaagtcttgcaggactcactggatagatgttattcgactccttcaggttatcttgaactgcctgacttaggccagccctacagcagtgctgtttactcattggaggaacagtaccttggcttggctcttgacgtggacagaattaaaaaggaccaagaagaggaagaagaccaaggcccaccatgccccaggctcagcagggagctgctggaggtagtagagcctgaagtcttgcaggactcactggatagatgttattcaactccttccagttgtcttgaacagcctgactcctgccagccctatggaagttccttttatgcattggaggaaaaacatgttggcttttctcttgacgtgggagaaattgaaaagaaggggaaggggaagaaaagaaggggaagaagatcaaagaaggaaagaagaaggggaagaaaagaaggggaagaagatcaaaacccaccatgccccaggctcaacggcgtgctgatggaagtggaagagcctgaagtcttacaggactcactggatagatgttattcgactccgtcaatgtactttgaactacctgactcattccagcactacagaagtgtgttttactcatttgaggaacagcacatcagcttcgccctttacgtggacaataggttttttactttgacggtgacaagtctccacctggtgttccagatgggagtcatattcccacaataagcagcccttactaagccgagagatgtcattcctgcaggcaggacctataggcacgtgaagatttgaatgaaactacagttccatttggaagcccagacataggatgggtcagtgggcatggctctattcctattctcaaaccatgccagtggcaacctgtgctcagtctgaagacaatggacccacgttaggtgtgacacgttcacataactgtgcagcacatgccgggagtgatcagtcagacattttaatttgaaccacgtatctctgggtagctacaaaattcctcagggatttcattttgcaggcatgtctctgagcttctatacctgctcaaggtcattgtcatctttgtgtttagctcatccaaaggtgttaccctggtttcaatgaacctaacctcattctttgtgtcttcagtgttggcttgttttagctgatccatctgtaacacaggagggatccttggctgaggattgtatttcagaaccaccaactgctcttgacaattgttaacccgctaggctcctttggttagagaagccacagtccttcagcctccaattggtgtcagtacttaggaagaccacagctagatggacaaacagcattgggaggccttagccctgctcctctcaattccatcctgtagagaacaggagtcaggagccgctggcaggagacagcatgtcacccaggactctgccggtgcagaatatgaacaatgccatgttcttgcagaaaacgcttagcctgagtttcataggaggtaatcaccagacaactgcagaatgtagaacactgagcaggacaactgacctgtctccttcacatagtccatatcaccacaaatcacacaacaaaaaggagaagagatattttgggttcaaaaaaagtaaaaagataatgtagctgcatttctttagttattttgaaccccaaatatttcctcatctttttgttgttgtcatggatggtggtgacatggacttgtttatagaggacaggtcagctgtctggctcagtgatctacattctgaagttgtctgaaaatgtcttcatgattaaattcagcctaaacgttttgccgggaacactgcagagacaatgctgtgagtttccaacctcagcccatctgcgggcagagaaggtctagtttgtccatcaccatttatgatatcaggactggttacttggttaaggaggggtctaggagatctgtcccttttagagacaccttacttataatgaagtacttgggaaagcggttttcaagagtataaatatcctgtattctaatgatcatcctctaaacattttatcatttattaatcctccctgcctgtgtctattattatattcatatctctacactgcaaattttgggtctcaatttttactgtgcctttgtttttactagtgtctgctgttgcaaaaagaagaaaacattctctgcctgagttttaatttttgtccaaagttaattttaatctatacaattaaaaccttttgcctatca

SEQ ID NO: 483221 - DNA, 1105 bp, Homo sapiens
gcctgctccccttgcgaagaactgtggcctcccgggaggagatgaggtgctttgccttgaaaccctgggacgccattgtgcgcgctccctgcaatgtggggtggtcctccggtgacttggaactgccccggctgggtggtgtcctgggccgtcctttccccgcttcttcccacctctggctggtccctgtttcctcctgcgcccagtgctggacctgtctcggctgccctgctgccctctcacctgccccacgcagtgatcccggcctggtcacctgggcagtgtgatgcttccctgactgccggctgggggacagccgaggcaacacacagggcttgaggccgcgccggaggccacacggcctggctgagttgctccatggtctcccagactctccacagtgcgacccaggaagggtaggcaatttacccagtgaggcacggtaccccaccccagagggggatggggcaacagccgacggcccaggaattggggacgagaagaccaaggaaaagcagagtgaaaatgggccttgaagcctcaccctgagcagttgggcgtggctgagcgcattgaaacagggtttggaaaatgcaatgttgttgcccagtcttgacttggcaaggaagcacaacggagagtatgcccacacctttgaatgatgttgcaacgcttggaatggccctttgagggatactcccccctaaaaggccagggaacattcaaagggcttgagtggggaatgaaacccgtattggcaagggagttgacatccagaaattagcagacaaacgaacggtcaacacaattcttgagtacttcacaacaagttcgggcggacacgcccgtgtggaatttaatatggaacacaagaggtgagagccaagatcatcgacctaccaaaaggcggtaacccatcggtggaaagaagagaagctatgtgagacactaaaagtgggtaggatatcacccccagaaccgaggaaacgcagtgagacagagagcacgaaatgggggggagtagaagtatcggaggttgaataacagcgacatagtaggcacaagatcgagagaaacccaagggagagaacgacaccgttgtgaa

SEQ ID NO: 483222 - DNA, 423 bp, Homo sapiens
atctgcccgccttggctcccaaaatgctgggattacaggtgtgagccaccgcgcctagccctctacttcagtttttaaatttatgtcttctaaattttagcaatgttacatcaagtttagcctaaagctgcctccttacatactttaagttcagcctccaggtttctctgtacatggtgaactataacctaaagggagttagactctagcctactcttgagccagttactgagttgtggtcaaaggtggacaactgttcaaactgtgttaaaataaggcagatgccaagctgtaaccaattcggctatttctgtacctcactttcgttttctgtatgtcactttcctttttcagtccataaatcttcctgcacgtggctgtgctaggagtctctgggcctactctggctcagaaggctgccga

SEQ ID NO: 483223 - DNA, 150 bp, Homo sapiens
ctcgtggaaggcccgggaccccgggaattgggtgtcgggcgtgacaacggcctaaggctccctgttctcttcctaaggtaaacattgggctttaaaaaccccagccgttggaaattcccttaacgggaccccccgttaattccccaacgg

SEQ ID NO: 483224 - DNA, 635 bp, Homo sapiens
  misc_feature (332)..(333): n is a, c, g, or t
ttgttgatccagcagctgtgcagatgtcgtgttcgtggttctctggtgtatatggatagggtcttctggccccccatagatataagggactggcctgcggttctccactgattgggtatgtagttgatctcattgactggaggtgcaagggcggacagaagcatgtggcgcagacccggtgggctgacctgaagagtgccctagtcttcattactttcacttatgggttttcaccagtgctgaagacccttacagagtctgtcagcactgacaccatctatgccatgtcagtcttcatgctgttaggccatctcatcttttttgactatggnntgccaatgctttgcccaaattggtgggtaaatttccccaaggaacaaaacaacctttaaattcccctttttgggaaaaaaccaaatttttgggggggcacccccaaaaaaaaaatattatatcacgagagaagaattatataatagtaggtaatataagaatagtggggggggggaggagaaacaccacagagaagaagtagaatataaaaaagataataattaaaagaaaaaaaaaagagataagtaattatagagagagaggagaggagatattataaaaaagaagtatatagtaaagat

SEQ ID NO: 483225 - DNA, 1052 bp, Homo sapiens
  misc_feature (849)..(849): n is a, c, g, or t
tccccggaacgggtgcgcccgcggggaagaggacccccccccccccccctgggggaccccacgcccccgccacccttgccgggtgaaagaagggatgaaaagtggggaaattcttgcgtttaaatccctcctgcctgcctttggccccatgcaatgggactgattccctgggtttccggccacagccttgtcctgatccaaaccctaaatccagggcgtaacccccggctatctgttgcccagtggtcaatcataccgccaatagggtgtcttcctgcttcctggtgggcttttttgggctgcttccggggcccgcaaggagaactattgtctgtgaagatccacctttgcccatactttccgtctcttgatacatagtttggtggaggtggccccccagacccaatgctggctaattttgtttaagaagaataaaggtgaattttcacagaagtttataatataaccaactttcccggcacccacagaatggaagaatttatccccgaaaacacacccaccacctgcttccaatcctctgacgcacaggattccacaggcacgattttataagtggctctgttgggggctcggctcaaactaacaccacagaatttgggaagagaaataccctcttccacatgttcgagaagagaccccgaggttcccccgaactctcctctgctcgccacttgaataggttaactgtgtggcctgttgggagattaaatttcacacacgacagaaaggcggaatccacataaaggaagggcctgttgttgtgaagaaagaattgtggggctgtgctgaaggagaaaaatgttgctggtggtaagctgcaccgcacgnccctctggaattgctctttgtccaaggttttgggaaattgttctttgcctcgctgccttcgtgaaagaagtaatcacagaaagtggctaacgaaggtgaatttaaggggttctggttctcctcaagcctcctcaatctgggggagatggaatagatatcctcccggtttttccaattaaacggactacttttttcagacccga

SEQ ID NO: 483226 - DNA, 742 bp, Homo sapiens
  misc_feature (505)..(505): n is a, c, g, or t
ccgtgagggtggtcgcgtctttccgcccctcgttcgatgttgttccccgccgtatgcgcggccgctttggggtgtggtttaggcccccccacccggcggggcccgccctaattttgtcgggtcgctatcggtcggcgtgtgcccgccccccttaagggcgggaagaatttaacgccgcgtggctttgccgctggcgcagcaccccccttgctcaacgattcccgcgtgtctcttacgtcatcgcactgggtagtagaagtaagtgtgctcctcgagtttgattggcacgcgcgcgcgctcttcgggtcgtcctgcaaggttgtagtcagtctccctgcgctctccttggccccgctcgacttatgggttcctccccgccgcctgttcactcgctgcaggtacgcactgcgtgttccccccacccttctagttcgcgcgcgctcgccccccgtcctctctcccctcttggggcgccctgtctgcctcctcctttacccgcgtgcgnctttgttcgcccccctaatgtggcgcctcatcctctcttaatgattcctccccatgatccacatatctcgctcttgtctactctccccgccctcatttatgccgcctcccttctcaccccgctctctataaacacctctctctcatgtttaactcaccctcgcgctctggaattgattcctcccactctcatctcctccctctgctctctccccccaacaaataaccaaaaacaaca

SEQ ID NO: 483227 - DNA, 148 bp, Homo sapiens
cagtttgaagcatcccaaaccagccatgtacaaccagctgtgctataagaaagagggagggcctgaccataactacaccaaggagaagatcaatgatcgtagatgggaatctgcctcctgtctggggatgatgctgagtgggatgacc

SEQ ID NO: 483228 - DNA, 747 bp, Homo sapiens
tgcggtagctcatgcctgtaatcccagcacttgggaggctgaggcaggaggatcacgaggtcaagagatcgagaccatccaggccaacctggagaaaccctgtctctactaaaaatacaaaaattagctgggcgtcgtggtgggcgcctgtagtcccagctacttgggacgctgaggcaggagaattgcttgaacccgggaggcagaggttgcagtgagccgagatcatgcccccgcactccagcctggcaacagagcgagactgcgtctcaaaaaaaaaaaaaaggtaaaccaaaggggtaaaaaatgaggaggaaggagggcagaaatattggcaagggagaagggatacagggcaaaatacaggatgggcaatcaacaggtggtacaggcacaatcatattggcaggttcaaaaatgggcaattacatattaacttagaaccaacaggaaaaagagatgagttatgcctgccggtgtgaaccatgtggtgactttgtgtcacaagcccaagagaataggtcaaacggggggaattgggaaaacttttgttaaacgcaaggcaattcatggggagggttattagaaggatgtgccggacattagggggatgtggagatgtggaattcccaaaagtatatgggaatagcatacgatttataaaaatatattgggatattggatttatatacactttataaaccttttaaatggcaccaaaaaagggttagggggtatataaattag

SEQ ID NO: 483229 - DNA, 1638 bp, Homo sapiens
taaaacatatcccttcattgccataatggctgccattttgccatagcatttccatataactgaaaaactgaacttgctcaccttctatcctttagctatcactgatgactctggaacacaaccctgctgcaacgcttgcttaacggcacctcctcactcttgcccgtcctctttctctaagctgaactacaggcacacgctattagcttgttccttaacttctctctcttcccccagctaaacactactggcactcctctctctaacgcaaccgaactcttgcacgcacagccaaaaccacactctaacactgctccactgctccaacggcgcgggctaccccagcactctcccactctccgctttctccaacctaacttgccccaccaaactaacccgcaagcgggcactctaactcgccttgccccaccagcgcgccgcgggccacacctcctcttctactctcctgctcccttaaccctctccccctaaccccccccgtattccccccttgccttcccctagcccccgttccttttctacacccctccaagcctctacagcgcctttggcttcccctcgcgccccgccgcgcaccccctgcgccaccccccacgcacacccccccacagacgccacaacacccccctgcaagcctgcgccaccaccggccccccactccccccctgcggccaccctcgcccacgcacaaccacacccactccccccacacacgcgcccccaaccaacctctcccccccaccccacacacttcactccccctcccacaaccctcaacgccccaatatccccgtctctcccccaacctctggcaactctctcgcacacgcgccgccgccaaccaccttctcacaccctcaacttctcactcatcactcccttccctcctgctacaactttccccaaacacacccgtgcggcacctacattctacgacccacaaccgtttttcacccccccccgtttctaactcttaacagcttttctaacacccaacccttctccctggccctgccactgcctgccgcctctcaagccttcccaccacctctacaaaccacccgcccacctctgccgcggaacccttccggtccaacacaccgcccactctcaaccaccaaccaaccgcctccccaccgcccacaacagcctacgggcccccaacacaacacgtcccctctgggggccccctataaaccgacgccccacacaaacctctgtccctggccatccccccacccacgggcgactaatcccctgtggcagacccctcgcgccgccccgccctcaacacccccccaacaccccccccacacggcacagcgtccccaccccacacccccgtccaccccctgcccgccccaccaccgctgccaacccccacccccgcacggcgcccccgccgcccccccccccgcccccccacccccctgcccccacccccccccccccccacccccccccccgcccccccccgcctcccgcgccaccccccaccccccccccccccccccaccccaccccccacccccccccccccccccccgccccccccccccccccaccccccacaccgccccccccccccccccccccccccccccccccacccccccc

SEQ ID NO: 483230 - DNA, 206 bp, Homo sapiens
gttttggtcccgtttcccccccatggggaggaacagttggcattgagtagcagctgcccccatagtttggggcccacattcttttgtcccacctccctgccattgctttttgcctttccccagattgtttcagccgttaacctaacctggcccctgtgggcatttgagtttgcgacccctgtgttaaaccaataaacatgcaaata

SEQ ID NO: 483231 - DNA, 434 bp, Homo sapiens
catgtatattaactcaacaaatatagacttattagcctcctcttaacaatacaagccttctaatacttaattaccctctcacaatagtatatgttaaattattgaacaatagtagaatttagatattgttgccattattttggatagtgtttagatttacagcaaacatgcaaacaattttctttgttcaccattacttctcgcattttggatcttccttctggaagatggtaattttctcttaacattttgaagatacgctgcagtatcatttggcttctattgttactattgaaaggtcagctgtcagccaaattatcttttctttgaagattagtgtcttttcttttcttttttttttttttttttgagatggagtcttgctctgttgcctaggctggagtgcagtggcgcaatctcagctcactgcaacc

SEQ ID NO: 483232 - DNA, 125 bp, Homo sapiens
  misc_feature (58)..(58): n is a, c, g, or t
  misc_feature (106)..(106): n is a, c, g, or t
cgggcgggctgaagcgccagcagagtggtttatctcagcagggccacccaggacaggngtctgtgtggaggggcaggctgaagcgccagcagagtggtttagctcnagcaggccaccaggactga

SEQ ID NO: 483233 - DNA, 120 bp, Homo sapiens
cacggtggatgatcagcaagaaatgttatgaaatggcctcccaccttcggcgttcctgtactgacctcgtcttgtcccttccccttcaccgctccccacatgctttgcagccctttcctc

SEQ ID NO: 483234 - DNA, 284 bp, Homo sapiens
gaaatcaatccactcataccactcgaacattgacttaccccagtatccctcgattcctggacggcgatctgatcctgaagccccttcaagccccctcaccgtggacaccaccaatcccacctgtcacacccccctggcacctggactccaccctctccccctccctcgctccacggagagggggagaagcctcggcaataaagaggcccatcccatggggaccacgccgtccacatcccgaccgatatcggacctgcgaccctcactggacccaaacccacatc

SEQ ID NO: 483235 - DNA, 312 bp, Homo sapiens
gatctaaatacaatacaataacaataacaccgacatcaatattaaccatgtctatttgaaaacatattctttaaattgactgggacttcattatctcatttacataactatataataatatgtaacataaatttcattttactttgattcttacagatctgttgtaagtcagtttcatacgactttcagttcatcagtcttcttgtgtctgtagtaataacctggccttcccagttctgaggggctttctaatacagagctccactgttttttatgacagtaccacagtatcttcctccttaagcggatcag

SEQ ID NO: 483236 - DNA, 212 bp, Homo sapiens
aggaataaggataacgatacctagagacggtgtttttaaagaaaggacctaaaacatagtatgtgttgaataaaaggtagccttctggctgggtgcagaggctcacgcctgtaatcccagcactttgggaggccgaggcaggcggatcacgaggtcaggagatcgagaccatcctggctaacacggtgaaaccccgtctctactaaaaatac

SEQ ID NO: 483237 - DNA, 107 bp, Homo sapiens
  misc_feature (47)..(47): n is a, c, g, or t
  misc_feature (71)..(71): n is a, c, g, or t
  misc_feature (80)..(80): n is a, c, g, or t
gagagagcgagaactactctcaagtttttatgtttcttttttttttnaacttcagctttaaaacacttggnttcattttnattgtgtagtaaccatttaaaaattct

SEQ ID NO: 483238 - DNA, 737 bp, Homo sapiens
cttatgaagtctttccgtataacatcttagtttcgctattagtgataatcccagcattgctcagtcatgctcagccccttgtcctgacataggtctccgtttttactttcaagtattgcataataatctctcagtcatgtagcttctgcttcgctccctattactacttatctcaggatgctaattactgttgatgtaccttaatggatttcttataccgtatctgcgcggatgaagctgtgagtatactgatagaccgaagagaagaaggtgaatgagactgcgtgtcatgctctacttagtgtgggagagtgcctgagcaacatccttaagtattttctgctgatacgcgtacttgatctgtatccaagactatgatggttgaggttgtatgtgcccgactcttgtgttcggtaggctctaagcacaatgggggtgggcaacgtagacatgcaagagctgaagccctgcttgaaaagacccttcaaggaagtaaaatggcaggggcagagtgcagcttaacatgttgctatccctgttggttttagagttggtttttggaatggattcaagttcttacacaatttatttgtgaatacaagcataatctaggtgatttgagttaatgaacttcttttcatgatgtagggaaagttgaatgtatatatttctaagaagaatttgtttagcagattacaaagttgggcaaaaatagactgttcaccagaaactaggca

SEQ ID NO: 483239 - DNA, 360 bp, Homo sapiens
tgagacagggtcttgctctgtcacccaggctggagtgcagtggtgtaatcttggctcactgcaacctccacctcccagggtcaagcgatcttcccactacagcctcctgagcagctgggactacagacacatgttaccacacctgggctaatttttgtattttttgtagagacaagatttcaccatgttgcccaggctggtctcaaactcctgggtctcaagagatctgcctgccttggcctcccaaagtgctgggattacaggcatgtgccaccgtgcccagctagtttctattagtttttgaaaattctgtgtatttttgtgggtttcccagtctgttattttggcatatgtatgttt

SEQ ID NO: 483240 - DNA, 155 bp, Homo sapiens
tagtcaacagggtgaatgatggttgggacgagagttgcctgtcttcagccagtgcctgtctcatatgtgggcgggacctctgagacagcctggcagcgagggtatgtactacacacactgcttggcctgcaccacgggctacgggacgaggaccg

SEQ ID NO: 483241 - DNA, 308 bp, Homo sapiens
gcagcgcagcaccatcaatggtgttaggttcattgaggtgagatggcaccagtgcattccagcctggcgacatagcaagactccatctcaaaaaaaaaatggtgctataataggataactccattgggccaagtagcaggtgtcccaaaaatatgatttaactttcatttggcagtgtctagaacagagaacgatgtaagtgtgagtggcatgtccagtgtccagcgtcagtcatggcccggccctgaaatacagctgctgccagccaggactctaaccaagtgggcagagttgggcaaggcagcttt

SEQ ID NO: 483242 - DNA, 131 bp, Homo sapiens
acagaacacttggctttgcaaagtggcacgcctggagagaacttggaagctccacgccccttctatacctcaccctatgcatctcttcagttgtatcttttgtgatatcctttataataaaccagtaaacg

SEQ ID NO: 483243 - DNA, 1250 bp, Homo sapiens
gcatgacatttctttgtgctatggcttacttgttaaagagaagaaaaaaaaactaatccaacctgttagattttgcaggtgaagtcagcagcttaaaaatgtcttacccagatttcaatggatttttattccccctacctcccaaaatctggagactggtgtaaaacatttgttcttctatgaacactggcctcagacctgcttacgacatgccataggagtgtgttgtgcacatctctctcatcttccagcaggaggagcccgtgagcacgcacagttgcccgtgtctgggtcacccgaaggcaccgggctcaccttggacctcccaggcaaagggagaaaagcctcagaaactgcatcatgggattcagaaaggaactattctctaagaagtccagacattttaccatttccacaattctcctatatccagaattgagttcggaccaagtgtatagttgggacagaactaagaattctaatctctgacagcgaaacccttactagggccttctaaaacatacagagtatcctatgtgtggcttcaaatattggaacattcatgtaacaagatcaagctataaccttcagctagctactctagaacagctaacggtgccgcacttcgcggcctactttcaatgattccagcaatcctcatctaaataggtgtagcatgttgctttgcacaactattttataacccaaggcaattccacggaactttagttgactaccaaggttctctactccgcccaatgtgtgccgtgaaggtcttcaaggcgggatcctgtttgcctctaaccttcttccctcctgataaactcatagaagtagcaaccatctctgtgatctcacatcgcattgtgctataccactaagcatgctgcgactataattcgatcatagttgcctgtcttgaccatctaatttatatataaacccgcacatattacatccttaaccttctatcatcgacactcgacaagaacgagcggcgaccacgcaacaacggcgaccaacccagcccgcggccgcccaaagccacccaagcagaaagcgctaaccgatcccaagcaacacctgcttgctaaccaaccgcgccccacggcgccgacacatcgcacgcctcggagcacgcacacgactaccgcccgaccccataccaccctgccgcggccttaccccaaacctcctttgaacaactcacaagacacccccctcgctcgtactaactcctcccgactcac

SEQ ID NO: 483244 - DNA, 108 bp, Homo sapiens
tgtgctcccaaaactctctcccatggatcagactcttggaggggattcacactccttgaagtaggcctggagattaacaatcatcttgacaaatcttgtcgacgcggc

SEQ ID NO: 483245 - DNA, 307 bp, Homo sapiens
  misc_feature (209)..(209): n is a, c, g, or t
gggcgtggtctcagctcattgccaacctcgcctcctaggttgaagcaattctcctgcctcagcctcctgagtagccaggactacaggcacgtgcaccacacccagtgtaatttttgtatttttagtggagacggggtttcaccatgttggtcaggctggtcttgaactcctgacctcaggtgatccacctgcgtcaacctccgtaaatnctgggattacaggcatgagccactgttcctggccagttttccagaattctaagttttgcttaaaagctgaaattttatcattgcaacacggtctctca

SEQ ID NO: 483246 - DNA, 253 bp, Homo sapiens
actccgaggtccttttagtctcagagcgatgggaagatcctggcagaagcagatagactgagcacaaaacactggctgatcgggacagacaagtgtgtggagaggatcaatgagatagtgaacagggcccaacggaaagcaggagtggatcctctggtaccgattcgaaactatgggcctatctcataaaacggaggggaccaggaggacacgaaggaggatcctgatcgaggagctataaggggaccgattt

SEQ ID NO: 483247 - DNA, 303 bp, Homo sapiens
agatcgatcgagccggtaccgctcacacatgcacaggtgggagtctttagtatatagttgtaaatagtgtctggttatgtaaaaatgaaattttttagacacagtaattgaacgtgtattcctggtttgtatatttaataaatttcgtgttttcattccttaaaaccaaaaaaaaaaaaaaaaaaaaaaaaaaaaaaaaaaaacaacacaaaaaccaacaacacaccaaaacacaaaacacacaacaccctcccacacaccaacctttcaaaaagagcgagcgacgcggggggatgagtctca

SEQ ID NO: 483248 - DNA, 234 bp, Homo sapiens
gagtcggtaccgtgataggttcaactgaagcccaaacctcaggactgtgcaatatccatgtaacaaacctgcacatggaccctctgaatctaaaattcaaaaaaaaaaaaaattttaaaaattcacctttaaaacaaacaagaaacctaaaacgggcaatgaacttttattgcatggtaagggaatgggaaagaacggggggcgtaaaggatggatgttttctcctagtgccgg

SEQ ID NO: 483249 - DNA, 440 bp, Homo sapiens
aattccagttggccacaagcagctcccaagtcaatttctctggttcactgtccattagttgacccagctagaaccccacccctggctcctgacgcctctcctgctggactcttcagcatgttggatgaaggccattagtgctgaactcaccatactcttccaagatttgcctgctcctccccatcaccccagagcaagccttggctcctctcccttcctaaaaaatccccaccatgttgtccgttctcctgggtcctaatatccccaaaaaaaaaacacactatccaattgtattccaaaacaaaaaaacattccaccattaaatttgctcttattaagtctattatcctgattcatcctctttggtattaaagtcaataaatcgtataaatcttgaaactttttaactcagaaaaataaattctgtaaaaacaatcaaa

SEQ ID NO: 483250 - DNA, 421 bp, Homo sapiens
ggttgagctgtgcttgactccagcctgggtgacagagtgagaacccgtctcaaaaaaaaaaaagactgagttgattattagtccaagcaggtgaattaagtcacctctatgtcccatgttggctgccacttggaatccccaggtcctcagcaggccaggaacggtgtgtcaccggagtgcccctgagctctgtgctgcaagggggccatcgaccacccttggtgccgttgctggaatcccttctcacgtctccctggagccagcactttattaagcgctccagcagcttccctggccactcctggttctggatataagtcgcgtttcccagggcagcgaaagtttctcccctgaaatccaagagttcctcggacaccagaggccccaacagttccatgtccttgcctggacagacgagtcc

SEQ ID NO: 483251 - DNA, 325 bp, Homo sapiens
gtactctagaggatctcctccacactagtccaaagaaaatttaaaaattagccgggcatggtgatgtgtgtctgtatccagcacttcaggaggccaaggtgggaggactgcttgagcttagaagttcaagacagcctgagcaacatagggagggcctgtctgtacaaaaaaccaaaaaattagctgggttgtggtgatacatgcctgtggtcccagctacttgagaggctgaggcggaaggatcacttgagcccgggaggtcgaggctgctgtgaaccatgatcatgccactgcactccagcctgggcagcagagcaagaccctc

SEQ ID NO: 483252 - DNA, 178 bp, Homo sapiens
actgactcagcatagcatggtctcagtcttcagcagaaccacctccaggaggaaccacttctctatgagtacctgagagcctctctggtactcctgagtcctcaacctatgtgctatctatgcctggtcaccatcagctactttcgatatatgacctagcgacccgggctagtgtggt

SEQ ID NO: 483253 - DNA, 718 bp, Homo sapiens
cattccttaagtcctaatgggaaaaaaaaaaaaaaaaaatgaattatttgaaaaacccgggggtgtaaacaattgattgtacccctacacactattcaataagtagtaaaaggagcttcacacaaattcagtctaatctgcccttcctgtggtgggccattaattattaaacattaaatgtgctgtgttactgataaaaagctcatttttcttcaaagaagacttacagcttagctgcacattgggtgttaaagcagcttctaaattggttagaactttggtgtttgaacctttgtaaatattatctaatttatggaaaaagttggatttaaaattatattattttaatcattagaaatcagggtttggggcggtgtattggactaattgggtcgactcaatgaaaaatgttgtccacacctttaattctaagggggggccaattatttgggacaactacaagaggggaaaacacaagatggccttcccatgtggcaaaattcttaaagctcctttccagggtcggggaaaattaccctgggttcataacaccttttggccctgcaattaacggttattcccacgctcaggaggaactctcatatcccttttggatcagacacagttccattatattccttgaactccaatattcttacagaatctctcacataacggtatcactcgcaattcgctatcactctacccataagacaag

SEQ ID NO: 483254 - DNA, 337 bp, Homo sapiens
cccccccccttttcccccccttttgggggggggggggggaaaaaaccccctggccccggggttttttttttccgggggggtttttttcccccccccccccccccccgggggccaggggggggcccccccccccaaaaattttttttttaaaaaaaattttcccccccccaaatttttttttggggggggggtttttttccgttaaatttgggtttttgaaaccgcaaaatttcttttttttttcgaattttttttttttttttaaaatggggtccctctttttttatacgtccccccccgtggggggtttttggaaaaaaaatttgtttgcttttta

SEQ ID NO: 483255 - DNA, 319 bp, Homo sapiens
cgtcgacgtcggcatcagcaccagggcgtcgccaccattggccacgcgctcaataatggcaccctggcgaccacggaagctgttgaaaccgaagaatgtctttgaggacgcgttgagcctgttcgagcataaccactccaaaaatcatcgaaacgcttgttcaaaggctggctgaagattcaccgttttcacgaaaaaaaccgtaagcaggcatttcccagcggccccgagggtcagcagcgcatcacaaaacgcggcagtatacccgagcgtccgacggcaatgggcggtgccggtcggttaagggaattcagtcgac

SEQ ID NO: 483256 - DNA, 359 bp, Homo sapiens
  misc_feature (10)..(10): n is a, c, g, or t
  misc_feature (57)..(57): n is a, c, g, or t
  misc_feature (133)..(133): n is a, c, g, or t
  misc_feature (140)..(140): n is a, c, g, or t
  misc_feature (144)..(144): n is a, c, g, or t
  misc_feature (187)..(187): n is a, c, g, or t
  misc_feature (267)..(267): n is a, c, g, or t
  misc_feature (271)..(271): n is a, c, g, or t
actcaccgcnaataaggattgttgacgatatctgccaccttaacccacccagcacgntggcacgcctgcttcatacagtttttgtggcacctgcactttttcatcgacgccatagcccatatgcacgacctgnaaaccgntgtnataaacgccagaacgcggcgcattgataccaataaagcgcccntctttgctttctgcggcatcgagaatgcgttgactgtcggttaacaggccaccaaatgtaatgacccgaccgacctgtancctntcacgcacgatacgaccaattttgattgcgtcgtcaaaagagatcacagagagattggcggtaatgttatagacctggcctaaatccg

SEQ ID NO: 483257 - DNA, 654 bp, Homo sapiens
  misc_feature (4)..(4): n is a, c, g, or t
  misc_feature (86)..(86): n is a, c, g, or t
  misc_feature (114)..(114): n is a, c, g, or t
  misc_feature (193)..(193): n is a, c, g, or t
  misc_feature (195)..(195): n is a, c, g, or t
  misc_feature (243)..(243): n is a, c, g, or t
  misc_feature (245)..(245): n is a, c, g, or t
  misc_feature (249)..(249): n is a, c, g, or t
  misc_feature (278)..(278): n is a, c, g, or t
  misc_feature (280)..(280): n is a, c, g, or t
  misc_feature (283)..(283): n is a, c, g, or t
  misc_feature (288)..(289): n is a, c, g, or t
  misc_feature (318)..(318): n is a, c, g, or t
  misc_feature (343)..(344): n is a, c, g, or t
  misc_feature (355)..(355): n is a, c, g, or t
  misc_feature (358)..(358): n is a, c, g, or t
  misc_feature (364)..(364): n is a, c, g, or t
  misc_feature (371)..(371): n is a, c, g, or t
  misc_feature (376)..(376): n is a, c, g, or t
  misc_feature (439)..(439): n is a, c, g, or t
  misc_feature (467)..(467): n is a, c, g, or t
  misc_feature (494)..(495): n is a, c, g, or t
  misc_feature (652)..(652): n is a, c, g, or t
gagnccccaagaatccttttggttttactggatgtcagggattacagtcagcaaaccccactcatttacagggtcaggtgatacanaggctgagctggagggttagggtcaggncccctcaggaaactctggtctggcacagcagcagcagggatgccactctccctttgtggaatccttcttaatacaagantnagaagcagaagagcaaaccacaaaggaatatccagctcaccccccaancncccncgcagacctgcaaacccccatggagatangncangccgnncgggaacacagtgactgactctgacacanagcaaagcacctctccaagcgaaannaaaaaaaaaanaanaataanttaatantttgnatcagcaagatgagcaggcaccaccatggaaagaacacctggagtgtagctggataaaaaaantcagcaacattccccagaaaaggaggtnagcactccatggcccaggaaaacatgnnggatgaagggttggaacctgcagtgaccagatggagatacaatgcaggcagctgctaccatgcttggtgaccagggtacaagcccctgatgagcttgccatggcagccaaggacactggtgccggaggaacgacaggggcctgcaaagggacatccntt

SEQ ID NO: 483258 - DNA, 241 bp, Homo sapiens
tgcggtgatctagaggacccggctcattcagttcatggtatattgcaggtgaaaaaagcagatcgtattctaagaaacagacacaacacatggtgaatatctagtttttcttctagtagtcagtttcttgaaccagtgatttctgatacatggcctaagcctgtgacatcatcagttcaagcaatggggtcttctagtgtgaaagccacacactaggtgggaaacaggcacctggaacgaa

SEQ ID NO: 483259 - DNA, 444 bp, Homo sapiens
  misc_feature (372)..(372): n is a, c, g, or t
  misc_feature (374)..(375): n is a, c, g, or t
  misc_feature (380)..(380): n is a, c, g, or t
acctgtctcctggtgagtgagtgaattgagatcaggtatggagggacttggctcctggtgagtgagttaattgagactctgtgtggagggacctggctcctggtgagtgagttaattgagatgaggtatggagggacctggctcctggtgagtgagttaattgagatgaggtgtggagggacctggctcctggtgagtgagtgaattgagatgaggtatggagggacctggctcctggtgagtgagtgaattgagatcaggtatggagggacttggctcctggtgagtgagttaattgagatgaggtgtggagggacctggctcctggtgagtgagtgaattgagatcaggtatggagggacctggctcctngnngtganttaattgagatgatgtatggagggaccaggaggcggaggctgcagtgaaccatgatggagctgc

SEQ ID NO: 483260 - DNA, 268 bp, Homo sapiens
tattactttatgaacattatcacagtatacctgcaaattaacaccttttcactttgtgcttttgttatgtattttgcttctatatatgccataagcttctcaatgaaatgtgtttttttattttaaattgtcaattatcatttaagagagagagagagcgagtgtgtgtgtgtgtgtgtgtgtgtgtgcatgtgcatgtgattttaataaggccttcatatttacttgcatatgtatttacttgttctggtgttcttcattccttctc

SEQ ID NO: 483261 - DNA, 1159 bp, Homo sapiens
gatcaatagacccaccatgccccaggctcaacggctgtgctgatggaaggtggaagagcctgaagtcttgcagcgactcactggatggatgttgattctactccgtcaatgtactttgaactacctgactcattccgagctactacagaagtgtgttttactcattatgaggaacagcacatcgaggcttcgccctttacgtggacaataggttttcttactttgacggtgacgaggtctccacctgggtgttccagcatggaagtgcatattcccagcaataaggcaggcgcctgtagctaagccgagagatgtcagttcctgcatggcaggtacctataggcacgtgaagatttgaatgaaactacagttccactttggaagcccagacataggatgggtcagtgggcatggctctattcctattctcaaaccatgccagatggcgacctgttagtctacaggtctgaaggacaatggtaccgcacggttaggtgtgacacgttcacataactgtgcagtgacatgccgggagtgatcagtcgagacatgtgaatttgaaccaggtatctctgggtagctacaaaattcctcagggatggcagtttagcagacatgtctctgagcttctatacctgctcaaggtcattgtcatcttgtgtgtagagctcatccaaaggtgttacccatggttatcaatgaacctaagctcattcgtaacgggtctacagtgacggcatgtataagctgatccatctgtaacacaggagggatcctgggtgaggattgaattaagaaacaacaatggtgttgacaatagtagacccggatagagtaccttgggtaaaagaagcacaaggctgaggcctcaagtgggagctagacattagggaagacaacaggatgagtggacacaacgacaggggaaaggctaagaccgcaaccccacaatcaaccgggtgagaaaaagagacacgaaaacaagtagagaaacacaagttaccagagacctgccggcgaaaatggacaaacgaggcgtgacaaagcagagaagacaaacagggaaaacagaaccagaaagagacacaaaaaaacacctaccgcaccacacaacgaagaagagcgataacaagctgatcaagaacacagcagagggagg

SEQ ID NO: 483262 - DNA, 821 bp, Homo sapiens
ccagggagtttaatagttggagggaaacacaaattgtggggtggttccagcagccacacataaatctaggagaaggccaccaacactgaggggggccacatatacacgcaggcggataaaaaatatatttttgtggcgtggagatacagatctgttctcagaccccctctgggagaaaatatctttgcgggggttgttctctgctccaaacaaatagtgggggcgcccaaccacccgcgaatgaccacagagagaggaggtggagtagtgttctctccacacatggtgtgccccccagcggcgaaaaaattttgtgtgctatattatagcaaggaactattgtatggagacaccgcacactgtggggtgttggaaagacacacgcatatatatagagatgtgtaaaatgtttctcccacagatgatagttttatgtacaaacagtttataaagtggggttctttttggggtgctccaccgcgcgcccttatagatagtgtggttgctttttggagaagggggagtaacacaagataataagtgtgtacgaaaacacagtgattctctgagagtgagctctcttgtggaataaaattccctcgggggataattttttagtcacgaaaagccgaagtatattccaaaatcacttttgacgccacggtagaagggtgcccccccctgccttttgtatgtcacaaacttggggggaaaacccattgttttggggggacaaaaaaggtttttggggtgttccccccaaacaaacgggggtttgtgaaaaattttttttaatttttgtgaaggggatttttttttta

SEQ ID NO: 483263 - DNA, 151 bp, Homo sapiens
acatcagcgtaaaacctaagtatactaagaaacacggtaaccaatacgaagcattacagatagtatagtagatatataaagtaaccgcaaatacagagtactggatataccagaaagtgaaactaaaagagacagataacaagtgctggaa

SEQ ID NO: 483264 - DNA, 947 bp, Homo sapiens
atgcctgtaatcccagcactttgtgaggccgaggcgggtggatcacgaggtcaggagttcaagaccagcctggccagcatggtgaaaccccatctctactaagactacaaaaaattagccgggtgtggcggcgggcgcctgtggtcccagctgctcgggaggctgaggcagagaattgcttgaacccgggaggcggaggttgcagtgagctaagatcgcaccactttactccagcctgagcgacagagcaagactctgtctcaaaaaaaaaaaaaaagagagagagagtgggcaagatattgggtaaacctaggcctttaacacctatagctttcagctctttccccgggttcttggctaaaattggggatgaatggtgacgggcctttgatgtccaaatattcatcctcctgggattggatttctacgggggcagtgggcttacacggaggtaagcatactctaaccgggtctcctaggaaccaactggtgggttgaactggtgggatgcagtccattaccggggaaaaagcaaatgggctctacttagagacaatgatccaagagatttcatctgatgtgccctgagttacccaacaataggcataagctcagggaagtacttgccaggttttctaggtgtctcatataaatatcacaagtttagtcggggccacgccggtatcccggcattggaaggcaggtggcaaaacacaagggcgagatcgaacatcgggtagaggtgaagccggtctataaatggaacatggcggtgggggcggctgggccagaactgggaggggacggaaggtgacccggggggcttgggccaaacgcctggtccggaggggatgtcaaaaaacaacacaacggggcatctcgcaagccacatgaaggcgtataacggggacaggagtgagagagggacacacaaatgtggataggcc

SEQ ID NO: 483265 - DNA, 295 bp, Homo sapiens
cccccccttttttttttttggtggggaaaaaaagggtgggggcccggcccccccttttttttttaaaagggggaaaatgggtagtccccttttttgaattcctaaattttctctgggaagggacctgggaaccctgttacccccttttcccttggggggggaggggcccttgtggccgggggggtggaatttagggggggaccaccttttccctttctagctttttaaaaagggggggttcctttttccttttgggttttcccccctttccaaaaaaaaaccttttaaaagctta

SEQ ID NO: 483266 - DNA, 965 bp, Homo sapiens
  misc_feature (321)..(321): n is a, c, g, or t
  misc_feature (325)..(325): n is a, c, g, or t
  misc_feature (333)..(333): n is a, c, g, or t
  misc_feature (356)..(356): n is a, c, g, or t
  misc_feature (377)..(377): n is a, c, g, or t
  misc_feature (385)..(385): n is a, c, g, or t
  misc_feature (398)..(398): n is a, c, g, or t
  misc_feature (403)..(403): n is a, c, g, or t
  misc_feature (409)..(409): n is a, c, g, or t
  misc_feature (812)..(812): n is a, c, g, or t
tgtgtgtatgccagacactgccccggccagggggatagatgtaacaccactaatacctcagctgctttgttttgttttgttttgagatggagccttgctctgtcgcccaggctggagtgcagaggcgcgatctcagctcactgcaacctccacctcctaggctcaagcaattctcctgcctcagcctcctgagtaactgggaatacaggcgcacacaccacgcccagctaatttttgtatttttagtagagacggagtttcaccatgttggccaggctcgtctcaaactcctgacctcatgcctgtaattccagcactttnggangccgaggngggaggatcgcttgagctcagangttcgagaccagcctgggcancatggagngatcccgtctctnccaanaatacnaaaactagctgggcatggtggtgcatgcttgtgatcctagctacttgggaggctgaggtgagaggatcacttgagcctggagggcggaggttgcattgagccaagattgccccactgcactccagagtcaggcttcagtcatgacttgatcacttaatagccatgtgaccctaggcaaaataataacttcacctttctgtgaccctttcctcccctataaaatgggattacagataccaggctgtgatgccattaactatgtctggcccatggtaagcagctaataagtgttagttattattgggaggccgaggcaggcggatcacctgaggtcaggagttcgagagcagcctggctggccatcgtagcgaaaccccatctctgctaaaaataacaaaaattngctgggcatggtggtgggcgcctgtaggcccagctacttgggaggctgagtcaggggaattgcttcagcctgggaggcagaagttgcaagtcacagtgagccgagatcgtaccactgcactccagcctgggtgacagagcaagattctgtctg

SEQ ID NO: 483267 - DNA, 729 bp, Homo sapiens
  misc_feature (85)..(85): n is a, c, g, or t
  misc_feature (89)..(89): n is a, c, g, or t
  misc_feature (97)..(97): n is a, c, g, or t
  misc_feature (120)..(120): n is a, c, g, or t
  misc_feature (141)..(141): n is a, c, g, or t
  misc_feature (149)..(149): n is a, c, g, or t
  misc_feature (162)..(162): n is a, c, g, or t
  misc_feature (167)..(167): n is a, c, g, or t
  misc_feature (173)..(173): n is a, c, g, or t
  misc_feature (576)..(576): n is a, c, g, or t
ttgtcggtatgagactcttcccaggacagagaaaacacaaatgaggctgggcgccgtggctcatgcctgtaattccagcactttnggangccgaggngggaggatcgcttgagctcagangttcgagaccagcctgggcancatggagngatcccgtctctnccaanaatacnaaaactagctgggcatggtggtgcatgcttgtgatcctagctacttgggaggctgaggtgagaggatcacttgagcctggagggcggaggttgcattgagccaagattgccccactgcactccagagtcaggcttcagtcatgacttgatcacttaatagccatgtgaccctaggcaaaataataacttcacctttctgtgaccctttcctcccctataaaatgggattacagataccaggctgtgatgccattaactatgtctggcccatggtaagcagctaataagtgttagttattattgggaggccgaggcaggcggatcacctgaggtcaggagttcgagagcagcctggctggccatcgtagcgaaaccccatctctgctaaaaataacaaaaattngctgggcatggtggtgggcgcctgtaggcccagctacttgggaggctgagtcaggggaattgcttcagcctgggaggcagaagttgcaagtcacagtgagccgagatcgtaccactgcactccagcctgggtgacagagcaagattctgtctg

SEQ ID NO: 483268 - DNA, 661 bp, Homo sapiens
gagttgtctttgtctttctttggaaatggagtttggctcttcttgcccaggctggagtgcagagggcgcgatctgggctcactgcaacctctgcctcccgggttataagtgattctcctgcctcagcctcccgagttattggggattacaggcgccgtgccaccatgcccggctaatttggcatttttagtagaaagggggtttctccagtgtgggctcaggtgggtctctaactccgtgacctcaggtgatccatccgcctcagcctcccaaagtttcgtgggaattacaggcgtgtgagccaccacgacctgtggccataggtggctctttctcttatgtggggaattttaactcggtcattgtggtccctaaggaacctcagaaaatatacgtggtggagtgctttacaaaaggggtgtggtggtgtgtggtgttgtgtggtgtgtgattcagatataactccaagaaaatttccctcccgaggcaaattaaaaaacccccgaggagagaggaggtggggcacaacaaacctctttatatctgcatagcgggccagaacagaaactttccgaatgaaaaaacgaccacattgaaaccctcgcagaacacctcgaagtggtgcctccacccagcgcggcccaataagcagtgggtaaaa

SEQ ID NO: 483269 - DNA, 402 bp, Homo sapiens
gaaaaaaaagtcccccctttttctcaggacagtaagttttgtgggcattttcgcgggagggcagggcttccccccaattttgcaggtgttccgggcccttatgaagggcccttatgacccccttgtgggccccctgttttttgccaaccagaccgagaagggctttctgttgggccctgagttgggggaactcaggaacaaactttttgcccgcttcaagttttgggacccgctgggcaaagccccttaagcctggggtttcggccaggggtttgtgaatggggggatgatccggggcccccttccccccccaaagggggagccgctggtgtttatgtggggccccccccccatgatccagtgcgccccccttcccccgtaaatgattttttttccctttta

SEQ ID NO: 483270 - DNA, 179 bp, Homo sapiens
atggaagacatgtaataagaattggatactcacaggaggttggaggaacagcacatcctttgtgaagcatttgtgagctgaagcagcgggaatgaaatatgtatatgtgaccttctcagagttgtatgctatctacactggcgtcgtgctaatagatatttagatgttacttgtaaaag

SEQ ID NO: 483271 - DNA, 677 bp, Homo sapiens
caaatgcccggagcaagctcctcggatccctcccaaaaatggccctgatcatccccaaaccctcggcaggcccatcacccgggccaatcccgcggaacccccgcggccccccggaggacacggcaacactgggaaaacggataccggaaggggccccccccagcccccaatcccccacgaagggtcccacacgagtgatggcgaaacgagacggtcttttgccccgccgggtctccagacaagaatcccccggcatctcagagcagagccactgcgtgccccacaacggtgctcccccgcctgcgacaccattaagcccaagaggcgaaaatatcggctccaaccacacaccgcggttctctcatgggacacacatccccccccagagcgcgaagccagcaccaagcgccccccgaagaacctccctggtgggcaccacggactagaggccccccacggttctaaacgcaccaggggaaccccccagcgctcctgaagagcggcctccccggcccccacgaaggaggagatgctactcagaagtgtttaatccccgagggcggaggaggaccccgcacattcgacccccccccgtggtcgtgcataatctggcgcctgtggatacacagggaccgcccccctcaaaagcagaccagccctgattcgcccaacatgac

SEQ ID NO: 483272 - DNA, 933 bp, Homo sapiens
gcccgctcctccgcggctcatggcgaccgactctcgcgcacatcgggaccctccggccgtggccggcgaggcgccggtgctcgggccccagccccggacgtgtggtgactccgccgcgcctcgccgtctgcccgtgcggggggaaaaagaaattttagctctcgtgcagggccctgcaggcgaccgagtgctccgtatcaaagtcatggagaaaaagacaaatgatacaccctgctgtcaccacacaagcctgctgcacacaagggattgacctcagaaatgcgctgatacattatcgctgacggacgactggcagcccgagcactccagggaacgaagcaaaaacgacacatacttagcgtcgcatctccagaagccttgaagagaaactcagcatcattcgccgaccactacgccgaccaccagcccgcacccacacaccacacaacaggcaccacgagccgccacgacaagagcgccccaccgccaccagacggaggcaccacacgagacagacgcaagagcaccgacccccagcgcgagcgagcccacggcgcgaccgaccaggccccccccaccccacacccccgcaccactcgaagacacagcagcacaccgacaccagcagccacacgcacgacgccagcgcaggccaccagccgacagcgcgacaacaccgcacagacggccgacacagcacacgcgagggaacagggcagggaacaccgaccagaaccaggcaaccacgccgccggcgcgggaagcgagcgtgacaaaagtacgagagcagcgcgagagcggtagagcgcaagctcgggaggcagagcgagggccgcggcagcgcacgcccacgagacaccccagcgcagacgccagacagcgcgcaggagcccgagggcgcagcgcgcgcccgcgagcccgagcgagcacgcg

SEQ ID NO: 483273 - DNA, 182 bp, Homo sapiens
gagaggacgaggaggggtgagatcagttacatttctagtacgtcaactgaatgtatttttgtaactccttattttggtatatggttttttttctgagacggagtctcactcgtgtcatccaggctggagtgcagtggcacaatctcagctcactgcaacctctgcctcctgggtgcctctgg

SEQ ID NO: 483274 - DNA, 446 bp, Homo sapiens
  misc_feature (3)..(3): n is a, c, g, or t
  misc_feature (10)..(10): n is a, c, g, or t
agnggaacgnacatcctgactctgacttctttggacaggagggtttttacccagattggattccccaatgcagcagggagcgcattttctcagaaagaaacagctcttatcactgtgactggcagctcatttttggtatgaaccaactctattcattcctcatcatgtggcttacttttattacagtcaattttgaggatattctggactaaatatttaagtgcagtcatttctttttggtttgcaaaaagagcacagccctggactacaagtttggagatttaaattctgaccttgagtttggaactgacaagttgtgtgaccctgagcaagtcagttaacctatctgagccttaatttccttatttataaattgaggtgtgtcgaatagattgcttttaagggctttctgctctgtgattccttgataatacatttctttcctt

SEQ ID NO: 483275 - DNA, 168 bp, Homo sapiens
gcctagaggatgttcaccttatgcgtgggggcgggtgggcagtgagcttgaaagcccactgtggagtggggagcaggagaggaaggggtactggttagtctcctaggggctgagcggagtattgttgccctgcttatatcccctaaatggtggacgggtagaagcgga

SEQ ID NO: 483276 - DNA, 852 bp, Homo sapiens
  misc_feature (468)..(468): n is a, c, g, or t
  misc_feature (470)..(470): n is a, c, g, or t
  misc_feature (472)..(472): n is a, c, g, or t
ggtaagtagttagtatgttacagtagtctatagaattatgtacaccttagaggacactagtaaatagaatattagaaagggaaactgtgtcctattaatcttcaaatttgagcatttagttttatgaaagcacaggctatttgattaggttgcatgtttattacatgtttcgtcctactgctttattatctaacaggtacagaagcattagggagagttcaggaatggtagtagttgaattagggctaactggaattcttattttaacaagatgctcacaactacagtgtgtgtggttcctttgtagctttttattctggagggtggctcttacttccctcatttagctgtgctctcttttcacaggggatgcccgggtagttaaagacatggcaactggaaaatccaaaggctatggttttgtatctttttataacaaactggatgcagaaaatgcgattgtgcaangngnggtcagtgggttgggtggtcgtcaagatccgtaatgcaattgtggccacgttcgtaagaccagctggcacctaaaagtacagcaagaaaacaacactaagcaggttgagattctgaacgatgtacgtaacaccagtcattagtccacaaagacattgtagctggtgtactgtcggacggaagttgcgtcgtgggttaacagagtcacgcttatgatgacatgacatttctcacgcagtttggatcaaagttcatggacataacgaagtttcccccagacacaagggcttattccatgttgtcagaattttcaagcccatgaaaagtgcaagcccatgcccattgttccggtgaaccggtactatacgatttgaaggactt

SEQ ID NO: 483277 - DNA, 520 bp, Homo sapiens
  misc_feature (136)..(136): n is a, c, g, or t
  misc_feature (138)..(138): n is a, c, g, or t
  misc_feature (140)..(140): n is a, c, g, or t
atcaaatcagcatttgccccctttggtaaaatatcggatgcccgggtagttaaagacatggcaactggaaaatccaaaggctatggttttgtatctttttataacaaactggatgcagaaaatgcgattgtgcaangngnggtcagtgggttgggtggtcgtcaagatccgtaatgcaattgtggccacgttcgtaagaccagctggcacctaaaagtacagcaagaaaacaacactaagcaggttgagattctgaacgatgtacgtaacaccagtcattagtccacaaagacattgtagctggtgtactgtcggacggaagttgcgtcgtgggttaacagagtcacgcttatgatgacatgacatttctcacgcagtttggatcaaagttcatggacataacgaagtttcccccagacacaagggcttattccatgttgtcagaattttcaagcccatgaaaagtgcaagcccatgcccattgttccggtgaaccggtactatacgatttgaaggactt

SEQ ID NO: 483278 - DNA, 171 bp, Homo sapiens
gggggcccgggggggggggggggggggggggcccccccccgttccgcttttcggggggggggggttttgggccatttttaggggggggaaaggggggggggggggttttttggggtttgggggggggggggggaaaaaatttcccttttttacgggggggggcccccttta

SEQ ID NO: 483279 - DNA, 715 bp, Homo sapiens
ggggggggaggcaggaagggagagagtggggtgagggtataacgcgtgaagccggtttaacagatgcatcaacctgtgtgcagtctatgagacatccatcttacatgcactgtaccgcctagtctcaaataaaagggatgagttgtaaagctattaggatcttgaaagctaggaaaaagcagctgttgtcatcttagtgcgagataaatcatactttaatccaaagcgtgcaattacacatgtgaggataatttcatgccgcatgggcccttgcgatttttcattgactgatttcatgatgaaacgtccattggggatcactcgatcaatttcccgtatatggggtagagatccaattgattgatatgaggttcagtgaaatttaactgtgaaaacccttgctttgccgaacttatgttcacatgatgatatgcaggcttccgatagatgctttacatgataaaaggcccaatccgtttgtagtttaaaccatgtgcacaatcggtttggccagtagaaaatgaaaggctctaactggccccaaaatttaggagccatttttacatcaaaagtgtagttttcaaccatatatccatttttgggaaatgctctaataatcaaaccaatatcctttgtaggggcctaatgtgactcattttgggacattaaccctctttgtaatatgccttcatttccggttcgacgtgtatcgtcc

SEQ ID NO: 483280 - DNA, 507 bp, Homo sapiens
gagcctgactgaactaactccacacaacacaggcgctgagatttgagataatctagtggatcacagttttcctaatcccatcacccctagagcaaggcaatgtacactcattactaacagtgagtcactaacgcagttgtgtttctctctctttttcttttttgagataaagttccactcttgttactcagggctgatgtgcactggcccgatcttgtctcaccacaacctctgcctcctggtttcactcgattctcctgcctcggcctcccaagtagccgggataacaggcatgcaccaccatgcctggctaattttttactttttgtaaagacagggtctcactgtgttactgtgttgcccaaactcgtcttaagctcctgaacccaagtaatcctcccacctcaaattccccaactactaagattacaggtgtgagccaccacacccagcctctgaaacagtttaaacaaccaagaaataacctttttttttaaaagggtcata

SEQ ID NO: 483281 - DNA, 175 bp, Homo sapiens
gagatttggaattcatcagtgatgttaaaagtcactggccggctgtgataatcgcgcgtgttatcctagcattttgggaggccgaggcgggcagatcacttgaggtcaggagttccagaccaacctggccaacatggtgaaaccccatctttactacaaatgcaaaaattagctg

SEQ ID NO: 483282 - DNA, 238 bp, Homo sapiens
tttttcccccggttttttccaagaaaggggggggggtttttgtttcccccccccccccccttttaaggccccttggaaggcccccccccccccggaggggggttttggggcccctattggggggggtttcctgtttttcccaaaaaaaagccctcccttcccaaggggcccttccccccccttttttttttttaaaaacccctaaaacccttaaaaaccggtgggggtggggccctta

SEQ ID NO: 483283 - DNA, 621 bp, Homo sapiens
tgatcgctgactttagaggatccaccgcgtggatcttgtccggcttgagaatctgcagaagatcctgactaacatattttctgaggggatgcactggatttcacatgaagagatagatacgatcccgaacgacttatctgccccaggggagtccgagccacagttttctgatcaactgatgattctgacccgcttctttctctctggggggtaagacacttgttgttgaagctctggggatgatggagaacgactcctcggcctaggagtctgaggcaaagctttcggttctgggggaagaatcacattcgcttctccctctagatggcgttctaggtatatctttcattccagggagaggacccagacaggctgtgcctcgagggagtcccagacccatctctaggtccgggagaagacccagaccggcttctcctggagggaggtcggggtaaaccatctttcatttcaggagaagatgcagaactacttctttctctcgagggggtcaggggtacagcatcaggcacaggtgaagagatgctcggattggaagacgtccctgcctttgccactgggatctgggggataactcagaagggctgtgcccagagggtctgg

SEQ ID NO: 483284 - DNA, 262 bp, Homo sapiens
  misc_feature (31)..(31): n is a, c, g, or t
  misc_feature (74)..(74): n is a, c, g, or t
  misc_feature (169)..(169): n is a, c, g, or t
  misc_feature (213)..(213): n is a, c, g, or t
  misc_feature (227)..(227): n is a, c, g, or t
ctgaagaacgacatcaaaggaaacagactcnagtttcaaaggggaggactccaatagtactgtctgaatagccnaataggcaggaaaaggctgtgtggatgtacgcatggccacaaagaaagtcaagcttctgagctcatgacctcagcagtgttgctgtggaagcagnagagacttcagagctgcacatgcctaggtttggatttatgtccntcactctgagctangcaggttccagcaagtgcttgaagttttctgcgtt

SEQ ID NO: 483285 - DNA, 398 bp, Homo sapiens
  misc_feature (10)..(10): n is a, c, g, or t
  misc_feature (14)..(14): n is a, c, g, or t
  misc_feature (24)..(24): n is a, c, g, or t
  misc_feature (77)..(77): n is a, c, g, or t
  misc_feature (123)..(123): n is a, c, g, or t
  misc_feature (125)..(125): n is a, c, g, or t
  misc_feature (140)..(140): n is a, c, g, or t
  misc_feature (179)..(179): n is a, c, g, or t
tctgattctngagnatccctgtanacactcgaggacacgcccctgtattcggtatcgatacatctagtggttgagcngggagaggtctacattcctctagaacgaaccacagtcagtactacngnagcgctgggatatcnagcccggtccatccaaagcgtaagccatatgtctctccnctggacctctctggaaatgcttctcaactttgatgatggctccagtgacaggcagcagccaccaggactgtgatctccctgggatttaaagtgggaggttaaaccaggctccacgccactgcggaattgtgcaattgtaagtcaagtctcaattgtgagccaagcttctcccagggtcagaggtggagttagaaaggccccatgtgaccctgagcaagt

SEQ ID NO: 483286 - DNA, 221 bp, Homo sapiens
gagctggagaacactggacagcacagcactctagcaggagctccgggccagagggagccggagtgacggtgctgaagaacgccttgatgaagagacgcggtccctataggctccggtccacgagatgaggcagaaacacgcccaggcggtggaggagctcacagagcagcttgagcagttccagagggtaatgcttttatggtgatagcttttttggtgat

SEQ ID NO: 483287 - DNA, 839 bp, Homo sapiens
gtccagaaggcaaaattaccgaatgccatttttaaaagtatgctataaactatgctactctcatacaggggacccgtattttaaaatctccagacttgcttcacatctagattatccagcacaatcataaagtgaatgacaaaccctttgaatgaaatagtggcacaaaatctgttcaggttaggtgtaccgtgtaacagtggggatggggtcaaacagtggttcaacgtcactgttggcatcaaccaaatcaaaggttacagttattagtaagagcaagtgcatttgaatcacatttttctggaactattcataatatgaagtttacctagaaccaatgagtttctagtttaatagtttagctatgcaaatgagcaactaaaacaatactttatattgttatttatagaaagagtcaaaacacctgtattataaacctataatatgcaaaatcatgcaattcacatagttacacaagatgtaaacatatacaaaatcatgtacctatatatttgatggacatctacatcctatattgtgacatgtaagtctataaaaaggtgaaaagtatgattacttaccaattaagtatgatagatatgatccaagaaattggatcagaagtgaagtaaaatcctcaactgaagcaaatggatactaaatctactaatgggaagttcataaaatatacatctacatgcctaagaccataattaaaaagaacataaagtaaataagagcaaatagaaacgaaagatataaagacaaggaaaacacaagatataaaagaccaaaaaaaacaagcaacaacggaaaagacgataaaagaaaaaacgaag

SEQ ID NO: 483288 - DNA, 183 bp, Homo sapiens
agagatccccgacaccccactcatctgcctattcataaaccaactataaactaaagccgtataataatgtactcgactgcccaatttaaaaaaatagctctctgcagtaagagtcagggtaatgattataggaggaagctgctggggtgagggtagagagatattctttttcttgcactgggt

SEQ ID NO: 483289 - DNA, 398 bp, Homo sapiens
  misc_feature (77)..(77): n is a, c, g, or t
  misc_feature (123)..(123): n is a, c, g, or t
  misc_feature (125)..(125): n is a, c, g, or t
  misc_feature (140)..(140): n is a, c, g, or t
  misc_feature (179)..(179): n is a, c, g, or t
ctatgaggtatcccgtaacccgaccgaggactctgcccctttgttctgactactcgatcagtctatggggttgagcngggagaggtctacattcctctagaacgaaccacagtcagtactacngnagcgctgggatatcnagcccggtccatccaaagcgtaagccatatgtctctccnctggacctctctggaaatgcttctcaactttgatgatggctccagtgacaggcagcagccaccaggactgtgatctccctgggatttaaagtgggaggttaaaccaggctccacgccactgcggaattgtgcaattgtaagtcaagtctcaattgtgagccaagcttctcccagggtcagaggtggagttagaaaggccccatgtgaccctgagcaagt

SEQ ID NO: 483290 - DNA, 571 bp, Homo sapiens
catgggactacttttcaggatgttatagtattaacacacataatgtgaacttcccagcacactgctctatggcatacttctgagcacatagtacatgctctataaagatgcattgatgcatatacacgtttttcaaatgcagacttactcagacttgccaccatcttccgcctctgtaaacattaaagggcttgcagagaatgccgtatttcaagatgatgattggtggtcttgtcttcggatgtaaagtatttgtgtcgtgataagggtgttgcagtgagggactcatgctgtgactgctttttctagctgagtggtataatgggtctagggggaggagtgtcagcaataagaagacttgcaataacaggagacttgcaataagaagctaattcatggaccctgtctctaataaacaaagattggccaggcatggtggcgggtgcctgtggtcccagctattcgggaggctgaggcaggagagtcgcttgagcctgggaggtgaagtttgcggtgggctgagaccgtaccgctgcactccagcctgggcaacagagcgggactccgtatt

SEQ ID NO: 483291 - DNA, 845 bp, Homo sapiens
ggaatcgtccggagagaatcatcactctgaccggccccaccaagttgccatctttaaggctttcgctatgatcatcgaccaagctggaggacgatatcacacgagtctccatgaccaacagtagcgcggaccaggaggcccccggtcactcctgaggctggtggtgacggcacagccagtgcggctccctgatctgggaaaggggggttgtaagattccaaagagatccgcgagagtacggggggcgcaggtgttccaggtggcgggggaatatgctgcccaatccagcgagcgggcaatcaccatcgccgggtcgtgcccgcagtcttgtgcaaccgagtgtgtcacagcagatttgcctggtcatgctggagaccgctctcccagtctccgcaagggagaggtcagtgagcattcccgtaccagcccatgccgggcccaggctccccagtgatctgggcgggcggcaagatcggctgcagcaggacgctgcgaggctaccccccatgtcgccatgaacgtggacggggaaccacctcgtagaatgacttacttcgacttccacggacccagcaacacgcagtatctcccggctcacgatcatggcgccaagcgtgacacacggttggcgctcaacaaccagtcttagctttgccactgagtgacacggcggggcacggcattcgaccggaactgacttcaaggtctccagaaggtgaaacggttgtggggccactcggatgcatatagcaaacacccagaattaccggtcccactactcactgggtagctctatggggccacacggcgacaaatgaaatcgcaaagctgagccaaaacatgga

SEQ ID NO: 483292 - DNA, 130 bp, Homo sapiens
tggggctaggttgggccagacaactccagcttgctagctcaggcttctttatattacagcatagtccaaagggtgagatggaatctgcatgtcctcttgtaagcctcacagcttctgaactccaccagtg

SEQ ID NO: 483293 - DNA, 896 bp, Homo sapiens
gcagtgcttacgaagataggtcacagtgccaatcccaagtgccgatgcatgtaagcgcgggaaactcacatctgcacctaactcccaccttctttctctgggaaatcttcctaggacatgcccagatggactcaggagcccatcagcatagtaaactccccacactgcagacacgtggcacattgacgtagtatgcagtgtgtgggatccaggtggaccaccttaggtgtatcatttgaaccgcttgacgtgaaaaaatgcgtgcctggcagggctcccatgagtcacgaccatccaacaataagtgaaggactaacaccacatacaacacacggtcaagagatgacatatcgccctagctggatctactacagggcaacgggccacagaagggtgcaagggtccacggcacgggctgagatgtctcatgtagttaagagctaactctgcccaatctatatccgggctggatgtggagatctgaaggcccgaacagccacctctggcctctgttgagtcaacgcaagcctgtgacgaccttggggggagcctgctctactcctctagggccgatacattagcgagtcattgtctagtgactcgcgcagattcccaggagtacatgccatagttcattaaccaacagtgggaactcataaccaaggctaagcccaactagccgcctaacacaactacacctacactacatgtaacacacctacggcaccgtccatactaacacccatcaccccacaataaccgctcgcaccatgacacaaccacaacaagcacacaagcaatcacctcagcatctccacaacgacaccaaaaaccagtaaccacctcttaccagccccaccaacacccccaccacacacaaaaccgacgcatacaac

SEQ ID NO: 483294 - DNA, 482 bp, Homo sapiens
  misc_feature (339)..(339): n is a, c, g, or t
atgtccagttgtacagataaatacacaatgttctaatgttacctcaaggcctgaatttaggaattgaaagtctttggtttttcacagtggtgaagaaaccagtagtaactttaaaatacccttgagtttccctctgctcatttatctcccaaatctatagttcatgttttctttctgtgatatccacttccttgtaataattggcttctgagattaataaattcttgaaaggcatagggaaaaaatgaaaatttgtctctttgaggaggcaggggacaagtttttttaagaggggaaggaatggaaaaggatggcagttattgtttttaaagccagagngagggattgtggctgggccattaaagggagatttgtggaggtgctttgtggggatttggaagtttctgctttgctttctccggccacactaggagagccccatttcaccgtccctttcaacaccacccgtatttttggtaaac

SEQ ID NO: 483295 - DNA, 364 bp, Homo sapiens
cagtcagtcagcagtaccaccgggccaagctgattgccccgccaagagactcgctctgggctcccctcgtaaaacgcaggagaactcgagttcagccagcattaaggatgagaagggggatgaggtggttgtggagctggtggagaatggcaagaaggtcacggttgggaaagatgacatccagaagatgaacccacccaagttctccaaggtggaggacatggcggagctgacgtgcctcaacgaagcctccgtgctacacaacctgagggagcggtacttctcagggctaatatatacgtactctggcctcttctgcgtggtggtcaacccctataaacacctgcccatctactcggagaag

SEQ ID NO: 483296 - DNA, 1218 bp, Homo sapiens
  misc_feature (1216)..(1216): n is a, c, g, or t
  misc_feature (1218)..(1218): n is a, c, g, or t
cagcctctgcctcccaggacgagggagatcctccccacctcagccttccactgtagctgggactacgaggcattgcaccacaggcatgcaccaacacacgccagcaaaattttgtgaatgtggcgtagagaccatgggtttgcatcatgtttgcccaggcttggtctttgaaattgcctgaggctcaaagccaattctaatttttggccttgtgtgcctcccaaaagctggctggcagcacttaacaggggcattgaagcccaacccagtggacaaggccttatctacaattgtggtacatcactcataatacaaggggacacgcataatcttctttcatcccccatccccacaaaactaaggggatattctttatttatcccctttatcggtccactttgggttccatggtaagtggtaattcctttacaagttttcattataattggaaatccatttgtgggaagtcatgtgaaaacaacgggcaactttcaaggaagaggctaaagaaacgaacactaggataacgagggcaataactcaggaggctaatctggaagtattttacctataaagtatgtgtaaagctacttgtggacgctttggacaactgtcacaagaaccccagtggacgttgcattgttgggaagcaacacgatgactgggaggcgttggtaaaggaccacacagggcacgcaggtgacgctacacgggcagaatgggccgtacgttggtgggcacacaacttctgggggcccatttccgtgtgctaacacctcgtggggtaacaatcggcggcgagcgcggccttggtgcaccccactgatggggggttctgttggcgcgacgcgattttccccccaagcgcagtgacacacaggtgtggaagtgcggtccagaaccgcggcgacttaccaccgatggccgggtaatctacacggaagacgacgagacgggcaccgcaataaacgcgtgacacctatacaagcaggcgtgacttacggacggagagcggacaacaaccggtcgtgggtgcggacccctctactctccctcacttcttattatttccttcactctaacaatgtattgtcaattttcttcttttaacacacagacgtcgacacacagcctgaactaaaagtacgagagaacagcacacaaagtacgcagaacagaaaacgagaccaggacaacagcgtagagaaggacacantn

SEQ ID NO: 483297 - DNA, 106 bp, Homo sapiens
cccgttcatcaaccctgtcaaaacccgtatacaagtagaccactacagccaattaacgcggttatttagggggccttcttattgctttccgtaggggtttcgatga

SEQ ID NO: 483298 - DNA, 803 bp, Homo sapiens
gcaaagatgcttcatttctcactgtaaacataagatcgttgccacatgactacatggacctcagtctaggaattaaatctgcacctacgctaggtctcttgtatgatatgtccattcaagcagtcattctcaggggtaatataatagtgagtgtcatgactaccttatcgtaagagtagatccagtatctgaaggtcggactttgtagtaggactacgggggaactcctttcaacgcgggtctcgagtgagacccgagagttctctgtcttgcattatatgtgaagtagtttaaaccgcatctgcatgggaggagacggcagtgcatgtgaatccaaggaaaggcttcccctcagtggattatcacggtcactcatgctaatcctatgtgctagccactttctttcatatcgtttgcaggaaacttcactaggagaggatttgaccatgtggggacacccaaaagtgtccacccactcttgacaggtatagaaagaacttggttggtcacaacagggggacaaggacaccaatagtattgaagcttaaaaaactccagtaaggaacacttggttacatccggacaaacagaagtagttactgggtgcgacgtaatctccatttaggagagaacttgatggagagctagcttatgctcacagacccagattaggaatcatcaggagagggacttgttaccgggaatatcgagctcctgtgggctggtggcaaaggcttccatctcttcgagcatgttaacgatacattgcggaggtcgacaaatagaacctcttatgaaccctc

SEQ ID NO: 483299 - DNA, 172 bp, Homo sapiens
gctaacgtgcggtgacaggacgctgactgagatgatgcttgaacccccactgctggtttgttcaactggtacagttcacattattaagtcgtaacaactgtgaagcttatttctctacagagacccaggtgtctcccgtcctcaactctgctcagtccatctgacccatctt

SEQ ID NO: 483300 - DNA, 177 bp, Homo sapiens
aggagatgatgctttgggtacttgaacctcagccacttttcaggcgtgtgcaatagctcaaaagggaaggcagagaggccatgtgggcacattagaccttcatcctgctcatgtcttctggagtcatccatgccctgtcccagcgttctccattgtaggaagcgctgggacggagat

SEQ ID NO: 483301 - DNA, 182 bp, Homo sapiens
ttaataagcctggtgctgcccgattcaggtccaccaccttgacaggatgatgctctgcgggacatccactcctccttggtcatgggctatcatggactggattcgggacttctgctcatccgtcaggactgggaccactcctcttcctccccagctgatcggatgtctctggcccagcgagg

SEQ ID NO: 483302 - DNA, 222 bp, Homo sapiens
tttcccggcagcctcttcaccgacccatgggtgccagacttcaggatgttccttgagaaagagtttcgccagtttcggcgactcgatgcgctcgcggctcatgcgcgccaggttctggttgagcaggtcgatcggcaggttgaccttttccagcaccgccaccagctccggggcctcgtcgtggaagactctggacaaaccgaccttgatgctcacgctctt

SEQ ID NO: 483303 - DNA, 89 bp, Homo sapiens
taatacaacaggtgtccagaatacttgcagtataaaatgaagatttggttgttgtataaaaaataatgctgttaaacaggagttgacct

SEQ ID NO: 483304 - DNA, 1693 bp, Homo sapiens
  misc_feature (1172)..(1172): n is a, c, g, or t
ggacgcgtgggtcctggacgctgtggtgcgtgacgcagtagggtactgaacacacgctgtacgacagagtcagagagaaccgcaccatggtgcatgtctcctgccgacaagaccaacgatcaaggccgcctggtggtaacggtcgggtgcgcaaagcaaggcgacgtatggtgcaggaggccgctggaagaggatgtgcctagtccataccccagcaaccacagaccatacttcaccagaacgtatctgacctgagccaacgagcacctcgacacacgtgctcacaggagccaaggagacacgacacggatggcaccgaccatgcagcaagaacacacacgcgcacggtacgaagccacgagaagagaacagagcatagccgcaaaaggcgagcatagaaccacgaccagtgaaggggacgcctatgcaacccgcgacagaccacacacaataaccgcacgcttgcgaaccacctgagatcaacacgataacaaagagaccacacataaagtgcgacgtcataggcccttgccatagagaagataccgccatggcacactgacccgccaaacacctaagcgaccacggacaccaagagcgatacaaacacccacttgctagtgatatgcacaaggcaccatgcaaaccactgaccaacacaaagaaacaaccaaggaggacgaaaacaatgcggaccaagccaaacgagagaaagcaacagaacacagcgacaaaaaggtaaaccaggggaacaagacatagagaagacaccaaacagcagaccacaaccggcaagacacatcacacgacaaccaggacataagagacgacaacgcccacacggaggagagaccaccctcgcacactatgaccacccgagacgcatgcactaccacagggcaccccgcagtagcagcagtgggtcctccataagctgtaaagcggaacagagacacgtcaactaatggagcgcgcacggcacagacatgcaccacaatgtaacgcacacacacacaccacaaaaccccccagcagcagcagaaaggccgagcacgggcacaacagcaacgaaaacataccatgcactcacacccgctagacccctaccagcaagagcacacgcgcacaacaccggcgacgcccacatccaacgacaagacacaacacagacnacacacacaagcaataagcagacagacgacaacaaaccaagaaacgcaacgccacgcacacagcgcccaacagaaataacaacgaccacagcgcaccaagaccaacagcgcgaacacagcacagaacgcagacggaacaagaggaagcgccaaagacacacaacaccacgccaagcgacatcgacagaacgagagacgcgcaggacgaacgcaaggagtgagccgaacaagtggatgtacgatatacgaagagcagggacaaccaagcgcggcgacgacagtgcacagcatcaacgcgggcagacagaagagagacaagacaggccatggaggaagaccccagaggcgcagagacaaaggagaggcggacagcagaccgagcagccctaagagggatgcgccgagaagcagagaggaacgagcgaacggcagacaagcgccagaggacggctacgcggcgcacgacaggccgacagggagaacgagaggcaagcacacaataaatggaagctcctacgcac

SEQ ID NO: 483305 - DNA, 588 bp, Homo sapiens
aacacagtttcttgtcactaagtctgtgcggtctggtggcacagcaaagattcgtgcatatgtccacccacatttggtctgcatgctattctacacagtcaatagcggccgagagccactcatctcccctataggggagagggaaagtttctttaaaaggctaggcaggatgattcataaggcatagatgaacgaatatacacatggtatctaactcagtagctatgtcgagccatcaggatattgttctacctgagcttaaaagatatgtgtagttctcccgttgcttttcccttcttcacgtgaacgaactctccgccacaacacagaggtgaaaagagcgctcacattcaaactctactcttgctgttcacatttacgatggagtcccagaatctccaggtttcttgctcaggcctcaggcaggactagatctcagatgtgagttctgggccagtatttctccaacacagtgttgcgtacttcagacctctgtctatgatctattagctctccctttagctagggcagattaaaggatgatacctttcaaaataattacacatcaggcctggtgcggcggctccc

SEQ ID NO: 483306 - DNA, 125 bp, Homo sapiens
acccccaatcacaagaagatttccacccctgcctcccatggctggttccaagacagtgagacagtttggaaagtgatgtcagaatagcttcccataaagcagcctccttttgaggcctgagtgga

SEQ ID NO: 483307 - DNA, 455 bp, Homo sapiens
  misc_feature (39)..(39): n is a, c, g, or t
  misc_feature (74)..(74): n is a, c, g, or t
  misc_feature (158)..(158): n is a, c, g, or t
  misc_feature (223)..(223): n is a, c, g, or t
cccaccaaaggaccgtatacttttttttttaaccagaantcatttccaacctgagtcctttgaatttacctgcnggaaaacctaggattcttttggaggcctgagaagaaagagtccatggtagagtttcctttttggatttagctcaataatgatgntcagattgggcaagtggggtgcgcgcatggctcatacctgtatcccgcactttgggaggccgagntaggcggatcacttgaggtcaggagttcgaaactagcctggccaacatggtgaaatcgcatctctactaaaaatagaaaaattagccagatatggtggcacacgcctataattcccagctactcgggtggctgaggcacaagaattgcttaaatctgggaggcggaggttgcagtgagctgagattgagccactgcacttcagcctgggtgagacaatgagattctgtctcc

SEQ ID NO: 483308 - DNA, 376 bp, Homo sapiens
gcggccgcctactactactctactactactaaattcgcggccgcgtcgacctgggctttatgtagcttgtaggctacagcatgtattgcactgaattctgtaggcaggtataacacaatggtaagtgtttgtgtttccgaacatacctaaacatagaaaaagcaaggaacggtggctcacatgtgtaatcccagcattttgggagggtgaggcatgagaatctttcgagcccatgagtttgagaccagtttgggcaacatggggagaccccatctctgtaaaaaatcttaccaaaaaaaaaattcgacgcgggctgtaatttagtatcaatagtcgccactggaatatcagactcaaacctagtggcgtattatac

SEQ ID NO: 483309 - DNA, 231 bp, Homo sapiens
  misc_feature (87)..(87): n is a, c, g, or t
ttaggccgttgtagtggtggacgggcaggtattccagtgcaggatgctccacgtgttaccatctaccatcaagaaggaaagcagcgnaggattgcccagtgcctgggattcgtcgtcctacacagaagaagaaggagtgccaggacaaagccaacagtgccagctctcacagctggaacacactattcatggggccgaatgccgtggccgatgccatcgcactgacaacgg

SEQ ID NO: 483310 - DNA, 285 bp, Homo sapiens
ctaaaaatatacaacatcgaatcagaaaaataggggcgacaaggaaaataattaggctgtcgcctcaattgtgcattcccgtgcaaagttgcctgacatcgcgacagcgttaacagttgacttcacttgtctatgctgcagttgatggctacataaccagtttcaccacacctatagcacttcacctttggtgcagtctttatgaatgtgtccgaattctccacaagaatagcatttctgctcatctgcattgtcgcagtccaccagccacaaggtccaggtatt

SEQ ID NO: 483311 - DNA, 226 bp, Homo sapiens
ctcaccacagaaacacctcatgtcactgctcacacgaacgacacactcatagatgcttaatcacagacactatcacactgcacccgaacgcatcagcacacgcacactcatagccatcacacagcacactagcacacagcacacaccaagacacagcacacacatgcacacacaacacacacacgcgaacacagcacacacgaacacagctccatcacgcggatca

SEQ ID NO: 483312 - DNA, 952 bp, Homo sapiens
acacgcccagtccatctgaccccaggtggttcaggaggcgaggaggccaggcgtgggttggaggacggctgtgctgccttcttcctcctccccaggctgccgtgctggggcccctccctcttgggaacccctccctctccggaggccgtatggcttcagcctgctttctaggactcagcgttggtgcctgccctgccaccctgaccctgacttgtgctcaagcctggcacctggatcctggttcctgcttggggcctggggatggggtcccaataggcttatgggatcacagggccactgggccaccagctgcccctcccttggctggagtcctgccctgacctccggactggagttcccctcctcttccagccccacggggccaagactcggcctcctggctggaggctccactgtctgggtggggctggtggtgccagggtcaaatcctggggccttcatgctcaattgttgctgacgaggccgcctggacagcttgcctggtcccctgtatgtccactctggatgtccacagtgactcgggctcctcagcagcccacgtcctcctcaccatctcccagaacattggagtcagggaaacagaggcgtgtggacaaggccctggggccctcacctaagactcacccgagcatcaggcgtgcgtgggcccgagtacggctgggactctccatcagcacagacaaagtcacacacatcctgggcacgagcacaggaggccacggaagtacgacgccagtgaggtaggccccgcacggggtagcacagcgcttgtggcgactggcttctcgaatcgccggacagatctccaacaccctggtgggccgaaccacggcacaccgggcgcgacggccaaccggtgggcctgggcgcatcaccatctacagacggtcaggccacagacggcgggatccacaaagagccgacacggtca

SEQ ID NO: 483313 - DNA, 894 bp, Homo sapiens
gaatcatattgatatcttcttcgaaaccgcacttatccccaccttggctatcatcacgccgatgaggccaaccagccagaacgcctgaagtgcaggcgcatacttcctatgctacgcccgtaggtaggcatccgcttccgcctactcgatcgacacttaatttactactgcgagcaacaccctatgctgaactaaatcattgctactactgcactctcaggggccaagaagctatgcgaaaactcctgagtcccaacagagttaatatgagtaggcttacagaatagcgttatagtaaagatgacctgctttacggaatccatttatgactccctaaagcccatgtcgaagaccccatcgctgggtcaattagtagctgggccgtggagtagctcttgaaactaggcgggtatggtatatattacgcatcacactcattctcaaccgctgacgaaacaccgtagtctaccgcttccttgtactatccctatgaggcataattataagcaagctccatctggctatgagaaaagactaaaatcgctcatgcataactcttgcaagcaagcacatagcctcgtagtaacaggcattctcattccaaccccctgaggcttcacggggccagcattctcataatcggccacggatttagatcctcatttactattctggctaagcaaaatcaaattacgaacgcgtccacagcgatcatcatctttttcagggagttcaaatttaatccaatatagctttggagactctagaagctcgtaaccgcttaacccatataacaggaatctcggagaacccggcggaattaccccataaggaaaagagtaacctattcaaagggccacaaaaactaaacgtatcttcccaggtaaaaagggc

SEQ ID NO: 483314 - DNA, 302 bp, Homo sapiens
tacagatgaatgtttagatttcaaaatttaaaagccccgagtctagaagaacctgaaaactgagtactcctcaagctgaaaggccatctctacagaactatcattccttttttttgttttttgttttcttttttggagatgaggtctcgctatgttgcccaggctggagtgcggttattcacaggtgcaaccacagggcactgcagctttaaactcctgggctcaagcgatcctcctgcctcagcctcccaaatagttgggactagatgcacgcaccaccacgcctgactcagacattcact

SEQ ID NO: 483315 - DNA, 634 bp, Homo sapiens
taagaggatcccgctgatctgcttacgcagaaaacagatgtccattacagatctttgggatgggtgaagggaattttaactggcgattttgtttcccgtttgactaccttccaccgaacactctgtatcgtgcgaaaaaagagcatttctggagtattgaccagacggaatttcgaatccccacccagctgatcattccagatatggggacaatgacaaggttttctcttgggatgactacttgggtttcctaagaacttgactttgcgtcacacggatcattccttgcaaatcaccagagaaatgcaggttggacatgattccggacctcaaagccatgaacccccttaagcggatcagcgctgatccgcttaagccaggttatggcagcaagtatgtctgcttttggatcctttaaaaaaaccaagatgaattccaataaaaattgtttatgtcaggcgttttggctttaaccgacatgatccaggtttcaggggccacccaaggtgctccttgcagaaagatcgttcaggaacacccccgacaggcattgcttcctcctcctcagcagctcacccaacaggcgtacagccagaggagccaccctatacaggagctcagatataagcggatc

SEQ ID NO: 483316 - DNA, 156 bp, Homo sapiens
aataacgtggacaggacagtcaacaaaggaaacatgatacagactaatctgaagtacccttggatccctggaatgtccgtaggacactcgtacaggtgtactgatcccacaagatctctaacgttctggccgagggcaaactagggtcatcaagct

SEQ ID NO: 483317 - DNA, 368 bp, Homo sapiens
gtgacaaaaatcctgacagaaacatggacagtgaaggccaggctgaggaggtctcagagagaaataagaagctttctggaaaatgtcttccttttggatatggaaagcttacacaatgcctgtaccatcattgtaccttagaagcagtggccttgctttttatttcagagactcataggcaaaagagactgtagccttgacccagaggaaactttggactttgtaactttgagttaatcctgaaatgagttaagactttgggagactgctggcaaggcatgattatattttgcaatgtgagaaggacatgagattcatggggtcaaggacaaaatatacggtttttctctatgtccttaccaaaaaaa

SEQ ID NO: 483318 - DNA, 274 bp, Homo sapiens
ctcttatgtacctcttctgtgcctcttactaatccattcctttccttgccactggcactctctttttttaactttttttgagacagcgtctcactctgtcactcaggctggagtgcactggtgtgacctcagctcactgcaacctccacctcccaggctcaagcaatcctcccacctcagcctctctggtagctaagaggtgcataccaccatgcccagctaaattttttttttttttttttggtaagagacgggttttttggccttgtaacct

SEQ ID NO: 483319 - DNA, 342 bp, Homo sapiens
cggcatccctagtgttttaaacttttccaccacctgcagagccaaaaagatgccgatgagctttagcctcacccagatgctgctcgtcagcgctgcctacctggctgcgttgttcggggtggcttggatcagtgagcgtggaatgattccgcgggcgatcattcgccatccgttgacctacaccttgtccctcggcgtttatgccagcgcctgggcgttctatggcacggtgggcctggcctatcactatggctatggctttctctccagctacctcggcgtatccggtgcgttcctgctggcgccggtgttgctgtacccgatcctgaaaatcacccgcac

SEQ ID NO: 483320 - DNA, 701 bp, Homo sapiens
agcggatctacggggcggcaggaggcccgaagcaagatggcggtgaatcagagccacaccgagaaccgcgcggagccctcatccctaacggtgaaagtctctggaagcggtctccgaatgtggagctctgccttcccacagcgatcagaaggctcaaatgtctttatggtagaaagacaggaacatgtatctcactttgcataccgggtgattttcataacttcatgctccatcagtgatcccgatgttgtgcttttatgatgccattggatctgatgacgaatctctaactgttgaacaaccagtatttgtctgcgaaacttgcattaagggaactattcaggcagctccatatggtggctgggaaggacgagctagctttataaaatgtagtcttcagaaatggaggtgccattgaatttgcccagttgatggtgaaagcgggctctgctgctgcccgaggatttccatttagaaccttaagatgactggttcagctctatgggcatttatgtaattactgggaatgggaatttgtgcatcgtccacagatgccttgtacagttatgtctatggagcgccacctgcgggatatggagccccacctccggatacggagccccactgcaggatatggagccaaacccgtaggaaatgaaaggccgctgtgggatacagagcctcacctggctgcccatatc

SEQ ID NO: 483321 - DNA, 307 bp, Homo sapiens
cccccgagttataacgggtgctggtggaaaacagtggtactgtagtattgggtggaatactcagacaaacggaacgcgataatgtgaccaaagtgccatttttgggtgatctgcctcttgtgtggcgatttatttatctagcactgggacaaccaatgacaagacagagttgctgatatttatcaccccaaaaattgtgacagatcaattccatttgaagtaatctgctacccgatttgtttcaagatcacattcattagtaaagagataggtggtctatgaagaagtttgtccaaatggtgtttgg

SEQ ID NO: 483322 - DNA, 323 bp, Homo sapiens
  misc_feature (13)..(13): n is a, c, g, or t
agcgaaagcttantagtgctcgcagatgcgctgagtcgcgcacgccgcggcgtcctcgtttgttttttcgctgcgatagccagatgtaatgatgatgggaaggtgaatcccatgcatcgaaaaccacccttggatgccacaaagtatatcgaggagtgtctggctcatctggactgcggtaccggtgtgaacgtctcgcagaatgcgacaaatgcgctcataacctgaccattgtagccggccactttcgtggtagatctcgttgacctcctcccatacccccttactaacttcacgcttcagccaaaggcgtcttggctgat

SEQ ID NO: 483323 - DNA, 142 bp, Homo sapiens
agagattggccagcaggaaggcgggggatcggggcaagtggcagcaccaagcaggccaacgtggttcttacaacgtctttccatgtctgacaagccagatacagagttcaagagctcagctgtatcgaccagaatcgtgatg

SEQ ID NO: 483324 - DNA, 200 bp, Homo sapiens
ggggaaaaacaaacagaaaatctcctcttctttctcttgcttgctgaccccaggtactccagcttcagatgggacctctgggggtggcttaggggcctcgaggaggcccgtgagcttcaggtgtatggctaggggtcacggatcctgcacatggggcagggtcccaagaactcgggaaattggccttctggtggttacac

SEQ ID NO: 483325 - DNA, 281 bp, Homo sapiens
gagatgccaccagtgcactcgagccggggtgacagagcgagactccatctcttaaataagtaacttttgtggccggtgtgtgttggctcatacctgaaatcctaccagtttgagacggcaaggttgggtggaccatctgagtgtccggagctcaacattaggtctagccaaaatggtgaaatcccatcgttactaaaataaaaaaatatggaggcatggggttgcatgcgtgtaatcccagctacttggagggctgaggtagaagaattgcttgaacccag

SEQ ID NO: 483326 - DNA, 227 bp, Homo sapiens
taaacataaagatgaggatataaggatacacacctgcattctatcgatagtcatttttactctaccttctgggtgtgtaacggatggaaaagacacatcagaaccgaataaacacagatccattcatacccgtggaaaggttggcaggccactcaagggactgctcagagcgtccacctcatctcagatggcctcaccgtatgacgctcaggatgacgcccggaagg

SEQ ID NO: 483327 - DNA, 363 bp, Homo sapiens
aattttgcccaaatccctatctaagagatctggggagacatgtcctacaaaccataaattctcatcacaagggttttatttaaccctatatgtcatgacttactttccaatcagactctggcttaacattataagacaggcaaataaatcaaaatatttaatcccaaaacatgtttctctgccatatcttgaaaatgtccctgcaaagccattctttgtagggtgaaaacctgcatctgtaaagagtctctattaacatagctagatcttttttttccaggtcctcccaatcctgaagagattagcttttgtttcatgcctcttaaagatccgaataggaaatatctttcatagtttgtctct

SEQ ID NO: 483328 - DNA, 234 bp, Homo sapiens
cgatatttttacaagatacccccaaaaaacattttaagagggcaaaagtagaagctgcaaggtctcttaaggtccaatcctggaagtatcacttctgctgcattcaactgggcaaagtagatcacaagtcctgcccagattaatgtccacttcttgacaggatgaacagcaaaattatactgtaaagaactgagcatattggagttcccactgtggtgcagtggttaacaaacc

SEQ ID NO: 483329 - DNA, 1364 bp, Homo sapiens
  misc_feature (85)..(85): n is a, c, g, or t
gggccgcactctgctgcaccgactgctgccgcctctctgtcagcgttgccaggctgacacatcatcgcaaatcctggtagcgatnccgcggagcggcgcggtcgccctgttccttcgtcgcgccgcatgatgccgcgatgagcctctgctattcctgtccgcggccgcctgtgtgccgcacggtgctcgagtgcccgagctgtagtacgccgcagtgcgcagctgattcgcaggaggctctgcttgtcgatccctggccagactcctcgcgggatagcccgtacactaagaggagtaccactgaccaagttagggcccgtgtgattgaggtcgtgacacctcgatggtttggcctcgctagaaagtcgaacagcgggtactgatgcataataacagacccctgacaagaaaggtagggactagcacgcgtcagggcagcaccatgtcgagcctgcgcgtgcccccacgaccttgcctggacagagcgttgtcgtcctggctcgcgcgtgcccttgcttctgcttagaggggccccagttgcctcccatccgttggcattccatttagcgcacattgccccattgaccgcttgcctagggtccatggccgaatagcttcatggcgctcggtccccaagcgttccttgcacctatgcgagtgttggcacttgccccacgcccattcctttccctattcatggactcccagccttggtcttgttcggccccaatttcccttgaggacatggtcgtgccaacggacgtagccattgccttcgtgaagccttgtgccatttggggcatcattggcgcgccagtgtcttgacgccagtggttcccaggggggccagttgtcccaggaagtttgggtcgttgagcgcccccttgttcgcaacgtccttgggctgcctaggaaatgtccccccgtttgccaaaaaggggatcgcggcccattgtgcggtcccccataggcgaatttccgccaacaaaatcccccgagagtaagtgcgcccttttgagcgttcgcaaggcattttaagtgcccgggcccccaacaggggctcctttggagtgttccattcaagggaaattttccccttaaagttccatttttccccaaggcacaagcgttaaacttgaaaaaccgggttcgaattttgggtcggtgggacaaaaaccaccgttgaaggagaacaacaagcgacaagtccacatcggggcacagctttggacgattaacattacacatggagcaaaacacaccaatgagccaggggacgcgggattcacatatgttatcaccacgaaggtagacgagatagccagagtacacacacaccaagataggtccctcgacgaaaatag

SEQ ID NO: 483330 - DNA, 263 bp, Homo sapiens
gactagttaaagcaactagcctggagatggcttatgtactctctcctttgtttttgttttgttttttgagacggagtctccgtgtcgcccacgctgaagtgcagtggcgcggatctcggctcattgtaacctccgcctcccgggttcaagtgattctcctccgtcagctccggagtagctgggactacaggcatgcatcaccacgcctggctaatttttttgtgtttttagtagagacggggtttcgccatgttgggctggct

SEQ ID NO: 483331 - DNA, 1331 bp, Homo sapiens
  misc_feature (131)..(131): n is a, c, g, or t
  misc_feature (138)..(138): n is a, c, g, or t
  misc_feature (141)..(141): n is a, c, g, or t
  misc_feature (171)..(171): n is a, c, g, or t
  misc_feature (283)..(283): n is a, c, g, or t
  misc_feature (295)..(295): n is a, c, g, or t
  misc_feature (298)..(298): n is a, c, g, or t
  misc_feature (304)..(304): n is a, c, g, or t
  misc_feature (311)..(311): n is a, c, g, or t
  misc_feature (323)..(323): n is a, c, g, or t
gattgctcaggttggtggtggctgcgtgtcaggcgtgtgcgtgcagtacggagacagtgctgctgggatgtggcattgccgagcgcatcaggtcctgtgctgatgatgaagaagatgtgaccgcgccctgntggagcngcngctggagcccgaggagctgtaccagacttnccagcgcatcgtggagaacgtgaacgtcatcatctccacctacggcgagggcgagagcggcccatgggcaacatcatgatcgatcctgtcctcggtaccgtgggctttggtnctggcctccacnggntggccnttcaccnctgaagcagttngccgagatgtatgtgccaagttcgcacgagcaagggggagggaccagattggaggccgtgccagagcgggccaagaaagtagaggacatgatgacagaagctgtggggctgacaggtactttgacccagccaacggcaagttcagcaagtcagccaccagccccgaagggaagaagctgacacgcaccttctgccagctgatcctggaccccatcattcaaggtgtgtgaggcgatcatgaatctcaagaagagaggagacagcaagaactgatagatgagaagtggatgtcacaatcaggaaaggcagcaaggagaagaggacacaagggaaaagagagaaaggcaaagaccgcatgagagaaagagagtgaagcatgcggccagacatgagcatgccatgacgggacaacgccatggcagcaaggaatgatacacccgagtcccacactgaaccatacacccatgatgcacggcccgcaggaaaagtacccaggctgacgacagacctcccatggaaacagaagaggggaacacacaggagaacgacacgacgggactggacaacttgggagagcattaacaacaagctagagacaccccccaaaagggggcacatcaagagaagaaagcgaaataatacaccgaaaacaaaggagagccacacacattcacggaacaaaccgaccggagatacaaagcgccccatgggacacggaagccgtacagcaagaggaagagacaatacaaagagtgcccggaagaggacaaaggaaaacaaaggaagaccacaacgaaagaacaccctaggtgaaaaaacggggagacaacaacaacaacaaaagacacaacatgcacaaaagaaacaaacagaacagaaaggccgcgaaaacaggacgaccagaacagaggagaaagcaaggagaacaaaagtgagcaacaagaaggagagacaagagaaacggtaagaaaagaaacaacaagaaacgagaaacaaacggcagagagc

SEQ ID NO: 483332 - DNA, 252 bp, Homo sapiens
ccacaccagactatcacaggctgcatgagcaaaaaaacagcactgggtacaccggggagtccagtctctttgcccaactccagaacttcctgcagctcaacataaaagccctgggggagggtctaagggcttctcggactgactgcagagtttcccacctcctctggtgggccgaaattgtgtcctttcaattttctttagaaagttttgcaaatcagccaaacctagtggctcatgcctgtaatcccaaca

SEQ ID NO: 483333 - DNA, 584 bp, Homo sapiens
  misc_feature (276)..(276): n is a, c, g, or t
  misc_feature (486)..(486): n is a, c, g, or t
  misc_feature (503)..(503): n is a, c, g, or t
cacgccgcaccgccggttcaaaagccgcaatgctcgagcagcttttcggttaccacaggctgttgaactcgataaggttaatgcccgcatgcggctggcaaaactcggttgggtccgagtaagaatgtcgcgggacgtgtgtggaaagcttaagaacgcaacagtctatcgtgagcaggggaattggtttgtgtcattgcagaccgagcgtgatgaagagttagttccacgcacgggcactgcggtcggggtcgattttggtgctgtacgtgccgngacctcgacagacggacaaacgctagtgctagaagcgcgattaagcaagggtgccgcgcgcctgcgttacttgcaacggtgtatgtctcgtaaacagctgggttcgcgcagacggcagcgggcaaaagctaggcttgcaaaagtacatgcgcgcgttgtgcggattcgtaacgatgccatgcataagctgagccgagcgcttatcgaganacatgcggttgtctgtnttgaagacttacggattgcatgatgggcaccggccggcgcgcatatccctcagcctcagatcaacgcacatagttcatgca

SEQ ID NO: 483334 - DNA, 129 bp, Homo sapiens
  misc_feature (93)..(93): n is a, c, g, or t
  misc_feature (99)..(99): n is a, c, g, or t
ctcggtacctctccctactgtatctatacaaaatgcttcagatgatggtatctcatgctggtttattactcccctgctccttgggcaggtgancatatngtcccaggcatctaggatacagtagggaga

SEQ ID NO: 483335 - DNA, 191 bp, Homo sapiens
attccatcccgctccaccagtccacaccgcagcagcacgagtgagctcgagaccgagaggggaagagaggaggaagcgatacagtactacaggcaaccatggaggtggtgaccggcagcaacggcgggaggctgaacccgtgggcggagcccttcgtgccggggagctggtgccgccccgcccccgtgcag

SEQ ID NO: 483336 - DNA, 173 bp, Homo sapiens
atatcgtcgacccccgcgtccgaataaatttaagaactcttagctgggagaagaaagatccccggctttacccattgtaagataaaagacccattaattgccaataattccaaaagtaatttttttaatttattgaagaactcttagctgggagaagaaagatccccggctta

SEQ ID NO: 483337 - DNA, 493 bp, Homo sapiens
  misc_feature (469)..(469): n is a, c, g, or t
  misc_feature (476)..(476): n is a, c, g, or t
tattttctctcatctaaacaggaaaggctattcaagggctaacttcgaataaatgttatatcacaaaatgaagtaggagaaaagaattattactttggttcaagtcccaatcatcaggtgtatctaagctgtttgtgaactcaggattcatggtctaggtgatttatctttctctttctccattcccaggattgacaagaaaatagacagaattagccacaagttctatcttatcccctcttttatgcctgcaggaggagttctatggaatgcgtaaatgttagacctctagctacaattcttttctgcacttttcactctcagctgcatgtgaaagaaagtgacaaaaagaagctagtaatgttgtaggcagtaaacaaacaaaaaaaaagttcttttgttgttgggagaatggaaggaaaacctgccatgttaaattacggcacacacacacacatttaaaattacnttttgcngttaccaaattggagtg

SEQ ID NO: 483338 - DNA, 239 bp, Homo sapiens
actccggcctcgggagtggtaacagctgcggcaacaaggtggtgggtccagcagggtagcatggttgaagtcagcacatgtctcgatctctgggggtgtcatgtcacattgcaagtccagctacatcacgggacggtggacgcgcctgacgagacctactgtcgacgggtgacccgactctcggacctgcgtggctgctttcatgttttccctttaccacctgtccctacacaccactt

SEQ ID NO: 483339 - DNA, 419 bp, Homo sapiens
  misc_feature (101)..(101): n is a, c, g, or t
  misc_feature (170)..(171): n is a, c, g, or t
  misc_feature (181)..(181): n is a, c, g, or t
  misc_feature (184)..(184): n is a, c, g, or t
  misc_feature (205)..(205): n is a, c, g, or t
  misc_feature (393)..(393): n is a, c, g, or t
acgttcatccgggataagtactcaaagagattccctgaactggagtccttggtccccaatgcactggattacatccgcacggtcaaggagctgggcaacanctgggacaagtgcaagaacaatgagaacctgcagcagatcctcaccaatgccaccatcatggtcgtcanngttaacggcntcnaccaacccaggggcaacaagntgttcggaagaaggagctgggagcggctggaggaaggcctgcgacatggcgctggagctgaacggcctccaagcaccgcatctacgagtatgtggagtcccgggatgtccttcaatcgcacccaaacctgtccaatcattatcggggcatcccacgggcccgccaagatcatgggttgtgggccggcnctggaccaacctctccaagatgcccg

SEQ ID NO: 483340 - DNA, 307 bp, Homo sapiens
gagcggggtggggacattgctctctgggtttttggtttgggggcggctctctgctccttcactgtcccctctggcttcccatagtgtgtgctgtgagtggttcccctgtgcttaaaatggtgccaatgcccatctcatcctggcacgccctactccactgccctggcagcagcaggtgtggccaatggaggggggtgctgtgccccgagtgattcccccagtcaaactgtctttgtcaccactgtggggctcacgttttcatccgttcccgcaacttccctatgtccccggtacataggtttggaca

SEQ ID NO: 483341 - DNA, 1366 bp, Homo sapiens
acggatttgccgccagaacacaggtgtcgtgaaacactacccggtaaaagccaaaatggtgaaaggacaagactcatactcaccacttgtcgtcattggacacgtagattcgggcaagtccaccactcactggccatctgcatctcatacaatgcggtggcatcgaccaaatagcaacccattgaaaacatttgcagacaggcaggctagctgagcatgggcaaagggcttccttcaaagatatgcctggagtctatggaataaccgtgaaagctgagcgtgaacgatggtactcaaccatatgactatctgccttgatggaaacttatgagaccagcaacgatacatactgtgactactcattgatgaccccaggacacaagagactatatatcaaaacacatgcacttcacagggacatactcaggctgacatgatgctgatccctgcatctgtagactgctgcgatgctaggatgacatcaagaacgactaggcatatcatccaagaaatgggacacgaacccagagaagacactacactaactgaaacttaacaaaaaataggaatgtgcaaaaacaagcgcaactcagacacaggaggttcaacgaaacaatgagatatccaactaggaaccaaaccgtaacaggaacaagaaaagagatatagaggaacattgagaaaggacagaacaaaacacataaaactaacgaacaacaaaaggagattaacaaagaaacagaaaaccaaaagcaattgaagaaaccacacactacaagagataggcacaatggaagacgaaacacagcaagacagccaaaaaaagaaaaaaaagacaataaaacaaacaactgagacaagcaaaaccgataaaggaaatgacaagaagaaaagcacggcaagacacgaacgagagataaagagcacacagcgaatgaacaacacgtcaacaaccaaaacaacatcacacatgaaaaaagacaacaagcaataagaaaacacagaatatacacaacaaacacaaagaaaggacaaggacacagaaaacaagagggaccgactaaaaacagaaataataacaacaaagtgaggaggaaaaggaagggacagagcacaacggaagagagaagaaaaaaacgaaggatagaacaaaataagtagcgagaagacacaatgggaaaaacaggaaagacagagacaacaagacgacaacgccgcacgcagagccacgaacacataagttaaggaggaggagaaggagcgggaggacgtaaacgaggaagaatgagagaaagacggacagagagaaacaaagaggacagagaacgtggccggacaagctcggcgtctcgccagaccggagagg

SEQ ID NO: 483342 - DNA, 372 bp, Homo sapiens
aaaggagctaagtaaaataagctagtcacaaaatgacaaatactgtattatttcacctatatgaagtatccaagccaattcataaaaacagaaagaatatcgctggttaccagggacagataagaggagaaaggggaagtgtttaataggttgtttagtagttatagagtttcatatttgcaagatataaaagctcggaaaatctgtctcacaacaatgtgtatatactttacactactaaactgtacatttaaaaatggttcaccaggcgcggtggctcacgcctgtaatcccagcattttgggaggcccacgcgggtggatcacaaggtcaggagatctagaccatcctggctaacacggtgaaatcccg

SEQ ID NO: 483343 - DNA, 426 bp, Homo sapiens
  misc_feature (187)..(187): n is a, c, g, or t
  misc_feature (354)..(354): n is a, c, g, or t
  misc_feature (357)..(357): n is a, c, g, or t
  misc_feature (361)..(361): n is a, c, g, or t
  misc_feature (380)..(380): n is a, c, g, or t
catgggaaggatcagctgaggagtgaggatggcggcgattacccacagccttagcgtgacctgctcatttgcagcaccaaccaatgaaagtcaacagaaaatgtgaaaaatggcagtccatgccatgaatacacgtcatttgaaaaaagcgtccgcgggtgccactggcactcacacacacgccctncacttaatgtctccacttaataccaagaaccttcagttgagaatctattttattttattattattattattttgagatggaacctcacttcattgcccgggctggagtgcagtggtgcgatctcagctcactgcaacctctgcctcctgggttcgggccattctccngcncttnccccctccccgcagcaccntctctgcccgttcttgtccacacatctattaaatgcttctgttttc

SEQ ID NO: 483344 - DNA, 840 bp, Homo sapiens
tgagcgacgctagatgggccgagctcctccctctgctccagcagtgccaagtggtcaggctggtaggcgagctgtggcctcacggaagtcgacggggcaaggacatcagctctgcacttcgagtcaagcctgcactggtcagcagctcaacctgcgcatggaaggagctgggcgatgtcggcgtgcattgcgtgctccagggcctgattagagcccctccctgcaacgatccagaacgctgagcctccagaactgtgggcctgaccggggcgccggtgtgcggggtcctgttcagcacactacgcacccatggccacaccatgctaggagtctgcaatccttccagacgacaaccgtccttgggggatgctgggctctgcatgcatgctcttgcgaaggactccttggagccccgcagtgccggctggaaaagcttggagcgtggagtattgcaagccctctcggtgtgtcagttgtgatggccctggcctccggtgtctcagggacaagccggacttcgaaggatgctcacggttagcaacgatgacatcaatgaggctggcgtccgtgtgctgtgccagggcctggagtggactccccgctggcagctggaggcggcgtcaagctggagagctgcggtgtgactatcagacaacttggcgggacctgtgcggtattgtggcctccaaggctcgctggggaggtgggccctggggcagcaataagctgggtgatgttgggcgtggtggagctgtggccagggctgttccaaccccagttccaggtcaaggaccctgtggctctgggagtgtgggttcactgcccagggttggggggcct

SEQ ID NO: 483345 - DNA, 500 bp, Homo sapiens
cactgttaggcctttattttattttattttccatcgaaagcattggaggcccagtgcaatggctcacgcctgtgatcccagcactttgggaggccaaggcgggtggatcacgaggtcaggagatggagaccatcctggctaacatggtgaaaccccgtctctactaaaaatacgaaaaattagccaggcgtggtggtgggcacctgtagtcccagctactcaggaggctgaggcaggagaatggcgtgaacccggaaggcggagcttgcagttagccgagatcacgccactgcactccagcctacatgacaatgtgacactccatctcaaaaaataataataataacaatataagaactagctgggcatggtggcgcatgcatgtagtcccagctactcctgaggctcagtcaggagaatcgcttgaacttgggaggcggaggttgcagtgagctgagctcataccactgcactccagcctgaacagagtgagatcctgt

SEQ ID NO: 483346 - DNA, 155 bp, Homo sapiens
  misc_feature (29)..(29): n is a, c, g, or t
  misc_feature (60)..(60): n is a, c, g, or t
  misc_feature (83)..(83): n is a, c, g, or t
  misc_feature (86)..(86): n is a, c, g, or t
  misc_feature (90)..(90): n is a, c, g, or t
  misc_feature (109)..(109): n is a, c, g, or t
acagtaggggggctgagtggcccagagcnctgggggaaaaagaactcccctgccttgcgngtgtgcctaaacaccctgctccngcncttnccccctccccgcagcaccntctctgcccgttcttgtccacacatctattaaatgcttctgttttc

SEQ ID NO: 483347 - DNA, 1338 bp, Homo sapiens
aatcacagcagtcctacttcgtccgtatctctcccagtcctagctgctggcagtcactatactactaacagaccggcgaatcctcaacaccgaccgttcttcgaccccggcggaggaggagaccggcgattcgtataccaacacctattctgatgttgcggtcaccctgaagtttatattcttatcctagccaggcgttcggaataagtctcccatattggtaacttactactccggaagaaaaagaaccatttggatacataggtatggtctgagctatgatatcaattggcttcctagggtttatcgtgtgagcacagcatatatttacagtaggaatagacgtagacacgacgagcatatttgcacctccgctagccataatcatcgctatccccaccggcgtcacacgtatttagcgtgactcgccaagtccacggaagcagtatgaaagtgatctgctgcagtgtctgagccctaggattcatcttgtcttttcaccgtaggtggcctgactggcattgtattagccaactcatccactagacatcgtcactacccgaaccgtactacggtgtagctcacttccacgtatgtctatcaataggaagctgtgatttgcccacctaggagggtcattcctgggttccccatttttggggttaccttgaaacaagtttcggaaaccctaacaattaatattaacggagagaaatcacttcttccccccacaagttggcgactcgaaggcacgaggatgggagtaccaccagttaccgaagcaactaatgggggggactaccgggcaaatatagagcagctcggggatagatgcttcctgctgtctcgccgttgctcgcgttcataacactcactacactatctttcgtgtcatcgtttctattatgtcagatgatagaacagcgcataataatgataggacagggacggagagagagaggagacatgcaggcaggagaaggtcagcgcgccaacaggcgagaaggccgagaagtcaaagcggcggcaaagcagacggagcgagcgcccgcgcgcgagcggcgcgcaacaagcagacggagcaaaaccaggcgagtacaagcacccgactgcaccggggacagcgcggaacaagcaaagcgacaacacgacagaacagcaagcagcaagagacaaaacaggcgcaggacgccgcacgcagagagcgacgagcacccagaggagcgaagcaagagacacaagcaggaaaaacgacacgcaaagcaaagaaggagcagagagaaggagacgcagagaagacagcagagacgacagagaggacccacgacgcgacacgca

SEQ ID NO: 483348 - DNA, 125 bp, Homo sapiens
cgctcccgtgtcgcagccaacaggatttcaaattttatcttttggcggtatgcacttttaagcagtcaccccccaactaacacattattttaccctcccactcccatactactacaatctcatca

SEQ ID NO: 483349 - DNA, 165 bp, Homo sapiens
ccccttttttgggttttggggggggggggggggggccccggggggtttttttttccccccccactttttttttcccggggcggggggtttaaagtccaaaaactcccctttgttaaccaaaggggggggggcccccagggggcctttttttttccccccccctta

SEQ ID NO: 483350 - DNA, 240 bp, Homo sapiens
gtcgacggaaaggggcatctcagctggcccatgctgaggcatcccttccccctgagggaccagccacacaatggtatagtatagaataaagtttattcagggcatgtggaggggagttaagagggtaggagagacagagagaggcagagaagagtagagaaatagaggccggccatgagcacgtggatagagaaggggtaggggaatggggagagagggaccttggtgtatagcacgcca

SEQ ID NO: 483351 - DNA, 1044 bp, Homo sapiens
tggttttcctaaagggttttcctcaggggcttctcttaagtggctggtagctgctgcagtgctgcgcagggcctccggaaaattgcgcggattaaggccacacagcgtggagtgctagttctccagggaagggtgcttagaagcccagtttcagaagaaggcccaggttcagctttcgtgcaaaagggcgtgtcgtggtggtgcaggccagtgacattcgtgatatttggggaggccacagagaggagcctaggtgtggcccctgtgggtgtgcctttgaagttccgtggcgtgcagctctcccttcacgaggtgcctccggaacgaaggtatacgtgggggcgtggggcgcaggtctcgagaaggccacagggggggacgcctctgtagaggctttagaggccaagcttgggtgtgcgctcccgagagcttgttgggaacagatggcgcagcctgtgggacatttccaaagagcgggggatatactcttatataatcgcaacggctcttagagctcaagaggttctccgtgacacataggccacagggacaggaacagatttttccgcggggtgatgtgggtcttgtggaagggaggagattcggttccccgggaagttccggggaacacgtttttcggccccagatatgtggcggtaaaaccgggcgacagaaagaattagtgtcgggccacatgtgatgcccgggagaagattgcagatcttgggccggattcccgagtaagcggccttggaaagcaaccttttagtgtctctcgagcgcatcaggtcggggggggaccccaaggaacaaaggtcgagcagatttaaagacccccaggttacaaggggccacatggttgcccacgccggaaagttacagggggggaaaaaattcgctttaggccgccgggggaatggtgtgtgcttgttatgaaagtaagccaaaatctgggtgccacaatggtataaaaacgctgtagggacaacgctagaaagaaaaaaaatttcacagaacacgctaacaaatgtgggcaccttgggc

SEQ ID NO: 483352 - DNA, 912 bp, Homo sapiens
tacccttaagggaggaattttggatgcaaatgtttggcccctatggcgttggaggcccaatactttgcaataaccccgataccaaggtggcttatggcggtttccagcagcagcaggtagcttatggcagtggcagatagattttaaataggaaccaaagcttatacaggacgtaggagagtccagagtcattggacagggaagcttatacaggttatccaccagaaattgtgtgaacttctatgccaagtcacatgtgtgttggcactgggcctagctgtctaccaaacgtaacgaacatggtgtttagactaaataactccaatgtgctaatgggcacacaaaatctcgaggactgtaatttgtcgagctaacattgtactaaccaggtttattctctagttctcctggtctgtggaaagtgtaagcattccacatagggtttttatgtagattttttttttcagcacccgcagtgactgttagtactgtgctaaaagtgtaacacgatcgtagtatcggtgatcagcatcgaagtcaaactgtctctatttaaaatgtgcattgtgtagaagctagtctacatcttaaggccatcttggagtaagagatttccccaacaagtcgatgaagttagaattccttaccagaggtgatgccagggttatactcttggaaatttatagtacaatcctgcttgggtggagaagccacttgtcttcggacaaccttggtgtagttgaactgatagttatctcgatctgtgaccatgaagttcaccattataagggattacccaagcataaatccatggaagtgccttataaaatgtgattgttggcagcaatcctatgcaatatatctaaagttgaagtaatggtaccagataaaattcatagatgggaatgaagc

SEQ ID NO: 483353 - DNA, 665 bp, Homo sapiens
cggagccaaaggtactgtgaagttcctaaacatgtctctgccactctttgtctaaactatgtaacgtagatgcagctgactttgcctgtagccacatagaacccatcccatggctgcagaggaagcttgcggtggctctccagagaccagaggcatagtgaggtcccagggaggcttcctctgtcttgcaacagatatttgtgatctttctctatgtgcctattgtcacaacagagtccggcagcgacttctcttgagggagcaatttggagactagctggaacccagacgttcgccctggatgccatcctttatcatccacagcaatcccatctggttggtagcactgctatgggactcacactgtccctcctctatcctagggagcctgaggcccaggggtggaaagatccagttgcgagtggtgcgaagtgaaccgctcaggataatgaaagcaactagcttttgaaatgacctaccgatacccgatgactgagactgagactatctcagactgtcttctggcttatgtcagaacactccctgtactagaagtaccgcggtgatggtggtaatggctgtgtagacccttactccaatggggtaaagcactttaagttttggccgtccaatgccgttccacctttaaggagcatccggcctgt

SEQ ID NO: 483354 - DNA, 422 bp, Homo sapiens
taaaattggtttacctcaggatgattgatgtgcagagaatgggggaaggctaaactctgagacacagccccagaagtaggacagtcctcatcaagtgccccagtcccatggtgacagtgacaccctggtggcgagcccgagtgtgatggttcattgctgtgcgcattgcattggagtgactgaacaacaaggctgtcaccaaatcccacacattttattaagaaatgtttcctaagggagcatttttggactgtgttttaaaacctagtgaaccatgactcggagccagcagagtaggctgtgtctgtggacttgagcacaccatcaacattgctgttcaggaaatgataatttacgtccattccaagttgtaaatgctagtcttttatttttttttttccaataaaaagaccattaactta

SEQ ID NO: 483355 - DNA, 433 bp, Homo sapiens
cccgacatacagccctgactcaagtgagtccacctgcctggcctcccaaagtgctgggattacaggtgtgagccaccatgcctggcctcatatcatttataaataagagtaatttgactagttcctttccaatttggatgtctttatttcttccttatgtaatcgctctagctaggactttcagtactatgttgaataacagtattgaaagtgggcatccttgttgtgtttcatatcttagaggaaggcttttaatataatactaaatggggaaaacagtctgttatgggtctgttgtatatagctcttactgtgttaaggtatgttccttctataaccaatttttgagagtttttgtcatgaaaggatattgagttttatcaaatgctttctcaacatcaattgaaatgatcatatggtttttgtcttttat

SEQ ID NO: 483356 - DNA, 128 bp, Homo sapiens
tgcaactgcggacagccaagtctgtgacttgcacgtactcccctgacctcaacaagatgtattgccaactggccaagactgccctgtgcagctgtgggtagataccacacccccgacccggcacccgt

SEQ ID NO: 483357 - DNA, 1064 bp, Homo sapiens
aaactagcgtagttaggcctcgtttattgaagaggatgtgatctttttaatagggaggtgggaggaggatgtagggaggcatggtgggtgcttaattatcatttccaaggtgcaagtgtaattattcaaatctatacgtacatagttccaccattaggcacaagacaaaatactcatgctaagcaaaggaagagaaagacaaagacagtttagtgcatttactaaagcaacaaataattctccaaagaaggggatgaaaatgctagttcctttaagcacttacttgactgtaaagttggtccctgcttaaattcatacccatagtataagcgtcggtatgacaaccactgcagtgtgagcaaaggtgaatccgtgtgccatgcatggaacacctatgagaataccgaaacaccatcaacatccagccttgcttgatggaagccacacacgctgccagcccaaaagagtctgaacgcagaacgatgggctcggactctttaggctggcaaggctaggaacacacagtgaaccattcaatgtcacttgtgaatccgtaccctgataaaggtgaatacaacacattgtagaccaaaaaacaatcaggctttatacacattatcagggaaatactgaatgtacattgctaaataaagattgtatgaaggaaacaattcatctgtatggacagttacactcatattttgcttgtgttctcgttttcatcctactcaatgaatgagacaaatcaactggagcatattcatcttcatgtgcacaatgacaacgattctatggaggtggcaaaagatattttcaacaacatcaagacaagcataaggacacagaacgaagagcaaaaatatatgaacaaataaaatcgaaaagtacacaagcaaaaaggaaaaaaaaaaaaaaaaggaaaagaacacaacgaagacccagaaaggaatcaagaggggcaaaaaagagtagaaggagagacagacaagaaaaacaaaaggagacgaacaaaaagacgcaagaagaaaacacaaagcacgaggaacaaacccaaaaaagacaag

SEQ ID NO: 483358 - DNA, 246 bp, Homo sapiens
tctgctggataggaaggtgtcatccagcttcactgatgtggtcccctgaagtgtgcaaatgagggaggctcaccgtgctaaggatgagacgagtgctagtgatggagaggagagcagtctccggaagctcatctatcccttctccccttcataactcaagggtcatgccccttcctgatcttctttcttgactctgctctgtgctgcctcaccagccagctataccctgagctacctcctccagcc

SEQ ID NO: 483359 - DNA, 338 bp, Homo sapiens
gaccccggacccggacccaaagtggtatgatgtgtagcttgtgagggatacgtgtttacagttggatgagccaaccgtggactagtggccacctatctactagtagccaacatccccatagctgccaactgtgtgaaagtagcataccctggcctagtagccaaccgtgaaatagcagccaaccgaatactagtagccaaccgtggactagtagccaaccataaactagtagccaaccgtggactagtagccaaccgtggactagtagccaaccgtgccctagtagccaaccgtgtattagtagccaaccatagactagtagtcaaccaagctctagt

SEQ ID NO: 483360 - DNA, 389 bp, Homo sapiens
gatgaatggataaacaaaatgtgatatatcccacagaagggaatcctgttccagctgtgagaaggaatgaagtatggacatgtgcctataatgtggatgtgccgttaaagacattatgcctaagtgaaagaagcccagacacaaagaccatacatttcacgattccacttacatgaaatgtacagaatagcctaaatctaaggacataaagtaggttagctaatgggtacaggtttcattctgggttgatgaaatgttccaaaattgattgtgctgatggttgtatttaaaactctgcatatactgaaaaccatttaattgtacattttaaatgagtgaattgtatgctatgtgaattatatctcaataaagttgttcaaaaaaaaaaa

SEQ ID NO: 483361 - DNA, 448 bp, Homo sapiens
  misc_feature (26)..(26): n is a, c, g, or t
  misc_feature (37)..(37): n is a, c, g, or t
  misc_feature (48)..(48): n is a, c, g, or t
  misc_feature (437)..(437): n is a, c, g, or t
ccttgaaaccgggtaaattgagagtntccccagtccnggggaacaagnaaggaaaaaggatgaagaaaaattaaccagagccctaggagacccggaggacattaaggcccctcaatacaccccctaaagagccgtcctcagagaagagagagaaaggggtagaacccatgatttgaagaaataatggtgaaactttgcaaatttgataaaaaatatcaatctatacatacaaaaagctcaatgaactccaagtaagataaactagaatagatctgcactgagatacatcataatcaaactgttgaaaatcaaagacgaatagagaatctcaaaagcagtaagagagaagcaacttattatatagaagaaatcctcagtaaaattatcaactgatttctcatcacaaaccatggagccaaaggcagtgtgatgacatngcaaagtgctg

SEQ ID NO: 483362 - DNA, 598 bp, Homo sapiens
agggtgcagtttggcataggccactcgtggtgggtgccgggtgcaagcctccagctcaccacgagtggcctatgccttacctgtcgccatagggtgcagatttgggatgtacgcgctctacagcaacgagatactgcctacgctcctgatgccctagactgtcaacgctatgcggcacacctatcttcaagtggacaatgcacgtcgaagcagctggcgtggagccagcgtgcgcacctggcgctcctcacctgcctaagagccgcgatccacgacgacgatgtgtgcagacgtatctgcagctgtcgttgcgtgcagggatgcttggcatcggtggcctgctgggggcgccccaccgcgaggcatggctcatggttgcgctcgtcgggagggcccaggagccgttggtgcgctatccgagctgcgtgcactggcaagcgcaccttgctaggccactggatccgccatcccacgggctcgttgacttgttcacaccctcgagcggcgcaccgcgtggtgcaagctaggtgctgacaacggatcgacgtcctgtgggcgcgcgacttggtgtctgccacacagtccgctgcgcccgcag

SEQ ID NO: 483363 - DNA, 653 bp, Homo sapiens
  misc_feature (593)..(593): n is a, c, g, or t
  misc_feature (606)..(606): n is a, c, g, or t
ccagcagctcacactgaagaagcatccttgcttgggtttgcagtcttctgcggcaggcattctcggaggaaaccagccaaggactaactacgaccatgagattggcagtgatttgcttttgcctgtttggcattgcctcctccctcccggtgaaagtgactgattctggcagctcagaggagaagctttacagcctgcacccagatcctatagccacatggctggtgcctgacccatctcagaagcagaatctccttgcgccacagaatgctgtgtcctctgaagaaaaggatgactttaagcaagaaactcttccaagcaattccaatgaaagccatgaccacatggacgacgatgatgacgatgatgatgacgatggagaccatgcagagagcgaggattctgtggactcggatgaatctgacgaatctcaccattcggatgagtctgatgagaccgtcactgctagtacacaagcagacactttcactccaatcgtccctacagtcgatgtccccacggccgaggtgatacttggcttatggactgaggtcaagtctagggtttccagtttctgatgacatatcctgatncccagatgagggnctcacctctcaaatgaagagcggtgagtctaaggagtccccgatgta

SEQ ID NO: 483364 - DNA, 182 bp, Homo sapiens
  misc_feature (139)..(139): n is a, c, g, or t
  misc_feature (181)..(181): n is a, c, g, or t
ctctacggctggttggtgtaaggagtgtttcaccacacggagatgtggtcacgtaacttgtcaactttaacccaggatgtctcccttctaacttccccttagcaaccaagtcgcggcgcttggttccccagcaaccggnagacgcgtctgctgcgtggaaccgccgagttcccagcgcttna

SEQ ID NO: 483365 - DNA, 147 bp, Homo sapiens
gactctccaggcaggaagatgtactgccttccccgtatatgccatccttcctcagtgtatgctctatgagctagtgttattgccattgatcaggatggtgcctaaccaggctcctcgaattcctctgccagtctctgaatgacaaga

SEQ ID NO: 483366 - DNA, 406 bp, Homo sapiens
  misc_feature (207)..(207): n is a, c, g, or t
cgtcatcagaaactccgctgcagcagtcacaaaagataaaacacacaaccaccaggtcatcaccaactccactgccaggcacatgcgaaagagctgaaagcagggtctgaagagatttttacgcccacgttcacagcagctctattcacaattgcctagaggtggaaaccacccaagtgtccacccacagatgagggaaacacccanatgcagctgctccacactaacaaatattgtgcaatctttttttttttttttgggagacagagtctcgtcctgcgacccgggttgtgtgcacagccggggttgcacactcaggccgcaccatttgagccccctcttcgtgagaggcaggccacagacgggcccgagggccagtgcagttggcaccaggaggggggctcag

SEQ ID NO: 483367 - DNA, 1278 bp, Homo sapiens
  misc_feature (711)..(711): n is a, c, g, or t
  misc_feature (1278)..(1278): n is a, c, g, or t
ggtccagagcagagtcagccagatatgaccgagcgccgcgtccctgttctcgctcctgcggggccccatgctgtggacctcgctttctcgcgtagctggttacctcgcattatgcgcgccatcttcgtactcaggaccttctggggctgcctcctgtgcttgcacggaagcgactgcgtggcacgcctggttatgtgcggcatgccatgctggtgccaggtgctacctgtgcgaccctccatgcacccgccagtcggctctatcggatgaggccgccggcagctggaccgtcgccacgcctacgatggtctgtcgctgcttcacgtccaggctagatcgtcaagcatgtcggtgcgtctcggcgagataccggctacacttgcggagccgactgagctgccgtgtcctcgtggattgtcgagaccatccgttcgccacccggaacgagggtctgagacggtcacaggacctacagggaactggctgctgtgtggaggactcaccccgtgcgaatgccacgacgtgacgcgcgacaggagctgaagcacttggctatcacttctcccaggtcgtctttcatcgctggacaatacagtcgctggtcccaccggtcgtgtgtacgcccacccagagttgtgcctacctcccgtgtgccgcctgcagaggcacatctagaccagtggacggccctccaatgcccataggcatagngcagcgtcgagtccaaccgagaatcatcatcaccagtcatccttcgtagtcagcagggcccagtcttggggggcccaggaagctgccaaaatccgatgagactgtcgcgccagtaaagccttagccctggatggccacccttgttgtcgccatgggtgtgtctccatgaccacctgtgtgtccttcgctacgtgtatcttcctggtttctcacctaaagtcaacaggagtacaacaaagggaatgccgggaagttctcaccagaaatatcccgggcttattgactcgggagaaaaagggttcagaagcggccactaagtcctgctcccctgctttgtgataacctgtggaaaatcgcgccccaatataaggggggacaaaattgaaagacagctgagagaagataaaagaagaagaagagggattcacagttaaaagacccaaaggaggacatgcacacaatgctaaagagaaacgtacctcagacaacactatgcagaacgacgacaaacgaccaataacataagagacgatcacacacgacgaatagcatactatcagacaagcn

SEQ ID NO: 483368 - DNA, 428 bp, Homo sapiens
tataacaaggcactcacaccgatgacgatgagattaactgtcacacttttaatgaaggttaattccaaagcaatgaccataatcacgccaaattttatcagtgggttcatgatgcgtcacctcgaaaagttagttgctggtcttcaaacactaagtggtagtcaaaccaatccgttactgcgtgtaattgatggctaatcatcaccacggtttggttttgcttggtggtcatgtcagcgatgacagctaacagttgtgcctgtgacgcactgtccaagccagccaagggttcatcaaataacaaaaccggcgtgccagtcatgagcatgagcaatacttgcagttttttttgttgccaccagataattggtaacgatgtgctcacgacatgactcaaattaagctgtaccaagatgtcattgagcaaa

SEQ ID NO: 483369 - DNA, 514 bp, Homo sapiens
tgacttctttcactctcgttgtctgatagctgccctgtgaacctacctcaccagctcttcctacttagtctaatttccagtcaccttttgaacttgaaaataaggcttacagacaaacagattacgcacatgacatttattttcaagttgcctactttttcaggccacttgtgtccatgggttaggaacatggaacttactggtaccctttgcactgggtctgtaacagtctcttccagatagacatgggcccgcagtaagacacattgatgaagaataccctgtgtttccctcctgctaattttctcatagtaatgcttttgttttatagataagaataaggtgagaaacttaggaagcctacgttaatatgccttctgttatatagtttttaatggccacacttggtggtttatatcggaacttgttttgttgttgttaaactctgtgataattcctgaaggaagtgggacaggtcttcacaggagggggagtgggggttgaactgtgcaca

SEQ ID NO: 483370 - DNA, 335 bp, Homo sapiens
  misc_feature (19)..(19): n is a, c, g, or t
acaaaaagggtttttttcncccgggcccctttttcccccgggggggggggggggcttttttgggaccccccccggggttttttttctttcccctcccccaaaaaaagggaaagggggtggccggggggggggggggcccccccccgggtttcggggggggggttttccccccctttttggcccaaaatttgacttttgggggggggggccccccccttccattgggcccccccagggggcgggttggttcctttccccccttccccgggccccccccggggtttttccagggggggggtaaagcctttttttttttttttttttttttcctttta

SEQ ID NO: 483371 - DNA, 229 bp, Homo sapiens
agagtgaaactccatcttaaaaaaaaaaaaggcccttacaagtgtggactgatggcaagataacaccccgtacaaggtggcactgaagataaaagataaaggttaggcctggcaataggcaacgtctgggatgccctatttttacctttacttccataatagaataaataggcctcatatggtaaggtgcggcagcacttttgtaaggcttaaactggggaaagcatct

SEQ ID NO: 483372 - DNA, 942 bp, Homo sapiens
  misc_feature (292)..(293): n is a, c, g, or t
  misc_feature (296)..(299): n is a, c, g, or t
  misc_feature (302)..(302): n is a, c, g, or t
  misc_feature (310)..(310): n is a, c, g, or t
  misc_feature (313)..(313): n is a, c, g, or t
  misc_feature (315)..(316): n is a, c, g, or t
  misc_feature (319)..(320): n is a, c, g, or t
  misc_feature (325)..(325): n is a, c, g, or t
  misc_feature (328)..(328): n is a, c, g, or t
  misc_feature (330)..(333): n is a, c, g, or t
  misc_feature (340)..(340): n is a, c, g, or t
  misc_feature (348)..(348): n is a, c, g, or t
  misc_feature (353)..(355): n is a, c, g, or t
  misc_feature (361)..(361): n is a, c, g, or t
  misc_feature (371)..(371): n is a, c, g, or t
  misc_feature (393)..(394): n is a, c, g, or t
  misc_feature (405)..(405): n is a, c, g, or t
  misc_feature (411)..(411): n is a, c, g, or t
  misc_feature (413)..(413): n is a, c, g, or t
  misc_feature (418)..(418): n is a, c, g, or t
  misc_feature (430)..(430): n is a, c, g, or t
  misc_feature (439)..(440): n is a, c, g, or t
  misc_feature (456)..(457): n is a, c, g, or t
  misc_feature (460)..(460): n is a, c, g, or t
  misc_feature (466)..(466): n is a, c, g, or t
  misc_feature (470)..(470): n is a, c, g, or t
  misc_feature (472)..(472): n is a, c, g, or t
  misc_feature (476)..(476): n is a, c, g, or t
  misc_feature (492)..(492): n is a, c, g, or t
  misc_feature (508)..(508): n is a, c, g, or t
  misc_feature (848)..(848): n is a, c, g, or t
  misc_feature (932)..(932): n is a, c, g, or t
cccggtcgactctttcgctccattccacaatgtcaactgtccccgcggcttcctgtacttcaacagacagggcgagctgaggatcagtgtcctgcctgcctacctgtcctatgatgccccatggcctgtcaggaagatcccgctgcgctgcacggcccactgtgtggcttaccacgtggagtctaaggtgtatgctgtggccaccagcaccaacacgccgtgtgcccgcatcccacgcatgactggcgaggagaaggagtttgagaccatcgagagagatgaggggtagatnnagnnnnagnaggagggnttntnnatnnaggtnatntnnnnggtgagntgggaggntattnnnaatggnaggatggagntggaggagtgggaggatgtganntggatgaaganagtgtntntgggnagtgaggagacngtgtcgggnntcaaaggctaggtggnngcngggacntggntnatgnagggggaggaggtcangtgccgagggcggatnttgatcatggatgtgattgaggtggtgcccgagcctggccagcccttgaccaagaacaagttcaaagtcctttacgagaaggagcagaaggggcccgtgaccgccctgtgccactgcaatggccacctggtgtcggccatcggcagaaagattttcctgtggagcctgcgggccagcgagctgacgggcatggccttcatcgacacgcagctctacatacaccagatgatcagcgtcaagaacttcatcctggcagccgacgtcatgaagagcatttcgctgctgcgctaccaggaggaaagcaagacgctgagcctggtgtcgcgggatgccaagcccntggaggtgtacagcgtggacttcatggtggacatgccagctgggttttctggtgtctgacgcgaccgcaactcatggtgtaatntactgcccga

SEQ ID NO: 483373 - DNA, 935 bp, Homo sapiens
  misc_feature (629)..(629): n is a, c, g, or t
gctttttccgctcggtgttttcctgcgcaggagccgcaggccgtaggagccatgggcccagccgaatgcatggtcttgaagccccacttccacaaggatggcagcggcgcgtggccaccgtgtttcaaccaagcgcggcccggtaagatccgcagttgagccctgcgcctcgggggcttgccccgtggggctccgttgcccggggttgcgccttggggtgggcgggggtggggcccgattgccaaggctggggggggggcgctgtgttcttgggaaacccggtcgggggaagggtttggccttggggggggccttttaagggcaggggcttgaccggcggcgggcgatttcgttcttcacaacaaagaaacgttagggccgggcaaaggccaaagggggcgcctggacggtaaattcggcccgcggcgacccgcggggtgtggggtgtctccccaaactgcgtgcccccagtcggtgggggctgggcccaccagtggggtgggcggtaccccaacacgcgaaaggggtggccgccagacacggcaagcgggcggacacaccaagccagggaaggggaagcacagggggggccggggcacattccaccaaaagagggggtggccgggganccaaatcgggcattctgttgggaaccaccgacggagggccggaacaccaaaggtccaaagaggagttccccgtgaggggcacaacgggggtcgcaaggcgggttcggacagcagagtcccgggccaaaaacgtcaattccttttgccacagaggagaaggccttgggacccccatagaagggggacacacaggtcgtgctggacagaaactggaacgtgggacaccaggcttgaccgcagcccggtgatgtgccggcccgggaagcgacaacatcaacaggacaaagcgcgacgacacccactgtg

SEQ ID NO: 483374 - DNA, 552 bp, Homo sapiens
  misc_feature (189)..(189): n is a, c, g, or t
gtttgtgttttggggcgaaaggcccagctcaccattgcctttggctccctgtgggcgccatgcctagggggcatatctttgtctgcctggaggaaaagccttgaacccgtggcaagttgggccgggcctcaggggaatatgcccccgtttttttcccccacccttgggccaaaaagacccgtgttaagntgccccccgggtcccaaaaggttttttccccccccccccaaactttggttgggttggggggtggggggggcccaatttcacaacccctttttaggggtggccggggggccccccaattttaggcaaaaagggacttttggccccgggttcgggggggggcccttattcctttggggccccctttttgggggggcccccccccgccctttggggagcccccccccctccccaaagatgccccttttggcccccaagtgggtttttttttttccccccgggttgggggtttccgggggacccaacttttgccggggaaaaagaacttgtttttggggccccctttaagttttttttttttcccca

SEQ ID NO: 483375 - DNA, 200 bp, Homo sapiens
gcataagaccctcttgtttaaaagagagtcaagtaggtaaccaaagccaagctcttttcaaggtgctttggagttgtaaattgaggagtgccatccttcctgtcttgacccattcttgtttgcaatggtgaagaccttcaataacctagccttgcagggcccgccacacacaccctggagtcctagagttggaggaccct

SEQ ID NO: 483376 - DNA, 177 bp, Homo sapiens
ttttaaaaaaaaaaaaagacaaatgtttttttaaaaaaaagcaccccccccccctgtttctgtatatagtcagcttatctcgtgttcaatcgtcttatctctacagagagaagtggaaaattctttttcaagggggggctttgctttccctttccaataaaggtgtgggaagcttca

SEQ ID NO: 483377 - DNA, 1427 bp, Homo sapiens
  misc_feature (1)..(1): n is a, c, g, or t
ntttcgacaggaagatgggatgggttgttgcacaccgccacaagaattggtggtgtacctctcccttctttcatagggtaacaatttgtgctaacgaggaggatgtgtcttaagttgtggacatagtaccgacacctcgtcgctcgacgatagatggtgggggggtacactctccccctcgccttccgtaggctgtttgtgtgtggggacgtcgcccccagatgaagtctctgcctgttttgtaggaactccgcctttgtggcgcacaacacacaatgtttggtcactcatggggcctttgtgtagtaaaatatttggtggcaagagtgtctcctccacgaaaaactatttatttgacgtgcgcggtgtggtgccttgtggcccaagtggagaagccgtgttggaaaaagtgttcctggtgagtggttcgtccctttatggtccactacctcccgtgggtggtgtattgatcctcagcccccctcttgtgagatcccctgtggcgaatactgcctcatcgtgggcagccgtctgccttctggatctgcctccctccctctctggcgttatggcggccgccttcccctgtctctcattgtgtcgatggccgcaagcctaatgcgtctagcaaggcgggcaatttcactccacgggagactactcccacaatagggagagagggtctttctctgagatgagcgccctctccccctttcacagagaaggatagagtgccccccggtgagccaccccccccccttgtgtagacacgcgggagagtttcgcgagtgaagcgaattttttcgaagaggagaggaaaccccaccacttcccccacatataggttcacctcgtggtgggccacattctataccacgctcttgtaaaggggtgtccacgcgcgagagggcgacactatattctctctatattggccccgagagggtggtaatagaccctccaagtgttttattggagaagaaagaccaaagggggagccgcgcgttggagccaccggtgtgcacagcgccgcgagataagaagggaaggccgaaggcgcgtgacacgtggcccacaccctccttacgctcgccgaagtcacacgcctcacaattgagacaccctcgccacgaagaccgggaaagaaggggggctttcggcttctgcttttgggccccgcgggggtcccacggagcctatggcacctttatatttttgaaccccgctggcttcggctgagagcccgtgtaacctcgctgccccctccacccccccaacccacgtcctatcctgtcaccacccggagcggagaccccctgtgccttttaaccactcgttccacccacttgatgtacatactcattttttacatcttttttttctgcccctctggctccggccctccttcgttttaaaccaaaatggga

SEQ ID NO: 483378 - DNA, 364 bp, Homo sapiens
atcaccgcggggggagaggttctatagggagctgagggtgcaatagcaccccagaccctcccaccaggctcaaggggctctaaagccttcacttgtggttgagagtcctccctccctcctgccctcttctcccgattagctgggattacaggtgcctgcctagcacgccccagctaattctttgtatttttagtcacagatggggtaacactgtgtaggccaggctggtcttgcaactcctgacttcaggtgatctacctgcctcggcctcccaaagtgctgggattacaggcgtgcagttaaaccaggcccagcttacctcattttcaattcagatagctgctctgagcagcagggacagaca

SEQ ID NO: 483379 - DNA, 249 bp, Homo sapiens
ggatgtagaaatccctcaaacacactgctgtgttctatgctagtgacactctcgatcgtagaattgtattacttgtggttgcagcgagccgagattgcgccactagcctggggtgacagagtgagacctgtctcaaaaaccaaaccaaaaaactgtattacttgtatgataaggaaaataatcaaatttgtgtatgtgggtgggtttgtttagtttttctgagacagggtcccactcatgtcgcccagg

SEQ ID NO: 483380 - DNA, 211 bp, Homo sapiens
tactgcccaacaatatttgcatgttgtagctcggcacacggaccattgaccatttcggtccattgttcttttgcgtaattcggtaaaaaatttgggacgttccagcaaaggatttttgcggatcccgtggcctcagccaaaacgcgatcattaaaagccaaccagctgatttccacgattgacataaattttggggttgtttcaatcaacc

SEQ ID NO: 483381 - DNA, 534 bp, Homo sapiens
  misc_feature (23)..(23): n is a, c, g, or t
  misc_feature (350)..(350): n is a, c, g, or t
tcaacgctttatacttcctcaangctatactttctcaacgctttatacttcctcaacgctctatactttctcaaggctttatacttcctcaacgctttatactttctcaacgctttatacttcctctagatagtcaagttcgaccgtcttcccagcgcagaaaggctgaaaattccaaaaaccagaatgcctcttctcctccaaaggatcataactccttgccagcaagggaacaaaactggacagagaatgagtttgatgaatggacagaagtaggcttcagaaggtggatattaacaaacctccccgagctaagggaacatgttctaaccaatgcaaggaagctaagnaccttgaaaagaggttaggggaatggctaattagaataattagtttagagaaaaacataaatgacttgatggagctgaaaaacacagcacaagaactttgtgaagcatacacaagtatcaatagctgaatcaactaagcaggagaaaggatatcagagattgaagatcaccgtaatggaatgaa

SEQ ID NO: 483382 - DNA, 407 bp, Homo sapiens
agagggttctggatctcgagcaagaaagaatacaggtccaagtgtaagcaagtttgttaggaaggtaaaggaaaaaaaaaaagaaagtaagggaagaaaagaagggctattccatagacaaagcagccctgagggctgtgggtggcccatttttatggttatttctggatgatatgctaaaccagggggattattcatgcctccccttttaagaccatagagggtaacttcctgacatcgccagggcattcgtaaccggtcagggcgctgataggagtatagtagtacggcataccagaggtctcttccagggccatctgggtttgggggggattaagccggcttatttacggcaaccggttttatcaccaaggtctttatgacctgtatcttgtgcctgccgaaat

SEQ ID NO: 483383 - DNA, 248 bp, Homo sapiens
attcggcaacatagtatacctgaatactgatcacgcgcagcttgaatgcacttacttactatgccgaccggcagtcgaaaacccaacgcgcgggatcagaatcgtagaatactgtggatgtcttgagggtcatgaggggtaccgccctagattgcagcgttcgtggatgatgctggtgtgaccagcatttactatgttggttgtaaaacaatgcttttctgactccagtattctctccacattcgtaa

SEQ ID NO: 483384 - DNA, 785 bp, Homo sapiens
catgacccaatgcagcgcaactaggtctacaataaacgtctacttccccttatcatagaatgagcttcttcacctattcatgatcatcgacccatcagtaatcatttcttccttcatctgacatatcctacctcctgtatgcccttttcttaagaactcactaaaaaatactaatctaatagtaacatctcgagatcgtctcagcgaaataagtacaaccgtcatgaactatctctgcactctgccatcatccctagtcctcatcgccctcccatccctacgcatcctttacataacagacgaggtcaacgatccctcccttaccatcaaatcaattggccaccaatggtactgaacctacgagtacaccgactacggcggactaatcttcaactcctacatacttcccccattattcctagaaccaggcgacctgcgactccttgacgttgacaatcgagtagtactcccgattgaagcccccattcgtataataattacatcacaagacgtcttgcactcatgagctgtccccacattaggcctaaaaacagatgcaattcccggacgtctaaaccaaaaccactttcaccggtacacgaccgggggtatactacggtccaatgctctgaaaatctgtggagcagaccacagtgtcatgccccatcgtcctaagaattaattccccttaaaaatctttgacatagggcccgtatttaccctatatgcaccccatctaacccctctagaagccaaaactaaaaaaacaaaaaaaatatcacact

SEQ ID NO: 483385 - DNA, 460 bp, Homo sapiens
atggccggcggaaagagagcgaatggttttttttctggatcatgagctccatgaggaggaggcccagtgggtgaactatcatgaggatgagctgtgtgggaaagacgagccagccttctggatctttgacaccctgatcacacatactaatgaggttctgtgtccaattagagaaaatcagaggccaacgctactcgtgtagacatatagcaaaataagcgctctccgagtgctaatgattgtttctcacaaatataacctgcccctgcagaccaagctattatctcaccctgcacctatagggtagaaattgctttcctggacttgacaaccctgcctttatgattgggttaagaagttacagggggccttttccagagtttaaaatgacggcccctttttttcccaaattaaaaagcccaaaaatttcacgttttggcaggaggctgtttaagatatc

SEQ ID NO: 483386 - DNA, 176 bp, Homo sapiens
tcataaggcaggatgaaaggactgtgaaccttcgtgtttgataccagtctgggctacatggcaaaaccctccctctaggttcaaaaaaaaacaaattagccagacatggtgtcatgcacccgcaggtcccatgctacattgtgaggctggggcacggagaatcactctgatcccag

SEQ ID NO: 483387 - DNA, 383 bp, Homo sapiens
ctgtgcgtacagcgccgggctcaaccccaacatcgacgcgctcagatggcgctggtatatgcgcaggggatgttcgaaaacgcgcagggcatagacatccgcagctcgtacctgaacgagctactgcagaagttgcgccagctagcgtacacgagctgatgatgtgcttgacgagctggtgtacttccgcatccaggacgcgcttgaaggcacctaccatgccactgccgtttatgatccaggctgcaatcgacggccttgttgtccacgttccccacatcgctaaagatgtcgccagtacactcaagctcccctcatgctcatgtgctgctagcagtggtgatctcgacgaacgagaaaatggtggcacacagggatgcctc

SEQ ID NO: 483388 - DNA, 180 bp, Homo sapiens
tgtcttacggctacggagtgtaaacctacttttatctgcactgggaaaccaaaaaatcatgttacttactttattgtgatatttactttattgcagtaatctgaaactgaacctgcagtgtctctgaagtatgcctgtgcatattgtgatatgattaccacaataagtttagtttagatc

SEQ ID NO: 483389 - DNA, 255 bp, Homo sapiens
ggtcagcgagagtcgagactgccttcatggcagctccgtgtctgggtgccccgggtcaggtgggtgggtgggggccatcttgccctgagcacaggctgggagggagtggagggatgagcaggatgggatgggctgtccctcgggtttggtatatttgctcctagagcagcccaggaggcacggtggctctgaagcatcactcacttctgtcccgttcttgacagcgccattcgcgaacgatttcccagtgcttca

SEQ ID NO: 483390 - DNA, 293 bp, Homo sapiens
ggtcgacaacttttgggccaggcatggtggttcccgactgtaataccaacactctaggaggctgaggtgagaggatcccttgagcccaggagtttgaaaccaacctgggctacatggcaaggctccctctacaaatgtaaaaaaaaattagccaggtgtggtggcatgcgccatgtagtcccagctacttgggaggctgaggtggaggactgtttgagcccagaagttcaaggttgcaggagctaggatcgcaccactatacaagcctgggtggcagcaagaccctgtttaaa

SEQ ID NO: 483391 - DNA, 339 bp, Homo sapiens
  misc_feature (86)..(86): n is a, c, g, or t
tctctaccgcacgctaagggggttgaggcgtacatccagggggcaagacaggaggaacggactaaggcatcgaggcatccgggagngcagaaggatgtccctagtagccacagacgtttgctccaaggcctgtacttccctgtcatccagcacgtcatcaattatgacatgccagaggagattgagaactatgtacaccggattgggcgcaccgggcgctcgggaaacacaggcatcgccactaccttcatcaacaaagcgtgtgatgagtcagtgctgatggacctcaaagcgctgctgctagaagccaagcagaaggtgccgcccgtgctgcaggtg

SEQ ID NO: 483392 - DNA, 128 bp, Homo sapiens
cctggccaggtcctggccaaattcgatgtcgaaacccgtcaggtggtcgtcttgtttgaatgcgtacggcgaattatcagcctgtacggcaatgcgcagttcgccccggtcggcgatttcgtcgatca

SEQ ID NO: 483393 - DNA, 100 bp, Homo sapiens
gtcatccctgtcatttcccacacccaattcggcttcttcctcttcgcaaaagaggggccacctcattagatcactgaaccaggaactttttgcacaaatt

SEQ ID NO: 483394 - DNA, 350 bp, Homo sapiens
  misc_feature (103)..(103): n is a, c, g, or t
  misc_feature (147)..(147): n is a, c, g, or t
  misc_feature (183)..(183): n is a, c, g, or t
  misc_feature (246)..(246): n is a, c, g, or t
  misc_feature (259)..(259): n is a, c, g, or t
  misc_feature (308)..(308): n is a, c, g, or t
  misc_feature (316)..(316): n is a, c, g, or t
tagtagacacggggtttcaccatgttagccaggatggtctcgatctcctgacctcgtgatccgcccgcctcagcctcccaaagtgctagggttacaggcgtgngtaccagatatttttaatgatttaaaaagtgaaaacagcatatnatggttctctaaatatataccatttccattgctctntctgcattcctgaagttccaggttccctctggtatcattcccttcaggctaaatacctgtctntagcatgggcttntaaagttggcaggtgaagcactttggggaggccaaggcgggcagatcangttgaggncaggagtcaagaccagtatggccaacatgggaag

SEQ ID NO: 483395 - DNA, 785 bp, Homo sapiens
gcgccactcgggagaggctgggtgaggcgccgtgtgagactgaccctggatcctcgaaatgcattgtgatcattactctgctctttggaaatggctgtatcattattggtactaatgtgaattgttcctcagaaacgcttcttttccatcctaggtgagaagctggccctgcaggtggtggcagcaatggtgtgtaagatttctctcccgtagttatattctcctcatggatttgactgaaagtgccaataacacgtccactttcaacgtgtagtttacgcggagcactttcgaggcctggcgggattgggcctacttctcacctgggcctatcttctgaactcgctaggttcttatcaacattggagggataacttcgtatatgttttcattgggcatatttctttaccagtttctgattattattctcaatatattttgctaaacctatttcacaaatcaccaccgactgaagtgtgtgttaactgactgcggacctgagactccactggcgaacggagtgactttgcaggacgtgagaccgcagtctgctaacagcacaggcacagtgacacaataagggagccccgacaagggcgctgcaggccccggggaccccagacacgtaggagtctaaagagaagacggagtctaggctctcatgccacccagaagtggccaccacacacagaaatcagcggggcctggtcgatcgacgaagcacacacacggagaacaccagctgcacctgccaaggaccgaccgcaaggtgaagcaccagcaga

SEQ ID NO: 483396 - DNA, 381 bp, Homo sapiens
aagagggaccagtgttacagatggctgtaaatgacgagttgagtccttcagtgtctcctaatactcgcaggtccacctcagaccgcaggtcttcataagctgagatgatcagctggagaatgattccggagtccttctgaagtagacctactcgagctccaggaataagttttgcgtgattcttatataaatgaacttggtcttgggttacagcgaagatcaataacacgttggtttgtaccagtttatcaatgaggtgtccaattggtggatattccaagacaggtgacatggagtattcattcttgctgcccaagtgacagagcccggcattaggaatgacgatgcctgcttgtttgctgtccattccaaaatgaggat

SEQ ID NO: 483397 - DNA, 1114 bp, Homo sapiens
aagatggacctgacaaggccaggcatggtggttcaacagcactttgagaggctgaggcaggatgatgcctgagcctgggagttcaaggttgcagtgaactgtgatcacatcctgccttctagcctgggtgacagagcgagaccctgtctcaaaaaaaaaaaaaaaaaaggaaaggaaatttttttttgaagaaaacttaaaggtcgatgtccccgatacacgttgaaagagagaggcaatgagacaagtatttgcagaagttggaagatacgagtttctggacacagggagatggatataaatatgtgtggactctgtgtattgtagtaaagaggctaaattattgagggtgtgacaaaaagtggggctgacggggaacactcattgcgcgtggagaggctccaagccatcacaaaacagagaacaaggcggccatgagtggaactcaaagcacgtgtgagaagggggcttatccagaaccgtggacaggctgcagagcacaatttgcaaaaagaacctacaaagagtgcaggcgccggacatctcacgagagaacaccgcagagcatgataacaagaggctcccacgagacagacaagagaaaagtgactcgggggaaaccgtaagaggcgagggagcgacaagaggcccagagcggaagacaaaagagggaggaagactcccacacgcggggggaaacaaacagggggggggtaagaaacaacaggggggggacatataagccgacagcggagggggagtggaacgaagaagacgcggcacaccaacgagagaaagtggccagaagggctgcggcgccacacatcgggcgtcgcagagagcaagaagaaaaggccgtgatcaaaaagagcaaggcgaaacaagggtgtatcgcatattgggagggagaagatacgtggtgtagagcgaagacccaccgccaccgatgaagcgagggagacccccggggtgggcaaagcagggaagaacgtactaccacgaaggagcggcaccacatacggtggggagcgacggagagaaaacaggaaaaccacacacgacgaaggatcgagtaggcaaaacggcgacgaggcgagacaaaccaggagacagc

SEQ ID NO: 483398 - DNA, 654 bp, Homo sapiens
actgctctgtacgccgccatggcccaatgctgacatctgctgctgatctggattggccgtcatgggccagaacttaacttctgaacatgaatgaccacggcatttgtggtctgtgctttaatatgtgactgtctccaaagttgatgatttcttggccaactgagtgcacagggaaccaaagtggtgtgtgcccagtccctgaaagagatggtctccaagctgaagaagccccggcggatcatcctcctggtgaaggctagggcaatgctgtaggatgattatcatcgatgaaattggtaccattgtaggatactggtgacatcatcattgacgtgaggaaacttctgaatatagggacaccacaagacggttgccgagacctcaaggaccaaggggaatttcatttatgtggggagcggagtcagtggtggagagtgacggggcccggtatggcccatcgctcatgccagtgagggacaaagaagcgtggccccacatcaagagcatcttccaaggcattgctgcaaaagtgggcacttgttagaaccctgctgtgactggggtgggaagatgagggaagcatgtccacttcgttgaagcataggtgcccaagggcaaatgagactggggacctgcgctgatctggagggcgaa

SEQ ID NO: 483399 - DNA, 802 bp, Homo sapiens
gttgccttaattatcgtcgcttcttctgttctcctcgttccggttagttgcccccgccctcgttttttttcttcggctcccccccccgtgggggggtgcacccccccgatatatatttcgtcccgacatactcgtggggggcgcctcttcggggcctcttttggaccacctgtgggggacaccccgcttgtcctctgtggacccgtgggggtgtctttgccccccttggtctctgccccgcccctggggggaccaccaaaccgcagcggtggttctcaccagagtgccctccccccctggggtgcacactcgcccctcatgcgaggtttcgtttacctctccgcgcgggtgcaccacccccacaaatgtgtctcactagttccgggcatattccccgccgcgttatactccttcctctccgatatgtctcgtctggtagtgattccccgcgctgtggttgacacacacgcgccccctttgtttctctggggctgagagaccacatcccccctgtcccactctttgtgtgattgagatctccccccaatagtttctctccccccgcgggggttttaatatttgtcctagcccggcaatatgatgccccggacgttgctccagcgtctgcccctgaaaaaggaacgccctgaactgcattgcgtggagatagtctctgtcttctcctgcatatctctccgcctctcagccttctaccccacgtgataaaggcctcaccctcgcgcaccacgcctgaggaggaagcaagacactgttttcacgcagcgaaaaagacaacataaca

SEQ ID NO: 483400 - DNA, 183 bp, Homo sapiens
  misc_feature (83)..(83): n is a, c, g, or t
  misc_feature (133)..(133): n is a, c, g, or t
  misc_feature (160)..(160): n is a, c, g, or t
catcatggagaggattagattggcaagccttttctatgcttttccaatgctgctggaatcaatttattgaccacttctttcangtcatttgctgcacctctcgggcatgatttcatcatcttcttccggattnggcggacctggtggtgctgagcatgangtcttccgtatctgtggtgcgtt

SEQ ID NO: 483401 - DNA, 962 bp, Homo sapiens
ggaacgggagtgatcacacgtcggattgcgtgggaagatctggatctcgctattcaggtcacctagtcagaaaagctaagttagctgtatagtgagggatccaaggagatctgatcctgatggcaagaaccttccctgattacagaatctttgggatgatttcacaaaagttcatcttcattgcagataccgtgtcctgtctttctaggttgtatctcccacttcgaatccgttcatagaccatcccagaagatctataagatttcatctgggaaatcaatagtgagttggcttgagagatgggaaagaaggaagatcgtggttaggaataaaaagagggttgaatgagttccagaaagcgagggttctcaagctcgtgtgactaggcaagtactgtagaagaagagaatttcagaaagaaccgaactaggaagcaacatgcagagaagtaaaatgagaggggtctcctcaggaaagaagacaggtggtccacaggagaaaaatgcttgaaccaggtctcccaggaagatggggtggtcgctcgttgcgagtagaaccccccttcaggatccgtgaggaagaccagaaagaacaagcagaagatcctggaagacggagatggggcagtagcagcgaagagctcagcccctcggatgaaaagggccgggagaccccactgtggaaagtgaggaggcgttaagaaataggaatggaggttacagtgaatgattctgaagaaataaaaacgtggttggttgaggatggacttagtgagcatgaagaagcagtgttaaattccctgccaagaaaatgttatgcaatctggaggatatgcaatggcagaatggaggaatgttgatatcaggaattgggtaaaagtggggaggcaaaaatttgcgggattggacaatggtaaattgaagccaatggaaatttgaaacgaagatcagtcaggtggaaac

SEQ ID NO: 483402 - DNA, 943 bp, Homo sapiens
  misc_feature (635)..(635): n is a, c, g, or t
cagctccgagcttactaccatgacaacctgtagtcgaaccagttacctcaagataaatgtatatgcgcgatagtaggctttgaatacgcgtggcgcatatagcatatagttaccgcgtcacggggaaatgatgaatgaacattatgcgccagagctataagtatatcaaggagctatgccctataccttctgcatgaatgagattaactagaaactacattttgcaatggagcagccagtagtgtacgcaccccacgaaaactggattgacgctagcctagaggaacgagctaatagagcacacccgtctatgtagcgaaagagggggcagattatagtgtcgatggcggtacaataccatcacgtaccggagtcctggtgactcatgctggtatgtccgaagatatgaagtctctcagtgtcaaccttctatatgtgcccacagaagcctctaaatcccgttgtaagatttaagcgtgtcagtccaggacgaggagacaggctctctggaccacttaggacataaaaccttgtagagagagtagagatattctaagacagatagtatggctatgaagcagccggcagataagacagcgttcaaagcatctaagagccattatctaggaatatcncaaacatatgaatgaaatgctgcacgtccaatggagcgaattgtatcacccgtatagaaggaaccaaatgttagtgtaggtaccatgagacatttctcttcgcataagcctggttcgattaaccttgaactgccaatcgcggcgatatcacagacaacaaacgtctttttccttcatgtcaccaaacaggctgccctaaggagcacagagtaagaaacagaattaccgcgtgcaagaatcacttgtcggataagcgagggcgagtaacagacaaaaaagggcgcccaaacatcggggcaaaagaacag

SEQ ID NO: 483403 - DNA, 394 bp, Homo sapiens
ggtttcaccatgctggagtctcgctctgctctgtcgccaggctggggtgcagtggcaccatcttggttcactgcaatctctgcctcccaggctcaagcaattctcctgcctcagcctcctgagtagctgggattacaggcgtgcaccaccacacccagctaatgttgctaatatttttgtattttttgtagagatagggtttcaccatgctggccaggatggcctcgatctgctgacctcgtgatctgtccgcctcggcctcccaaagtgctgagattacaggtgtgagccaccgtgcccagccgaaatacaaaatttttagtattttttttttttttttgaaatggaccctgctctgtggcccaggctagattacagtggcaaaagcaggaag

SEQ ID NO: 483404 - DNA, 180 bp, Homo sapiens
  misc_feature (176)..(176): n is a, c, g, or t
atccgggaggggctgggggctgaagtgagcaagaaagctgtagctgtgtggggctggcaggatgttgaagactgctctagtgctctcacatggggactgggcccagatactagcttggttcacaccccagcccgagaagacgggtcctccagttccagttgactcttatcggtggnagcg

SEQ ID NO: 483405 - DNA, 120 bp, Homo sapiens
ggtgtgtatagggcagtctctttggccgacctttattgtggcaaatgttgtctgacttactgtttcaacaaaccagaagacaagtaactgtattagtttatacaagaccaagggaaaaca

SEQ ID NO: 483406 - DNA, 118 bp, Homo sapiens
gcaggcagttgctcgctgaggtcgttctatgagatcccccgtatagttttctctcttcttttcctttcctgaagtttcctacttctattccctaggtatcacttccccaaactaacta

SEQ ID NO: 483407 - DNA, 704 bp, Homo sapiens
ggcagaggtgggctgtagagcccaagtggggtgggagcgcgaagatggatagctgctgagcgaggagccgaagcgccaaaaatctgaaggtggaggcgccgtgaagcgctgaggtattctcgtgagaaccaaatgaccaaatcttggctgaagacaaacgagcaaggaactgtgtgatgaacttggtgaaaaaattcaagagtcgaagtatcatgctggtggctcatacgcacagaattgcaattaagagatggcgtcagtggatgagttcaactagaccacgacaaatgcagacaacattttttggatgcattgggatagataaatttggggagatcctgaaggagacaaagctgctggaaggccatgtggtatgctcattactacgagacagaagatgagcagccagacaggaacttgtgctgcggatgcatcactgggtggacagacaggtccctcatagctatatctaggctgctgcctaattgttgatagcaaggaagagaacatcttgatctggagaaagaacgggatgttggtagaaaaagcaagagatttgttatatagcagggtttttaacttattagtttactcgagagttcagtattatacggtgggtcaccgatgtcttctgaataatagcaggattttctactttgatatctatctgaggcgattattagtcagtgtctacatgggaatca

SEQ ID NO: 483408 - DNA, 124 bp, Homo sapiens
cctccccttataccccacgatcacatgcctcttttacacccaacccccatagtattgtggtgagtagaattcaactacgttacaaccccacgatcacaagggttggtgtaacaatagtgcacgg

SEQ ID NO: 483409 - DNA, 122 bp, Homo sapiens
  misc_feature (4)..(4): n is a, c, g, or t
  misc_feature (14)..(14): n is a, c, g, or t
  misc_feature (86)..(86): n is a, c, g, or t
gctnttcccagggntagtgatccgtgtatatattgcatcttcctaatggctctacagagattaagaagaaacaacaagatgtgctnggtttcctagaagccaacaaaataggatttgaagaa

SEQ ID NO: 483410 - DNA, 1289 bp, Homo sapiens
caaggtttgcagacaagccaggatgcacgctttatatgctctgtcgagcccagtttcgcagcctttcagccaacaacaggccagacgctggtgcgtgccagcttccacggctgacaacatgacgcagaaccatcgcactgtgggggcggctatgtgcaagctgtttcctaatacgctttggacccagacagcacatgcacggagactcagaagtacaacatcactgatatggctcccgacactcatgtggacccatggcaccaacgaagcgttcactgctcaatcttcacagcgtaccaacgggcaacgacacgtgctgcatcacaccaaggcacatcacgattgcaccacagggcactgcactgagctcttacacaacactgatacacacctggaatcagtgcagcgaccccagaacccaaccaacctcatgacggctgcaccgattcgcaccaaacaagcccagcgatgcgcagcgtccgagcatccccttggcaacgaacgactcgggcgcacctaccctgaccaaccacaaacgaacagatacacggaataccctgacatgcattcaacaacaccggacacacccagggactgacgccgcggaccaaagaatcgcgtgactccgcaccacgagctccacaggcgcacgacgacctgggggaaacagcccccgacgcatacgtacccgcaccccgcactgctaacgcaacgcccgagggacagggacgtgccagcagcatgggacagcagacgatgcgcaacgcgcacaagagcacacccgcaaccccgtgcagctcacaaggcgatgaactgaaacagaccccgggccagaatcgaccaacgccacgactaaaaaaagcaattagaatacaacccccgaacaaattgaaaacaccgaagcatacccacgcaaagcaaacaaccaaagcgcaagacaaaccacgaagatgctggccacgaagacacaggaagcaaagaacgagacacttcgaaaaaatcctcaaaacaccacacaggactagccgccaaagacggcacaaaccaaggaccacacagcaaaacacaacacgaaggacaaggaacagaacagacacaggagagaaacacaaccaaaacggaagcgccaagaagaagacaccacaatcagaacgagcacacaacaaaaagacatccccgcgccaaacgcactcaagaacaacaaaccaagaaaaaacaaaacaaagagagagagcaaagaacacagacacagaaagaagaatcacaaagcaccaaacacaaagccacac

SEQ ID NO: 483411 - DNA, 204 bp, Homo sapiens
aggaagtccccaatatggccctgggcatatctgttgtcccaagccaaagactaagaagtgctttgggagtaccttcctatgtgtccgtaccaaatgatagctcataaacctctagaaatggagcaaatctcttacaaaggagttcgcagaagtcttcagaaagactaaaatattggctcttcctgcaaaagaagagcactcggt

SEQ ID NO: 483412 - DNA, 301 bp, Homo sapiens
aaactcataaataaggaaaattgggagttcttatccatgatcatgaggtacattggagaagagttggctgggcgcagggctcatgcctataattcccagcaactttgggaggccgaggcgggtggatcatttgaggtcagcagtttgagaccagcctgacgaacatggtgaaaccccgtctctactaaaaatacaaaaaattagcccggcttggtggtgggtacttgtaatcccagctactcaggaggctgaggcaggagaatcacttgaacctgggaggcagaggttgcagtgagctgag

SEQ ID NO: 483413 - DNA, 4678 bp, Homo sapiens
gtttttcagggttctcaatggttacaagatagatcataagttgctgctgacaggaaccccattgcagaataatctggaggagctcttccatctcctgaacttcctcaccccagagagatttaacaacttggagggcttcctggaggagtttgctgacatatccaaagaggaccagatcaagaaactgcatgatttgctggggccacacatgctgcggagactcaaggcagatgtctttaagaacatgccagccaagacagagctcatcgttcgggtggagctaagccccatgcagaagaaatactacaaatacatcctgactcgaaattttgaggccttgaattcacgaggtggtgggaaccaggtgtcgctgcttaatatcatgatggatcttaagaagtgctgcaaccatccatacctttttcccgtggctgctatggagtcccccaaactccccagtggggcttatgagggtggggcacttattaagtcgtctgggaagctcatgctgctccagaagatgctgcgaaagctgaaggagcaaggacaccgagtgctcatcttctcgcagatgaccaaaatgttagacttgcttgaggacttcttagactatgaaggctacaagtatgagcgcatcgatggtggtatcacgggtgccctgaggcaggaggccatcgatcggtttaatgctcctggggcccaacaattctgcttcctcctgtccacccgagctgggggcctgggcatcaatctggccactgctgacactgtcatcatctttgattctgactggaacccccataatgacatccaggcctttagccgggctcatcggattggccaggccaacaaagtgatgatttaccggtttgtgactcgcgcgtcagtggaagagcgaatcacacaagtggccaagagaaagatgatgctgacacacctggttgtgcggcctgggctgggctccaaggcaggctccatgtccaagcaggagcttgacgacattctcaaatttggcactgaagagctattcaaggatgaaaacgagggggagaacaaggaggaggacagcagtgtgattcattatgacaatgaggccatcgctcggctgttggaccggaaccaggatgcaactgaggacactgacgtgcagaacatgaatgagtatctcagctccttcaaggtggcacagtacgtcgtgcgggaagaagacaagattgaggaaattgagcgagagatcatcaagcaggaggagaatgtggaccctgactactgggagaagctgctgaggcatcactatgagcaacagcaggaagacctagcccggaatctaggcaagggcaagcgggttcgcaagcaagttaactacaatgatgctgctcaggaagaccaagacaaccagtcagagtactcggtgggttcagaggaggaggatgaagacttcgatgaacgtcctgaagggcgtagacagtcaaagaggcagctccggaatgagaaagataagccactgcctccactgctggcccgagtcgggggcaacattgaggtgctgggcttcaacacccgtcagcggaaggctttcctcaatgctgtgatgcgctgggggatgccaccacaggatgccttcaccacacagtggctggtgcgggacctgaggggcaagactgagaaggagtttaaggcctatgtgtctttgttcatgcgccatctgtgtgagcctggggcagacggctctgaaacctttgccgatggggtccctcgggagggactgagtcgccagcaggtgttgacccgcattggagtcatgtctctcgtcaaaaagaaggtgcaggagtttgagcacatcaatgggcgttggtcaatgccggaactgatgcctgaccccagcgccgattctaagcgctcctccagagcctcctctcctaccaaaacgtctcccaccactcctgaggcttctgctaccaacagtccctgcacctctaaacctgctactccagctccaagtgagaaaggagaaggcataaggacacctcttgagaaggaggaagctgaaaaccaggaggaaaagccagagaagaacagcagaattggggagaagatggagacagaggctgatgcccccagcccagccccatcacttggggagcggctggagccaaggaagattcctctagaggatgaggtgccaggggtgcctggagagatggagcctgaacctgggtaccgtggggacagagagaagtcagccacagagtcgacgccaggagaaaggggggaggagaagccgttggatggacaggaacacagggagaggccggagggggaaacaggggatttgggcaagagagaagatgtaaaaggtgaccgggagcttcgaccagggcctcgagatgagccacggtccaatgggcgacgagaggaaaagacagagaagccccggttcatgttcaatatcgccgatggtggcttcacagagcttcacacactgtggcagaatgaggaacgggcagctatttcctcggggaaactcaatgagatctggcacagaagacatgactattggcttctggctgggattgtcctccatggctatgcacggtggcaggacatccagaatgatgctcaatttgccattatcaacgagccatttaaaactgaagccaataaggggaactttctggagatgaaaaataagttcctggcccggaggttcaagctcctggagcaggcgctggtgattgaggagcagctgcggcgggcggcctacctgaacctgtcgcaggagccggcgcaccccgccatggccctccacgcccgcttcgccgaggccgagtgcctggccgagagccaccagcacctctccaaggagtcgctggcggggaacaagccggccaacgccgtcctgcacaaggttctgaaccagctggaggagttgctgagcgacatgaaggcggacgtgacccgcctgccagccacgctgtcccgaataccccccatcgcagcccgccttcagatgtccgagcgcagcatcctcagccggctggccagcaagggcacggagcctcaccccacaccggcctacccgccgggtccctacgctacacctccggggtacggggcggccttcagcgccgcacccgtaggggccctggccgccgcaggcgccaattacagccagatgcctgcagggtccttcatcacagccgccaccaacggccctccagtgcttgtgaagaaggagaaggaaatggtgggggcattggtgtcagacgggctggatcggaaggagccccgagccggggaggtgatctgtatagacgactgactggatcccaggcctgcccttcacccaggccccgtccccgaggccgacccccagctcaagcgctggggcctgctgccagccctccaccttccccaccccttgggccatcactgggctaggaacccctttgcccctctctgcagctcctctcttcaagaagggccctttgtctttctccactcccacacacctttcccaccaagccttgaagactgtgctggtgagaagaagtctgggtgggagatggctggcagggtcttccaagtaccttcctcccacactgccaagtatacacaacttcccagtaaatggttgtggggaggaaagaggtggagcctccccagccgtttccctgcagaatcagctctgtctcatgtggaagtggagaatcagccttgcctggcctttaggaacttttgtggggaagagagctttgaagagaggagggggactttagagagggatgaaaatgagccctgggagggaggaagggacgaggaggggtggctgcatgttaccgtcccctacctctccccacgtggagggtggagcagttatgagggaggaagtcaactgctgttcagcctcagaataaaggtgccgttcactggctcagttacctcctgtgtaccggcatcttgtgttgggaatgttcccccctccctagggaccaaggaccacccctacaaaaagagtaatggttgggtgatactccctcaagccaaagaggagctccccaacctgttctagggacccaggtaacctagaagggtgggagagaatacaatgggccagatgtggtggaagcccagctctggggctcaggttcctggaagacttctactaccctccctcctcaaggcctggatacagactaaatttgtataagtcaggcaggggacctagtcagggtcttgggagctaccttgtcgttgggaccagagcaaaatagtggagggcaggctagggaaatgtgggcacatcccccctcccaggaggggccggggagagtggcagtttgcatggcgaaccccccacttcctctttgctgccccttcactttcttgctgcccctttcccagtctctcttcacacccactcctggtctgtcctgatcccctcttctgtatcaggtttattggttgtacatataaattatactttcctttcaaaaaaaaaaaaaaaaaaacaaaaaacaaaacaaaaaaaaaaaaaaccccgcgggccttttttttgggggggcggaaaaaagggctttaaaaagggccatggtgattttgttgtttcccccccccttttttgtcagggggaaaatcgcgggcccccctaaggaggcgaaaattaaaacggggtcct

SEQ ID NO: 483414 - DNA, 108 bp, Homo sapiens
gtatcagagacgttacagtgatgggatcagagttacagagcttcacgaccacctcagtgacaccgtgaaggaacgtccgagtcagaagtgtgggaagccaccgtggtg

SEQ ID NO: 483415 - DNA, 147 bp, Homo sapiens
tttatccatattgtgttccagaacaggacatcctccagactactactggcagaacaaggcttggattgcctcttgtgccacctgtctgtgacacctgagcagaaactccatgaaacactacatgccataatggcaaagtgagtggga

SEQ ID NO: 483416 - DNA, 3941 bp, Homo sapiens
gtttttcagggttctcaatggttacaagatagatcataagttgctgctgacaggaaccccattgcagaataatctggaggagctcttccatctcctgaacttcctcaccccagagagatttaacaacttggagggcttcctggaggagtttgctgacatatccaaagaggaccagatcaagaaactgcatgatttgctggggccacacatgctgcggagactcaaggcagatgtctttaagaacatgccagccaagacagagctcatcgttcgggtggagctaagccccatgcagaagaaatactacaaatacatcctgactcgaaattttgaggccttgaattcacgaggtggtgggaaccaggtgtcgctgcttaatatcatgatggatcttaagaagtgctgcaaccatccatacctttttcccgtggctgctatggagtcccccaaactccccagtggggcttatgagggtggggcacttattaagtcgtctgggaagctcatgctgctccagaagatgctgcgaaagctgaaggagcaaggacaccgagtgctcatcttctcgcagatgaccaaaatgttagacttgcttgaggacttcttagactatgaaggctacaagtatgagcgcatcgatggtggtatcacgggtgccctgaggcaggaggccatcgatcggtttaatgctcctggggcccaacaattctgcttcctcctgtccacccgagctgggggcctgggcatcaatctggccactgctgacactgtcatcatctttgattctgactggaacccccataatgacatccaggcctttagccgggctcatcggattggccaggccaacaaagtgatgatttaccggtttgtgactcgcgcgtcagtggaagagcgaatcacacaagtggccaagagaaagatgatgctgacacacctggttgtgcggcctgggctgggctccaaggcaggctccatgtccaagcaggagcttgacgacattctcaaatttggcactgaagagctattcaaggatgaaaacgagggggagaacaaggaggaggacagcagtgtgattcattatgacaatgaggccatcgctcggctgttggaccggaaccaggatgcaactgaggacactgacgtgcagaacatgaatgagtatctcagctccttcaaggtggcacagtacgtcgtgcgggaagaagacaagattgaggaaattgagcgagagatcatcaagcaggaggagaatgtggaccctgactactgggagaagctgctgaggcatcactatgagcaacagcaggaagacctagcccggaatctaggcaagggcaagcgggttcgcaagcaagttaactacaatgatgctgctcaggaagaccaagacaaccagtcagagtactcggtgggttcagaggaggaggatgaagacttcgatgaacgtcctgaagggcgtagacagtcaaagaggcagctccggaatgagaaagataagccactgcctccactgctggcccgagtcgggggcaacattgaggtgctgggcttcaacacccgtcagcggaaggctttcctcaatgctgtgatgcgctgggggatgccaccacaggatgccttcaccacacagtggctggtgcgggacctgaggggcaagactgagaaggagtttaaggcctatgtgtctttgttcatgcgccatctgtgtgagcctggggcagacggctctgaaacctttgccgatggggtccctcgggagggactgagtcgccagcaggtgttgacccgcattggagtcatgtctctcgtcaaaaagaaggtgcaggagtttgagcacatcaatgggcgttggtcaatgccggaactgatgcctgaccccagcgccgattctaagcgctcctccagagcctcctctcctaccaaaacgtctcccaccactcctgaggcttctgctaccaacagtccctgcacctctaaacctgctactccagctccaagtgagaaaggagaaggcataaggacacctcttgagaaggaggaagctgaaaaccaggaggaaaagccagagaagaacagcagaattggggagaagatggagacagaggctgatgcccccagcccagccccatcacttggggagcggctggagccaaggaagattcctctagaggatgaggtgccaggggtgcctggagagatggagcctgaacctgggtaccgtggggacagagagaagtcagccacagagtcgacgccaggagaaaggggggaggagaagccgttggatggacaggaacacagggagaggccggagggggaaacaggggatttgggcaagagagaagatgtaaaaggtgaccgggagcttcgaccagggcctcgagatgagccacggtccaatgggcgacgagaggaaaagacagagaagccccggttcatgttcaatatcgccgatggtggcttcacagagcttcacacactgtggcagaatgaggaacgggcagctatttcctcggggaaactcaatgagatctggcacagaagacatgactattggcttctggctgggattgtcctccatggctatgcacggtggcaggacatccagaatgatgctcaatttgccattatcaacgagccatttaaaactgaagccaataaggggaactttctggagatgaaaaataagttcctggcccggaggttcaagctcctggagcaggcgctggtgattgaggagcagctgcggcgggcggcctacctgaacctgtcgcaggagccggcgcaccccgccatggccctccacgcccgcttcgccgaggccgagtgcctggccgagagccaccagcacctctccaaggagtcgctggcggggaacaagccggccaacgccgtcctgcacaaggttctgaaccagctggaggagttgctgagcgacatgaaggcggacgtgacccgcctgccagccacgctgtcccgaataccccccatcgcagcccgccttcagatgtccgagcgcagcatcctcagccggctggccagcaagggcacggagcctcaccccacaccggcctacccgccgggtccctacgctacacctccggggtacggggcggccttcagcgccgcacccgtaggggccctggccgccgcaggcgccaattacagccagatgcctgcagggtccttcatcacagccgccaccaacggccctccagtgcttgtgaagaaggagaaggaaatggtgggggcattggtgtcagacgggctggatcggaaggagccccgagccggggaggtgatctgtatagacgactgactggatcccaggcctgcccttcacccaggccccgtccccgaggccgacccccagctcaagcgctggggcctgctgccagccctccaccttccccaccccttgggccatcactgggctaggaacccctttgcccctctctgcagctcctctcttcaagaagggccctttgtctttctccactcccacacacctttcccaccaagccttgaagactgtgctggtgagaagaagtctgggtgggagatggctggcagggtcttccaagtaccttcctcccacactgccaagtatacacaacttcccagtaaatggttgtggggaggaaagaggtggagcctccccagccgtttccctgcagaatcagctctgtctcatgtggaagtggagaatcagccttgcctggcctttaggaacttttgtggggaagagagctttgaagagaggagggggactttagagagggatgaaaatgagccctgggagggaggaagggacgaggaggggtggctgcatgttaccgtcccctacctctccccacgtggagggtggagcagttatgagggaggaagtcaactgctgttcagcctcagaataaaggtgccgttcactggctcagtta

SEQ ID NO: 483417 - DNA, 3714 bp, Homo sapiens
agcggcaagttaaccccaggagaggtgccagtcagcagataatctgcaaacgaacgtattctcctcctcctacgaggatatgagcctcacgaaataatcttttcatcctgaatctccctgccgcagtcgagctgccttccgtccaggtagggtcccctccccgcccgggtcccctccccctcccggtcccctcccccgcccgggctcatctctgtctccccctcccggactgcgtcctcgctccgccgggccctcctagccgccagcttgtgaatgagacgctcagtttctcaatggagccgcggggggctcgggcggccgcccgagcggagcccggctgaggcagccgcgcaggtcgcagggccagcgtccgcgaggacggcccggctgggcggccccgagctctgtggcgctgtggaggagcgggagcgcggccgaggaagcggggcgccgagggggtcggcggccttcgggaaatttccgccgacccttcgctcccggctctaaaagttcctgatttcctatttccttttaaatcccgagtggctgttagctcttcgcctgcactttttcttccccaggagataagggggagtgtgaggaacggagcgaataatataaaaaaggatttcctcccggaagagagcggcagttcggagagatttttcttaaggaagcagaagcggcgtttgcggccgctgcaggcgccgggccctgccggccacactatgcgcgagccggccccgggctgctgaggcgcggggacgcggaagcggaggccgagcgcgccgggctcccgcgctcgcgagcgagttttgtccgcccggcggcggtggcggggggatggagcccgcgaccgcgccccggcccgacatggcgccggagctgaccccggaggaggagcaggctaccaagcagtttctcgaagagattaacaagtggacagttcagtacaatgtttccccgctgtcttggaatgtggctgtcaagttcctcatggcaaggaagtttgatgtgctccgtgccatagaattgttccactcctacagagaaactcgaaggaaggaaggcattgtaaagctgaaacctcatgaggaacctcttcgttctgagatcctcagtggaaaattcaccatcttaaatgttcgggacccaacaggagcctccattgccctctttactgccaggttgcatcatccccacaagtcagtccaacatgtggtacttcaggctctgttttacttgctagacagagctgtggatagctttgaaactcagaggaatggactggtgtttatctatgacatgtgtggttctaattatgccaactttgagctggatcttggcaagaaagtcctaaacctgctgaagggagcatttccagctcgtttgaagaaggtgctgattgtgggggcacccatatggttccgagtgccctattccatcatcagtctcctcctgaaggacaaagtccgggagaggattcaaatattaaagacatctgaggtcacgcagcatctgcccagggagtgtcttccagaaaacctgggtgggtacgtcaaaattgatctcgccacttggaatttccagttcctaccccaggtgaacggccacccagatcccttcgatgagatcatcctgttctccctccctcctgccttagactgggactcagtacatgttccaggtccccatgctatgaccatccaagagttggtggactatgttaatgccaggcaaaagcaaggaatctatgaggaatatgaagacattcgtcgtgagaaccctgttggcactttccactgttccatgtctccaggaaacctagagaaaaaccgttatggggatgtaccctgcctggaccaaactagagtgaagctaacaaagcgaagtggccatactcagacagattacatcaatgccagtttcatggatggctacaagcagaagaatgcttacattggcacacaaggtcctttggagaatacctatcgtgatttctggctcatggtatgggagcaaaaagtcttggtgattgtcatgaccacccgctttgaggaaggcggcaggagaaagtgtggccagtactggcctttagaaaaagactctcggatccgatttggcttcctcacagtgaccaatctaggcgtggagaacatgaatcattataagaaaacaacgctagaaattcacaacacagaggaacggcagaaacgccaggtgacccacttccagttcttgagctggccagactatggtgtcccttcctcagcagcttccctcattgacttcttgagagtggtcagaaaccagcagagtctggctgtgagcaacatgggagcacgctccaaagggcagtgccctgagccacccattgtggtccattgcagtgcaggcattggcaggacaggtaccttctgctcactggacatctgcctggcacagctggaggagcttggcacccttaatgtgttccagacggtgtcacgcatgaggacccagagggccttcagcatccagacccctgagcagtactatttttgctacaaggccatcctggagttcgcagagaaggagggcatggtatcctctggccaaaacctgctggccgtggagagtcagtaactctcctacgaacctcctacctgttggccagccttccttaaactaccctggacaccgctgagcctataggttgccatcagttacgctgaagccatggatcaacttctttcttgtgtctcccagcacacgtgtgcacgcaaggcagcctttccctttggctagataaatgtggtgaaattgccactagaaagggccagtagcaatgtgttcttaattcctagcatctgctatcaaactgtgccttattaaaaccaaattgtggctattgatttttgctagggtccccgaggtaagtggggaaggaacctccctcctcctttctcccgccattctttttctgaggtctcctgtctcccactccttccctttcctaggattttatggggaggtttgatgagcatttgcctttctccccagagagcttgaccaagttacatattctagagatcgtcctgagtgccaagcacgtttataagtagggcgtgtattccagtcctttctgtcattctgtgtgtgtgtgtgtgtgcacttatgtgtatgggtccatatgtacgtgtgtatataatatatattgtatgtgataatatgatcgtattctataaatacatatacacacgatactcctttccagaagttcctggggctccgtgttgcagttcaggactccttgcttctggtgggttctgtgtcaataaaaagcttcaccccctggctgagtgaggtggtcccctgcaatcactgtttgtcccctacccacccaacctgtccctgcctgctcccagcccactcatccttatgtgctagggataaatcaagagtcctcagcactccacattcccaaaaaatcccaggaactcctaaaccttcccctgtgacagaagatgaggttggcagctgatcagacctcaataattttatactgtaataagctctttgaatgtgtatattattattttttacaatcatttcattttgtatttaatatcaatggactgagtctgattcagaaaataattgtaatgttcatattcaatatcttacagtgatacagttttgtatttacatataaatataccgacatgatcaaaa

SEQ ID NO: 483418 - DNA, 199 bp, Homo sapiens
  misc_feature (117)..(117): n is a, c, g, or t
  misc_feature (146)..(146): n is a, c, g, or t
  misc_feature (187)..(187): n is a, c, g, or t
tgagtcaatctgggccttccacaggtcctctgaaccaagccccactcccttgctaggggtgaaagcattacagagagatggagccatctatccaagaagccttcactcacccttctncgtgctgctgttgcaacttcggctgttcntggactctgactgtgtgtggacgggactggggaatagaacnattgactggtgt

SEQ ID NO: 483419 - DNA, 3484 bp, Homo sapiens
gggaggagaataatgaggaggacggcagtgtgattcattatgcactatgagcgccaagtccgcatcgcggtgatcaggaccgggtaacgctcggatgccaactggaggggactacctgacgtgctcgaacatcaatcattctcatccagtctccatctcgaggttcgctcagtacgtctctgagtttaaaaacccttccgcgggaatattgaggaaattgagcgagagatcatcaagcaggaggagaatgtggaccctgactactgggagaagctgctgaggcatcactatgagcaacagcaggaagacctagcccggaatctaggcaagggcaagcgggttcgcaagcaagttaactacaatgatgctgctcaggaagaccaagacaaccagtcagagtactcggtgggttcagaggaggaggatgaagacttcgatgaacgtcctgaagggcgtagacagtcaaagaggcagctccggaatgagaaagataagccactgcctccactgctggcccgagtcgggggcaacattgaggtgctgggcttcaacacccgtcagcggaaggctttcctcaatgctgtgatgcgctgggggatgccaccacaggatgccttcaccacacagtggctggtgcgggacctgaggggcaagactgagaaggagtttaaggcctatgtgtctttgttcatgcgccatctgtgtgagcctggggcagacggctctgaaacctttgccgatggggtccctcgggagggactgagtcgccagcaggtgttgacccgcattggagtcatgtctctcgtcaaaaagaaggtgcaggagtttgagcacatcaatgggcgttggtcaatgccggaactgatgcctgaccccagcgccgattctaagcgctcctccagagcctcctctcctaccaaaacgtctcccaccactcctgaggcttctgctaccaacagtccctgcacctctaaacctgctactccagctccaagtgagaaaggagaaggcataaggacacctcttgagaaggaggaagctgaaaaccaggaggaaaagccagagaagaacagcagaattggggagaagatggagacagaggctgatgcccccagcccagccccatcacttggggagcggctggagccaaggaagattcctctagaggatgaggtgccaggggtgcctggagagatggagcctgaacctgggtaccgtggggacagagagaagtcagccacagagtcgacgccaggagaaaggggggaggagaagccgttggatggacaggaacacagggagaggccggagggggaaacaggggatttgggcaagagagaagatgtaaaaggtgaccgggagcttcgaccagggcctcgagatgagccacggtccaatgggcgacgagaggaaaagacagagaagccccggttcatgttcaatatcgccgatggtggcttcacagagcttcacacactgtggcagaatgaggaacgggcagctatttcctcggggaaactcaatgagatctggcacagaagacatgactattggcttctggctgggattgtcctccatggctatgcacggtggcaggacatccagaatgatgctcaatttgccattatcaacgagccatttaaaactgaagccaataaggggaactttctggagatgaaaaataagttcctggcccggaggttcaagctcctggagcaggcgctggtgattgaggagcagctgcggcgggcggcctacctgaacctgtcgcaggagccggcgcaccccgccatggccctccacgcccgcttcgccgaggccgagtgcctggccgagagccaccagcacctctccaaggagtcgctggcggggaacaagccggccaacgccgtcctgcacaaggttctgaaccagctggaggagttgctgagcgacatgaaggcggacgtgacccgcctgccagccacgctgtcccgaataccccccatcgcagcccgccttcagatgtccgagcgcagcatcctcagccggctggccagcaagggcacggagcctcaccccacaccggcctacccgccgggtccctacgctacacctccggggtacggggcggccttcagcgccgcacccgtaggggccctggccgccgcaggcgccaattacagccagatgcctgcagggtccttcatcacagccgccaccaacggccctccagtgcttgtgaagaaggagaaggaaatggtgggggcattggtgtcagacgggctggatcggaaggagccccgagccggggaggtgatctgtatagacgactgactggatcccaggcctgcccttcacccaggccccgtccccgaggccgacccccagctcaagcgctggggcctgctgccagccctccaccttccccaccccttgggccatcactgggctaggaacccctttgcccctctctgcagctcctctcttcaagaagggccctttgtctttctccactcccacacacctttcccaccaagccttgaagactgtgctggtgagaagaagtctgggtgggagatggctggcagggtcttccaagtaccttcctcccacactgccaagtatacacaacttcccagtaaatggttgtggggaggaaagaggtggagcctccccagccgtttccctgcagaatcagctctgtctcatgtggaagtggagaatcagccttgcctggcctttaggaacttttgtggggaagagagctttgaagagaggagggggactttagagagggatgaaaatgagccctgggagggaggaagggacgaggaggggtggctgcatgttaccgtcccctacctctccccacgtggagggtggagcagttatgagggaggaagtcaactgctgttcagcctcagaataaaggtgccgttcactggctcagttacctcctgtgtaccggcatcttgtgttgggaatgttcccccctccctagggaccaaggaccacccctacaaaaagagtaatggttgggtgatactccctcaagccaaagaggagctccccaacctgttctagggacccaggtaacctagaagggtgggagagaatacaatgggccagatgtggtggaagcccagctctggggctcaggttcctggaagacttctactaccctccctcctcaaggcctggatacagactaaatttgtataagtcaggcaggggacctagtcagggtcttgggagctaccttgtcgttgggaccagagcaaaatagtggagggcaggctagggaaatgtgggcacatcccccctcccaggaggggccggggagagtggcagtttgcatggcgaaccccccacttcctctttgctgccccttcactttcttgctgcccctttcccagtctctcttcacacccactcctggtctgtcctgatcccctcttctgtatcaggtttattggttgtacatataaattatactttcctt

SEQ ID NO: 483420 - DNA, 3340 bp, Homo sapiens
agcggcaagttaaccccaggagaggtgccagtcagcagataatctgcaaacgaacgtattctcctcctcctacgaggatatgagcctcacgaaataatcttttcatcctgaatctccctgccgcagtcgagctgccttccgtccaggtagggtcccctccccgcccgggtcccctccccctcccggtcccctcccccgcccgggctcatctctgtctccccctcccggactgcgtcctcgctccgccgggccctcctagccgccagcttgtgaatgagacgctcagtttctcaatggagccgcggggggctcgggcggccgcccgagcggagcccggctgaggcagccgcgcaggtcgcagggccagcgtccgcgaggacggcccggctgggcggccccgagctctgtggcgctgtggaggagcgggagcgcggccgaggaagcggggcgccgagggggtcggcggccttcgggaaatttccgccgacccttcgctcccggctctaaaagttcctgatttcctatttccttttaaatcccgagtggctgttagctcttcgcctgcactttttcttccccaggagataagggggagtgtgaggaacggagcgaataatataaaaaaggatttcctcccggaagagagcggcagttcggagagatttttcttaaggaagcagaagcggcgtttgcggccgctgcaggcgccgggccctgccggccacactatgcgcgagccggccccgggctgctgaggcgcggggacgcggaagcggaggccgagcgcgccgggctcccgcgctcgcgagcgagttttgtccgcccggcggcggtggcggggggatggagcccgcgaccgcgccccggcccgacatggcgccggagctgaccccggaggaggagcaggctaccaagcagtttctcgaagagattaacaagtggacagttcagtacaatgtttccccgctgtcttggaatgtggctgtcaagttcctcatggcaaggaagtttgatgtgctccgtgccatagaattgttccactcctacagagaaactcgaaggaaggaaggcattgtaaagctgaaacctcatgaggaacctcttcgttctgagatcctcagtggaaaattcaccatcttaaatgttcgggacccaacaggagcctccattgccctctttactgccaggttgcatcatccccacaagtcagtccaacatgtggtacttcaggctctgttttacttgctagacagagctgtggatagctttgaaactcagaggaatggactggtgtttatctatgacatgtgtggttctaattatgccaactttgagctggatcttggcaagaaagtcctaaacctgctgaagggagcatttccagctcgtttgaagaaggtgctgattgtgggggcacccatatggttccgagtgccctattccatcatcagtctcctcctgaaggacaaagtccgggagaggattcaaatattaaagacatctgaggtcacgcagcatctgcccagggagtgtcttccagaaaacctgggtgggtacgtcaaaattgatctcgccacttggaatttccagttcctaccccaggtgaacggccacccagatcccttcgatgagatcatcctgttctccctccctcctgccttagactgggactcagtacatgttccaggtccccatgctatgaccatccaagagttggtggactatgttaatgccaggcaaaagcaaggaatctatgaggaatatgaagacattcgtcgtgagaaccctgttggcactttccactgttccatgtctccaggaaacctagagaaaaaccgttatggggatgtaccctgcctggaccaaactagagtgaagctaacaaagcgaagtggccatactcagacagattacatcaatgccagtttcatggatggctacaagcagaagaatgcttacattggcacacaaggtcctttggagaatacctatcgtgatttctggctcatggtatgggagcaaaaagtcttggtgattgtcatgaccacccgctttgaggaaggcggcaggagaaagtgtggccagtactggcctttagaaaaagactctcggatccgatttggcttcctcacagtgaccaatctaggcgtggagaacatgaatcattataagaaaacaacgctagaaattcacaacacagaggaacggcagaaacgccaggtgacccacttccagttcttgagctggccagactatggtgtcccttcctcagcagcttccctcattgacttcttgagagtggtcagaaaccagcagagtctggctgtgagcaacatgggagcacgctccaaagggcagtgccctgagccacccattgtggtccattgcagtgcaggcattggcaggacaggtaccttctgctcactggacatctgcctggcacagctggaggagcttggcacccttaatgtgttccagacggtgtcacgcatgaggacccagagggccttcagcatccagacccctgagcagtactatttttgctacaaggccatcctggagttcgcagagaaggagggcatggtatcctctggccaaaacctgctggccgtggagagtcagtaactctcctacgaacctcctacctgttggccagccttccttaaactaccctggacaccgctgagcctataggttgccatcagttacgctgaagccatggatcaacttctttcttgtgtctcccagcacacgtgtgcacgcaaggcagcctttccctttggctagataaatgtggtgaaattgccactagaaagggccagtagcaatgtgttcttaattcctagcatctgctatcaaactgtgccttattaaaaccaaattgtggctattgatttttgctagggtccccgaggtaagtggggaaggaacctccctcctcctttctcccgccattctttttctggagtgaggtggtcccctgcaatcactgtttgtcccctacccacccaacctgtccctgcctgctcccagcccactcatccttatgtgctagggataaatcaagagtcctcagcactccacattcccaaaaaatcccaggaactcctaaaccttcccctgtgacagaagatgaggttggcagctgatcagacctcaataattttatactgtaataagctctttgaatgtgtatattattattttttacaatcatttcattttgtatttaatatcaatggactgagtctgattcagaaaataattgtaatgttcatattcaatatcttacagtgatacagttttgtatttacatataaatataccgacatgatcaaaa

SEQ ID NO: 483421 - DNA, 3746 bp, Homo sapiens
gtttttcagggttctcaatggttacaagatagatcataagttgctgctgacaggaaccccattgcagaataatctggaggagctcttccatctcctgaacttcctcaccccagagagatttaacaacttggagggcttcctggaggagtttgctgacatatccaaagaggaccagatcaagaaactgcatgatttgctggggccacacatgctgcggagactcaaggcagatgtctttaagaacatgccagccaagacagagctcatcgttcgggtggagctaagccccatgcagaagaaatactacaaatacatcctgactcgaaattttgaggccttgaattcacgaggtggtgggaaccaggtgtcgctgcttaatatcatgatggatcttaagaagtgctgcaaccatccatacctttttcccgtggctgctatggagtcccccaaactccccagtggggcttatgagggtggggcacttattaagtcgtctgggaagctcatgctgctccagaagatgctgcgaaagctgaaggagcaaggacaccgagtgctcatcttctcgcagatgaccaaaatgttagacttgcttgaggacttcttagactatgaaggctacaagtatgagcgcatcgatggtggtatcacgggtgccctgaggcaggaggccatcgatcggtttaatgctcctggggcccaacaattctgcttcctcctgtccacccgagctgggggcctgggcatcaatctggccactgctgacactgtcatcatctttgattctgactggaacccccataatgacatccaggcctttagccgggctcatcggattggccaggccaacaaagtgatgatttaccggtttgtgactcgcgcgtcagtggaagagcgaatcacacaagtggccaagagaaagatgatgctgacacacctggttgtgcggcctgggctgggctccaaggcaggctccatgtccaagcaggagcttgacgacattctcaaatttggcactgaagagctattcaaggatgaaaacgagggggagaacaaggaggaggacagcagtgtgattcattatgacaatgaggccatcgctcggctgttggaccggaaccaggatgcaactgaggacactgacgtgcagaacatgaatgagtatctcagctccttcaaggtggcacagtacgtcgtgcgggaagaagacaagattgaggaaattgagcgagagatcatcaagcaggaggagaatgtggaccctgactactgggagaagctgctgaggcatcactatgagcaacagcaggaagacctagcccggaatctaggcaagggcaagcgggttcgcaagcaagttaactacaatgatgctgctcaggaagaccaagacaaccagtcagagtactcggtgggttcagaggaggaggatgaagacttcgatgaacgtcctgaagggcgtagacagtcaaagaggcagctccggaatgagaaagataagccactgcctccactgctggcccgagtcgggggcaacattgaggtgctgggcttcaacacccgtcagcggaaggctttcctcaatgctgtgatgcgctgggggatgccaccacaggatgccttcaccacacagtggctggtgcgggacctgaggggcaagactgagaaggagtttaaggcctatgtgtctttgttcatgttcaatatcgccgatggtggcttcacagagcttcacacactgtggcagaatgaggaacgggcagctatttcctcggggaaactcaatgagatctggcacagaagacatgactattggcttctggctgggattgtcctccatggctatgcacggtggcaggacatccagaatgatgctcaatttgccattatcaacgagccatttaaaactgaagccaataaggggaactttctggagatgaaaaataagttcctggcccggaggttcaagctcctggagcaggcgctggtgattgaggagcagctgcggcgggcggcctacctgaacctgtcgcaggagccggcgcaccccgccatggccctccacgcccgcttcgccgaggccgagtgcctggccgagagccaccagcacctctccaaggagtcgctggcggggaacaagccggccaacgccgtcctgcacaaggttctgaaccagctggaggagttgctgagcgacatgaaggcggacgtgacccgcctgccagccacgctgtcccgaataccccccatcgcagcccgccttcagatgtccgagcgcagcatcctcagccggctggccagcaagggcacggagcctcaccccacaccggcctacccgccgggtccctacgctacacctccggggtacggggcggccttcagcgccgcacccgtaggggccctggccgccgcaggcgccaattacagccagatgcctgcagggtccttcatcacagccgccaccaacggccctccagtgcttgtgaagaaggagaaggaaatggtgggggcattggtgtcagacgggctggatcggaaggagccccgagccggggaggtgatctgtatagacgactgactggatcccaggcctgcccttcacccaggccccgtccccgaggccgacccccagctcaagcgctggggcctgctgccagccctccaccttccccaccccttgggccatcactgggctaggaacccctttgcccctctctgcagctcctctcttcaagaagggccctttgtctttctccactcccacacacctttcccaccaagccttgaagactgtgctggtgagaagaagtctgggtgggagatggctggcagggtcttccaagtaccttcctcccacactgccaagtatacacaacttcccagtaaatggttgtggggaggaaagaggtggagcctccccagccgtttccctgcagaatcagctctgtctcatgtggaagtggagaatcagccttgcctggcctttaggaacttttgtggggaagagagctttgaagagaggagggggactttagagagggatgaaaatgagccctgggagggaggaagggacgaggaggggtggctgcatgttaccgtcccctacctctccccacgtggagggtggagcagttatgagggaggaagtcaactgctgttcagcctcagaataaaggtgccgttcactggctcagttacctcctgtgtaccggcatcttgtgttgggaatgttcccccctccctagggaccaaggaccacccctacaaaaagagtaatggttgggtgatactccctcaagccaaagaggagctccccaacctgttctagggacccaggtaacctagaagggtgggagagaatacaatgggccagatgtggtggaagcccagctctggggctcaggttcctggaagacttctactaccctccctcctcaaggcctggatacagactaaatttgtataagtcaggcaggggacctagtcagggtcttgggagctaccttgtcgttgggaccagagcaaaatagtggagggcaggctagggaaatgtgggcacatcccccctcccaggaggggccggggagagtggcagtttgcatggcgaaccccccacttcctctttgctgccccttcactttcttgctgcccctttcccagtctctcttcacacccactcctggtctgtcctgatcccctcttctgtatcaggtttattggttgtacatataaattatactttcctt

SEQ ID NO: 483422 - DNA, 2412 bp, Homo sapiens
agcggcaagttaaccccaggagaggtgccagtcagcagataatctgcaaacgaacgtattctcctcctcctacgaggatatgagcctcacgaaataatcttttcatcctgaatctccctgccgcagtcgagctgccttccgtccaggtagggtcccctccccgcccgggtcccctccccctcccggtcccctcccccgcccgggctcatctctgtctccccctcccggactgcgtcctcgctccgccgggccctcctagccgccagcttgtgaatgagacgctcagtttctcaatggagccgcggggggctcgggcggccgcccgagcggagcccggctgaggcagccgcgcaggtcgcagggccagcgtccgcgaggacggcccggctgggcggccccgagctctgtggcgctgtggaggagcgggagcgcggccgaggaagcggggcgccgagggggtcggcggccttcgggaaatttccgccgacccttcgctcccggctctaaaagttcctgatttcctatttccttttaaatcccgagtggctgttagctcttcgcctgcactttttcttccccaggagataagggggagtgtgaggaacggagcgaataatataaaaaaggatttcctcccggaagagagcggcagttcggagagatttttcttaaggaagcagaagcggcgtttgcggccgctgcaggcgccgggccctgccggccacactatgcgcgagccggccccgggctgctgaggcgcggggacgcggaagcggaggccgagcgcgccgggctcccgcgctcgcgagcgagttttgtccgcccggcggcggtggcggggggatggagcccgcgaccgcgccccggcccgacatggcgccggagctgaccccggaggaggagcaggctaccaagcagtttctcgaagagattaacaagtggacagttcagtacaatgtttccccgctgtcttggaatgtggctgtcaagttcctcatggcaaggaagtttgatgtgctccgtgccatagaattgttccactcctacagagaaactcgaaggaaggaaggcattgtaaagctgaaacctcatgaggaacctcttcgttctgagatcctcagtggaaaattcaccatcttaaatgttcgggacccaacaggagcctccattgccctctttactgccaggttgcatcatccccacaagtcagtccaacatgtggtacttcaggctctgttttacttgctagacagagctgtggatagctttgaaactcagaggaatggactggtgtttatctatgacatgtgtggttctaattatgccaactttgagctggatcttggcaagaaagtcctaaacctgctgaagggagcatttccagctcgtttgaagaaggtgctgattgtgggggcacccatatggttccgagtgccctattccatcatcagtctcctcctgaaggacaaagtccgggagaggattcaaatattaaagacatctgaggtcacgcagcatctgcccagggagtgtcttccagaaaacctgggtgggtacgtcaaaattgatctcgccacttggaatttccagttcctaccccaggtgaacggccacccagatcccttcgatgagatcatcctgttctccctccctcctgccttagactgggactcagtacatgttccaggtccccatgctatgaccatccaagagttggtggactatgttaatgccaggcaaaagcaaggaatctatgaggaatatgaagacattcgtcgtgagaaccctgttggcactttccactgttccatgtctccaggaaacctagagaaaaaccgttatggggatgtaccctgcctggaccaaactagagtgaagctaacaaagcgaagtggccatactcagacagattacatcaatgccagtttcatggatggctacaagcagaagaatgcttacattggcacacaaggtcctttggagaatacctatcgtgatttctggctcatggtatgggagcaaaaagtcttggtgattgtcatgaccacccgctttgaggaaggcggcaggagaaagtgtggccagtactggcctttagaaaaagactctcggatccgatttggcttcctcacagtgaccaatctaggcgtggagaacatgaatcattataagaaaacaacgctagaaattcacaacacagaggtaaatccaggtttcttttttctcaccttgttgaaacagggggagaataattactgtaatgaaaatctccagagggaataggtaggataccagggaagttatgagttgcttctgtttttctagggacaggatgaggatatttaactcacagccagtatagccatattactgcagcacgataggaactaatatgaagtataaagcgttgag

SEQ ID NO: 483423 - DNA, 4370 bp, Homo sapiens
gtttttcagggttctcaatggttacaagatagatcataagttgctgctgacaggaaccccattgcagaataatctggaggagctcttccatctcctgaacttcctcaccccagagagatttaacaacttggagggcttcctggaggagtttgctgacatatccaaagaggaccagatcaagaaactgcatgatttgctggggccacacatgctgcggagactcaaggcagatgtctttaagaacatgccagccaagacagagctcatcgttcgggtggagctaagccccatgcagaagaaatactacaaatacatcctgactcgaaattttgaggccttgaattcacgaggtggtgggaaccaggtgtcgctgcttaatatcatgatggatcttaagaagtgctgcaaccatccatacctttttcccgtggctgctatggagtcccccaaactccccagtggggcttatgagggtggggcacttattaagtcgtctgggaagctcatgctgctccagaagatgctgcgaaagctgaaggagcaaggacaccgagtgctcatcttctcgcagatgaccaaaatgttagacttgcttgaggacttcttagactatgaaggctacaagtatgagcgcatcgatggtggtatcacgggtgccctgaggcaggaggccatcgatcggtttaatgctcctggggcccaacaattctgcttcctcctgtccacccgagctgggggcctgggcatcaatctggccactgctgacactgtcatcatctttgattctgactggaacccccataatgacatccaggcctttagccgggctcatcggattggccaggccaacaaagtgatgatttaccggtttgtgactcgcgcgtcagtggaagagcgaatcacacaagtggccaagagaaagatgatgctgacacacctggttgtgcggcctgggctgggctccaaggcaggctccatgtccaagcaggagcttgacgacattctcaaatttggcactgaagagctattcaaggatgaaaacgagggggagaacaaggaggaggacagcagtgtgattcattatgacaatgaggccatcgctcggctgttggaccggaaccaggatgcaactgaggacactgacgtgcagaacatgaatgagtatctcagctccttcaaggtggcacagtacgtcgtgcgggaagaagacaagattgaggaaattgagcgagagatcatcaagcaggaggagaatgtggaccctgactactgggagaagctgctgaggcatcactatgagcaacagcaggaagacctagcccggaatctaggcaagggcaagcgggttcgcaagcaagttaactacaatgatgctgctcaggaagaccaagacaaccagtcagagtactcggtgggttcagaggaggaggatgaagacttcgatgaacgtcctgaagggcgtagacagtcaaagaggcagctccggaatgagaaagataagccactgcctccactgctggcccgagtcgggggcaacattgaggtgctgggcttcaacacccgtcagcggaaggctttcctcaatgctgtgatgcgctgggggatgccaccacaggatgccttcaccacacagtggctggtgcgggacctgaggggcaagactgagaaggagtttaaggcctatgtgtctttgttcatgcgccatctgtgtgagcctggggcagacggctctgaaacctttgccgatggggtccctcgggagggactgagtcgccagcaggtgttgacccgcattggagtcatgtctctcgtcaaaaagaaggtgcaggagtttgagcacatcaatgggcgttggtcaatgccggaactgatgcctgaccccagcgccgattctaagcgctcctccagagcctcctctcctaccaaaacgtctcccaccactcctgaggcttctgctaccaacagtccctgcacctctaaacctgctactccagctccaagtgagaaaggagaaggcataaggacacctcttgagaaggaggaagctgaaaaccaggaggaaaagccagagaagaacagcagaattggggagaagatggagacagaggctgatgcccccagcccagccccatcacttggggagcggctggagccaaggaagattcctctagaggatgaggtgccaggggtgcctggagagatggagcctgaacctgggtaccgtggggacagagagaagtcagccacagagtcgacgccaggagaaaggggggaggagaagccgttggatggacaggaacacagggagaggccggagggggaaacaggggatttgggcaagagagaagatgtaaaaggtgaccgggagcttcgaccagggcctcgagatgagccacggtccaatgggcgacgagaggaaaagacagagaagccccggttcatgttcaatatcgccgatggtggcttcacagagcttcacacactgtggcagaatgaggaacgggcagctatttcctcggggaaactcaatgagatctggcacagaagacatgactattggcttctggctgggattgtcctccatggctatgcacggtggcaggacatccagaatgatgctcaatttgccattatcaacgagccatttaaaactgaagccaataaggggaactttctggagatgaaaaataagttcctggcccggaggttcaagctcctggagcaggcgctggtgattgaggagcagctgcggcgggcggcctacctgaacctgtcgcaggagccggcgcaccccgccatggccctccacgcccgcttcgccgaggccgagtgcctggccgagagccaccagcacctctccaaggagtcgctggcggggaacaagccggccaacgccgtcctgcacaaggttctgaaccagctggaggagttgctgagcgacatgaaggcggacgtgacccgcctgccagccacgctgtcccgaataccccccatcgcagcccgccttcagatgtccgagcgcagcatcctcagccggctggccagcaagggcacggagcctcaccccacaccggcctacccgccgggtccctacgctacacctccggggtacggggcggccttcagcgccgcacccgtaggggccctggccgccgcaggcgccaattacagccagatgcctgcagggtccttcatcacagccgccaccaacggccctccagtgcttgtgaagaaggagaaggaaatggtgggggcattggtgtcagacgggctggatcggaaggagccccgagccggggaggtgatctgtatagacgactgactggatcccaggcctgcccttcacccaggccccgtccccgaggccgacccccagctcaagcgctggggcctgctgccagccctccaccttccccaccccttgggccatcactgggctaggaacccctttgcccctctctgcagctcctctcttcaagaagggccctttgtctttctccactcccacacacctttcccaccaagccttgaagactgtgctggtgagaagaagtctgggtgggagatggctggcagggtcttccaagtaccttcctcccacactgccaagtatacacaacttcccagtaaatggttgtggggaggaaagaggtggagcctccccagccgtttccctgcagaatcagctctgtctcatgtggaagtggagaatcagccttgcctggcctttaggaacttttgtggggaagagagctttgaagagaggagggggactttagagagggatgaaaatgagccctgggagggaggaagggacgaggaggggtggctgcatgttaccgtcccctacctctccccacgtggagggtggagcagttatgagggaggaagtcaactgctgttcagcctcagaataaaggtgccgttcactggctcagttacctcctgtgtaccggcatcttgtgttgggaatgttcccccctccctagggaccaaggaccacccctacaaaaagagtaatggttgggtgatactccctcaagccaaagaggagctccccaacctgttctagggacccaggtaacctagaagggtgggagagaatacaatgggccagatgtggtggaagcccagctctggggctcaggtttattggttgtacatataaattatactttcctttcaaaaaaaaaaaaaaaaaaacaaaaaacaaaacaaaaaaaaaaaaaaccccgcgggccttttttttgggggggcggaaaaaagggctttaaaaagggccatggtgattttgttgtttcccccccccttttttgtcagggggaaaatcgcgggcccccctaaggaggcgaaaattaaaacggggtcct

SEQ ID NO: 483424 - DNA, 1623 bp, Homo sapiens
  misc_feature (1623)..(1623): n is a, c, g, or t
agcggcaagttaaccccaggagaggtgccagtcagcagataatctgcaaacgaacgtattctcctcctcctacgaggatatgagcctcacgaaataatcttttcatcctgaatctccctgccgcagtcgagctgccttccgtccaggtagggtcccctccccgcccgggtcccctccccctcccggtcccctcccccgcccgggctcatctctgtctccccctcccggactgcgtcctcgctccgccgggccctcctagccgccagcttgtgaatgagacgctcagtttctcaatggagccgcggggggctcgggcggccgcccgagcggagcccggctgaggcagccgcgcaggtcgcagggccagcgtccgcgaggacggcccggctgggcggccccgagctctgtggcgctgtggaggagcgggagcgcggccgaggaagcggggcgccgagggggtcggcggccttcgggaaatttccgccgacccttcgctcccggctctaaaagttcctgatttcctatttccttttaaatcccgagtggctgttagctcttcgcctgcactttttcttccccaggagataagggggagtgtgaggaacggagcgaataatataaaaaaggatttcctcccggaagagagcggcagttcggagagatttttcttaaggaagcagaagcggcgtttgcggccgctgcaggcgccgggccctgccggccacactatgcgcgagccggccccgggctgctgaggcgcggggacgcggaagcggaggccgagcgcgccgggctcccgcgctcgcgagcgagttttgtccgcccggcggcggtggcggggggatggagcccgcgaccgcgccccggcccgacatggcgccggagctgaccccggaggaggagcaggctaccaagcagtttctcgaagagattaacaagtggacagttcagtacaatgtttccccgctgtcttggaatgtggctgtcaagttcctcatggcaaggaagtttgatgtgctccgtgccatagaattgttccactcctacagagaaactcgaaggaaggaaggcattgtaaagctgaaacctcatgaggaacctcttcgttctgagatcctcagtggaaaattcaccatcttaaatgttcgggacccaacaggagcctccattgccctctttactgccaggttgcatcatccccacaagtcagtccaacatgtggtacttcaggctctgttttacttgctagacagagctgtggatagctttgaaactcagaggaatggactggtgtttatctatgacatgtgtggttctaattatgccaactttgagctggatcttggcaagaaagtcctaaacctgctgaagttaccctctagttctactgatttggagaaaccccagcactcctctatggagaatatacagcatctagaacaaacttctccaaaggcctcttcactgaagtgtgataaactactttcatcttttccttcaaagatgcaacaatttatttcaggacctaaatgtccaaggtccttttaccagcaaatcaaaaaccattctaggaaaacacctgttatttccacaaaataataaataaaaacggatgcggccagn

SEQ ID NO: 483425 - DNA, 484 bp, Homo sapiens
atgaaatctagaaagagatgacagcacaatgttctagtagcggaggtaactcagcagttgaggacgcgattcttaccaagtccagttgttattaagaaacgtattgaaggacttattgagagagaatatttggcacgaacacatgaggatcgcaaagtatacaaatatgtagcataaaatgcgttcagaaatttgatttattcttggactgtaatcttcgcatggaatgggaagttattttaaataattaaatattaagaagaaatactattatattaacttaaagtacatgttctagaacattgagatcaagcctttaatacatttgagagtttccaacataagttgattgagattaaggatttacaacgtatatccatgtagagatcatctttaaagttcctagggaaaatgtgaatgtgatgagttttgttttctttactgtatgaaaaaaggaaaataaaagagaaatttagaaaataaa

SEQ ID NO: 483426 - DNA, 4190 bp, Homo sapiens
gtttttcagggttctcaatggttacaagatagatcataagttgctgctgacaggaaccccattgcagaataatctggaggagctcttccatctcctgaacttcctcaccccagagagatttaacaacttggagggcttcctggaggagtttgctgacatatccaaagaggaccagatcaagaaactgcatgatttgctggggccacacatgctgcggagactcaaggcagatgtctttaagaacatgccagccaagacagagctcatcgttcgggtggagctaagccccatgcagaagaaatactacaaatacatcctgactcgaaattttgaggccttgaattcacgaggtggtgggaaccaggtgtcgctgcttaatatcatgatggatcttaagaagtgctgcaaccatccatacctttttcccgtggctgctatggagtcccccaaactccccagtggggcttatgagggtggggcacttattaagtcgtctgggaagctcatgctgctccagaagatgctgcgaaagctgaaggagcaaggacaccgagtgctcatcttctcgcagatgaccaaaatgttagacttgcttgaggacttcttagactatgaaggctacaagtatgagcgcatcgatggtggtatcacgggtgccctgaggcaggaggccatcgatcggtttaatgctcctggggcccaacaattctgcttcctcctgtccacccgagctgggggcctgggcatcaatctggccactgctgacactgtcatcatctttgattctgactggaacccccataatgacatccaggcctttagccgggctcatcggattggccaggccaacaaagtgatgatttaccggtttgtgactcgcgcgtcagtggaagagcgaatcacacaagtggccaagagaaagatgatgctgacacacctggttgtgcggcctgggctgggctccaaggcaggctccatgtccaagcaggagcttgacgacattctcaaatttggcactgaagagctattcaaggatgaaaacgagggggagaacaaggaggaggacagcagtgtgattcattatgacaatgaggccatcgctcggctgttggaccggaaccaggatgcaactgaggacactgacgtgcagaacatgaatgagtatctcagctccttcaaggtggcacagtacgtcgtgcgggaagaagacaagattgaggaaattgagcgagagatcatcaagcaggaggagaatgtggaccctgactactgggagaagctgctgaggcatcactatgagcaacagcaggaagacctagcccggaatctaggcaagggcaagcgggttcgcaagcaagttaactacaatgatgctgctcaggaagaccaagacaaccagtcagagtactcggtgggttcagaggaggaggatgaagacttcgatgaacgtcctgaagggcgtagacagtcaaagaggcagctccggaatgagaaagataagccactgcctccactgctggcccgagtcgggggcaacattgaggtgctgggcttcaacacccgtcagcggaaggctttcctcaatgctgtgatgcgctgggggatgccaccacaggatgccttcaccacacagtggctggtgcgggacctgaggggcaagactgagaaggagtttaaggcctatgtgtctttgttcatgcgccatctgtgtgagcctggggcagacggctctgaaacctttgccgatggggtccctcgggagggactgagtcgccagcaggtgttgacccgcattggagtcatgtctctcgtcaaaaagaaggtgcaggagtttgagcacatcaatgggcgttggtcaatgccggaactgatgcctgaccccagcgccgattctaagcgctcctccagagcctcctctcctaccaaaacgtctcccaccactcctgaggcttctgctaccaacagtccctgcacctctaaacctgctactccagctccaagtgagaaaggagaaggcataaggacacctcttgagaaggaggaagctgaaaaccaggaggaaaagccagagaagaacagcagaattggggagaagatggagacagaggctgatgcccccagcccagccccatcacttggggagcggctggagccaaggaagattcctctagaggatgaggtgccaggggtgcctggagagatggagcctgaacctgggtaccgtggggacagagagaagtcagccacagagtcgacgccaggagaaaggggggaggagaagccgttggatggacaggaacacagggagaggccggagggggaaacaggggatttgggcaagagagaagatgtaaaaggtgaccgggagcttcgaccagggcctcgagatgagccacggtccaatgggcgacgagaggaaaagacagagaagccccggttcatgttcaatatcgccgatggtggcttcacagagcttcacacactgtggcagaatgaggaacgggcagctatttcctcggggaaactcaatgagatctggcacagaagacatgactattggcttctggctgggattgtcctccatggctatgcacggtggcaggacatccagaatgatgctcaatttgccattatcaacgagccatttaaaactgaagccaataaggggaactttctggagatgaaaaataagttcctggcccggaggttcaagctcctggagcaggcgctggtgattgaggagcagctgcggcgggcggcctacctgaacctgtcgcaggagccggcgcaccccgccatggccctccacgcccgcttcgccgaggccgagtgcctggccgagagccaccagcacctctccaaggagtcgctggcggggaacaagccggccaacgccgtcctgcacaaggttctgaaccagctggaggagttgctgagcgacatgaaggcggacgtgacccgcctgccagccacgctgtcccgaataccccccatcgcagcccgccttcagatgtccgagcgcagcatcctcagccggctggccagcaagggcacggagcctcaccccacaccggcctacccgccgggtccctacgctacacctccggggtacggggcggccttcagcgccgcacccgtaggggccctggccgccgcaggcgccaattacagccagatgcctgcagggtccttcatcacagccgccaccaacggccctccagtgcttgtgaagaaggagaaggaaatggtgggggcattggtgtcagacgggctggatcggaaggagccccgagccggggaggtgatctgtatagacgactgactggatcccaggcctgcccttcacccaggccccgtccccgaggccgacccccagctcaagcgctggggcctgctgccagccctccaccttccccaccccttgggccatcactgggctaggaacccctttgcccctctctgcagctcctctcttcaagaagggccctttgtctttctccactcccacacacctttcccaccaagccttgaagactgtgctggtgagaagaagtctgggtgggagatggctggcagggtcttccaagtaccttcctcccacactgccaagtatacacaacttcccagtaaatggttgtggggaggaaagaggtggagcctccccagccgtttccctgcagaatcagctctgtctcatgtggaagtggagaatcagccttgcctggcctttaggaacttttgtggggaagagagctttgaagagaggagggggactttagagagggatgaaaatgagccctgggagggaggaagggacgaggaggggtggctgcatgttaccgtcccctacctctccccacgtggagggtggagcagttatgagggaggaagtcaactgctgttcagcctcagaataaaggtgccgttcactggctcagttaaaaaaaaaaaaaaaaaaaaaaaaaaaaaaaggggggggggctttttgaaattgggcccccccagcttttttgccaaaatggggctaaaaaaaaactttttttaatcccaataaaaaagggttaagggggggaacccccaaaggggggggaacctttaaagggcaccttggggctttcaaattttggaatggggggggttttaaacgagaaaaaacttttccccttttttcgggtttcaggggcggggtt

SEQ ID NO: 483427 - DNA, 1423 bp, Homo sapiens
  misc_feature (1292)..(1292): n is a, c, g, or t
agcggcaagttaaccccaggagaggtgccagtcagcagataatctgcaaacgaacgtattctcctcctcctacgaggatatgagcctcacgaaataatcttttcatcctgaatctccctgccgcagtcgagctgccttccgtccaggtagggtcccctccccgcccgggtcccctccccctcccggtcccctcccccgcccgggctcatctctgtctccccctcccggactgcgtcctcgctccgccgggccctcctagccgccagcttgtgaatgagacgctcagtttctcaatggagccgcggggggctcgggcggccgcccgagcggagcccggctgaggcagccgcgcaggtcgcagggccagcgtccgcgaggacggcccggctgggcggccccgagctctgtggcgctgtggaggagcgggagcgcggccgaggaagcggggcgccgagggggtcggcggccttcgggaaatttccgccgacccttcgctcccggctctaaaagttcctgatttcctatttccttttaaatcccgagtggctgttagctcttcgcctgcactttttcttccccaggagataagggggagtgtgaggaacggagcgaataatataaaaaaggatttcctcccggaagagagcggcagttcggagagatttttcttaaggaagcagaagcggcgtttgcggccgctgcaggcgccgggccctgccggccacactatgcgcgagccggccccgggctgctgaggcgcggggacgcggaagcggaggccgagcgcgccgggctcccgcgctcgcgagcgagttttgtccgcccggcggcggtggcggggggatggagcccgcgaccgcgccccggcccgacatggcgccggagctgaccccggaggaggagcaggctaccaagcagtttctcgaagagattaacaagtggacagttcagtacaatgtttccccgctgtcttggaatgtggctgtcaagttcctcatggcaaggaagtttgatgtgctccgtgccatagaattgttccactcctacagagaaactcgaaggaaggaaggcattgtaaagctgaaacctcatgaggaacctcttcgttctgagatcctcagtggaaaattcaccatcttaaatgttcgggacccaacaggagcctccattgccctctttactgccaggttgcatcatccccacaagtcagtccaacatgtggtacttcaggctctgttttacttgctagacagagctgtggatagaaaaattagccgggtgtggtggcgggngcctgaagcaggagaatggcgtgaacccgggaggtggagcttgccaggagccaagattgcgccactgtactccagcctgggcgacagactgagattctgtctccaaagatccatacacagcagaagaacgc

SEQ ID NO: 483428 - DNA, 173 bp, Homo sapiens
agcagcttaagtctcatgggagtgcgaaccctgtgtgaactgcacatgcgaggatctaggttgtgcactccttatagaatctaatgcctgatgaatctaatgcctcatgatctgaggttgaatagcttcgtgccgaaaccaatcccccccccatcccgctaccccgagtccgt

SEQ ID NO: 483429 - DNA, 177 bp, Homo sapiens
agagaggagagaggagtcgttactgtggccagagcttacagagtagttttatcagacctggcccccgggcgaggatgaggaactactgtgtggttcacactataataatgtgcttgtttggccagtaggtgtatttctggttattttggccggacaagaggagggaggtatcagcta

SEQ ID NO: 483430 - DNA, 3870 bp, Homo sapiens
gtttttcagggttctcaatggttacaagatagatcataagttgctgctgacaggaaccccattgcagaataatctggaggagctcttccatctcctgaacttcctcaccccagagagatttaacaacttggagggcttcctggaggagtttgctgacatatccaaagaggaccagatcaagaaactgcatgatttgctggggccacacatgctgcggagactcaaggcagatgtctttaagaacatgccagccaagacagagctcatcgttcgggtggagctaagccccatgcagaagaaatactacaaatacatcctgactcgaaattttgaggccttgaattcacgaggtggtgggaaccaggtgtcgctgcttaatatcatgatggatcttaagaagtgctgcaaccatccatacctttttcccgtggctgctatggagtcccccaaactccccagtggggcttatgagggtggggcacttattaagtcgtctgggaagctcatgctgctccagaagatgctgcgaaagctgaaggagcaaggacaccgagtgctcatcttctcgcagatgaccaaaatgttagacttgcttgaggacttcttagactatgaaggctacaagtatgagcgcatcgatggtggtatcacgggtgccctgaggcaggaggccatcgatcggtttaatgctcctggggcccaacaattctgcttcctcctgtccacccgagctgggggcctgggcatcaatctggccactgctgacactgtcatcatctttgattctgactggaacccccataatgacatccaggcctttagccgggctcatcggattggccaggccaacaaagtgatgatttaccggtttgtgactcgcgcgtcagtggaagagcgaatcacacaagtggccaagagaaagatgatgctgacacacctggttgtgcggcctgggctgggctccaaggcaggctccatgtccaagcaggagcttgacgacattctcaaatttggcactgaagagctattcaaggatgaaaacgagggggagaacaaggaggaggacagcagtgtgattcattatgacaatgaggccatcgctcggctgttggaccggaaccaggatgcaactgaggacactgacgtgcagaacatgaatgagtatctcagctccttcaaggtggcacagtacgtcgtgcgggaagaagacaagattgaggaaattgagcgagagatcatcaagcaggaggagaatgtggaccctgactactgggagaagctgctgaggcatcactatgagcaacagcaggaagacctagcccggaatctaggcaagggcaagcgggttcgcaagcaagttaactacaatgatgctgctcaggaagaccaagacaaccagtcagagtactcggtgggttcagaggaggaggatgaagacttcgatgaacgtcctgaagggcgtagacagtcaaagaggcagctccggaatgagaaagataagccactgcctccactgctggcccgagtcgggggcaacattgaggtgctgggcttcaacacccgtcagcggaaggctttcctcaatgctgtgatgcgctgggggatgccaccacaggatgccttcaccacacagtggctggtgcgggacctgaggggcaagactgagaaggagtttaaggcctatgtgtctttgttcatgcgccatctgtgtgagcctggggcagacggctctgaaacctttgccgatggggtccctcgggagggactgagtcgccagcaggtgttgacccgcattggagtcatgtctctcgtcaaaaagaaggtgcaggagtttgagcacatcaatgggcgttggtcaatgccggaactgatgcctgaccccagcgccgattctaagcgctcctccagagcctcctctcctaccaaaacgtctcccaccactcctgaggcttctgctaccaacagtccctgcacctctaaacctgctactccagctccaagtgagaaaggagaaggcataaggacacctcttgagaaggaggaagctgaaaaccaggaggaaaagccagagaagaacagcagaattggggagaagatggagacagaggctgatgcccccagcccagccccatcacttggggagcggctggagccaaggaagattcctctagaggatgaggtgccaggggtgcctggagagatggagcctgaacctgggtaccgtggggacagagagaagtcagccacagagtcgacgccaggagaaaggggggaggagaagccgttggatggacaggaacacagggagaggccggagggggaaacaggggatttgggcaagagagaagatgtaaaaggtgaccgggagcttcgaccagggcctcgagatgagccacggtccaatgggcgacgagaggaaaagacagagaagccccggttcatgttcaatatcgccgatggtggcttcacagagcttcacacactgtggcagaatgaggaacgggcagctatttcctcggggaaactcaatgagatctggcacagaagacatgactattggcttctggctgggattgtcctccatggctatgcacggtggcaggacatccagaatgatgctcaatttgccattatcaacgagccatttaaaactgaagccaataaggggaactttctggagatgaaaaataagttcctggcccggaggttcaagctcctggagcaggcgctggtgattgaggagcagctgcggcgggcggcctacctgaacctgtcgcaggagccggcgcaccccgccatggccctccacgcccgcttcgccgaggccgagtgcctggccgagagccaccagcacctctccaaggagtcgctggcggggaacaagccggccaacgccgtcctgcacaaggttctgaaccagctggaggagttgctgagcgacatgaaggcggacgtgacccgcctgccagccacgctgtcccgaataccccccatcgcagcccgccttcagatgtccgagcgcagcatcctcagccggctggccagcaagggcacggagcctcaccccacaccggcctacccgccgggtccctacgctacacctccggggtacggggcggccttcagcgccgcacccgtaggggccctggccgccgcaggcgccaattacagccagatgcctgcagggtccttcatcacagccgccaccaacggccctccagtgcttgtgaagaaggagaaggaaatggtgggggcattggtgtcagacgggctggatcggaaggagccccgagccggggaggtgatctgtatagacgactgactggatcccaggcctgcccttcacccaggccccgtccccgaggccgacccccagctcaagcgctggggcctgctgccagccctccaccttccccaccccttgggccatcactgggctaggaacccctttgcccctctctgcagctcctctcttcaagaagggccctttgtctttctccactcccacacacctttcccaccaagccttgaagactgtgctggtgagaagaagtctgggtgggagatggctggcagggtcttccaagtaccttcctcccacactgccaagtatacacaacttcccagtaaatggttgtggggaggaaagaggtggagcctccccagccgtttccctgcagaatcagctctgtctcatgtggaagtggagaatcagccttgcctggcctttaggaacttttgtggggaagagagctttgaagagaggagggggactttagagagggatgaaaatgagccctgggagggaggaacatacgacagcctgacgcccccagtgcccagagaagaacgtagtagctcactttctag

SEQ ID NO: 483431 - DNA, 3458 bp, Homo sapiens
  misc_feature (3452)..(3452): n is a, c, g, or t
gtttttcagggttctcaatggttacaagatagatcataagttgctgctgacaggaaccccattgcagaataatctggaggagctcttccatctcctgaacttcctcaccccagagagatttaacaacttggagggcttcctggaggagtttgctgacatatccaaagaggaccagatcaagaaactgcatgatttgctggggccacacatgctgcggagactcaaggcagatgtctttaagaacatgccagccaagacagagctcatcgttcgggtggagctaagccccatgcagaagaaatactacaaatacatcctgactcgaaattttgaggccttgaattcacgaggtggtgggaaccaggtgtcgctgcttaatatcatgatggatcttaagaagtgctgcaaccatccatacctttttcccgtggctgctatggagtcccccaaactccccagtggggcttatgagggtggggcacttattaagtcgtctgggaagctcatgctgctccagaagatgctgcgaaagctgaaggagcaaggacaccgagtgctcatcttctcgcagatgaccaaaatgttagacttgcttgaggacttcttagactatgaaggctacaagtatgagcgcatcgatggtggtatcacgggtgccctgaggcaggaggccatcgatcggtttaatgctcctggggcccaacaattctgcttcctcctgtccacccgagctgggggcctgggcatcaatctggccactgctgacactgtcatcatctttgattctgactggaacccccataatgacatccaggcctttagccgggctcatcggattggccaggccaacaaagtgatgatttaccggtttgtgactcgcgcgtcagtggaagagcgaatcacacaagtggccaagagaaagatgatgctgacacacctggttgtgcggcctgggctgggctccaaggcaggctccatgtccaagcaggagcttgacgacattctcaaatttggcactgaagagctattcaaggatgaaaacgagggggagaacaaggaggaggacagcagtgtgattcattatgacaatgaggccatcgctcggctgttggaccggaaccaggatgcaactgaggacactgacgtgcagaacatgaatgagtatctcagctccttcaaggtggcacagtacgtcgtgcgggaagaagacaagattgaggaaattgagcgagagatcatcaagcaggaggagaatgtggaccctgactactgggagaagctgctgaggcatcactatgagcaacagcaggaagacctagcccggaatctaggcaagggcaagcgggttcgcaagcaagttaactacaatgatgctgctcaggaagaccaagacaaccagtcagagtactcggtgggttcagaggaggaggatgaagacttcgatgaacgtcctgaagggcgtagacagtcaaagaggcagctccggaatgagaaagataagccactgcctccactgctggcccgagtcgggggcaacattgaggtgctgggcttcaacacccgtcagcggaaggctttcctcaatgctgtgatgcgctgggggatgccaccacaggatgccttcaccacacagtggctggtgcgggacctgaggggcaagactgagaaggagtttaaggcctatgtgtctttgttcatgcgccatctgtgtgagcctggggcagacggctctgaaacctttgccgatggggtccctcgggagggactgagtcgccagcaggtgttgacccgcattggagtcatgtctctcgtcaaaaagaaggtgcaggagtttgagcacatcaatgggcgttggtcaatgccggaactgatgcctgaccccagcgccgattctaagcgctcctccagagcctcctctcctaccaaaacgtctcccaccactcctgaggcttctgctaccaacagtccctgcacctctaaacctgctactccagctccaagtgagaaaggagaaggcataaggacacctcttgagaaggaggaagctgaaaaccaggaggaaaagccagagaagaacagcagaattggggagaagatggagacagaggctgatgcccccagcccagccccatcacttggggagcggctggagccaaggaagattcctctagaggatgaggtgccaggggtgcctggagagatggagcctgaacctgggtaccgtggggacagagagaagtcagccacagagtcgacgccaggagaaaggggggaggagaagccgttggatggacaggaacacagggagaggccggagggggaaacaggggatttgggcaagagagaagatgtaaaaggtgaccgggagcttcgaccagggcctcgagatgagccacggtccaatgggcgacgagaggaaaagacagagaagccccggttcatgttcaatatcgccgatggtggcttcacagagcttcacacactgtggcagaatgaggaacgggcagctatttcctcggggaaactcaatgagatctggcacagaagacatgactattggcttctggctgggattgtcctccatggctatgcacggtggcaggacatccagaatgatgctcaatttgccattatcaacgagccatttaaaactgaagccaataaggggaactttctggagatgaaaaataagttcctggcccggaggttcaagctcctggagcaggcgctggtgattgaggagcagctgcggcgggcggcctacctgaacctgtcgcaggagccggcgcaccccgccatggccctccacgcccgcttcgccgaggccgagtgcctggccgagagccaccagcacctctccaaggagtcgctggcggggaacaagccggccaacgccgtcctgcacaaggttctgaaccagctggaggagttgctgagcgacatgaaggcggacgtgacccgcctgccagccacgctgtcccgaataccccccatcgcagcccgccttcagatgtccgagcgcagcatcctcagccggctggccagcaagggcacggagcctcaccccacaccggcctacccgccgggtccctacgctacacctccggggtacggggcggccttcagcgccgcacccgtaggggccctggccgccgcaggcgccaattacagccagatgcctgcagggtccttcatcacagccgccaccaacggccctccagtgcttgtgaagaaggagaaggaaatggtgggggcattggtgtcagacgggctggatcggaaggagccccgagccggggaggtgatctgtatagacgactgactggatcccaggcctgcccttcacccaggccccgtccccgaggccgacccccagctcaagcctgggctgtgcagcctcacttccaccttggcatatggtagaccttgcctttgagtcttttagaggcttntttcat

SEQ ID NO: 483432 - DNA, 235 bp, Homo sapiens
  misc_feature (95)..(95): n is a, c, g, or t
  misc_feature (135)..(135): n is a, c, g, or t
  misc_feature (181)..(181): n is a, c, g, or t
ttccggacgcatcagtgctttattaccaaggatgactgtgctgcaggaggcggctcaatgtgaagaactacgggtttccgcagggtgaagctcanaattatccacactgaccttctcagtcatgcatgatgccangaaaatcacaggcttccattctacagtgaagggcttggaggagcangcaataatccttaggaaagaggctgaatccaggggctgagcagaacagtccata

SEQ ID NO: 483433 - DNA, 192 bp, Homo sapiens
tatttgtcgatcgttaaaccatttgccagttgtatacttaaacccgtcctcattgcttggccctttctgaagctgcttcctctcataaaatagcttttgccgacacatcgtttttttagcagatcccacaatataatgacggggctggtgggatctttgtgtctgtgttcttctaatatattattattcttc

SEQ ID NO: 483434 - DNA, 412 bp, Homo sapiens
  misc_feature (3)..(3): n is a, c, g, or t
  misc_feature (15)..(15): n is a, c, g, or t
  misc_feature (74)..(74): n is a, c, g, or t
ccngaagggttctgncagtattcttgtggaagggccccattcacgggcttgtgttctttccttggcctactgtnggctcctttctttgagtcagaagcagctggctcagccaggcggggtggctcatgcctgtaattccagcactttaggaggccaaggcaggtggatcgcttgaggccaggaattcgagaccagcctggccaacatggtgaaaccccgtctctactaaaaatacaaaaaaattagcttgacatggtggctcacgcctgtaatcccttagctactcaggaggctgaggcaggagaatcacttgaacctggcaggtggaggttacagtgggccaagatcgtgccattgcactccagcctgggcaatagagtgagactctgtctcaaaacaaataaacaacaac

SEQ ID NO: 483435 - DNA, 2090 bp, Homo sapiens
gtttttcagggttctcaatggttacaagatagatcataagttgctgctgacaggaaccccattgcagaataatctggaggagctcttccatctcctgaacttcctcaccccagagagatttaacaacttggagggcttcctggaggagtttgctgacatatccaaagaggaccagatcaagaaactgcatgatttgctggggccacacatgctgcggagactcaaggcagatgtctttaagaacatgccagccaagacagagctcatcgttcgggtggagctaagccccatgcagaagaaatactacaaatacatcctgactcgaaattttgaggccttgaattcacgaggtggtgggaaccaggtgtcgctgcttaatatcatgatggatcttaagaagtgctgcaaccatccatacctttttcccgtggctgctatggagtcccccaaactccccagtggggcttatgagggtggggcacttattaagtcgtctgggaagctcatgctgctccagaagatgctgcgaaagctgagcgacatgaaggcggacgtgacccgcctgccagccacgctgtcccgaataccccccatcgcagcccgccttcagatgtccgagcgcagcatcctcagccggctggccagcaagggcacggagcctcaccccacaccggcctacccgccgggtccctacgctacacctccggggtacggggcggccttcagcgccgcacccgtaggggccctggccgccgcaggcgccaattacagccagatgcctgcagggtccttcatcacagccgccaccaacggccctccagtgcttgtgaagaaggagaaggaaatggtgggggcattggtgtcagacgggctggatcggaaggagccccgagccggggaggtgatctgtatagacgactgactggatcccaggcctgcccttcacccaggccccgtccccgaggccgacccccagctcaagcgctggggcctgctgccagccctccaccttccccaccccttgggccatcactgggctaggaacccctttgcccctctctgcagctcctctcttcaagaagggccctttgtctttctccactcccacacacctttcccaccaagccttgaagactgtgctggtgagaagaagtctgggtgggagatggctggcagggtcttccaagtaccttcctcccacactgccaagtatacacaacttcccagtaaatggttgtggggaggaaagaggtggagcctccccagccgtttccctgcagaatcagctctgtctcatgtggaagtggagaatcagccttgcctggcctttaggaacttttgtggggaagagagctttgaagagaggagggggactttagagagggatgaaaatgagccctgggagggaggaagggacgaggaggggtggctgcatgttaccgtcccctacctctccccacgtggagggtggagcagttatgagggaggaagtcaactgctgttcagcctcagaataaaggtgccgttcactggctcagttacctcctgtgtaccggcatcttgtgttgggaatgttcccccctccctagggaccaaggaccacccctacaaaaagagtaatggttgggtgatactccctcaagccaaagaggagctccccaacctgttctagggacccaggtaacctagaagggtgggagagaatacaatgggccagatgtggtggaagcccagctctggggctcaggttcctggaagacttctactaccctccctcctcaaggcctggatacagactaaatttgtataagtcaggcaggggacctagtcagggtcttgggagctaccttgtcgttgggaccagagcaaaatagtggagggcaggctagggaaatgtgggcacatcccccctcccaggaggggccggggagagtggcagtttgcatggcgaaccccccacttcctctttgctgccccttcactttcttgctgcccctttcccagtctctcttcacacccactcctggtctgtcctgatcccctcttctgtatcaggtttattggttgtacatataaattatactttcctt

SEQ ID NO: 483436 - DNA, 447 bp, Homo sapiens
ggaacgtcactagaggcaacagaggcaggcataggaatcagagggatggaaactcaagtccttagttttgccacttatatatactctgtggctttatgcactgacctaaccactgacctaactttcctgagcctcagtctccctcctctgtagaatgggacaactcataataccagtcttaagaatgggtgcagtggatcatgcttagtaatcccaatactttgggaggctgatttaggcggatcgcttgaggaccggagttccggaccagcctagacaacatagcaagaacccatctctacccaaaaatacaaaaattagccaggtgtgatgacagacaaccgtagtcccaactacttgggaggctgaggtgtgaggatcagctgagcccaggggtatagaggccaccagtgagcttatgactataccacttcattccagcctggg

SEQ ID NO: 483437 - DNA, 1871 bp, Homo sapiens
catcttcctttcctccatgctccctttttcttcttctttctctccatctgtcttctgtggtaatctggtctctctgtctcttttcctgacactttttcttttcccctgagtgcttctgttttccatctacttcttttactttcttgatctctggttctttgacatctgtgttctcctctctcgctctttttctgcctgtatctgtccatctgatgcctctcttttcctggctccatctctgtatttccctgtctttctcttgcccttctttctctgtggcccgggcccagttctgaaccagctggaggagttgctgagcgacatgaaggcggacgtgacccgcctgccagccacgctgtcccgaataccccccatcgcagcccgccttcagatgtccgagcgcagcatcctcagccggctggccagcaagggcacggagcctcaccccacaccggcctacccgccgggtccctacgctacacctccggggtacggggcggccttcagcgccgcacccgtaggggccctggccgccgcaggcgccaattacagccagatgcctgcagggtccttcatcacagccgccaccaacggccctccagtgcttgtgaagaaggagaaggaaatggtgggggcattggtgtcagacgggctggatcggaaggagccccgagccggggaggtgatctgtatagacgactgactggatcccaggcctgcccttcacccaggccccgtccccgaggccgacccccagctcaagcgctggggcctgctgccagccctccaccttccccaccccttgggccatcactgggctaggaacccctttgcccctctctgcagctcctctcttcaagaagggccctttgtctttctccactcccacacacctttcccaccaagccttgaagactgtgctggtgagaagaagtctgggtgggagatggctggcagggtcttccaagtaccttcctcccacactgccaagtatacacaacttcccagtaaatggttgtggggaggaaagaggtggagcctccccagccgtttccctgcagaatcagctctgtctcatgtggaagtggagaatcagccttgcctggcctttaggaacttttgtggggaagagagctttgaagagaggagggggactttagagagggatgaaaatgagccctgggagggaggaagggacgaggaggggtggctgcatgttaccgtcccctacctctccccacgtggagggtggagcagttatgagggaggaagtcaactgctgttcagcctcagaataaaggtgccgttcactggctcagttacctcctgtgtaccggcatcttgtgttgggaatgttcccccctccctagggaccaaggaccacccctacaaaaagagtaatggttgggtgatactccctcaagccaaagaggagctccccaacctgttctagggacccaggtaacctagaagggtgggagagaatacaatgggccagatgtggtggaagcccagctctggggctcaggttcctggaagacttctactaccctccctcctcaaggcctggatacagactaaatttgtataagtcaggcaggggacctagtcagggtcttgggagctaccttgtcgttgggaccagagcaaaatagtggagggcaggctagggaaatgtgggcacatcccccctcccaggaggggccggggagagtggcagtttgcatggcgaaccccccacttcctctttgctgccccttcactttcttgctgcccctttcccagtctctcttcacacccactcctggtctgtcctgatcccctcttctgtatcaggtttattggttgtacatataaattatactttcctt

SEQ ID NO: 483438 - DNA, 719 bp, Homo sapiens
gtaggaatccggagcgagctcgcaagagagagacccggcagccagaaccgagggaaagggttttttttgggtagagagacccccccagccgcgccaagggaggcagactctaagaagacgtcccgcctggcacggaccaagcgagacacgaaggagcgcctcgtcgggccgagccgagaaagagggctccacaggggggggggagccggcccaccaccaaagaaagacagcgaccggcgcgcgcagcacccaccgggccgaccccagaaggaggcagggggggcgagaggcgcgacaagaagccaggcaccacccccccgaagaaaggagggagaaggaagaaccaaaaacaaacccccaaggcgggcccacccggcaggcaacaggaacccccggcgggtgagcccccccaccgcccgccggaaggccccagagcgggggaccgcacaccggaagaggaggcacacccgcagctttccgggcaccccgccaccgcagagcaccagaccggactcccccgcacccagagggcaaaacacgcccgacgccccgcggcgccgcccggggccaagcgggggcgcggcaggggggcacccaacaaggccggcggggggggcaaataaccccgccccccccaagccacgccggcgcgcaccgcgggagggaggggagcaacgccacaccgcgcccccacgcccccgccccccggcgcgggtgcg

SEQ ID NO: 483439 - DNA, 418 bp, Homo sapiens
cagtcaaatattgtgccaggcgtagggatatcatcgtggcatcgcgcgacgtattttctcaggataacatccccaactcatgttcaagctccgtcacgatgtccttggccactctttacacttctcaacggtacattttatatgtatagtaccaaaaaaaaaaaaaaaaaaaaatactagtttttttgaaacaaagtcttgctctgtcacccaggctggagtgcagtggtgcaatcgcggctcactgcagcctccacctcctgggctcaagcgatcctcccacctaacgctctcaaagagctggaataacgggattgagccaaccgtgcctggcctcatcttatagaaacaggtaaattatacttaactagctattaaaaaagttagatggaaaatgagccagaacaatcctccagcc

SEQ ID NO: 483440 - DNA, 223 bp, Homo sapiens
cggtgcaatggctcatgcttcatattctttcacttgggaggcaaggcaggaggattgcttgaacccacgacattcaagacctgcctgagcaacatggtgaaactccatctctacaaaaagtacaaaagttagccaggtgtgctggcatgcatttgtagtcccacctaagtgtcacaggtaggtgggactacaagtgcatgcaagccacagggctaactttgga

SEQ ID NO: 483441 - DNA, 768 bp, Homo sapiens
  misc_feature (491)..(491): n is a, c, g, or t
ggggcaacctgcgcggacgtacctgtcaggcccggaggcccccagcggctgaaatactgctagcaacccccagacacaacccgataggagcaggctctcctccaagggacctggtgtcctgcgcctacccaggtggccccgagtgcatggacgtagtctggtctccaagaagtgcatacaccgagacctggccgctcaggtaaattgtccatgggctgaccgggatgcgacaagtgctagacttgaaatggataggcaccaacgtttgagagctcgccacggggacacttcgatcagcaatcgactatcgaatgaaatgacaaccaacggccgacctgcctgtgaatcttggcatgggcacccgaaggggattatttgaccggattctatcaccccgaccgagagctgatgctgtggttctttcaggcggctggctccttgttgggagcagtagtcttacagcttcctcgtgcgtcgcgagtcccccatgnactccccgagtgatgacccatgctgcgcagtgatatcttatctgcacaagactttgactagcaaagggggacgaggtcgagctcggacgactcgggatcaagaagcccatggtacagcttggccaagcgcagatctggaagcgtggtaatcacttgtactgaagtcgtccggtgcaccttggctcgcgagaggttgcatggtcgaccccgtctagcaagagcaagccctggcgcttgccgccatggcaccgtgtggggttggcacatggaaccctgg

SEQ ID NO: 483442 - DNA, 168 bp, Homo sapiens
cagaggatcccacaagctgaactcttccggtcattatttcgttggcatgatgtatggcttcttcacgtttggtttttattggagcacggagtagaattccaggctgccttgacttcttcccgtgcatgctcccgtcccaggtgactttccttcccatttcacatagag

SEQ ID NO: 483443 - DNA, 1172 bp, Homo sapiens
agcggagtgctaaagtccccagcgacactccgcgacgccggactcagaatctcctcagacgccgagatgcgggtcacggcgccccgaaccctcctcctgctgctcgggggggcctgtggccctgtacctcgaccatcctggcgctggtcgtcccgagctcgcagtgagggtagtttccgacatccgtccgctgttccctggacccggctcagtcgcggggagctcccgctttcatcgatccgtgggcttatcgtggaacggactgctgctgtttcgtgaggttcgaacatgcgcagcgccgtcgagatccgcacgacgaggaggcccgtggtgcgcccgtgggactgggaggccaagagcgcggaccggcagtactggtgagaaccggcgaagaccaacaagaatcctgacaaaggtcccaacgtgtcaacctgaacttgaccccgcaagtacggtaacacctggcgaggatccgagagcttccggacatatacataatggcacgccaaaggagcagcagtcgctcccgggatctgcaaccaaagccctcactaaagcaaaggatggtaatagagagtgccaacaaatgttagggaggcgcagatgatagaggagaacggacacgtccacatacccgggaaggagttcacccgaagccatatgtgcacagcacttccaaggagacaggggcagaaaggggttgaaaaacaataacgggacccacataggagaaaccgagagagaaacccggggaagggctaccccttgggaaatcgcagacaccgtagggaaaccaaaccggtggatcgggactgtaccaggaactacggagcacactaaacgggcaacatactgggagggcaaagtgggccgggggcacacagtgcaagaatgggcgccaggagcaacgaccaatggctgtggcaatgaaggtcaccggaatacgccctggaggaaagggcgaagccgcacaggagtgtatccagtattgggcacagtgtggaggacttcaccggacaagagcacgtagaacgccgtagggaacacaaaaaccggcgcgtgcaagcagacaccaatgcgccattgtaacaagccgatgggaggggagagcccccacggcacacatacggacccatacaccgttggtgacaccacgagccgaaacggtccca

SEQ ID NO: 483444 - DNA, 829 bp, Homo sapiens
gacagctctcccccattatatggccaggaatcgaggctggtgactggtgcacaaggtctcctattctacccgtgttctgttcatctaagatgctagactatatttataaatcatagtgtcaatcatagttattgaatgacttcaagttgtattcccatggcaagatggactttctcagaataggactgcagcggcttggagtactttacatgttagatgttgaatctagaattttttattgatatgaaggagaaaatactgaccaatggatccatggacattacatcaaagaagataacatattcctaaattaacaagtacctagaagtcaaaactacaagaatagaatatctgaaaaaaaagcagattgactgcagatcaaaagagtaagtctggatgactaatccaggtggattagggagtcactgactgaacaaaaactgcctctaatagcttgaggatattcatttgatatgaaattatcatatgactttagtgcaaactgcctgctgatttaagttgacagtaaacctatggagtgctgcttaaagtcttcacatctacgaaaaatagctatcaggagttattaaagtcctactatgatgaagacagccatgcgtgtggtagcagaacgtgtactgtgtatcgacacgcactttcgaacttcacatacaccaaagtacaccagcgatgtaagtcgcggcgagaaaacctaccactgcgatcgcctctcactcacagactattaactggacaacaatgtgcttttacagatggtacacgggcatggacaggccacagtcctcggcggaaagggtcacacttaacc

SEQ ID NO: 483445 - DNA, 188 bp, Homo sapiens
gataaaaccagaagcaacagacacagatatacatatacacaaacaaataacaaaatcactttctgttgcagtagatcaaagatctagctgtgcccagggaagttgttctgtcttctgccttccttaccaaagcattttgctttattgagaaacttttataatccccaaatccttaaaaaccttagaaa

SEQ ID NO: 483446 - DNA, 107 bp, Homo sapiens
cagctgatctaaggatcccataaggcatactcttaatgcctttggcgatctctaatctgtaggagtgcttcattctttcttgtttattcttttggccccttatcgag

SEQ ID NO: 483447 - DNA, 406 bp, Homo sapiens
tgagccatcactgcgctgctgtttggggcacaccgtgttccctggctttgcgacagttatgcacaaggagatcattgtcctggcgtccatgcacgatgctgatcaagatcatttgctcctcctgagcgcaagtcctccgtgtggatcggcggctccttcctgtcctcgctgtccaccttcctgctgctgttgatcaacaggcagtgagtattacgatctccggtccctctcatcgtccatcgcaattgcttctaagctggctatgagttagttgctctacaccctttcttgacgcatcctagcttgcgcctgagcgacgatgagcattggtctggattgatttgtccctgtcgttttgttttggtttttttttttttttttgggtttgactcaggttttaccctag

SEQ ID NO: 483448 - DNA, 736 bp, Homo sapiens
  misc_feature (1)..(1): n is a, c, g, or t
  misc_feature (140)..(140): n is a, c, g, or t
  misc_feature (238)..(238): n is a, c, g, or t
  misc_feature (241)..(241): n is a, c, g, or t
  misc_feature (264)..(264): n is a, c, g, or t
  misc_feature (271)..(271): n is a, c, g, or t
  misc_feature (286)..(286): n is a, c, g, or t
  misc_feature (291)..(291): n is a, c, g, or t
  misc_feature (296)..(296): n is a, c, g, or t
  misc_feature (298)..(299): n is a, c, g, or t
  misc_feature (303)..(304): n is a, c, g, or t
  misc_feature (332)..(333): n is a, c, g, or t
  misc_feature (341)..(341): n is a, c, g, or t
  misc_feature (364)..(364): n is a, c, g, or t
  misc_feature (369)..(369): n is a, c, g, or t
  misc_feature (372)..(372): n is a, c, g, or t
  misc_feature (376)..(376): n is a, c, g, or t
  misc_feature (380)..(380): n is a, c, g, or t
  misc_feature (397)..(398): n is a, c, g, or t
  misc_feature (404)..(404): n is a, c, g, or t
  misc_feature (408)..(408): n is a, c, g, or t
  misc_feature (420)..(420): n is a, c, g, or t
  misc_feature (427)..(427): n is a, c, g, or t
  misc_feature (458)..(458): n is a, c, g, or t
  misc_feature (468)..(468): n is a, c, g, or t
  misc_feature (487)..(487): n is a, c, g, or t
  misc_feature (495)..(495): n is a, c, g, or t
  misc_feature (497)..(497): n is a, c, g, or t
  misc_feature (499)..(499): n is a, c, g, or t
  misc_feature (505)..(505): n is a, c, g, or t
  misc_feature (520)..(520): n is a, c, g, or t
  misc_feature (540)..(540): n is a, c, g, or t
  misc_feature (735)..(735): n is a, c, g, or t
ngacactagtggtggtgaagttcataaagttttggggtggcaaacaaacagcttattttgtcctttatcataattggtttacaaattgggtgcctggttttggcatactggttcagttgatcaagcgcaggatccctttngtctttgtaagaccagatgtataaggccgaatagggtcaagaacttgattgtcaggcgaacgatttactattaacacaaaacaatattactacaaacnccntctcttgtttaacccaagcgacngaggtgngttttctctcatggnctctncgggngnnttgnnagggttgcttcgtggtatgccatgtttnncagttggntcatgggggatggtaatcttggngtgtngtntggnagtntgggtggctgcgttttnngcttgnggtngctttggttatnccctgcnaagggcctcgtgtcctttgggagcgactcantgtttttgcncagctgttaaatacctccntgcgtttntntntcctgntttaatattgctatnaacaggaaagtgtgtaaaantaaaaagtgtatactatttacagatttaaagctttctttgaccttgtcaagggttaagcgactcatttgcatttagtataatgatatgcaaatcttttactttgatgtgtgaaattctgctatctcaaattgacagtatcattattttcagctatgatcatccgtttaagtaaatgttcccataattttgaggtnc

SEQ ID NO: 483449 - DNA, 156 bp, Homo sapiens
gctcgacatacattattgctttgaatgtaaatcagtacagccattatggaaaacagtatggaaatttttcaaagaactaaaaatagaactaccatacaacatagcaatctcattactaagtatttacacaaaagaaagaaaaaaaaaaagtcgacg

SEQ ID NO: 483450 - DNA, 253 bp, Homo sapiens
gccggtcgcgtcgcgacgtgttatcctgagtactcctacttcacaatgaagtaggagtatacaggaaaacacgccatgtgaatatccgtactcgtcatgggctatatccacaaagccacaacaggctacttgtatacccgagggctgtgagggctccaggttgtatcaccatcaccatatcattgagaccaactttgagatgatcaaacttatagatattgcagcgagagactgcacagggcatggcttactt

SEQ ID NO: 483451 - DNA, 196 bp, Homo sapiens
ttttctttttttgggggggggggggaaaaaaacccccaacctgggtttggaaaataaaccccgggtcggggtttcccggggatgttaaccccctaaaagtttttttccccctttggttttaaagggattgtggggccccccaagccaggaacccgtttttttttccttaaaaacccatgggggttgggttttttta

SEQ ID NO: 483452 - DNA, 656 bp, Homo sapiens
ggtctctgcggaatggcggctctagactgcccgtggtcgctcttcactagcctcggcctgagcgagcagaaggcccgcgatacgctcaagaactacgtgctctgagcgcgcagttgcgacgaggccgctactcaggctcagacggaccgctgtggttccacctattgacaaagctaccgggatccctgttatatggcttggcctcccgactcagggatacccggcgtctctccttccttgtaagctacatagaccagtaagaagatccacactgaggccccagctaaacgctgcccttgagtatgtgcggagtccaccccttggtaccccatcgacactgtggacttcgagcgggaatgtggcgtgggtgtcatggtgaccccagagcagattgaggacggctgaggaggctgttattaccaagcaacgggccccctcttggtgagaagtgatgacaatggttagatctgggctgcctggctcaataggagaggaagggctcgtggtctgtgccagagagtcgggcagatgtgacataactgactcaaccaattgtaagtcgcgcatgcgagggtcctccgcatgcgtatctaggtgtctcaccagatcggaaggaccgcatctggcaggaaaaaggtacaaaggtgtgcccacca

SEQ ID NO: 483453 - DNA, 899 bp, Homo sapiens
agaacgatgcgcgggtcccgctaggcgcatggtgtaagttcgacatgggcttcctttgtgacctggtagtgctgggtgttgctgatcatggcttgattttgaccaagctgaaagattgttccggtgggaccactggagctgttcgtgaagcacgctgtacatcagtccagagctgcatcgagcgtcttattgctgcgggtcctgatccagactcgttattccctccatatggttgcaaaatgtccttttgctactgaccagagatgagcaaaaatcctacgatccaggagcctccctcggactgggaaggtgccttttgaaattccataccagtgtgggggagtatgaccggtcaagttgtggtccatcagtatggtcctaaagctttgccagagacttttcaatccaacgtattgtttgggcacgcttatattgatgaacgaataccattcgaacattaagagtttgtgcctgggttacataggtccaaggtgagcagatcttacgtggcaccacgggagttgggcgcgcagcagttctactcctagtggagcgccatttccagcggatgaattgtcagtgcacggttcgcgtttaaatcggaaagtacctggttgccttgggaaaaattgctggtccgtcagtgattactggcaggcttgttgtttcttcggcacttggctccgaggcagactgaaactaaacatttaagcttaccatcttttggcccggttgcgggctccgtcttctccctgtggcaactgttacgttggccctgctgtgcggaagagcctatccagcactataagagcggacggtaggtagccgttggtgagtctccgggggctacagctttgagcgaccgcgtgggtcagtccacgggccacattgctctcctt

SEQ ID NO: 483454 - DNA, 360 bp, Homo sapiens
tgggatgattaaaatgttctggaaaaaggcccggcatggtggctcacacctgtcatcccagcactttgggatgacctgaggtcaggagaccaacctggccaacatggtgaaaacccgtttccactataaaaatacaaaaatcagccgggcgtggtggcacgcacctgtaatcccagctactcggctaatttttgtattttttttagcagagatggggtttcacgatgctggccaagctggtctcaaactcccggcctcaggtgatccacccgtctcagcctcccaaagtgctgtgatgacaggcgtgagccactgtgcccgtgctccttggggtctttctgctcaaggcatccgctttct

SEQ ID NO: 483455 - DNA, 102 bp, Homo sapiens
cagagataggcgcatctctggagttgatcgttactatgcgtcataggttttggcgaacaatgattaaggaagcatttcctgattgatgaaaaaaaataaagc

SEQ ID NO: 483456 - DNA, 1382 bp, Homo sapiens
ccacgcgtacgagaatactgggatacccgtcgcagcatggtgtttgccaggcacctgcgggaggtgggagacgagttcaggagcagacatctcaactccacggacgacgcagacaggcatccccttccagcgaggactggactgaacgatgaagcgtcaagctgggtctccgccgctaacggcggccccatacctgggagatccacctgattaagaccagatctcatctggggtcacagacaggcatgtacccagctctggaaggcggccgacgaggaagcatccgcatcctcatgcaacgcaccccaccggcctggcacaacggtcgtttgactggccacacgatgccgttcacgaccggcgactactgcacaccaccctacaaccagcctgctctcacccgaccactgccctgacagtctcgcaccccaccactccccacccacacctacccaaccccccataccacccgaccccccacccctccccaccctctcgacaccaccaggaatacctagctcccacaccaccaccatgtctccccaactaccgcacccccctccccctcccctcccacaccactctcactcctcacacacgcgactctccatacacacgcataccaccacacctcctcgcccccctccgccaacaccccacacaaaccacctaacacacaaaagcataccctaccctcaaccactcaacaaccaacacgcctattcttcacttctcatcacaccaccacacccgctcaacccacatcaacaccaacatgccacccaccctcatccctcccaaacaacccacatcaccacccacgcaccccacacactccacacccaccccacaccaccacgccaacaataacatctaccaccacccgcacctctcaacccatcacctaccccgccactaccccacaaacaacatacactcccaccactcccccacacaccaccacacaacagctacccataccccctacaccaccaagcactccaccttacctcaactatcctcaccaatcaaactccaccacccacacacccccctcacccatcctccactcgacctctccaccacatcctcgcccgcaccactctactaccattctcccacacccaaacacacacctcacacaaataacacctagcgtccgtcacccgcactctcccaccctctacacacaacacacagcacacagaccactccgcccacaaacctcccgccgcgcgcactgcctccaccacacaatcaacacaatataacatcaaacgcaagtaaaacagacataaccacagaacgacttaactcacttattcgatgacaactgcccactacctctattctttactatcactctcaccactccacttcac

SEQ ID NO: 483457 - DNA, 165 bp, Homo sapiens
agagagtgtaacaggatgatggagggaatagaagagagaggagtgtaacgggatgatggagggaatagaagagaaaggagtgtaacaggatgatggagggaatagaagagagaggagtgtaacaggatgatggagggaatagaagagagaggagtgtaacaggat

SEQ ID NO: 483458 - DNA, 314 bp, Homo sapiens
  misc_feature (54)..(54): n is a, c, g, or t
caatggcactatctcagctcgctgcaaccttcacctcctgggttcaagcaattntcctgcctcagcctcctgagtagctgggaatataggtgcacaccaccatgcctggctaatttttgtattttcagtagaagcagagtttcaccatattggccaggttggtctcgaactcctgacctcaagtgatctgcctgcctcagcctcccaaagtgctgggattacacgcgtgagccaccacacccagcctccatctttaaacttttaaaatgtgaaatttctatcatgtaccgttagcctaacaagattttttttcc

SEQ ID NO: 483459 - DNA, 439 bp, Homo sapiens
  misc_feature (15)..(15): n is a, c, g, or t
  misc_feature (226)..(226): n is a, c, g, or t
  misc_feature (229)..(229): n is a, c, g, or t
  misc_feature (233)..(233): n is a, c, g, or t
  misc_feature (243)..(243): n is a, c, g, or t
  misc_feature (371)..(371): n is a, c, g, or t
  misc_feature (383)..(383): n is a, c, g, or t
  misc_feature (408)..(408): n is a, c, g, or t
tcagttgacctttgncccctgatcagagtgggagaagagcccgaagaagaccctgaagagcaccggaagcccccccccgaaggccagggcaggcgaagattaagaaatggttgtggggcccaatgaagaagaagaacccgccaagggttttcccgctgaaaaagatgaattgtaaattattctctccccctttgggtcctgtgggagagggaatgtgaaatttacntcntttntttttggganagacttgttttggaagccccctaatccccttttcccctgccctgtaaaatgtgggattttgggtcccaggaaaaagtgggttttttagttgaattttttttacccttccccatgaaggtaaatttggnctatttaactgnctttttttgaggtaaaattttgtcntgggtttaaaaataaaaaaggtccccaatta

SEQ ID NO: 483460 - DNA, 376 bp, Homo sapiens
aggtgactagaggatccacagagggctgcgaaaaggcggagccaggtggtcctccatttcttccagctgagggcaggaggtgctgaacaggttcctgctgaccagcacggcagggctcccaggtctgcatggcgatgttgaaaaagaagttgcggggacaggcactggctctgcgccggggcccaagtgcttttcggctctgcacacagcgaggccttggttcttggaacaaagatccgaagcgtagcccaattctcttcggtccaaagggcttttgccaaacatccaggatgaaagggcacgccctcccaagcaaaggttggtcccatggttgcactaaggaacgggttgcaaaagggtcgggcgttacaggggt

SEQ ID NO: 483461 - DNA, 431 bp, Homo sapiens
gtagagacggggtttcgcctatgttggccaggctggtctcaaacctcctgacctcaagtgatccacctgcctcggcctcccaaagtgttaggataaacaggtgtgagccaccgtgcccggctgaagatttttcttaattgcaataaatattcagcagtttttctaatgaagaattcttaccagtagagcattttgagacttcagatagctttacggaagtgttaataatagtatggagaaccatgttttttaggttttttctttttttctgtcatgcgaataggaagggggcgcttagtacacttaaaacatatctcttcagagatgggaaggatcacaaagaatgaactctaaccggtcctccctcaaagagcctacagtatcgtatagcgcatacagtctctggatgaaattacttgacttacaacctt

SEQ ID NO: 483462 - DNA, 839 bp, Homo sapiens
gtcatgtgtgttttccccagagatcagccagaggaggagcgggggaagcaggagtcctctcctagcccatcttgggagggctaggcgcatggcatagagggtggcgcttcaaggaggacagttaggcgtagtgcctgggagtagactcaagccaggccccttgcaaggcagccagctctgaagtctgggggacctcagcaaaggcaagttcataccaggcattagggtccaggaggatggggaccttcatggtgccacgtggcacagtcacagacttcctggtccctccaagtggttctggaagctgaagggaggtctctagtgacagtgacaggtcctagggctctgtgctcagctcggtctgtaacacagatgaggacaaataccagaagctgattgcaattacagactgatacgttagaaagcagaacttagcaagcttctcagaattagtcctcgaccaactcaggacaagaccaatacaagcactaccctgaggtgccacagggcaggttccacatagattgcaccttgatcccttgactcacccatctgacttcgcggaatttgtcctacggatgtgtcccccatgtgctcaacgatgcgctccacaatgttcactggcgcctggtcttgacacgaccccaaacccggaagcctcgtgaccctaagggggacccaatgggggaccctgcacgcactagaaccggcccctccggccccttggcacggcgaccccccggcacaccgtccgacaatccacgaccgcacccggcactcccaaccttagaagccgggcccggaacacggccccacgccggacacgcggccccccccgg

SEQ ID NO: 483463 - DNA, 150 bp, Homo sapiens
  misc_feature (94)..(95): n is a, c, g, or t
  misc_feature (126)..(126): n is a, c, g, or t
  misc_feature (146)..(146): n is a, c, g, or t
gcacgagcttctctgtgcctcagttccctcaggaagaactcgagtattcactctttcccgtgcgctgagcacacgtggaggggatgagggcacnngagaggagcagctgcagtcaaccatgagggngatcagaggccagtgaaggnttat

SEQ ID NO: 483464 - DNA, 3314 bp, Homo sapiens
  misc_feature (3236)..(3236): n is a, c, g, or t
  misc_feature (3277)..(3277): n is a, c, g, or t
  misc_feature (3291)..(3291): n is a, c, g, or t
gtttttcagggttctcaatggttacaagatagatcataagttgctgctgacaggaaccccattgcagaataatctggaggagctcttccatctcctgaacttcctcaccccagagagatttaacaacttggagggcttcctggaggagtttgctgacatatccaaagaggaccagatcaagaaactgcatgatttgctggggccacacatgctgcggagactcaaggcagatgtctttaagaacatgccagccaagacagagctcatcgttcgggtggagctaagccccatgcagaagaaatactacaaatacatcctgactcgaaattttgaggccttgaattcacgaggtggtgggaaccaggtgtcgctgcttaatatcatgatggatcttaagaagtgctgcaaccatccatacctttttcccgtggctgctatggagtcccccaaactccccagtggggcttatgagggtggggcacttattaagtcgtctgggaagctcatgctgctccagaagatgctgcgaaagctgaaggagcaaggacaccgagtgctcatcttctcgcagatgaccaaaatgttagacttgcttgaggacttcttagactatgaaggctacaagtatgagcgcatcgatggtggtatcacgggtgccctgaggcaggaggccatcgatcggtttaatgctcctggggcccaacaattctgcttcctcctgtccacccgagctgggggcctgggcatcaatctggccactgctgacactgtcatcatctttgattctgactggaacccccataatgacatccaggcctttagccgggctcatcggattggccaggccaacaaagtgatgatttaccggtttgtgactcgcgcgtcagtggaagagcgaatcacacaagtggccaagagaaagatgatgctgacacacctggttgtgcggcctgggctgggctccaaggcaggctccatgtccaagcaggagcttgacgacattctcaaatttggcactgaagagctattcaaggatgaaaacgagggggagaacaaggaggaggacagcagtgtgattcattatgacaatgaggccatcgctcggctgttggaccggaaccaggatgcaactgaggacactgacgtgcagaacatgaatgagtatctcagctccttcaaggtggcacagtacgtcgtgcgggaagaagacaagattgaggaaattgagcgagagatcatcaagcaggaggagaatgtggaccctgactactgggagaagctgctgaggcatcactatgagcaacagcaggaagacctagcccggaatctaggcaagggcaagcgggttcgcaagcaagttaactacaatgatgctgctcaggaagaccaagacaaccagtcagagtactcggtgggttcagaggaggaggatgaagacttcgatgaacgtcctgaagggcgtagacagtcaaagaggcagctccggaatgagaaagataagccactgcctccactgctggcccgagtcgggggcaacattgaggtgctgggcttcaacacccgtcagcggaaggctttcctcaatgctgtgatgcgctgggggatgccaccacaggatgccttcaccacacagtggctggtgcgggacctgaggggcaagactgagaaggagtttaaggcctatgtgtctttgttcatgcgccatctgtgtgagcctggggcagacggctctgaaacctttgccgatggggtccctcgggagggactgagtcgccagcaggtgttgacccgcattggagtcatgtctctcgtcaaaaagaaggtgcaggagtttgagcacatcaatgggcgttggtcaatgccggaactgatgcctgaccccagcgccgattctaagcgctcctccagagcctcctctcctaccaaaacgtctcccaccactcctgaggcttctgctaccaacagtccctgcacctctaaacctgctactccagctccaagtgagaaaggagaaggcataaggacacctcttgagaaggaggaagctgaaaaccaggaggaaaagccagagaagaacagcagaattggggagaagatggagacagaggctgatgcccccagcccagccccatcacttggggagcggctggagccaaggaagattcctctagaggatgaggtgccaggggtgcctggagagatggagcctgaacctgggtaccgtggggacagagagaagtcagccacagagtcgacgccaggagaaaggggggaggagaagccgttggatggacaggaacacagggagaggccggagggggaaacaggggatttgggcaagagagaagatgtaaaaggtgaccgggagcttcgaccagggcctcgagatgagccacggtccaatgggcgacgagaggaaaagacagagaagccccggttcatgttcaatatcgccgatggtggcttcacagagcttcacacactgtggcagaatgaggaacgggcagctatttcctcggggaaactcaatgagatctggcacagaagacatgactattggcttctggctgggattgtcctccatggctatgcacggtggcaggacatccagaatgatgctcaatttgccattatcaacgagccatttaaaactgaagccaataaggggaactttctggagatgaaaaataagttcctggcccggaggttcaagctcctggagcaggcgctggtgattgaggagcagctgcggcgggcggcctacctgaacctgtcgcaggagccggcgcaccccgccatggccctccacgcccgcttcgccgaggccgagtgcctggccgagagccaccagcacctctccaaggagtcgctggcggggaacaagccggccaacgccgtcctgcacaaggttctgaaccagctggaggagttgctgagcgacatgaaggcggacgtgacccgcctgccagccacgctgtcccgaataccccccatcgcagcccgccttcagatgtccgagcgcagcatcctcagccggctggccagcaagggcacggagcctcaccccacaccggcctacccgccgggtccctacgctacacctccggggtacggggcggccttcagcgccgcacccgtaggggccctggccgccgcaggcgccaattacagccagatgcctgcagggtccttcatcacagccgccaccaacggcctcacttcccacccttggcctnatggctagtgtcaacggctgatcgaagacccgacccggagnactgataacactgntgatccagctgcttaccagcccg

SEQ ID NO: 483465 - DNA, 2126 bp, Homo sapiens
catcttcctttcctccatgctccctttttcttcttctttctctccatctgtcttctgtggtaatctggtctctctgtctcttttcctgacactttttcttttcccctgagtgcttctgttttccatctacttcttttactttcttgatctctggttctttgacatctgtgttctcctctctcgctctttttctgcctgtatctgtccatctgatgcctctcttttcctggctccatctctgtatttccctgtctttctcttgcccttctttctctgtggcccgggcccagttctgaaccagctggaggagttgctgagcgacatgaaggcggacgtgacccgcctgccagccacgctgtcccgaataccccccatcgcagcccgccttcagatgtccgagcgcagcatcctcagccggctggccagcaagggcacggagcctcaccccacaccggtaaccctctttccccctagctccagttccctgtttgtgttcctcctgcacacatacaaacacttccatcagaatcctatacaatatggaaaaacaacttgctagaacacagtcatcacccttgagtgagtctccctgcctgtgtatcctacccttagcagttgtaggagtgtggctcataatgtctctcctacagcttctttcctctcacagactatgaactaactcccaacttctgcttcctctctgttccaggcctacccgccgggtccctacgctacacctccggggtacggggcggccttcagcgccgcacccgtaggggccctggccgccgcaggcgccaattacagccagatgcctgcagggtccttcatcacagccgccaccaacggccctccagtgcttgtgaagaaggagaaggaaatggtgggggcattggtgtcagacgggctggatcggaaggagccccgagccggggaggtgatctgtatagacgactgactggatcccaggcctgcccttcacccaggccccgtccccgaggccgacccccagctcaagcgctggggcctgctgccagccctccaccttccccaccccttgggccatcactgggctaggaacccctttgcccctctctgcagctcctctcttcaagaagggccctttgtctttctccactcccacacacctttcccaccaagccttgaagactgtgctggtgagaagaagtctgggtgggagatggctggcagggtcttccaagtaccttcctcccacactgccaagtatacacaacttcccagtaaatggttgtggggaggaaagaggtggagcctccccagccgtttccctgcagaatcagctctgtctcatgtggaagtggagaatcagccttgcctggcctttaggaacttttgtggggaagagagctttgaagagaggagggggactttagagagggatgaaaatgagccctgggagggaggaagggacgaggaggggtggctgcatgttaccgtcccctacctctccccacgtggagggtggagcagttatgagggaggaagtcaactgctgttcagcctcagaataaaggtgccgttcactggctcagttacctcctgtgtaccggcatcttgtgttgggaatgttcccccctccctagggaccaaggaccacccctacaaaaagagtaatggttgggtgatactccctcaagccaaagaggagctccccaacctgttctagggacccaggtaacctagaagggtgggagagaatacaatgggccagatgtggtggaagcccagctctggggctcaggttcctggaagacttctactaccctccctcctcaaggcctggatacagactaaatttgtataagtcaggcaggggacctagtcagggtcttgggagctaccttgtcgttgggaccagagcaaaatagtggagggcaggctagggaaatgtgggcacatcccccctcccaggaggggccggggagagtggcagtttgcatggcgaaccccccacttcctctttgctgccccttcactttcttgctgcccctttcccagtctctcttcacacccactcctggtctgtcctgatcccctcttctgtatcaggtttattggttgtacatataaattatactttcctt

SEQ ID NO: 483466 - DNA, 211 bp, Homo sapiens
gacgtccacggcatatgcatcagatcctcctcgaaagtaacttccgggtccgggtccgaaagtgccaccgccaccacgtgaatccccaaagccaaagtggcctcctcttccactcctagaactctgaacttccggcatttctggtctagacaaagcctttcttacttctgcattatgaccatggatggtatggtatttctgcaatacgatt

SEQ ID NO: 483467 - DNA, 529 bp, Homo sapiens
gctgatactggcatttgtagatgtggttgactatttctgtatgtctccatctatgatgagggccttaaaaaaaaaaaaaaaaaaaaaaaaaaaaaaaaaaaaggggggggggaaaaatttcccccggggggccccattacgtccccagtttttggtgtttcaaaaggtgggcccttatagagggggtgcgattattaatagaagcatagaggcaagagggcggggttataacaaggctggggatcgtgggaaaaaagctggttagtgggggatatcttggggggagggaaccccctaatttggtgggggggggacatattggtggggaacaaacttcccttaaagaagagaatttaaaggcgctcaagggggaaaataataaaaatttttaagggtgtgttatagcgtggtggtaaaccaacagtgcggcaataatggcagtggcggcctagaaaagcattggggctcaggggggtatatgacttttggaaaacaatattttcacgcgggctgtgtagaaaaaaaagat

SEQ ID NO: 483468 - DNA, 3011 bp, Homo sapiens
gtttttcagggttctcaatggttacaagatagatcataagttgctgctgacaggaaccccattgcagaataatctggaggagctcttccatctcctgaacttcctcaccccagagagatttaacaacttggagggcttcctggaggagtttgctgacatatccaaagaggaccagatcaagaaactgcatgatttgctggggccacacatgctgcggagactcaaggcagatgtctttaagaacatgccagccaagacagagctcatcgttcgggtggagctaagccccatgcagaagaaatactacaaatacatcctgactcgaaattttgaggccttgaattcacgaggtggtgggaaccaggtgtcgctgcttaatatcatgatggatcttaagaagtgctgcaaccatccatacctttttcccgtggctgctatggagtcccccaaactccccagtggggcttatgagggtggggcacttattaagtcgtctgggaagctcatgctgctccagaagatgctgcgaaagctgaaggagcaaggacaccgagtgctcatcttctcgcagatgaccaaaatgttagacttgcttgaggacttcttagactatgaaggctacaagtatgagcgcatcgatggtggtatcacgggtgccctgaggcaggaggccatcgatcggtttaatgctcctggggcccaacaattctgcttcctcctgtccacccgagctgggggcctgggcatcaatctggccactgctgacactgtcatcatctttgattctgactggaacccccataatgacatccaggcctttagccgggctcatcggattggccaggccaacaaagtgatgatttaccggtttgtgactcgcgcgtcagtggaagagcgaatcacacaagtggccaagagaaagatgatgctgacacacctggttgtgcggcctgggctgggctccaaggcaggctccatgtccaagcaggagcttgacgacattctcaaatttggcactgaagagctattcaaggatgaaaacgagggggagaacaaggaggaggacagcagtgtgattcattatgacaatgaggccatcgctcggctgttggaccggaaccaggatgcaactgaggacactgacgtgcagaacatgaatgagtatctcagctccttcaaggtggcacagtacgtcgtgcgggaagaagacaagattgaggaaattgagcgagagatcatcaagcaggaggagaatgtggaccctgactactgggagaagctgctgaggcatcactatgagcaacagcaggaagacctagcccggaatctaggcaagggcaagcgggttcgcaagcaagttaactacaatgatgctgctcaggaagaccaagacaaccagtcagagtactcggtgggttcagaggaggaggatgaagacttcgatgaacgtcctgaagggcgtagacagtcaaagaggcagctccggaatgagaaagataagccactgcctccactgctggcccgagtcgggggcaacattgaggtgctgggcttcaacacccgtcagcggaaggctttcctcaatgctgtgatgcgctgggggatgccaccacaggatgccttcaccacacagtggctggtgcgggacctgaggggcaagactgagaaggagtttaaggcctatgtgtctttgttcatgcgccatctgtgtgagcctggggcagacggctctgaaacctttgccgatggggtccctcgggagggactgagtcgccagcaggtgttgacccgcattggagtcatgtctctcgtcaaaaagaaggtgcaggagtttgagcacatcaatgggcgttggtcaatgccggaactgatgcctgaccccagcgccgattctaagcgctcctccagagcctcctctcctaccaaaacgtctcccaccactcctgaggcttctgctaccaacagtccctgcacctctaaacctgctactccagctccaagtgagaaaggagaaggcataaggacacctcttgagaaggaggaagctgaaaaccaggaggaaaagccagagaagaacagcagaattggggagaagatggagacagaggctgatgcccccagcccagccccatcacttggggagcggctggagccaaggaagattcctctagaggatgaggtgccaggggtgcctggagagatggagcctgaacctgggtaccgtggggacagagagaagtcagccacagagtcgacgccaggagaaaggggggaggagaagccgttggatggacaggaacacagggagaggccggagggggaaacaggggatttgggcaagagagaagatgtaaaaggtgaccgggagcttcgaccagggcctcgagatgagccacggtccaatgggcgacgagaggaaaagacagagaagccccggttcatgttcaatatcgccgatggtggcttcacaggttggggagactctcgctgctttctgctcctcaaggggatctgctcatcctcatggggtttctcgttttgcctgaggcttcctgctacctttaattccaagtaacttccaatgaagtatgttgcatgctgactccgatccttgctctaaatctttcttaagtatccctcttaactccaaagctggccctaatcccacctttattcttaattctaacgaacctggttagaactgagtttgttccaaacctaacctttacccattcctcttcaggagcccttagttccctttcattattcagtttctccatctctacctgtctgttggactgagtgcagtctgcaaaaccctgttacctcttctgtctgctgccttctttgcagagcttcacacactgtggcagaatgaggaacgggcagctatttcctcggggaaactcaatgagatctggcacagaagacatgactattggcttctggctgggattgtcctgtatcctttgatacacatgcaagaaggaaaaggttctctcaagctggca

SEQ ID NO: 483469 - DNA, 1775 bp, Homo sapiens
  misc_feature (626)..(626): n is a, c, g, or t
  misc_feature (1436)..(1436): n is a, c, g, or t
gcaacacttgctccctcgaaggaaactaaagcttatgcagagtcaacgcccgggccttggcaaaacagcactgcattctaaacatccctctcatccagacacagctggcttcttttgcttatgctggtacttgtgacgactggcagctcctcacttcatgctcaccacaaggacatgggaagatgcaagcttgtgctgaagacatctctgcggcctcaacactggccaaactcctatcccagccttcacacatagggtttcaaaggcccaaattccatccatgatcctcaagcgcctcccgatgaatgataagcctggcgactataccacgcgcatggccccgatcgccacacccagcatcgcccgtgttcctacaaatatctcatatgaataagtattaatttaaggcctaaagcacagcaagtgcgacgcggcatcatttcgaacgccaagtgtggagtatgagggcaccccaaggtgtacacttgcacattcttatgtgaacaaaccttcctccgtgtgtaaccctgttccgatgttggttgaatttctatgtgccctatggcccgtattggagccccgtttcgtctctaaacaagctatgcctaagggggaatttacactanaacgcggttggttggtactgcctttataactgcaattacaacggtgggcaatattacttttgaagacgcttaattgcggctcttatggtccaaccatcaccgatggaaaattttccctaatcccctgtttgagtcccaaatagaaacggttataatgaaaaacaacgagtttaaacctcgagttggagggaatccccagttggaccacctaatacccccaatatggaaatggcccttttgttggcatatggaaacttcgtactataacaacgtttccgaaatggaacagggattccagcgctggaccgaagataccaaacagaaacaggtgttcgttcatattccgaagaacacttattacatgatgctatacaatccatttctctaacgccttgtcaataaacttactgaaactttcaatcacgcttatcaatccttgattaaacattctcaactgttcgtagacattctcaacattcataaaggtccgtggaacagcaatccaaaaacaggaatgttaccttttgtggaccacctacccttgggtgtacaaggaccccgaccaaaggaaagccctgtggtggcacaggctttgtccaaccggagtgggggcttcgcctttggaaccttcctcacaccgagcgcttccttatatggcaattgtgccaagcgacgtccatgcggaaaccaccttttccgcccttaggtgattttaaccaagggggcgccacagtccccttgtgatcaccgagacgtcctttccgaagggtcccccttatacacctgtaggaaaagagatagaagggattnacaggaggtgcgaacactttaacccaagcgcggttaaagggtgtcacaacccccaaaaagccaaagataaatcgccccgcagagaccatttacaatataagcgtattagtacgtaataagtctatatataactatactatagagggttcaacgcatagcaacaatcaagccgcggattcatcgcccaatctcacttgggtctgggccccgggaggaggaataagagccgcacatccggaaaaaccgtttacccttaagtgagcctacaaacgacgaggaagacgccctttccctgtaatccctttgggcgaacagtcccaccaaaaagcgggtattgaa

SEQ ID NO: 483470 - DNA, 2313 bp, Homo sapiens
gtttttcagggttctcaatggttacaagatagatcataagttgctgctgacaggaaccccattgcagaataatctggaggagctcttccatctcctgaacttcctcaccccagagagatttaacaacttggagggcttcctggaggagtttgctgacatatccaaagaggaccagatcaagaaactgcatgatttgctggggccacacatgctgcggagactcaaggcagatgtctttaagaacatgccagccaagacagagctcatcgttcgggtggagctaagccccatgcagaagaaatactacaaatacatcctgactcgaaattttgaggccttgaattcacgaggtggtgggaaccaggtgtcgctgcttaatatcatgatggatcttaagaagtgctgcaaccatccatacctttttcccgtggctgctatggagtcccccaaactccccagtggggcttatgagggtggggcacttattaagtcgtctgggaagctcatgctgctccagaagatgctgcgaaagctgaaggagcaaggacaccgagtgctcatcttctcgcagatgaccaaaatgttagacttgcttgaggacttcttagactatgaaggctacaagtatgagcgcatcgatggtggtatcacgggtgccctgaggcaggaggccatcgatcggtttaatgctcctggggcccaacaattctgcttcctcctgtccacccgagctgggggcctgggcatcaatctggccactgctgacactgtcatcatctttgattctgactggaacccccataatgacatccaggcctttagccgggctcatcggattggccaggccaacaaagtgatgatttaccggtttgtgactcgcgcgtcagtggaagagcgaatcacacaagtggccaagagaaagatgatgctgacacacctggttgtgcggcctgggctgggctccaaggcaggctccatgtccaagcaggagcttgacgacattctcaaatttggcactgaagagctattcaaggatgaaaacgagggggagaacaaggaggaggacagcagtgtgattcattatgacaatgaggccatcgctcggctgttggaccggaaccaggatgcaactgaggacactgacgtgcagaacatgaatgagtatctcagctccttcaaggtggcacagtacgtcgtgcgggaagaagacaagattgaggaaattgagcgagagatcatcaagcaggaggagaatgtggaccctgactactgggagaagctgctgaggcatcactatgagcaacagcaggaagacctagcccggaatctaggcaagggcaagcgggttcgcaagcaagttaactacaatgatgctgctcaggaagaccaagacaaccagtcagagtactcggtgggttcagaggaggaggatgaagacttcgatgaacgtcctgaagggcgtagacagtcaaagaggcagctccggaatgagaaagataagccactgcctccactgctggcccgagtcgggggcaacattgaggtgctgggcttcaacacccgtcagcggaaggctttcctcaatgctgtgatgcgctgggggatgccaccacaggatgccttcaccacacagtggctggtgcgggacctgaggggcaagactgagaaggagtttaaggcctatgtgtctttgttcatgcgccatctgtgtgagcctggggcagacggctctgaaacctttgccgatggggtccctcgggagggactgagtcgccagcaggtgttgacccgcattggagtcatgtctctcgtcaaaaagaaggtgcaggagtttgagcacatcaatgggcgttggtcaatgccggaactgatgcctgaccccagcgccgattctaagcgctcctccagagcctcctctcctaccaaaacgtctcccaccactcctgaggcttctgctaccaacagtccctgcacctctaaacctgctactccagctccaagtgagaaaggagaaggcataaggacacctcttgagaaggaggaagctgaaaaccaggaggaaaagccagagaagaacagcagaattggggagaagatggagacagaggctgatgcccccagcccagccccatcacttggggagcggctggagccaaggaagattcctctagaggatgaggtgccaggggtgcctggagagatggagcctgaacctgggtaccgtggggacagagagaagtcagccacagagttgacgccgggagtaggggggagagataccttggatgacattccacggggacaactctctcg

SEQ ID NO: 483471 - DNA, 135 bp, Homo sapiens
gcgtatctgagatcccttggtgtcttttctggtagagtaaaggggtatttcttctcgagctatgaccgattatttatctttgcttattaataatattagaaaaatgtcccagaaatagaagtaacaagagctttg

SEQ ID NO: 483472 - DNA, 438 bp, Homo sapiens
  misc_feature (1)..(1): n is a, c, g, or t
  misc_feature (75)..(75): n is a, c, g, or t
  misc_feature (128)..(128): n is a, c, g, or t
  misc_feature (263)..(263): n is a, c, g, or t
  misc_feature (281)..(281): n is a, c, g, or t
  misc_feature (298)..(298): n is a, c, g, or t
  misc_feature (325)..(325): n is a, c, g, or t
  misc_feature (362)..(362): n is a, c, g, or t
  misc_feature (389)..(389): n is a, c, g, or t
nggccgccagtgtgctggaaaggtccgtcaggaaatcgtcgatgaccaccacgttggggcggtgttccaggtagnggcgctggacctgccccgggtgccacgatggcgagagagcgcgcgcgacccgnggcgcatcggcaacgtgaaccagccgcccgaaggcgcgcccgaccgtacgctcgtcctcgtcggtcagcggtgcccgggcgatgcccagaccggacagccttgccagcgcggccttgtagtcagcgatgatcgantccagtggggcatcgatnccccggcggcgcaagtnctcgaactgatcgatgtcgtggcgcanttgcccaccgacaggcgcgcgttggcaatcgggcgtntacggccgcccagccacgccgggtgcnacgcgctgccccgctcgagtcccgtcaggatcgtcgccagatcgccggc

SEQ ID NO: 483473 - DNA, 1455 bp, Homo sapiens
  misc_feature (1422)..(1422): n is a, c, g, or t
  misc_feature (1426)..(1426): n is a, c, g, or t
gtttttcagggttctcaatggttacaagatagatcataagttgctgctgacaggaaccccattgcagaataatctggaggagctcttccatctcctgaacttcctcaccccagagagatttaacaacttggagggcttcctggaggagtttgctgacatatccaaagaggaccagatcaagaaactgcatgatttgctggggccacacatgctgcggagactcaaggcagatgtctttaagaacatgccagccaagacagagctcatcgttcgggtggagctaagccccatgcagaagaaatactacaaatacatcctgactcgaaattttgaggccttgaattcacgaggtggtgggaaccaggtgtcgctgcttaatatcatgatggatcttaagaagtgctgcaaccatccatacctttttcccgtggctgctatggagtcccccaaactccccagtggggcttatgagggtggggcacttattaagtcgtctgggaagctcatgctgctccagaagatgctgcgaaagctgaaggagcaaggacaccgagtgctcatcttctcgcagatgaccaaaatgttagacttgcttgaggacttcttagactatgaaggctacaagtatgagcgcatcgatggtggtatcacgggtgccctgaggcaggaggccatcgatcggtttaatgctcctggggcccaacaattctgcttcctcctgtccacccgagctgggggcctgggcatcaatctggccactgctgacactgtcatcatctttgattctgactggaacccccataatgacatccaggcctttagccgggctcatcggattggccaggccaacaaagtgatgatttaccggtttgtgactcgcgcgtcagtggaagagcgaatcacacaagtggccaagagaaagatgatgctgacacacctggttgtgcggcctgggctgggctccaaggcaggctccatgtccaagcaggagcttgacgacattctcaaatttggcactgaagagctattcaaggatgaaaacgagggggagaacaaggaggaggacagcagtgtgattcattatgacaatgaggccatcgctcggctgttggaccggaaccaggatgcaactgaggacactgacgtgcagaacatgaatgagtatctcagctccttcaaggtggcacagtacgtcgtgcgggaagaagacaagattgaggaaattgagcgagagatcatcaagcaggaggagaatgtggaccctgactactgggagaagctgctgaggcatcactatgagcaacagcaggaagacctagcccggaatctaggcaagggcaagcgggttcgcaagcaagttaactacaatgatgctgctcaggaagaccaagacaaccagtcagagtactcggtgggtcagancatnaggtgtatcctcaagagtcagctatggct

SEQ ID NO: 483474 - DNA, 1333 bp, Homo sapiens
gtttttcagggttctcaatggttacaagatagatcataagttgctgctgacaggaaccccattgcagaataatctggaggagctcttccatctcctgaacttcctcaccccagagagatttaacaacttggagggcttcctggaggagtttgctgacatatccaaagaggaccagatcaagaaactgcatgatttgctggggccacacatgctgcggagactcaaggcagatgtctttaagaacatgccagccaagacagagctcatcgttcgggtggagctaagccccatgcagaagaaatactacaaatacatcctgactcgaaattttgaggccttgaattcacgaggtggtgggaaccaggtgtcgctgcttaatatcatgatggatcttaagaagtgctgcaaccatccatacctttttcccgtggctgctatggagtcccccaaactccccagtggggcttatgagggtggggcacttattaagtcgtctgggaagctcatgctgctccagaagatgctgcgaaagctgaaggagcaaggacaccgagtgctcatcttctcgcagatgaccaaaatgttagacttgcttgaggacttcttagactatgaaggctacaagtatgagcgcatcgatggtggtatcacgggtgccctgaggcaggaggccatcgatcggtttaatgctcctggggcccaacaattctgcttcctcctgtccacccgagctgggggcctgggcatcaatctggccactgctgacactgtcatcatctttgattctgactggaacccccataatgacatccaggcctttagccgggctcatcggattggccaggccaacaaagtgatgatttaccggtttgtgactcgcgcgtcagtggaagagcgaatcacacaagtggccaagagaaagatgatgctgacacacctggttgtgcggcctgggctgggctccaaggcaggctccatgtccaagcaggagcttgacgacattctcaaatttggcactgaagagctattcaaggatgaaaacgagggggagaacaaggaggaggacagcagtgtgattcattatgacaatgaggccatcgctcggctgttggaccggaaccaggatgcaactgaggacactgacgtgcagaacatgaatgagtatctcagctccttcaaggtggcacagtacgtcgtgcgggaagaagacaagctgtgcttcctctcctggttctcaaaaattccaacttatcttcccaatgtcccttttactccagcctcctcacagacttcacgaactgctgccacacttggctcagcctggtctccatac

SEQ ID NO: 483475 - DNA, 1372 bp, Homo sapiens
gtttttcagggttctcaatggttacaagatagatcataagttgctgctgacaggaaccccattgcagaataatctggaggagctcttccatctcctgaacttcctcaccccagagagatttaacaacttggagggcttcctggaggagtttgctgacatatccaaagaggaccagatcaagaaactgcatgatttgctggggccacacatgctgcggagactcaaggcagatgtctttaagaacatgccagccaagacagagctcatcgttcgggtggagctaagccccatgcagaagaaatactacaaatacatcctgactcgaaattttgaggccttgaattcacgaggtggtgggaaccaggtgtcgctgcttaatatcatgatggatcttaagaagtgctgcaaccatccatacctttttcccgtggctgctatggagtcccccaaactccccagtggggcttatgagggtggggcacttattaagtcgtctgggaagctcatgctgctccagaagatgctgcgaaagctgaaggagcaaggacaccgagtgctcatcttctcgcagatgaccaaaatgttagacttgcttgaggacttcttagactatgaaggctacaagtatgagcgcatcgatggtggtatcacgggtgccctgaggcaggaggccatcgatcggtttaatgctcctggggcccaacaattctgcttcctcctgtccacccgagctgggggcctgggcatcaatctggccactgctgacactgtcatcatctttgattctgactggaacccccataatgacatccaggcctttagccgggctcatcggattggccaggccaacaaagtgatgatttaccggtttgtgactcgcgcgtcagtggaagagcgaatcacacaagtggccaagagaaagatgatgctgacacacctggttgtgcggcctgggctgggctccaaggcaggctccatgtccaagcaggagcttgacgacattctcaaatttggcactgaagagctattcaaggatgaaaacgagggggagaacaaggaggaggacagcagtgtgattcattatgacaatgaggccatcgctcggctgttggaccggaaccaggatgcaactgaggacactgacgtgcagaacatgaatgagtatctcagctccttcaaggtggcacagtacgtcgtgcgggaagaagacaaggtgagaggctttgggggccagacattatctatcccaggccatctccaaaaggcagtatcctttactcagccttgaagtaggagggtctgtcccccttaaaacagtagtggacctcaaacaacttcttcgtctaatagctgagaccatcgtgcactcgaa

SEQ ID NO: 483476 - DNA, 233 bp, Homo sapiens
  misc_feature (12)..(12): n is a, c, g, or t
  misc_feature (176)..(177): n is a, c, g, or t
aggaagttgtgnccgtgcgccaggagctgtcccactaccgcgccgtgctgtcccgataccaggcccagcacggggccctgtgaggctgccccacatccccacctgggagctctccttcgccttgctgagacttacgccctgttcccttcctgccctggtgccacgggccggccagnngggtgccccagggacgtgataatgcagataaatacatttatatttttaagaaaaaa

SEQ ID NO: 483477 - DNA, 140 bp, Homo sapiens
aggtacctagatccgtatagagaggtagtgagcatgtgtcgacacttttcatttctaggagggatcagagagtgatgcagcagaaagagtgtgaggtcagcagattcggagtgaggatattgaatataggtttgtcactt

SEQ ID NO: 483478 - DNA, 119 bp, Homo sapiens
ccaaggattctcaactagggggacactcactctatctatttcgcacgccacatgataactgatgtgcgactggggaccgcgacggttgccactgcatggcataccacagcatccctact

SEQ ID NO: 483479 - DNA, 845 bp, Homo sapiens
agcggagtcgtccgttgggtttccgcgccagccgcagatcttggaccataatcatggtggacatgatggacttgcccagattcatcccaccggaaaaatgtttattctttcagagtggacgacacgggaacacagagtggaaccatcgagttgtaatggaaacccctgtgatgaatgacatctctggcaattgtggtaagtggttggagatgagtaaccgccaaggcgctactcatcttgtgtacagtcttatgtccacgtttacaatgaagatagctcatcgctttggactcttggagctttaccatgtgaagctgtgaaaccattgtccatgacttccctcaggtataatcctttagggacttgtgcgacatgagtggagtcttgatggattttcatacgacttgtaaattgagctatattaaaggtctattatgaggaatgccctctctgggtttgaggaatcgaacctcacaagcgacagatttctccacacggagtgggaatggccgggcacataagggggacccagaatgctgtgccgagggaggggtgcctcggaacgccaaactttgtgccacccttgtgattagcggggttaacatgtcacacgatcggggtgaggggaaagtcccccactggggaggggcaccaatctcgcgtggataagcacgggggtgtatgaacaagacttagtgaaaacgcgagggtcctaaacaaattgtcccactccgaacctccggggcacagccacaaacaagcgggaaccagggggaaacctatgatacgctgaatcaaagggctgcacttggaagggtgggggcccagagagagttacctggtga

SEQ ID NO: 483480 - DNA, 427 bp, Homo sapiens
ggtcggtacccggggccagagactggattaagtggccctaggagacgggacgtgctcttattctcgtgatctgatactgctgatttctgacccttggtctgatcagaatcctcctttatacagcttttatgaagttattgtccagctgggcacggtggctcgtgcctgttgtcccagtactttggtatgccaagctgggtgtcttctgaggtcaggatatcaagatcatcctggtgctaacacagtgaaaccccatctctactatgaaattcaaaaaacatgaacgaaattagccggcccttggttggcgggttgcctgtattcccagctacggggaaggctgaggaaggaaaatggcgtgaacccggaaggcggagctttgcagtgagccgagatcacgccattgctctccagtctctggcccccg

SEQ ID NO: 483481 - DNA, 121 bp, Homo sapiens
gagcagtggaagggaagaagagactgaaaataaactatataatcgcccattaagcaaggagatctctactgaagttcagctaagtacctaagctaccatataatttgtataaggactgagc

SEQ ID NO: 483482 - DNA, 754 bp, Homo sapiens
  misc_feature (187)..(187): n is a, c, g, or t
  misc_feature (192)..(192): n is a, c, g, or t
  misc_feature (197)..(197): n is a, c, g, or t
  misc_feature (205)..(205): n is a, c, g, or t
  misc_feature (243)..(243): n is a, c, g, or t
  misc_feature (255)..(256): n is a, c, g, or t
  misc_feature (307)..(307): n is a, c, g, or t
  misc_feature (331)..(332): n is a, c, g, or t
  misc_feature (341)..(341): n is a, c, g, or t
  misc_feature (362)..(363): n is a, c, g, or t
  misc_feature (427)..(427): n is a, c, g, or t
  misc_feature (430)..(431): n is a, c, g, or t
  misc_feature (435)..(436): n is a, c, g, or t
  misc_feature (439)..(439): n is a, c, g, or t
  misc_feature (457)..(457): n is a, c, g, or t
  misc_feature (461)..(461): n is a, c, g, or t
  misc_feature (466)..(466): n is a, c, g, or t
  misc_feature (469)..(469): n is a, c, g, or t
taacattaaaatgtacaactggtgatgttcaaatgttgtactactactcttcaatgtactgtgcaggaagtgggggaacagttcatactatagagagttacagtttagatgtatgtgtaaatcgattagctatttatccaactactgtatatttaggtaactagaatttcaaaatagaaaaaaaaanacggngtccngtttggcncatagaaagaagcagatcagatggtcctatgtggcgcngtatatatgaanngttgggacggtacatctaaagaatgattccgtcctaacacccacccagccngttggaacacattctaatggtctnnccattggtngcatttaagtatgagatgacnngatcttatgaatgtctcgtcagcacaactgtcataatttcaacagtcttggcgagtatacatgnttnnctanncangttgacaactgtttcatnctgnaaccnttncctaactttggtgtgatggccaggtaggagttcaaaaatccaaagaattacccactgtaaggtagctgagcaaagaaagcaaaaagaacaagacgacgaaacgcagcccagtgggggcacgcgaggcaccccccggacacgaggtcttcagaaacaatgtcggcggacgggcgaagcccggcagagagagaagacggacgcacgggcgccagaggagcagggggagacacgagggggtcgcaacagaaaaggcagcgggcccgacggctggacaaccccaacggg

SEQ ID NO: 483483 - DNA, 119 bp, Homo sapiens
caccagctattctattctaacagaagtgactatagggaattaatagctcatgacacactgagaaggttataattgtagatcggtgtgaatcccacagcagaatgtatcttggaagctct

SEQ ID NO: 483484 - DNA, 164 bp, Homo sapiens
ccagctctcgcagagatcgaggaagggctgctgtacagatttcctgccccaggaccccatcccgcgctgatggagggtcgcaggagcaacgtgaaagtggaggctgaggccagccgacaatgagggttggactggtgtcttcagacccaggacctcaaacttct

SEQ ID NO: 483485 - DNA, 112 bp, Homo sapiens
  misc_feature (84)..(84): n is a, c, g, or t
gattttcagttttgcctgcgtcataaaagagagcactccattgctttttttcctggccacactgctacaatccagcactactanccatgtccagggtaaggatcgagatcga

SEQ ID NO: 483486 - DNA, 87 bp, Homo sapiens
  misc_feature (13)..(13): n is a, c, g, or t
  misc_feature (33)..(33): n is a, c, g, or t
tcgcaaaagaagngtaccataactcctatttcnaatggctgattgtagtagcactggaagtttatcaaaacccaggtgtaaatatgc

SEQ ID NO: 483487 - DNA, 424 bp, Homo sapiens
agctctggtccagattgggtctgaagtagcaccccatcctagaagctctggacacaggataggtgctttagcctacataggtttccaagcttagagccttgctggatctctcaccctctgtaactttctttgaactacctttgaagtcattgccaaaaattccgaagattgggccagagagacattgactggattgactgaatatttaatccagtcccccctactccaaatggcaatgagtacaggttttgttttatttcatatcttatacttcaacaactacaaaaacatagtaattattagagcaaacaattttcactgtgagtaacccccaaactttcccacaattctcacgataaaacataaattaattgctatgcctaggaaatttgtattttcttaattaaaattttaagttaacagt

SEQ ID NO: 483488 - DNA, 111 bp, Homo sapiens
cacaggcaccacaatcctacctccatcgatacccactaaaacactcaccaagacctcaacccctgaaccccatgcctcaggatactcctcaatagccatctactgtatcgg

SEQ ID NO: 483489 - DNA, 726 bp, Homo sapiens
  misc_feature (74)..(74): n is a, c, g, or t
cttttgcggagcatgacgtgctcattttcgtacatctgaggaactgattacactgatgatctactgtgttaganaacaatagaagagaatgcctaattattaaacgaggaacttactggctaaggattaactatcttttgggaaggaatcacatagccaaacctaatgttcttaattctatttatccataacaacacacgttgacagttgttggaccaatgatagacattaaagcgcaaaagtctaaaagttgatggaagggatgaccttcctgtgaaaagggatgctctttcaacatgacgatcatgaggatatgtaatgaacctatattcataatcatttgcttatacaagaaagtgggataaattggttggtgagatcagagaagaagaaaagaatgaatagctggagggagatgcatcttttaacagattatttgagcacacctcattctatggatgctgttgagatgtacacgtgccatgatcgactcctttatggagtcgggtggtacagatttgactaccatctggactggatgttgccataggatagttgtagcacatcgtcctggtggtctggtatgcaaaaagaacttacagaataactttgttctcataaactaaacatctcaggtctcgatggcctctctcgtggaactcgactgtacgtataccgttatgtgaggggttaaacactgacccatgatgcctgactccataaaca

SEQ ID NO: 483490 - DNA, 174 bp, Homo sapiens
  misc_feature (89)..(89): n is a, c, g, or t
ttggcgagagacactataccccaatgcatccctgctgtccagaactgtcacccagaatgacacaggattctataccctacaagtcatanagtcagatcttgtgaatgaagaagcaaccggacagttccatgtatacccggagctgcccaagccctccatctccagcaacaactc

SEQ ID NO: 483491 - DNA, 600 bp, Homo sapiens
gcagaatcagactatcaggaaaggagctggccagggccacagccagtcaagatctctgagcaacttagagacatggtgtcagggtatgaagcttgcatttaatacatttatacataatacattgtacatttaattcataacgtctcttggtcacagatgccttatatataaaataagtgccagatctctaagatgcctagtacaccttgtatctcatttgatgtgatacccagaagagatcatggtttgttggttcgtttttcaagaagatccttcgtgatcaccatgctgttctcatggtaagaactggagttatgttctttaaattcggacatatgacattttatgtcagcactttatcaccaacgtgcaaagcgacaaataccaccgctgcttaatcactggcttggcttctcttttatcgaaccatgatagatcactatgtatctacaacagagtactaataatcaaaacacagtacaaccattctatttctctatggtctaccagcatgccagtcaatacatatggtaggaccaataaataaattatcaattaacacatctcgtgtcacctaattcaaagcatagcgataaatga

SEQ ID NO: 483492 - DNA, 385 bp, Homo sapiens
tttcctcaaaaaaaaaaaaaaaaaaaaaaaaaaaaaaaaaaaaaaaaaaaaaaaaaaaaaaaaaaaaaaaaaaaaaaaaaaaaaaaaaaaaaaaaaaaaaaaaaaaggggggggggccttttttttttttccttgggggggcccaactttccccccccccattttttttgaccaagggggcccttttggggggtttttttttagcctgggcccgggccgtttttttccaccgtcggggtggggaaacctgtttcttggggttttttgggagggaccctttttttgggggggggcctttttgggccaccctccctccggaattttaaggctttggggaaattttaaattttttaggggtttagggggtaaacctccctgcttttcc

SEQ ID NO: 483493 - DNA, 797 bp, Homo sapiens
  misc_feature (202)..(202): n is a, c, g, or t
  misc_feature (288)..(288): n is a, c, g, or t
  misc_feature (345)..(345): n is a, c, g, or t
tgcccttttttttgtgcctcaaatctgaaggccttttatgtatagattgtactaggacctgcagatctagtgtctttactcatcataggtaacaattggatttagcgagaaaatataggtatttctgttttgagtttcgttaacagcaaattgtttagatgggattaaaggcccaaaatgtactctagttatctttgtggancccatggatgaacacctatatatatagagagagagtgtgtgtgtgtatgtatatgtatgtacgtgtgtatactcaccgttggactnaaactcaggtaattctactgcctcagcttcttgagtaggggggattacaagtgtgtnccactgtgcctagtttatgttgtgttttagtggtgtaaatcttgtgtaccaggtcagaataattgttttagttggaggagctaagttgaaataagtatttggttatcataagttacagttcataagcactttaaaaataaccccttttcttcaattaactatatattggcttggtgtgttggctcacacctgtaattctaacactttgagaggccaaggtgggtggattgcttgagcttaggagtttgaaacccccctgggcggcatggcaaaacctcgtctctaccaaaaatacaaaaattacctgggcatggtggtatgtgcctctggtcccagccactcaggaggctgaggtgggtggattgcttgagtccgtgaggtggaggctgcagtgagtggagatcgcaccactccactccagcctgggtgacagagtgagatcttgcctcaaa

SEQ ID NO: 483494 - DNA, 101 bp, Homo sapiens
gcaatgcagctcaaaacgtttagcctagccacacccccacgggaaacagcagtgattaccctttagcaataaccgaaagtttaactaagctattctacccc

SEQ ID NO: 483495 - DNA, 1192 bp, Homo sapiens
agcgggcttgctctctggagctggagccggagctgccgccagccgcccgcctcagtgctctctctgccagccgtgctggccagtgccctgcggggtggtcgggggggagccgggcggcaagagaaggagtggagcgggtacggtgcctcctagcctgaggaccggtaagccgaagcccttgagcctgctcgcttgcctgctgcctgccgccgcctgccgctgaccctgcgatggggaacaacggaccaacgccggccgagctaggctgccttgccccaaagccccgcgggaaacgcgcaaccccagccacccaaaatgccccaagaacaccgtgacccgttgcgttggcaccgtggccctcccgcagggcacccgagcatgacacgcgccaccacacgacgttctcacagccaccgggcacaggacctgtcccctttacaaacacgcctctaccacagcagacacattcatttatcacgttccattcccggacgcatccacatactcacccacactaaacacttatattacactcccatgaactcacacatattaattatataaataccatatacacgcacacaaaaaacctatactattaattacatatcacgtacctcaacaataatctattctactgtctacaatacacacactacacagcactagacccaccaaactaccacacctaccacccaccgtcagcaccccactatttccagaatgacacaccactccctaaatccaccccccaatactcacaaactaaatctcgaaacttacactacactaaccacactactaccacataccaacacaacgtctcccacatcctgtcttctcaaccatcaacagcgtaccacctcccaacacacacaacctactactaccctctcactagatcccatcttcagtccttcctttagttcatcatcaattagtctcttcagcaatcataaactttcataatctactcacatgtgtacacttcctacacttcacatcttctcttacttcctctacttaatatctcattatattcatatcactctatgtagtaccttactcctattactccaataactacactaccttatctctattaactaccctactttaatattatatactatcatctattttagtagattctcaatacacagcttaatctaatatgatctctctacttctt

SEQ ID NO: 483496 - DNA, 540 bp, Homo sapiens
  misc_feature (187)..(187): n is a, c, g, or t
  misc_feature (189)..(190): n is a, c, g, or t
  misc_feature (219)..(219): n is a, c, g, or t
  misc_feature (283)..(283): n is a, c, g, or t
  misc_feature (288)..(288): n is a, c, g, or t
  misc_feature (291)..(292): n is a, c, g, or t
  misc_feature (297)..(297): n is a, c, g, or t
  misc_feature (320)..(320): n is a, c, g, or t
  misc_feature (322)..(324): n is a, c, g, or t
  misc_feature (335)..(336): n is a, c, g, or t
  misc_feature (344)..(344): n is a, c, g, or t
  misc_feature (348)..(348): n is a, c, g, or t
  misc_feature (370)..(370): n is a, c, g, or t
  misc_feature (438)..(438): n is a, c, g, or t
  misc_feature (446)..(446): n is a, c, g, or t
  misc_feature (480)..(480): n is a, c, g, or t
  misc_feature (504)..(504): n is a, c, g, or t
tgagagttttaaataactctcaaagggggaactgtggaaatataaatttctatcaactaattccaaatgaaaaataatctacgtataactgaaaagttatattctctggtttttaattatataattttattaacatcccagctaggaaggacattaaccttttgtctctctgataacaggctaagcnanngtaatgcaaattgtcagtttcacagcatngggtgtctattgttttctcttttcgatcaaatggtcaggcggtttctgtctccagaacatgatnagatnaannctganaagcagtttaccctgccgacccnannnttaatttgcannctttgttnagcnatatcccctcctcctaagaacncaatatagccatgaaatctttgtcttaattcagacttgtgtgagacttgtgaaagaacttgcagactncggacctntagtaggctcttgcagacacggacatcttaaagncgctgtatgactgcagattaaccnacacgtctcaataaaggaattctgcttgtttcgaga

SEQ ID NO: 483497 - DNA, 804 bp, Homo sapiens
tcgcgggctcagaccgaaccgactcgaccgcgccccagccaggcgccatgctgccgcttctgctgggcctgctgggcccagcggcctgctgggccctgggcccgacccccggcccgggatcctctgagctgcgctcggccttctcggcggcacgcaccacccccctggagggcacgtcggagatggcggtgaccttcgacaaggtgtacgtgaacatcgggggcgacttcgatgtggccaccggccagtttcgctgccgcgtgcccggcgcctacttcttctccttcacggctggcaaggccccgcacaagagcctgtcggtgatgctggtgcgaaaccgcgacgaggtgcaggcgctggccttcgacgagcagcggcggcaggcgcgcggcgcgcagccagccagagcgccatgctgcagctcgactacggcgacacagtgtggcttgcggctgcatgtgcgccccgcagtacgcgctaggcgcgcccggcgccaccttcagcggctacctagtctacgccgacgccgaccgctgacgcgcctgcgcgcgggccgccggcccccccgagccgcgctcggcttctcggggcgcgcacgccgcaggttggtgggctcggacgctggccccgggccgcggcaccaaccactcgccttcgacaccgagttcgtcaacattgggcgggcgacttcgacgcggcggccggcggtgtcccgcttgccgtctgcccgggcgcctacttcttctccttcaccgctggcaagcctgccgcgtaagaacgctgttcggttaaggctgtgacaga

SEQ ID NO: 483498 - DNA, 421 bp, Homo sapiens
gttaaaaaaaaaaaggggaaaatgtgaaaaaaaaatatcttgggtcccttcaaaatgggaactgctcagggcaaatttgccttttattttattcaagtcatccatttgctcacaaagacaaatgcatattttgattgcctcctttggaaaaacttatcagaaactcaaaaaaatgcaaccatttgtttttcccctacctgttactttgaagcccccaataagggggtcttgctttgagctgtttccccctttccggacggaaataatgtactttttacaaagtgattgatgtttcatgtctccctaaaatgtataaaaccaaactgtggccggacccccttgggcacatgtcatcaggacttttttagggtatgtccctgggcatgttttcaaccttggcaaaataaacttttttaattta

SEQ ID NO: 483499 - DNA, 561 bp, Homo sapiens
  misc_feature (187)..(187): n is a, c, g, or t
  misc_feature (189)..(190): n is a, c, g, or t
  misc_feature (219)..(219): n is a, c, g, or t
  misc_feature (283)..(283): n is a, c, g, or t
  misc_feature (288)..(288): n is a, c, g, or t
  misc_feature (291)..(292): n is a, c, g, or t
  misc_feature (297)..(297): n is a, c, g, or t
  misc_feature (320)..(320): n is a, c, g, or t
  misc_feature (322)..(324): n is a, c, g, or t
  misc_feature (335)..(336): n is a, c, g, or t
  misc_feature (344)..(344): n is a, c, g, or t
  misc_feature (348)..(348): n is a, c, g, or t
  misc_feature (370)..(370): n is a, c, g, or t
  misc_feature (459)..(459): n is a, c, g, or t
  misc_feature (467)..(467): n is a, c, g, or t
  misc_feature (501)..(501): n is a, c, g, or t
  misc_feature (525)..(525): n is a, c, g, or t
tgagagttttaaataactctcaaagggggaactgtggaaatataaatttctatcaactaattccaaatgaaaaataatctacgtataactgaaaagttatattctctggtttttaattatataattttattaacatcccagctaggaaggacattaaccttttgtctctctgataacaggctaagcnanngtaatgcaaattgtcagtttcacagcatngggtgtctattgttttctcttttcgatcaaatggtcaggcggtttctgtctccagaacatgatnagatnaannctganaagcagtttaccctgccgacccnannnttaatttgcannctttgttnagcnatatcccctcctcctaagaacncaatatagccatgaaatctttgtcttaattcagactaattcagacttgtgtgagacctgtgtgagacttgtgaaagaacttgcagactncggacctntagtaggctcttgcagacacggacatcttaaagncgctgtatgactgcagattaaccnacacgtctcaataaaggaattctgcttgtttcgaga

SEQ ID NO: 483500 - DNA, 496 bp, Homo sapiens
ggaggtaatagatgagactgtagtaaaagtcatgtattggggaagaggaatgggggtatattctgtgggcgtcgaatgaggaagatatcagatggctagatgacgggacatctcctagaactggtgggtgctcccaggggctgccttctgggccttgccctaaggtgacctggcggactccaaggttccccaagctggggggaatactagttgatctgcctgaggcttaagagccaagcagtggaaaagaagaggcaagaccagtgtggggatccccctgggaaaggcaccaaggggttaggagggaagggaaaagggcaaggagttggggaataagaagcagcaggacttagtggggacgcaggttctacttcacagacgtcattcatgctccagcaccagcttgctcccagtgtccctggggagccctgtgctggtgttggaacccctgccccctgcctcacaggcagctcaaggccatgttggggcagatgca

SEQ ID NO: 483501 - DNA, 512 bp, Homo sapiens
cggcatgactgcagccgggcccagtgcaccatcaccgttgaccatgtagtcacgtgaggcctgatagtccgatgcagtagtcatggctgatgttgcagaagaatctgaaatcatttcggaactggttcagaccgtaagatttgggacggcaactatcttctgaacatatggagccacaactaacagatggactgcttgtggcccatcgtctccaagagaaggcttcttgctgtctggtgaaatggctgagcatcaaatggggaggctatctatgcctccaaaccatgagtcgggatgcaatgtggaaaacgaactacaacatctgtatggtataccgtcatgagggatcggcatgttgtatgccatttatctgcactggccagaaaatggagtcttaaaccttgaatcccccataactacctcaactacaaaggataacaatgctgggaattcaaggagatctgaagtggtccacagatccagtataagaggtctcttcatcgtctcgtacc

SEQ ID NO: 483502 - DNA, 366 bp, Homo sapiens
ttcgtactatatattgtacccagtatgtagtttatacttcccccttccctgctccgggtctcccgtatactgttataccactctgtgtgcttaactgtagcttagctcccacttaaagtgggaacatttggtatttggttttccattcctgagttacttcactaacgaataatatgctcccccatatctatccccagttgcttggccacgacattttttatggctaatattccatgggatctatataacacactttataccttcattgtgtgctgggtacttcggttgggcccctatcttttattatgaactgtctagccagtttttcactcgaaacagtcttgatataggtgaaccagttcctaa

SEQ ID NO: 483503 - DNA, 186 bp, Homo sapiens
gtgtccgcccacgggtccgggcatagcctagattcccagcctttccctgcagttctgtcccccccttccaggcggtttccattaaagccctatttttttttctttttatgtacaaagcctgtttttttgtaataatttttgtgtttttcactttttgcaattgttaaataaaacaaatttataata

SEQ ID NO: 483504 - DNA, 122 bp, Homo sapiens
cctgtggacctcagcgtagctgattgagcagaaccggcgagcggcggcggaaggcagcgacgatgatccgatcactgcagcagccgaccagagcccactcctccaagagtgagatctgatcc

SEQ ID NO: 483505 - DNA, 407 bp, Homo sapiens
atgggtgttacgccccttgatacatgattcagagaagagctaaagatgtttccagttccagggaactttgataggagagttgtgagtttacatcacagataaatcctcatttgatcaacaagtattcgttagcacttgctatattccactcttcgaaggtactggccatataaccttgaacaaacaagagttttactttcttagagcctgtagtacgtaattccagataatggtgataaatgtcacaagagaggactagcaaagcactcagtaaatttagaaagcaaggagcacatccatccaggaagctttcaaggagaagatgggccttaaagtaaaggcaggggtctgccagctaaagaaagggtctaaggcttccaggtatcaaggggcggtaacccatgggt

SEQ ID NO: 483506 - DNA, 895 bp, Homo sapiens
agctgtccgggctgctttcgcctccgcctgttgattctgcgcctctccgaacgcaacatgaaggtgctccttgccgccgccctcatcgcggggtccgtcttcttcctgctgctgccgggaccttctgcggccgatgagaagaagaaggggcccaaagtcaccgtcaaggtgtattttgacctacgaattggagatgaagatgtaggccgggtgatctttggtctcttcggaaagactgttccaaaaacagtggataattttgtggccttagctacaggagagaaaggatttggctacaaaaacagcaaaattccatcgtgtaatcaaggacttcatgatccagggcggagacttcaccaggggagatggcacaggaggaaagagcatctacggtgagcgcttccccgatgagaacttcaaactgaagcactacgggcctggctgggtgagcatggccaacgcaggcaaagacaccaacggctcccagttcttcatcacgacagtcaagacagcctggctagatggcaagcatgtggtgtttggcaaagttctagagggcatggaggtggtgcggaaggtggagagcaccaagacagacagccgggataaacccctgaaggatgtgatcatcgcagactgcggcaagatcgaggtggagaagccctttgccatcgccaaggagtagggcacagggacatctttctttgagtgaccgtctgtgcaggccctgtagtccgccacagggctctgagctgcactggccccgtggctggcatctggtggagcggacccactcccctcacattccacaggcccatggactcacttttgtaccaaactccccccccccctgcccaataaaaaaaaatgtgggttttttttttttttttttttt

SEQ ID NO: 483507 - DNA, 840 bp, Homo sapiens
agctgtccgggctgctttcgcctccgcctgttgattctgcgcctctccgaacgcaacatgaaggtgctccttgccgccgccctcatcgcggggtccgtcttcttcctgctgctgccgggaccttctgcggccgatgagaagaagaaggggcccaaagtcaccgtcaaggtgtattttgacctacgaattggagatgaagatgtaggccgggtgatctttggtctcttcggaaagactgttccaaaaacagtggataattttgtggccttagctacaggagagaaaggatttggctacatcaccaggggagatggcacaggaggaaagagcatctacggtgagcgcttccccgatgagaacttcaaactgaagcactacgggcctggctgggtgagcatggccaacgcaggcaaagacaccaacggctcccagttcttcatcacgacagtcaagacagcctggctagatggcaagcatgtggtgtttggcaaagttctagagggcatggaggtggtgcggaaggtggagagcaccaagacagacagccgggataaacccctgaaggatgtgatcatcgcagactgcggcaagatcgaggtggagaagccctttgccatcgccaaggagtagggcacagggacatctttctttgagtgaccgtctgtgcaggccctgtagtccgccacagggctctgagctgcactggccccgtggctggcatctggtggagcggacccactcccctcacattccacaggcccatggactcacttttgtaccaaactccccccccccctgcccaataaaaaaaaatgtgggttttttttttttttttttttt

SEQ ID NO: 483508 - DNA, 725 bp, Homo sapiens
ctctgacttcgaacaccagtgagaccgttctcgaccgtctacatcgagcaaactcctacaattgtgccatatatgcttgaatgtatcattatccttgtgtgtcttcatctggatacatgctaacgcagttgggacgagacaatgatgcttttgtatgccgacctaatgcgatgcactagtgccgggtgtactatgagagctgatacacatataacagaaataacgctctgatacggaatggggaatgcaatacaactgcccgaccatgccaaatgaagcagcgtttcccttctacaggctgttcaatgacagtttgccagcgacatttagggactacatgctacctgggtttccaggcacacctagaccaacaagggagaagagtgtcagaatcagaatcatggagaaaatgggcgggggtggtgtgggtgatgggactcattgtagaaaggaagccttgctcattcttgaggagcatcacggtatttcgaagagctgccaagggtgctggtgcggatggacactaatgcagccacgatgggagaatactttgcttcatagtattggagcacatgtactagttcattttggagcttgtggaagttgatgactttctgttttctgttgtaaattatttgctaagcatattttcttaataggttttcctttggggttctacagtcgtaaaagagataataagattagttggacagtttaaagcttta

SEQ ID NO: 483509 - DNA, 927 bp, Homo sapiens
tgcagctcagcgttctagaatgcatgcagtccggtgtggtgagtgtaacccagcgcaaggctcacacattgacatgtgagcgcggcatctggatgccctccggccatcacagctgccatctgattataaccacacaaatggggctaggtgcgacaagcagaagaccctcatgggaaaaccacagaatcatgaggagcaataactcggtgtaaaaaactactaaaataacaggatggtttgtagcacagcaatatacagctgatacactaagcaagctctaggaagctgaagagtttctaagtccctaggacggtcggcataggaatatcttgtatgactggcttgtctgctacacagttctagatgtacctatgtggcatattactcaccaggggagatggcacaggaggaaagagcatctacggtgagcgcttccccgatgagaacttcaaactgaagcactacgggcctggctgggtgagcatggccaacgcaggcaaagacaccaacggctcccagttcttcatcacgacagtcaagacagcctggctagatggcaagcatgtggtgtttggcaaagttctagagggcatggaggtggtgcggaaggtggagagcaccaagacagacagccgggataaacccctgaaggatgtgatcatcgcagactgcggcaagatcgaggtggagaagccctttgccatcgccaaggagtagggcacagggacatctttctttgagtgaccgtctgtgcaggccctgtagtccgccacagggctctgagctgcactggccccgtggctggcatctggtggagcggacccactcccctcacattccacaggcccatggactcacttttgtaccaaactccccccccccctgcccaataaaaaaaaatgtgggttttttttttttttttttttt

SEQ ID NO: 483510 - DNA, 355 bp, Homo sapiens
gcacgttgggaggctgaggcaagaggattgcttgaactcaggactttgaggctgcagtgagctatgactgcaccactgcatttttttgagacgctgtgtcaaaaaaaaaaaaaaaaggagggagggggggccccaaagtccagaagggcccccgggggggggttgtgggaaaaaaatggggtccctgagcagggggccatggcataacacctgaaacccaagcttttggggggcccgggcggctagattattggggcccaggggtgggaacccaccctgccaaaaaggggaaacccttgttttttttagaagcaaaaaaaggagcggggttttttgggggccccttgtaaccccg

SEQ ID NO: 483511 - DNA, 341 bp, Homo sapiens
attttaagtctcataagaaacatttacaatctattctttctgaagcctgctacctggagtcttcatctgcataataagaaccatggtctctacaaccccttatcttaacccagacactcccttatatggaatttcaggtgtgtattttttatttatttttattttttattttctttgagtacccaggctggattgcagtagtgcgatctcggcttattgcagcctccgcctctgggggtcacatgattctcgtgcctcagtctcctgagtggctgggattacaggcatgcaccaccatgcctggttaattttttgtatttttaatagagatgggatttcac

SEQ ID NO: 483512 - DNA, 121 bp, Homo sapiens
cagaatacactcaaaatgtatcaaaaattaatttacaaaagccaccaagggtcatggaggcggcaggtgtatcgtgtggccgcgtgttgtgtgagcctgcccagaatctcatgcgcgctgt

SEQ ID NO: 483513 - DNA, 247 bp, Homo sapiens
gtcaatcttagctctgtcagacctgcctccctctgtggatgcctttacaggtgatgagagtgatctggattaatgggcgtccagtataagagggaaaaacaaatatcacaggtcaaatcgttatttgtcttcaagtttaacaccgtctactgtactaaaagatgtccaacagaatagttgttcaactatgttaattccttttctttgttggagacagagttctagctcttattgcccaggcggaagt

SEQ ID NO: 483514 - DNA, 168 bp, Homo sapiens
tgtttacggtcctggtgttacgtgaccggtacccacacctctgtatgtagtacgtgcgtcggggggtttattgatttatgtatttatttatttagaaacggtcttgctctgtcacccaggctggagtacagtggcgtgatcacagtgcactgcagcctctacctccca

SEQ ID NO: 483515 - DNA, 350 bp, Homo sapiens
  misc_feature (1)..(1): n is a, c, g, or t
nagtacgtcatcctcccctcaagcctcagtttcctcatctgccaattcgggataataccaatagctcattcataagggcgttgtgaggattaaccctgacaacttcataaatcacttagaaaaggcctgaagatagtaagtgctcagtgaccatccagtattcccatgatcgggtacatgtcactagacctttaagttttctttcaccatgtgaattctgggattaagtctaatattgaaaagaaaatctcaggacacaggggagctagcctcaggcagacccagagctgcggtctatcatgtacagactgtgtagtatctgaggctacagcacagtgcatgacaaagcg

SEQ ID NO: 483516 - DNA, 688 bp, Homo sapiens
  misc_feature (239)..(239): n is a, c, g, or t
  misc_feature (282)..(282): n is a, c, g, or t
  misc_feature (303)..(303): n is a, c, g, or t
  misc_feature (350)..(350): n is a, c, g, or t
  misc_feature (419)..(419): n is a, c, g, or t
  misc_feature (513)..(513): n is a, c, g, or t
  misc_feature (521)..(521): n is a, c, g, or t
  misc_feature (570)..(570): n is a, c, g, or t
  misc_feature (627)..(627): n is a, c, g, or t
  misc_feature (673)..(673): n is a, c, g, or t
cgttggggtggaggtgttcggtccttgcctgcttcatgagctcaattcctcaccactgtgctgtgaatggcacaactcacatggtaatgtagcttcacatccagcctgggaagtacacaggcgttaaggatgctcatttcagagacatcgctgactgctgcggcctctacgtttcaaatgatgaatttcttagttgccttgtcattgggcacacaacaaccacagttcatacagcaaanggctgcagtaacagtcacactggttgtggactctttggcacgnacattgctgcttcttgttatnttggaggtgcagggcaagagagataagtaaaatcttaatttgagggntgactaatgaatacttcaagaccacttacccacatcacattctgcaagacagtcaagagaaaggcaagngcatctatctaaggggctatggctcacacactagcacttgtccacgtgtaacacttccatcgcgtgctattccgtctccacgttacgcacaacnactgcaangtgctgtatcacactcatctttaaattacgcagtgtgtgctatctgtangacagttggcgcacgcagggatactaccagagttaacagttgacacaaataaccacnttaaattaaacactaagttgccacttgcatattgagtagacggtantatacatattcatct

SEQ ID NO: 483517 - DNA, 1127 bp, Homo sapiens
  misc_feature (1105)..(1105): n is a, c, g, or t
ggaacccttccggtgggctaggtacgtgagtcgcgcgaggtgagcgagattgtgctacgggttctgggggaatatggaaggctggcttcgtgcagtagtagtggcaggtttgcgcggctttcgcccccttttccaagagaccaacaaagagtccttcctccaattcccatactcaacacccttttggaactatgtgtggtgcttgggactctgctggctgcatccttgtcgcttctgtgtcctttcttcatgcccggcgatcgcgtcttgtgctggataagcggccctgtcgtgccactctcttattcttctctcttgcgatggtagtttggactggcagtgcgatgtcctacgaccaatcgatgttccacggtcatcactgtgtctagggatgacttcctggtgtgctccatcatctccgcgtcccgggaacgatgttgcatgttgtcctaaatccttgacatcaatgccgtgcggctgtagtttggtgatttgcatgttcgcgttgcgtctgttcgtgtcatcttgccttcgccccttttcgtccatgcaatccctgttaggagcttcttatcacgaagtttgaacagtgttttaaacattgcccaaggggtccagtgggcgaaaaactatcgtgaatggttgcattcgccaatgagatctgtgagtagggtaacagggcgaacgggacaaccgtgggcaatcgctgccattactacggacgcccctagagaccatgaatcccttcatctattgcgacttggggcttccactttgactcggcacattccaagcagtccgcgcaggtgattcactgacgcaatcgccaattgccgggcccgtgcgtacatgaagcgggaaaaggcctattgcaacatccgcgtgcccgggccggtggattgctatcaatcatggggaaacattggggcttccgccaaaggaatccaaaccttcctttggaatggccgaacgagacactgcgggggcccagcatccccgtgcgccagtgggccttgctctgacgggccgtggtggggtttggggaccaccccaaggttgacgaacacccctccatcccaaggtttctcttcttcgcaattctgcntttcttttcggtcccaactccc

SEQ ID NO: 483518 - DNA, 1783 bp, Homo sapiens
  misc_feature (163)..(163): n is a, c, g, or t
  misc_feature (332)..(332): n is a, c, g, or t
gagccgggggtgtcggaggatctgtgtctcggagaacagtggactcttgcagtccccgtgcgggcagggaccggggcaggcacgagctactctgtggacccatgcttatcgagtatctgggcaacatgctttctgcatcattgcccatacttgcgctcgcatnacatatctatctgcgcttacgaaggtagcgagactgggcgtggctcctgtagttcacgagatgccattgtctggtcacaatgcggtcaccaggcgtgtgagtctcacctatcgcatcatatagataccgatgcgtcgtggcatggtaatagcatagggtacgtcgggcncagctctgtacgttcttcgcacaactcctggtggaacgggcgagactgtgcctgattggatctctacagttggggtgcgaacgcataacagttgacatgggaccagctgctgagactgatggacgagcaatctagggataaagggttacgtgtgagaaccctatagtttcgaattgttcaccccgtggacatcgtctcggggggcaatacgtgtgcaagaaagttacggacaagtaactcgaagtggttttgccctaggcggccttgtggcgccctagggaggcgctaccttggtcgtccgaagatttagcatttccttggttccctcaggtcatatgtcacaatttgtctcactctataaattggagggtgcctgtgaagcgccacgtgagggccatttttgagaagcctatttgtgaccatgggaagaggattattgctaccaaagaagtggcaagccatttattcaccgtcccaaatatttctacgttccattgagtttcccacatttacgaattcaggttggtccgggtcattgcggttcaaggggttacgtgggccattggacttatatcaacccggcttatttagacttggcctagctaattgcgagcaccgcgttttccccaggtagccctaggacgtagttgccgtaccccctggtctgggagatcggttgctcgtgccaagggagggtgcataagcgaaagggggccccgttttgggttatcactttgggaagcaacctctttatctggtttcccccgcccttttattggctaccgtggtggtggggccaagagctcgcgaggctcggcttcgtaacgtgggagcccctgggggctagggtcggggtagaccgtgggggcctttgccatgtgttcccatacccaggcaagaggttctggggtgccctctgggtattgtgttcggccctttgttggttcgtccgttgtttggcacctcgcgttacaggggcatagggaagggtcgcccacgcacgcttttgggttgtagaccgtttttttcacctggggcctcacaactcacacgcgggttcaaagcgcgcaaacggggagacacgggcatctggggggcacacaggttatgggtaaaacaagcccagataaacaggggggcggcgcaacggagaaaacataatacaccgagggaggggccacagaaactgacgcgggccaccagcggttttctgataaaaagcggggcccaggacagaggaaaacagaatcaacacgacaatgaacacaatagcatatcggcatacacggcaaaaagcataacaaccatgtgtgtagagaaacaacccagtgagtgcaaaaaacagaagcagacacagaatgatagagcagatcagcacagaaaaatagagacagagcactagctaggcactgaagatacagacaacacagaacagccattagctagtagcc

SEQ ID NO: 483519 - DNA, 411 bp, Homo sapiens
  misc_feature (5)..(5): n is a, c, g, or t
  misc_feature (37)..(38): n is a, c, g, or t
  misc_feature (45)..(46): n is a, c, g, or t
  misc_feature (49)..(49): n is a, c, g, or t
  misc_feature (51)..(53): n is a, c, g, or t
  misc_feature (213)..(213): n is a, c, g, or t
  misc_feature (217)..(218): n is a, c, g, or t
  misc_feature (226)..(226): n is a, c, g, or t
  misc_feature (253)..(253): n is a, c, g, or t
  misc_feature (290)..(290): n is a, c, g, or t
  misc_feature (315)..(315): n is a, c, g, or t
  misc_feature (317)..(317): n is a, c, g, or t
  misc_feature (319)..(319): n is a, c, g, or t
  misc_feature (334)..(334): n is a, c, g, or t
  misc_feature (385)..(385): n is a, c, g, or t
tgggntgcaggaattgggcacgagccggcaggtggcnncctgaannggnannncaggaggcgatactcaaagagctgagcagacacgaaccacgcaatcagcaggcaataagcatggagctcagcagtgacgaatcatgctgctcaactggcaataatcaagcacgtgaccaggcaggaatcacgcagctcagctggcaattgtcaagcagangagnngacagaantcacgcagctcagcaggccctgatcangtgactctgcaggcactgatcacgtggctgatcagtncagatcacgtgactagcatgcactnancncgtgctatcatgcantgatgacgtgactgcgcatgccctgatgacgtggctgatcaggcactgatnacatggctcatcctcgtgccgaattc

SEQ ID NO: 483520 - DNA, 456 bp, Homo sapiens
  misc_feature (5)..(5): n is a, c, g, or t
  misc_feature (37)..(38): n is a, c, g, or t
  misc_feature (45)..(46): n is a, c, g, or t
  misc_feature (49)..(49): n is a, c, g, or t
  misc_feature (51)..(53): n is a, c, g, or t
  misc_feature (213)..(213): n is a, c, g, or t
  misc_feature (217)..(218): n is a, c, g, or t
  misc_feature (226)..(226): n is a, c, g, or t
  misc_feature (279)..(279): n is a, c, g, or t
  misc_feature (298)..(298): n is a, c, g, or t
  misc_feature (335)..(335): n is a, c, g, or t
  misc_feature (360)..(360): n is a, c, g, or t
  misc_feature (362)..(362): n is a, c, g, or t
  misc_feature (364)..(364): n is a, c, g, or t
  misc_feature (379)..(379): n is a, c, g, or t
  misc_feature (430)..(430): n is a, c, g, or t
tgggntgcaggaattgggcacgagccggcaggtggcnncctgaannggnannncaggaggcgatactcaaagagctgagcagacacgaaccacgcaatcagcaggcaataagcatggagctcagcagtgacgaatcatgctgctcaactggcaataatcaagcacgtgaccaggcaggaatcacgcagctcagctggcaattgtcaagcagangagnngacagaantcacgcagctcagatggcaattgtcatgcagatgagccggcaggattcacgcnctcagcaggccctgatcangtgactctgcaggcactgatcacgtggctgatcagtncagatcacgtgactagcatgcactnancncgtgctatcatgcantgatgacgtgactgcgcatgccctgatgacgtggctgatcaggcactgatnacatggctcatcctcgtgccgaattc

SEQ ID NO: 483521 - DNA, 347 bp, Homo sapiens
atgtagtcctatctaactagttattctttctcagtctccttcactgctttccttttctttgactcctaatgttggcattctccaggacccagccctatagccctactctcatctctgtctcagctcttgggttatctttcccaggtttgtggctttaaatattatttatttgctgacaactcccaaaagtatccaactcagacttctctcaagaacccctgccatttttatccacctcttcacttgaacattcattggatatctcaaactgaacatgtccaaaacttatctggtaacctcccctcttaaagctgcttcttctaatagcttcccctattcagttgatt

SEQ ID NO: 483522 - DNA, 123 bp, Homo sapiens
atggcgtctagaggacccggggcataaagggcacaagagagccaaagcatggagtctttacacactgcagcctgggagctctattccaccttacaacaccgaggtgactgagaccaccattgt

SEQ ID NO: 483523 - DNA, 449 bp, Homo sapiens
atttactattgatggattggttgattgactgatggggtctccctctgctgcctactctggagtgcagcaactattcacaggcatgatcatagcacactgcagccttgaactcctgggctcagaccatcctcctgcctcagccgcctgagtagctggtactataggcatgcactaccacacctggcttgtaatttcgctcttgttgcccagcctggagtgcaatggtgcagttttggctcaccacaacctctgcctcccgggttggagcgattctcatgcctcagcctcccgagtagctgggattacaggtatgcaccaccacgcccagctaattttgtatctttagtagagatggggtttctccaccatgcccggcccatgaaatcgatttttaaaaagtaaattacaggccgggcgcagtggctcacgcctgtaatcccaagcacttt

SEQ ID NO: 483524 - DNA, 1364 bp, Homo sapiens
caaaacaccaaatggcggatgacgccggtgcagcggggggtgcctggggggccctggatggccctgggatggggaaccgcggtggcttcctgaggaggatttcggcagtgagcatccgagggaccggggtcgcggacgtggacgtgtggaccgagtggaccgatgtgaccgaggagctcgcaggagtggcaaggccgaggataaggagtggatgcccgtcaccacaagtttgggccgattggtcaaggacatgaagatcaagtccctggaggagatctatctcttctaccctgcccattacgggaatcaggagatcattgattacattcctggtggagacctcatctcaaggatagaaggttttgaagattatgcacagtgcaagaagacagacccgatgccaggcacagacgcaaccaaggttcaaaggcaattatgttgcatatcacgggactacacaattggacacggatcgggtcatagggtgtaaaaagtagctaccacaggacaggtagagcaaccatgaccaatccgtagagggccaatccataccttgggccaaagatcatccaatacggtacccacgatagcaggcagacaggctaccttgaggaggaaaacaaaaatacaggcaaagccacactacaaatatgaccacatttgcacacgggatgcacaggagccatgctttgacgggaatccatgtatggcattgggtaacgacgcttacaataccgctgcaaaccgagtggtgacacctgggcattcgatactacacgaaaccacaatgtagcacttaagggaaaagacattggtaccactggagagggactgagaaatacgaataacattgagaacaaacatccaagaacacggaggggcattgagagcgtggaccaaccccctatgaaaggagaaacgaattagtgacaaagagggccaacacgtactatgaacattgacaccaacaataagcttaataggaaccaataaacacggtaataaccattggaacaagccacacaggaaagccattcatgggaaaaacgggacgacaagttgggtaacatttaccacaccaaaaaggatccatacacccataaatccacagaaagacataacatagagaacacaccaaatcgaataaacaaaaacccagaacaaacaaaagaagtacaacacagagtgacaagcgtgaacacatcaagagaatcacaagactatgttgaataaacagaccaaatagagcagataaacaatacacataacaacaacaataaaaagtgtacatataaacacgatataacacagacaaacataaaaaaataacaaataacaacaataaaacaaaaaaaacacagaag

SEQ ID NO: 483525 - DNA, 182 bp, Homo sapiens
accacgtggcttttcccatctgccacccagtttacttattgttcaatgccaatacacttgtttagcacgctatcagattacgttaacgagtaccctcgtgaaaaacaactttattgactaaagtacagtacttattggtagtcccttttgcgtaaagtcttatggactcttttcctttacag

SEQ ID NO: 483526 - DNA, 702 bp, Homo sapiens
agcattgaataagttaatcaacgatgaactacagaaaaatttgatttccaatttacacacaattctgaaaccattccttttgagaagattgaaaaaagttgttttggctaatattctgccgccaaagagagaatatatcataaattgtccgatgacgtctgcacaggaaaaattctataaggctggattgaatggaaagttgaaaaagactatgttcaaagaattaatcaaagattttttcacattgaacgatgaatatatcggccacgtttctaatcgatccatacgagatttcatcaattataaactatctggtaatgagacttcaaatacggacaataaaatcaatccaaccttgttgcaaatggacaaactatataagaagaacctgcaaatggaaatttcaaataagaaattgcaaaatatgatgatgcaattgagacaaatcattgactcaacttttttgttttatttcccatatttacacccagaagacttgactttggaaactcttttaaagacgtctgggaaattacaaatcttacaaaaattaatccccccattaatatctgaggggcacaaagtgcttatttattctcagtttgttaacatgctcgatttgatcgaagattggtgtgatttaaattcgttcgcgacatttcgaattgatggttcagtaaacaatgaaacaagaaaggatca

SEQ ID NO: 483527 - DNA, 371 bp, Homo sapiens
agtggtgttaccaaggagctgcctagaagggcaccagagtggtgagtggtagatgggtgcctcctcagcctcccataccaccccacagacacgatacaaagatgacagccagagcagtgtttgtgtgctgagagaagtgaagcagtgctttgtaaattaagctggggtgtttaaatctcatcctgaaagtttttgagagacactaaaatgttaagcataataacttgcttgattgatgaattggtaatttgggaagattattctgaaataatttagctcagatggattagaagacaggaccaattagggggctgttacattaattcagattaaagaggttaaaccagggagggctccatgtttcctgggtt

SEQ ID NO: 483528 - DNA, 322 bp, Homo sapiens
tttttgaattttttaaattttgtttttaaaggcaaaaccccccttggttcttttatggtttcggggaaagcattttaatcagacttatttttaatcccggaaaattttttagcggttttggggcggatttttgggattttttataaggatgttttttgaaaaaaagcaaaggccttggtttgtttcccttaaatttgtggactaaaccaggttttgtaaaataaaccgggaaacccgggaaggtttttaactttagggtctttgtttccttttggaaaatgggggggggggggaaaaaatttacccctgttttttgttttta

SEQ ID NO: 483529 - DNA, 160 bp, Homo sapiens
acgacggcagtatagctgtttctgagtgtaaacgacggtcagtatagcggtttcctgattgtaaacaggaccggcgagtcatagcggttgtcctggttgtaacacggcgggcgagtgattagcggttgcctgattgtaacaggcgggcgagtgataacgg

SEQ ID NO: 483530 - DNA, 133 bp, Homo sapiens
  misc_feature (46)..(46): n is a, c, g, or t
tagctggtaccggacacgctccagataagcggcgccaggttctggnttggtgacaacatcgcttgctcacccgccttcaacggcataaaagaagccggatcgttaaacaatccggcggcgatggtaatcgggt

SEQ ID NO: 483531 - DNA, 353 bp, Homo sapiens
gggacgagaatccttacacagtgacatgatctctgacctgaatggaactgggcagagcaacagtaactccaaagtgtcagaaaatagtcacacattcaaaaaactggttttcacatggaccaaaagatgtgccatataaaaatacaaagcctctggtcatcaacagccgtgaccactttagaatgacccagttcatggcatgcggaagcgacatggtgggtcaagaaaccagtttcgggcatagcgctattggtagttactttggctttctctgagcgcatgcagataataagatgtaaacattaacacctcgtgcataccattcaacttccatttagctatagctttactca

SEQ ID NO: 483532 - DNA, 107 bp, Homo sapiens
  misc_feature (21)..(21): n is a, c, g, or t
acaattccgccggaaagcagnaacccgctcaatcgctttttgattcgtgtttatcatccgctgttgctgaaagtactgcactggccgaaaaccacgcatgaagaaaa

SEQ ID NO: 483533 - DNA, 121 bp, Homo sapiens
gaggatccaaaaaccatggcattcatcacgcccagcaggtgtcccagccatgacttaccatagcaaaacacaaccacacactaacctgcatcgcctagcttactgatgatgatgtcctggt

SEQ ID NO: 483534 - DNA, 228 bp, Homo sapiens
tgtagtcaagtaaaggtatctctgtccctcagtttccaaatgcgtcaggtgataaccctatcaggcttttgggagcaggagacgcaagaccacccaaggtgctgagcagggtctgacgcagaactgccgcccatttgatcctcactattgcggccactatagcatacgacgcatttgtgcctgcactcggttcctgctcactcagcggctactgtgcaccagatgctg

SEQ ID NO: 483535 - DNA, 219 bp, Homo sapiens
  misc_feature (13)..(13): n is a, c, g, or t
  misc_feature (96)..(96): n is a, c, g, or t
  misc_feature (119)..(119): n is a, c, g, or t
  misc_feature (166)..(166): n is a, c, g, or t
  misc_feature (188)..(188): n is a, c, g, or t
  misc_feature (196)..(196): n is a, c, g, or t
ttcggcacgaggntcgaggccagcctgctaacaatgttgaaaccccagtctctactaaaaatacaaaaattagctgggtgtggtggcggaccatgntaatcccagctactcggggggcntgaggcgggagaatcacttgaaactgggagggggacgttgcggtgancggagatcacaccacgtgcccntccaaccntgggggaaagagtaaaacgtcgg

SEQ ID NO: 483536 - DNA, 233 bp, Homo sapiens
gctcgcccgtcccaaaaagcttccccaggggggagggtaagggaaaagggcccccccctgccccccagttccagcctgaccccccccccccccttgggcttgaccctttttcccagggggcccccccctttgggggcccccgggtttttttttacccccccccccccccccccccttgggttttattttggtaatggtgggggggaaagaaaaaaaaaagggaatttttgcca

SEQ ID NO: 483537 - DNA, 567 bp, Homo sapiens
cattgttgctgacgcctgtaatcctagcactttgggaggctgaagttggaatatcacttgaggccaggaatgggagaccaccctggccaacatggtgaagccccgtctctactgaaaatacaaaaattagctgggcgtggtggtgtaagtctgtaatcccagttactcggaaggctgagacatgagaatcacttgaacctgggaggcggaggttgcggtgagctgagattgtgccactgcacttggccatatcatttttttttaatgtgaccaaattgaggccgggcattgttgctgacgcctgtaatcccagcactttgggaggccgaagttggaatatcacttgaggccaggaatttgagaccaccctggccaacatggtgaagccccgtctctactgaaaatacaattagctgggcgtggtggtgtaagtctgtaatcccagttactcggaaggctgatacatgagaatcacttgaacctgggaggctgaggttgcggtgagctgagattgtgccactacacttcaacctgaacgacagaaccggactccattttataatgacc

SEQ ID NO: 483538 - DNA, 407 bp, Homo sapiens
  misc_feature (316)..(316): n is a, c, g, or t
gccagacacagtggcatgctcttctattcccagctactcaggaggctgaggctgaaaaatcacttgagcccaggagtttgaggatatcctgggcaacatggtgaaacttggcaaaaacaaaaacaaggccgggcatggtggctcacacgtgtagtcccagcactttgggaggccacggctggcggatcacgaggtcaggagatcgagaccatcctggctaacatggtgaaaccctgtctctactaaaaatacaaaaaattagccaggcgtggtggcgggtgcctgtactcccagctactcgggaggctgaggcaanagaatggcatgaacccaggaggcggagcttgcagtgagctgagatcgcgccactgcactcctgcctgggtgacagagtgagactccatctc

SEQ ID NO: 483539 - DNA, 515 bp, Homo sapiens
  misc_feature (8)..(8): n is a, c, g, or t
  misc_feature (24)..(24): n is a, c, g, or t
  misc_feature (60)..(60): n is a, c, g, or t
  misc_feature (70)..(70): n is a, c, g, or t
  misc_feature (89)..(89): n is a, c, g, or t
  misc_feature (172)..(172): n is a, c, g, or t
  misc_feature (300)..(300): n is a, c, g, or t
  misc_feature (468)..(469): n is a, c, g, or t
aattaaanccctaggttattaacnaattgcaaaaaacctatgggttaaaaaataacctgnaatccccaancccccgggaagggtagaanttggtaattttatcctgcttgtggcaccatacttgtaaatgggagtatccatatacctatttattgaaaatcttatttttgantcattttatcaaattaactcccctctaccccccaaaaacagccgtagtacccacttttgaattagatttgtgatcttaccctagcaccttgaatttgtaagaatattaaaagaatagcccaggtgtgngtgtcacgcctgtaatcccagcactttgggaggccgaggcaggcggatcacgaggtcaggagatccagaccatcctggctaacacggcgaaaccccgtctctactaaaaatacaacaacaacaacaaaaaaaaaaaccgggcataagtgcaggcgcctgtaatcccanntactcgccactgcactccagcctgggcgacagcgagactccatcaa

SEQ ID NO: 483540 - DNA, 120 bp, Homo sapiens
  misc_feature (96)..(96): n is a, c, g, or t
tggcactctaaggatcccaagctccacaagagcagcttgatttattgcagtggaagctaggaaggaataggacactgagggtctccgcaggacacnccattcaccggcatgactgccagt

SEQ ID NO: 483541 - DNA, 305 bp, Homo sapiens
ggtgaggatcccaggagcagagtgctgggattcaggcatgagccacggcaccgggcccagaattaacaatcttaaaggatgcttcctcttagtttttttttttaaacctctatctaatgacaaattggggtggttgggttatgaaataaatctgattaattctcttggagctctgggtccatgagaccttcagggatttaatgggttaccctacagaatcggcaagcaaagcttagtagccggggcttatctccaggtggttaactcacggcggggggctggtgtgcagcacgggtgctcggccg

SEQ ID NO: 483542 - DNA, 180 bp, Homo sapiens
ggatgaacgctgacagaattgcttaacacattgcaagtcaaccttgaattggggttttaacttaggttggtgtggcgggaggggtgagtaacgcgtaaagaacttgcctcacagctaagggacaacattggagaaacgaatgctaatactctaatattatgataatatgggcatcctata

SEQ ID NO: 483543 - DNA, 1236 bp, Homo sapiens
ggttgctattgtcaggtaacgggccgggtgtcagttggacattaccgggccgcgtcggtctatcaaactcctgacgtgctgccaatgtcatgaagacgagtatcacgaagacgtcgagagactacgacgacgatctgaaaatgaaaacacaaagtttgaagtaagatgttaagagacccagctgatgcctcggaagctcacgagtcctccagcgaggggagaggcaggagccccagtgtgaggatggacatcctaaggcccaacaaaggcagacacagagaaatggagcagagggaggcgggcacagacgagagcgatcggatgagccccagatggagcctctatccctccgacagccaagtctctgaagaagtgaagacacgccattctgagaagagccagagagaggatgaggaggaggagagagggagagagagcgtatcacaaaaggggagccgaggaggaagatagcagtgaagagaaacaccttgaagcagccaggagagacacaaaacgcttaccttcactgacaagacagcaggcttcacgctaataaaaacagaggagttagtggccagatcggaaacacatgctggccgggcattctcagggagaaagacacatagccgagagaagagtagccaggagagtggagaggagacagggagccaggagaattcacccccaggagtctaaaaggccaaccccggaagccaggaaagaatctgaggaaggtgaggcagatgcacctctagaggtgacaaacgacgcacgaggccaagaacgaccacggaggaagcagagcccgacagagccctctcaagaaaggaagtcaaccatctggcgacagaggcacccccaggaggacactgaacaggtcaacttagcatggccagataagggcaaaaaggcaccaataagccataaggctaagagaaggaccgggacttatggggaagacaaaaggggactccagagaacaggcccccctagaactgagagagagacgcaaaaaaggtcaagaagggcaacaaaagaggtccaacacccacaagaggaagatttagagcgacacataacacacccacatagtaacaggaaacgaaatagaaaactaaaaggaacaatgaaagaaacacaagagggcgaccaacgactagaataagaatgacctcaaaaccaagaggtaagatacacctagcacaaaccacacagacgggagatatcgcgagagat

SEQ ID NO: 483544 - DNA, 442 bp, Homo sapiens
acatttaatttcaatttataattcttcaaacaccttttttaacattcttattgaatttttaatcatggtaaaatatacataatataaaatgtgccattttaaccatttttaagggtaaaatgtggcattacatacattcgcattgttgcgcaaacattgccactattgatttcaggaacgttttcttctttcccccactgtaactctatatccattaaacattaattgcctgttccctcctccctccagcccctggcaaccaccattctactttctgcctttatgaatttgactactctaggtacatcatataactgaaatcacacagtattttttttttgacacagaatctcgctctgttgcccagaccggagcttgcagtgggccgagatcgcgccactgcactgcagcctgggcgacagagcgagactccgtctcaaaa

SEQ ID NO: 483545 - DNA, 395 bp, Homo sapiens
  misc_feature (10)..(10): n is a, c, g, or t
  misc_feature (17)..(17): n is a, c, g, or t
  misc_feature (36)..(36): n is a, c, g, or t
  misc_feature (149)..(149): n is a, c, g, or t
  misc_feature (180)..(180): n is a, c, g, or t
  misc_feature (220)..(220): n is a, c, g, or t
  misc_feature (299)..(299): n is a, c, g, or t
  misc_feature (363)..(364): n is a, c, g, or t
  misc_feature (377)..(377): n is a, c, g, or t
  misc_feature (386)..(387): n is a, c, g, or t
ccgggaaaanccccctnaatcctgccctctggctgncctccccaactgggcttgttctctgagggaaggttccggaaactcatggacttggggctctgcctgtaggaaggaggctgggccggagggaccagccaccattgtctctgttnagccaaatgtgcaagtagctgcccgcccaanagggggcctctgctacccgtctgcctctgccggctgacanactgcctccccagccttcctgctaggccaccctcctcccttcccatgcttgtaaccagctctggggcttgcacctccanaaagtaaggttgcccttggaggccatgtttgggtccatgcgccaggcctagggctaggccccgnnccaatgggtgcanaataaatannagttcaac

SEQ ID NO: 483546 - DNA, 864 bp, Homo sapiens
ctttttccagagaagagaagctttactggtgttccagccctaagtctcgctctgtcgctcaggctggagtgcaatggcgcgatctcggctcactgcaagctccgcctcctgggttcactccattctcctgcctcagcctccggagtagctgggactacaggcacccgccaccgcgcccagctaattttttttttttttagtaaagacgcggtttcaccgtgttagccaggatggtctcgatctcctgacctcgtgatccgctacgtctcggtttcccaaagtgctgagaattacaggcttgcaggcgtgagccaccgcgcccggccgagttaaagtacttttcctggaacaacagaaacttagcataaatcgttcacactattaagagttgtaattcacgggacatctcccgctcaatatgacttcaaccagttctcaacaacaatgtatcatctcacataagaccctggagagaggaactcggacagccccagaatcgaccggctccgcaacttcgcacatgactactatcagtgacccaggtttgactgtctctctccacagcattgacttcactaactggcatgtgacctggttcggcagcagtagccttgcaccacatgcttgtgcgcccgtgagtcagtaccagacaacggttgggcttcccccagaacctcctgacaacaggtcatccagaccctaaattgccttaagaccttctcctaccactggaccacaatcctcaggcacttgcattgccaaccagggtgtcaccttttacactgtgaccccttagtgtgcgaccaacgacctaacatggcggaaaatagtcccctcccaccacagctctacccatcggagccc

SEQ ID NO: 483547 - DNA, 226 bp, Homo sapiens
aagctttgacgctccaagaaagattataaaaagtaattaagcagaatagtcagaaacattttctaaaggtattttggcacctgtaatcccacaactttgggaggccgagatgggagaatcatttggagccaggagttcgagatcagcctgaccaatatggcaaaaccccatctctactaaaagtacaaaaattagctgggcgcaatgtcacacgcatgtgcggtaa

SEQ ID NO: 483548 - DNA, 161 bp, Homo sapiens
cccacgcgtccgctctcctgtccttgtgttgaagcgccagtaaactaagggtgtccagcccccattccctctctactcttgcaccagccggattggatgttgtgtattgtggtttattttatttttttcctttttttctgaaatttaagtatcccaaatta

SEQ ID NO: 483549 - DNA, 681 bp, Homo sapiens
ggagcgcggagtctggagtctcggaaccgaagccgcacaggggccccgtcccgccgccatgccggcccggccgggcttggggcgcggccgttcggaagtaagtgagcccggggaagggacctgcagggggcgtggagggtggcaccgagatcgtattaacttccccaaacggagtacgttgaagacgcagcatgcagccggaagagcagctcgacaccacgccggcggaacacggggccattgggggaatgcgatgcggtaaacacggcatcgcacagcacaatgggggtccctgggccgtgtcaacgggggcatataacctccctggcacactaaggggtacccaccccacaaaggggcgccgaccaaggttgggcagcagggtcacgagtttacctcaaggaaaacccaacatggcgggcattgcaccaggggaaccgggctggacacaagcaccgcgttggcgcgcttggatcgcagagcgcagtgagcacgcggcgtgtgggccaaaaccacgggagctggacccgtggttgccccctagtggagacccatcagggggagaacgttacactcccccgaccagaagacctaccacaaaaagccccaaagggtcagagaggaactcaccaggggataggagaaactggctgcgcgaacaacgggcagagcgaccgtcca

SEQ ID NO: 483550 - DNA, 481 bp, Homo sapiens
  misc_feature (263)..(263): n is a, c, g, or t
ccctcacggattacctcaaattacaatgggttacatcctgatgaacctgttgtaaatgaaactatcctaagctgaaaatgcatttgatctgcctaacctattgaacttcatagcttagccattattagtctgtatttttcttttcctatattgtgtttgtctggttttggttttagggtaatgcttcatagatgagttagtaagttattcattctgtttttatcttatagaagagataacagaaaattgatataacttcttcnaatgtttggtagaattcaccagtggatctgcctaggcttagtttctctgtttggaaagataattattaagtattgattctgtgaagatctgggatctctttcatttctgatattagtacattatgtcttctttgtttttcatagtctggctagagactcatccattttatgatcctttcaaagactagctttggtcttgagtatccgtgaggggccgt

SEQ ID NO: 483551 - DNA, 109 bp, Homo sapiens
cagcgctagtgcgtgtattctgaccttccagtgagtttatcagcatactcaaaatttttttcctggcatttggagggatgggaggagggggtggggcttacttgttgta

SEQ ID NO: 483552 - DNA, 990 bp, Homo sapiens
agtctgcgcgacagagcgagacttcgcacccgccgcccccccaccaaaaaaaaaaggggcacagtcagagaagagcagagcccggctgggttgggtcccagcccggccggccttcgtgagtgtgctgtgtgacattaggccgtggtgctggccctctcgtgggtctccctttctttcttcctttcctttcttttcttttcttttcttttcttttcttttcttttcctttcctttcctttcctttcctttcctttcctttcctttcctttcctttctttctcttttcttttcttttgtgacgaggattcgtggcgtgtcatccaggcgtggagttgcaggtggcacgaatctcggcttcactgtgcaaccttctgtgccttccgtgggcctcaaggtgatccttccgtggtcttcaagccttcccaaagttagcgtgggaacttcacgagggcgcaacaaccaagcttaacgccccacagaggctataattgttgttgtgtggtattgtgttgtgtggtagagagacagcggggtttttcaccaagtgttgtgggctaggactgtggctcttcaaacttccgtgagaacttcggtggatccttcccgccttcagcctcccaaaagtggctggggataatagggtggtgagccaaccggaacccaagcctgggttctccctttcttcatctgggaaggaaggctgggatgaccttctctacagggctgagtgggacattcgcagatctaccctccacaacggcattcggcctcaagcagcaaggcccacccaggctcaggcacttggagaagcaccctagttccagtggtggctgttggcacctctggctggcaatcagagctcccttgtctaggtcctagtgatggtccggatggccgtgaccatgggcggcttcctggggtctaccggagctcggagttgccggtgttggacagcgggcgggtccggggccggacttggtggcggtcccg

SEQ ID NO: 483553 - DNA, 213 bp, Homo sapiens
ggaaaatagcgaaggtctcttctattctattctcttctgttgtattctattccattctgttctattctattctattctattctattcagttctgttctattctattctattctgttctattctattctgttctgttctgttgtgttctattctattctattctattctgttctattccattctattctattcttttctgcgtcgagtaatttt

SEQ ID NO: 483554 - DNA, 162 bp, Homo sapiens
atattaaatttccatttcataaagaaagttaggtttttagaaaatatgctctcagctggccacagtggctcacacctgtaatcccagcactttgggaggctgtggtgggtggatcacctaaggtcaggagttcaagaccagcctgaccaacatggtgaaacc

SEQ ID NO: 483555 - DNA, 717 bp, Homo sapiens
  misc_feature (133)..(133): n is a, c, g, or t
  misc_feature (184)..(184): n is a, c, g, or t
agcgggacgtggcttggcaacgtccctaccgccgctgcttcccgggaacctggcgccgccggaactgatcgcggctagtcccgacgcgtgtgtgctagtgagccggagccggcgacggcggcagtggcggccnggcctgcaggagcccgacggggtctctgccatgggggagtgacgcgcctgnacccgctgttccgcggcagcggcgagacatgaggagaccccgcgacaggggcagcggcggcggctcgtgagccccgggatggaggagaaatacggcggggacgtgctggccggccccggcggcggcggcggcttgggccggtggacgtacccagcgctcgattaacaaaatatattgtgttactatgtttcactaaatttttgaaggctgtgggacttttcgaatcatatgatctcctaaaagctgttcacattgttgcagttccatttttattttaaaactctggggacggcttttatagtggtttggttcaaaagccattttcttctgggaaaactattaccaaacaccagtggatcaaaatatttaaacatgcagttgctgggtgtattatttcactcttgtggttgatttggcctcactctttgtggaccactaaggactttgctgctatctgagcaccacggatattgtgtcatttcactactcagtgtttgttcaccagtcctggaggaggaccagcaaagacaagg

SEQ ID NO: 483556 - DNA, 223 bp, Homo sapiens
tggaagcgcaaaatagcacgttgggaacctagcgcaggtgccgctttgaagggtgtccatgaaattacacagacccacacagcactgtagcccacgccattctcatcttgcaggtactgcagatatgtagatcgtggccgcacaggtaggcagtgaccccgtatgtggccagcagtgggcgtagctgcttaatcaggcagtggttagagcccagaagctgtga

SEQ ID NO: 483557 - DNA, 380 bp, Homo sapiens
tgatctagaggatctctcactgttgttcatacctgcactgttgttcatacctgcactgttgtacataccctcctgacctcagtctcccagagtaacgtgggattacatgtcatgcaccagcacacccggctaattatgtattatttaagtagagacaggggtttctccaatgttggtcagtgctggtcttagaactccctgacctcatggtgatcttgcctgtctcgagcctcccaaatgtgcttggtgattacagtgcatgacgccacctgcgccggagcttcatttgattttttaacttcaatgtcaccaaaggtcagtgaaactggagttatggtactgacaaacatgtgcaggcgtaccgcagctcagaattctgt

SEQ ID NO: 483558 - DNA, 267 bp, Homo sapiens
tgcgagtatctcctggatctgggccagatgcatgcagatagcgatctttgctctcctccaggcatgtacatccaggaatagcttacatgctgagctgggactgcagctcaatctccaggttctgcatggtgcgccggagctccgaaatctcgctcttgctgctactgaacacagctcgctgtaggtggccacctacgcgatcatctacctggatctgggccagatgcatgcagtagcgacctattggtctacctacaaggctgtact

SEQ ID NO: 483559 - DNA, 286 bp, Homo sapiens
agacaacacacctcaacaggacccagaggagtagagccagattacaaaaacagctgcctttccccaaccctcgtctttttcttgtcagccacccacacaaccgggtgcaggagtctgccaagggccaaactgaccctttgcggccgtagggtgacacccaccgtcacctgtatagttctgggccctggccaggtgcgaaagcagagcctggtggcggctgcacaacagggctgtgccagaccccgtccttccaccacaaacgtgggatccgtgcacgttaacgatt

SEQ ID NO: 483560 - DNA, 1448 bp, Homo sapiens
ccacgcgtcggagctgatgtcgagtgatggaccctttgaacgcagtcgccctacagactgctgattccccccgcatcgcctccctgtggaatgcccagtgccctgcttcgcagctttctccctttgtctcataaccatgtccaccaacgagaatgctaatacaccagctgcccgtcttcacagattcaagaacaagggaaaagacagtacagaaatgcggcgtcgcagaatagaggtcaatgtggagctgatggaacagctacgacggatgaccagatgctgacagaggcgcacaatgtaagctcatttcctgatgatgctacttctccgctgcaggaaaaccgcaacaaccagggcactgtcacatatggtctgttgatgacattgtcaaatgtgcatacacactactgcagaccctgtggcaacacatcacgctccaatgctaccttcaatgctgccagcgaacactacttttaccagcagacacacacagaccccgcatagcacccacataaatcctggtgcctggtcttgatcccgcaacatttgtgtccttcttggtgcagcaacatgcattgtcagtccccaatcccagtccgcactctggcttggcgcacctcagctataccactttgcttcctagcgagaacatcacgaacaccaatccgcacaggcatcgctgccgaagcaatcgctacagcgctgtcacacatccccatacctatcacactccctcctgcattggccaacatcacccaccttgcatcacctatactagctgcaaccacacgactagtcatgaggacttcctactctacacacttagcatagccgctctgcactgtgtccgccagcctggtcaccgtacactaactctgtcgctgtattcaaaagtataaccggagcagcaacaaatctcagaaacacaagcagtgattggtgactcatacgcgcttgtcacaccatacacctctgacatggcctcgcaccttacaatgcaaatccgtagtcagaaataacgcacacgcaatacactctatcacttcagactgcccttaccacaacaatgcgctgagcccgaacacagagcacatcaccgatcactaccacataatcctctcctctcgtacccacaactcttccaccctacattatcactccactcatctatcgcaacatcacaacatacaactacatatattgcaggaccctctactaatagctccaccacaaacactacaatcaactcacaattacattcatatcatatcaccactcacttcgtcactacctaacatcttccaatccactcaaattactacaaccctaactacgtagacttactacaacacataatttttacccgaatctattacttactccaccgtccatccaaacacccaaccacctctaaagtacaaaatcactaataaaccaaatatcaaata

SEQ ID NO: 483561 - DNA, 460 bp, Homo sapiens
ctgctttgcagctgctgagggcaccttctgtggccaacacgcgcctcccggactcgcggctctccgcacgcacctcccggactcgcgtctccgcaggcatcgatgcctggcactcctgggttctctgctcgactgagtgagtgacgcgccgtgcggcgtgtgcgtgtgagtttatggaacgactgggctcggcctcagccacgggatcagccaccgccctctgagacgagcactggcggaagtgatatgcacgacgaacgcctcacggctcaaacacatggcttcactctgaaccaaacagcacgctctgtttgctaaacaaacaccagactcctgcgttccgtgctcggcgtttctccctcctggcgcttccattcgcctgctctcagcagctccttcttcacgctaatcaattttaactcctgggacaggtcttgctctgcaacccaggctggagtgc

SEQ ID NO: 483562 - DNA, 367 bp, Homo sapiens
aacacttgggctcttacaggtgcccgctattagttatttgtggggggattaccgatcactcctaagctaagcagcatctgaaagacccccgcaagggagacgatctatattggtctgaagcgaaagtgagagtgtgttgtgccaaaaaaggaggaaatgggagggaagtcgtcaaaacctacccggttagaatgtatgttaaagaattttaagaaaggttataagagggactatggaatcaagttgaccccccagaggttaagaactctctgtgaaatagaatggccttcttttagtgtaggatggctggcctaaaggactatagacagagaaacaattggccatgtatatcgggtggtgactaggg

SEQ ID NO: 483563 - DNA, 127 bp, Homo sapiens
  misc_feature (35)..(36): n is a, c, g, or t
  misc_feature (40)..(40): n is a, c, g, or t
gaccatagaatgggtaggaagtaagtctgagcctnngtgngagattttggaaccctcaacccattctgtcaatactactgtgtgacacatacaggattaagttctacatttgtgcattctatggttg

SEQ ID NO: 483564 - DNA, 293 bp, Homo sapiens
aacaaggggtctcccgcgcagaggaaaggaggtacgtccggggccacgtccatcatgattccaggagggttcatgccgccccaggcaagtggtttgaggagtccccaggtaggaggaagtgagagagatgggatgcgtatgcaccgcggggagtgtgactggaggtacttcggtaggcgactaaccgggtcttgagtgctagcgagtctgtttgggggagggctcgaggagagcgttcctgggggcgagtccgccccgcgcctcacagaacactcgtgcaatacgcgcgtgtg

SEQ ID NO: 483565 - DNA, 912 bp, Homo sapiens
tgatagcacacggttggcgacaagaccaaagcgcacaccacggggaattcgcgagacgtggtccgattggcgccccaccacggggggggacacacctcgccggtggcccaacctgggaaagtgacaaacggggcaaaacacaacacgtggggcacacgcccagcgggcttggcacgcccggcacaggccctgcccccgcaaacggaatgttctcgccctggataacacaaccacgaaggggcggagcaagcccacagggccatcggcaggacacagggcgtccggccaccattttgcccccctggctccggggtccaacaagatgggtttgcaaccttgcccctccgcgctgaatgatgatctcccccggacgatcggggcggattatctctattagcactgcggcaccaaatgcattcgtgcgcgttacaaaagggcaccaacacttggtcccattcccccaacaggagcaagggggtctaatcccactcccgctggcagcattttgcataatttgttatatgcttgctgcaagaaacgacttctccctgcggacatatgtacgttcacaaaggcgtgtttttcgatggaggacgaccaattcaccgggcgttgacaatttgcccccagaatatttgccgacattcaaagccgtcgcaaattgcacgggcgcattcgtggacgcgaggctaattaacaaccacgacgaccgcatgggctacgctgacggtcaatccagtcggaaatcgatcatgtcacatatagtcttgtcggtggattgtgtctgaggcagcagtgaacctccgccagatatcctcggccagtaactgtattcacgggcccggccccgcgcaaaaattttcaaggggaaattttctcgcagcaagctcatttaaacggcaacaatagtca

SEQ ID NO: 483566 - DNA, 484 bp, Homo sapiens
  misc_feature (437)..(437): n is a, c, g, or t
  misc_feature (445)..(445): n is a, c, g, or t
  misc_feature (470)..(470): n is a, c, g, or t
ttcatgtgtgaggttttagacattcagaacatcaatgagcagacaaaacctctaacagactcccagcgtgtcaagtttaccaaagaaattaggggtaggtattcatgataatgtcatcgtgacttgagtgtaacacagtacgtgtcatctgggcctgagccccacagacctgggttctcttcctagcctacgtcgtcctagcagtgggaattgggataagttctttagctgtgttagtcagtgtacacttagacttgaaaatacacactagaacatattgatacttatacaaacttactgaatgagtgaattagaggtcagttatgtagccagacctggtattgcatgcctggaatctcagcagtcaggagcctgtggcggaacatcacaagatcaaggctaatctgagctatgtagagaccctgactcaataattnataaatanataaaatggttgacatctagaccantggggccaattaac

SEQ ID NO: 483567 - DNA, 381 bp, Homo sapiens
aaacacaagcagccaccaatatacacctactaggatgattaagaataagtgtgaaaggacgtaaaattgtaactgtaatgatggtagaaatggataagttgcagccactgtgaaaaacagtctgcagtggtagaaggttaatatgaaccctgttggccaggaatctacttaggcaccaagaatagaacggatacagatgttgttctatgtttgtagcatcactttcacaggagcaaaggtggaataatccaaccaacagtgacaaatgaatgtataaagcaaagtggtctgctgcatgtacatcatccatctgtaaaaaacgaacatcattttgatagatgctacaacatgggtggacattgagaacattatgcttagtga

SEQ ID NO: 483568 - DNA, 725 bp, Homo sapiens
atatatatacagccttgggtacacaatgtgtggtttctgaggattggactctaggatggatatactattttgatataactatacagtaagcattggtatttactctctctaggtataagttactagtttggaatgtccatcaggacctttaataaatgagttaaaaatttgtcttatgagagccacacctatttaagtacagattttggctttattgcccaaaagcctcctgaagagggtacggagagtcccctctgtgggctggcagttgtgaatgagaatctgtgtagtctcgatgcatatacgttgcggttatttgttaaatgaaccacagtttgagtacttctgacagtggaattttcgacgaacaacagggaaacatttgtaacctttaattcgtttttcccataaaggcccagtggtgggtttaccatgacatgcatagggggagggccaaaatcactgtgtggtgtaacactttgtccaaaattgtggcattggcattattttagtggcccaaaggtcggaaggtgtcctcaaccacaaatttttgccacatttgtgggggtgcgccactacctttttggggtcaaattttacctgggtcagcgttagcgtttgggcacacaattcctgattccaaaacaattgattttataccccttttcccaaacaattggggtgcacaaaaccaaaaagggggaaacattcgcacacggttgcat

SEQ ID NO: 483569 - DNA, 229 bp, Homo sapiens
tgtccagtcgctcttgggcctggtcagtcgtcttggcaaataaaagcagggaggtgggaggagaggaaggcctggacccagtaccaaggagaaacatccaatcaggcctgtcatggccatcttacgctgcgaatcccctttccacgcatgcctatgaagatcgttttccgaggctctcatacacaccgcccgaagagcgacgtgacaggggtaccgaggctcgagattc

SEQ ID NO: 483570 - DNA, 160 bp, Homo sapiens
atgggggttctttgcatcccaaaaatcctatggaactggggcaaactggcagaggcttacctgaatctggagccagctctttcagccgcacttgcctaatcacagaaacagcacagtctccacctcaagtgacaaaaatatcaaatcctactttccacac

SEQ ID NO: 483571 - DNA, 235 bp, Homo sapiens
tatctccctactatgcctaaaacgaataatacatcgctgttcattatatctactctcataaactctcaacaactcactccctctttaccaatattgtgcctattgccatacttaatctttgccgactgcgaatcatcgagtggagccgtatccctactattctcaagtctccaatcaatcatatcgtctagactacgtacataatctaaacctaccccattgcttcagagctcct

SEQ ID NO: 483572 - DNA, 137 bp, Homo sapiens
ctcaaaaaaaaacaaaacctagtatacaaacagatctaatgcttaccatgtcttcagggtaaccaaaagagaaacaaaggctgctcaacgtctgatgggatagagtcaggtaagtcctacggggccggcagtccgtg

SEQ ID NO: 483573 - DNA, 283 bp, Homo sapiens
gagttgtggaaacggcctttagtctcggtgcgagtgtgggtgagtgttaacccccttggcaagtgcctgggcaggggccggccgccctccatttgggccgggtgattgggggccggctgtgtgcccaaggcctccccctgccctcgcctagtttggaagctccggccgacatcacggagcagccttcaagcattccattacgccccatttcgctttgtgcccctcccccccaggggttcagcaggagccctgggctcttcatcaataaaccctgtttcagcca

SEQ ID NO: 483574 - DNA, 453 bp, Homo sapiens
  misc_feature (9)..(9): n is a, c, g, or t
  misc_feature (51)..(51): n is a, c, g, or t
ggtccccgntttttcttttttaggggcgcgctcctccccccccacataaanaaaaaaagggggggggggggccccctttccccgggttccccggggaaaattaccccaagtttgtgtggttttttgggggggggaaaaaaattgcccccaaaaaggggtgtttgtttttgtttcccctggaggggggttttatttccccccggccccccattttttttttttttttgggggccctttggggcccccgggttaaaggtttaataaaaaaggtcggggggggggaaagggggttttttttcccaccctccccccggccccgggtttagaaaaaactaaatttttttttcggggcttcccggaaagggttccctttcctaggacttggggcccaggggaaaaggcccccccccccgggttgggggggaccccccccttaagattccgggtttttta

SEQ ID NO: 483575 - DNA, 114 bp, Homo sapiens
  misc_feature (8)..(8): n is a, c, g, or t
gcatctgncagctgctgcaggctgacagcctccagacctggacagaattcatacactcccggagctgaaaaaaccgaacataagggagtgcacaagagccgggctttggagagg

SEQ ID NO: 483576 - DNA, 288 bp, Homo sapiens
  misc_feature (20)..(20): n is a, c, g, or t
  misc_feature (49)..(49): n is a, c, g, or t
  misc_feature (106)..(106): n is a, c, g, or t
  misc_feature (116)..(116): n is a, c, g, or t
  misc_feature (211)..(211): n is a, c, g, or t
  misc_feature (238)..(238): n is a, c, g, or t
  misc_feature (255)..(255): n is a, c, g, or t
aaggccccgagggcgaaggnaccgaaagcacaggaatcactggggcganattgcatgaaccatcacctgcaggaaacaaggttcacaaaagaagcctacaagaagncatcaaagantacatgaaatcaatcaaaggggaacttggaggacccgaggcccgaaggaggaaacctttatgcagggctgcagacaaatcaagcacatccttgtnattcaaaactaccaggtctttattggngaaacatgaatccaganggcatgggtgctctattggactaccgggaggat

SEQ ID NO: 483577 - DNA, 225 bp, Homo sapiens
acctagcttcctggtggtaccctccagataatgaatcaacatttctccctaaattcttatgcaccttaacctctccagcatcaaatcttctactctataaccccgtctttaaacacctccctctaatctcaatgtccttctgttttgattatttggcacaattacgcttaaaaaaataaatattgccatcatggcatatatatacctatgtaacacacctgcaca

SEQ ID NO: 483578 - DNA, 442 bp, Homo sapiens
tcgatatcaacgtctctgcgagttatacacgagtcgggaactataaagaagcatactatcactaagtgacgggggctgtaagagcaaggaagacattgaacgtatggtccaggaagctgaaaagtacaaagctgaagatgagaagcagagggacgaaggtgtcatccaagaattcacttgacgtccatagtgccttcagcatgacaagcaactgatgaagatcagaaacttcaaggcatagattaacgatgaggacaaacagaagattctggaccaagatgtaatgatcatgatcaactggcttgtataggaatcagacagctgagaaggcagaatgtgaacatcaacagaaagagctggagaaagtttgctaaccccatcatcaccaagctgtaccagagtgcaggaggcatgccaggaggaatgcccgggggtaggaggt

SEQ ID NO: 483579 - DNA, 437 bp, Homo sapiens
aaaaaccagctgggcgtggtgacgagcgcctgcagttacagccactgggaggctgaggcaggaggcggaggttgcagtgagccaagatcgtgccggtgtactccagcctggacgacaagagtgaatgttcgtctcaaaaaaggaaaaagaaaaaaataaatctttaaaaataactagttgctgggtgtggtcgcacgcctataatcccagcactttgggagtccaaggtggaaagatttcttgagctcagaaatttgagaccagcctgggcaacaaagcaagacctcatctctgctaagaataagagaaaattagctaggcatggtagcagatgcctgtagtcccagttagtcaggaggcagaggtgggaggattgattgagcccaggagagctggtctgcagtgagctacgatcatgccactgcactcccgcgtgg

SEQ ID NO: 483580 - DNA, 160 bp, Homo sapiens
gtaacggacaaggagctcatcgcttacagtgcgcctggctgccgaggccgaggcccactggatccagcagattgccgagtgttgacaagtgagagcggccaggttgccggggtcagggcttagtcaggctccttctgcctttcagtgaactcccttctaa

SEQ ID NO: 483581 - DNA, 200 bp, Homo sapiens
agaggataccacgacccggacctacatatgtgtgcgatgcattcacagcacacacacactcttctccactctacaagtctctagaacataccctctcttaagactcccagccaccaacgttcataactcttcctcatggtcaaccctgacctcatccccctcttcttcatcctcagccagcctctctcgccccagggggc

SEQ ID NO: 483582 - DNA, 517 bp, Homo sapiens
tggccatgtgctgtagcattctcaaggcaattggcctgtcactctgtctgctttcattgctccaatcaagtgttcctcctttgtttcacaggtactggaaaactgggcttctcttttgtgagaattccagctcttatggtgtcttgtaatcgtatgtgggtggagacaggaaatggtgtcattatctccatcccattgacagaaagtaagtatctttatagctaactgccatggacacacacatcaggagaattataggcaacatcagttatgtctgaaattcacatctgtgttagctcagaaacatccagtgatgggtcttgtttcctgcacttccctgccactactgtttgtcatttgatcctttgtctcattcagtcacttcaatcgcaaatgaacttgtcaagcctcttattctgacttcacagcaattcactgtatcttccacacattaaaatcacttctgatatcaatcataggaaaacctaacattgtggctcatggatcccaaagctgt

SEQ ID NO: 483583 - DNA, 443 bp, Homo sapiens
aggccaattgactccgtcaccaaagattgtaccagaaaacgcgagtcccgtttgacagacttctttccgtttcagaactgtgtcctacaaaccaaacagatctcccccaattgctaaagccatatgcattttgaaggaaatgtaatccatatgttcctgagtcacttatgcctaagtcattaaaaagttattttttaaatgcgacttcatgtttgaagtcattatagagcatttttagtacactctcattcttcataatgctaaagttctcttgcctcgctttattgctccatttcacactgtatatcatcttaacacatacttgagccgaggcataaccgtaatcattgaactcggacgcccctggtgactcgctagtcacacttgagccagtttctatctttagaagcgtacacttgttcatcctcgctgttcttcctttc

SEQ ID NO: 483584 - DNA, 198 bp, Homo sapiens
aaaccccttttttttttttgggggggtttttaaaaaaggggaaccccccccttttaaaaactttcccccggttttctttaaagggaaaaaaaaaaggattttttcccttttgggtccccccaaccccttttttaaaccggttttgggaaaaaaaaaactttttcccacccccttttcccaaacccaaataaaatatta

SEQ ID NO: 483585 - DNA, 854 bp, Homo sapiens
taaagagattaggaggctcgatatttgggaaagaagagaggatgctagtcgtcgacgactctcttaataaccaccgctacacaaagaaagtcgtgctgtatccctactgacttctccagctgctggtataaaaacagttgatcctctgcctttgcgggaagattctgaagacaatatccacaaatttgctgaggcaactcttccagtttcaaaaattccaaaatacccaacaaatccccctggacagttgccttctccaccacatgttccatcctactggcatccctctcgacgaattcagggctctcttagagatccagagtttcagcacaatgtgggaaaagcaaggatgaacaatttgcagttacctcaacatgaagcctttaatgatgaagatgaggacagattgtctgagatttctgctcgctctgcagcttctagtctccgggcttttcaaactctggcacgagctaagaaaaggaaggagaatttctggggtaaaacataaacctagctgagttgcctttatctaaggaaacattggcataatttttctttattgcttactgtgttaaaattttttggagtgaagtttttcctaacattttctactcggaaaattccacttttcaatttacccttcatctggaaattgtacacctagtcttttacacattgcccccttatagaagttctttacatctatttcaaagttcataacactacattattcggttcttccgatgtacttttttttgttcgtttctggttcccttttctcctattcttcgaggtttttaaaaattaacaattttgagctaacgtttatctcccttgtcagcttttcttccctt

SEQ ID NO: 483586 - DNA, 382 bp, Homo sapiens
atcaagtggacactacaaggaaatgttaaaaaaaaaaaaggtacgtggggccaaaggaatataatatatgtcagaaactggggttcccccaacagaattaaggggcataaaaataagataagggtaatggcggtaaaagataactagcagtttaaaccaaggatatatagggttttcccagcatatgtaaaagtagtccatatatgaatacaagaccacaagggatcagggagaatggggaatatactatcacagggttctaatagggaaggggaacacagtataatctcatttagaggaggccccaaataatttaaaacatatatactataaaccctaggagacaccattaaagggttcccaaaaggaggggtcaccggag

SEQ ID NO: 483587 - DNA, 370 bp, Homo sapiens
atctagtgtttgaagcaggatggccttgccgcgtggcctgcgcctgagcgctcaagcccgcaaacagggggaggtcttcaggcagaatcttttccaggaggctgtggaatccctctacagattcttgccacagtcatatacctgaatcagctcttgcaagaggactccctcaatgcggctgacttgacttccatacggacctcactggacatgctcatcccagacccttcacccaaggatgatgagatggaaacagataagcaggagacgaacagaagtccctaagcgtggatttctccctgcgaatgagaaaggccctggccctgcttgccctgcgtaagccacgaagtctggactctcagagtgcttt

SEQ ID NO: 483588 - DNA, 978 bp, Homo sapiens
  misc_feature (739)..(739): n is a, c, g, or t
  misc_feature (742)..(742): n is a, c, g, or t
  misc_feature (753)..(753): n is a, c, g, or t
  misc_feature (756)..(756): n is a, c, g, or t
  misc_feature (765)..(765): n is a, c, g, or t
  misc_feature (768)..(768): n is a, c, g, or t
  misc_feature (771)..(771): n is a, c, g, or t
  misc_feature (773)..(773): n is a, c, g, or t
  misc_feature (775)..(776): n is a, c, g, or t
  misc_feature (783)..(783): n is a, c, g, or t
  misc_feature (791)..(791): n is a, c, g, or t
  misc_feature (806)..(806): n is a, c, g, or t
  misc_feature (808)..(808): n is a, c, g, or t
  misc_feature (815)..(815): n is a, c, g, or t
  misc_feature (817)..(817): n is a, c, g, or t
  misc_feature (819)..(820): n is a, c, g, or t
  misc_feature (826)..(827): n is a, c, g, or t
  misc_feature (829)..(829): n is a, c, g, or t
  misc_feature (831)..(831): n is a, c, g, or t
  misc_feature (834)..(834): n is a, c, g, or t
  misc_feature (838)..(838): n is a, c, g, or t
  misc_feature (842)..(842): n is a, c, g, or t
  misc_feature (845)..(845): n is a, c, g, or t
  misc_feature (850)..(851): n is a, c, g, or t
  misc_feature (854)..(854): n is a, c, g, or t
  misc_feature (856)..(856): n is a, c, g, or t
  misc_feature (867)..(867): n is a, c, g, or t
  misc_feature (873)..(873): n is a, c, g, or t
taaagagattaggaggctcgatatttgggaaagaagagaggatgctagtcgtcgacgactctcttaataaccaccgctacacaaagaaagtcgtgctgtatccctactgacttctccagctgctggtataaaaacagttgatcctctgcctttgcgggaagattctgaagacaatatccacaaatttgctgaggcaactcttccagtttcaaaaattccaaaatacccaacaaatccccctggacagttgccttctccaccacatgttccatcctactggcatccctctcgacgaattcagggctctcttagagatccagagtttcagcacaatgtgggaaaagcaaggatgaacaatttgcagttacctcaacatgaagcctttaatgatgaagatgaggacagattgtctgagatttctgctcgctctgcagcttctagtctccgggcttttcaaactctggcacgagctaagaaaaggaaggagaatttctggggtaaaacataaacctagctgagttgcctttatctaaggaaacattggcataatttttctttattgcttactgtgttaaaattttttggagtgaagtttttcctaacattttctactttgaaatatttaatttccaatagaacagtttactttggaaattggtaacataagcttatacaaatttaacttttaaagaattctttttacatctatcccaaagtacaaagacctagattattgaanttntcaccggtacnttngtaataggngtnatngntnnatttccnccttcacnagagttttctaaaananaaacaangngnngtaaanntnanatncccncggngangttannttncnccaagaatggnatatgntctttataatgaacaggttgaaaacaaattcgcgaccctgaccctcgctggaaggcccttttatatacaacctacacacgggcgcaggatacaataatgcactcg

SEQ ID NO: 483589 - DNA, 208 bp, Homo sapiens
gatgaaatacgctatcgcatttattcaaagggcgcgccatatgcttcttagcgtcgcttgtcaaactatcagctcatctttctctaatgaggtactctggcagctccgtatcatgtcattgtggtaatacccgtatcatactgctgttgtcctcgctaccgtccactccatcttcctggtcatagctgttcctgaatatagatagagg

SEQ ID NO: 483590 - DNA, 835 bp, Homo sapiens
taaagagattaggaggctcgatatttgggaaagaagagaggatgctagtcgtcgacgactctcttaataaccaccgctacacaaagaaagtcgtgctgtatccctactgacttctccagctgctggtataaaaacagttgatcctctgcctttgcgggaagattctgaagacaatatccacaaatttgctgaggcaactcttccagtttcaaaaattccaaaatacccaacaaatccccctggacagttgccttctccaccacatgttccatcctactggcatccctctcgacgaattcagggctctcttagagatccagagtttcagcacaatgtgggaaaagcaaggatgaacaatttgcagttacctcaacatgaagcctttaatgatgaagatgaggacagattgtctgagatttctgctcgctctgcagcttctagtctccgggcttttcaaactctggcacgagctaagaaaaggaaggagaatttctggggtaaaacataaacctagctgagttgcctttatctaaggaaacattggcataatttttctttattgcttactgtgttaaaattttttggagtgaagtttttcctaacattttctactttgaaatatttaatttccaatagaacagtttactttggaaattggtaacataagcttatacaaatttaacttttaaagaattctttttacatctatcccaaagtacaaagacctagattattgattctttttatttaccttcataaaagggcactggtttatttcacctatccagaaacatctaaaaataatcaagatgtgaacagtttgaaatctatttat

SEQ ID NO: 483591 - DNA, 596 bp, Homo sapiens
  misc_feature (28)..(28): n is a, c, g, or t
  misc_feature (224)..(224): n is a, c, g, or t
  misc_feature (243)..(243): n is a, c, g, or t
  misc_feature (255)..(255): n is a, c, g, or t
  misc_feature (314)..(314): n is a, c, g, or t
  misc_feature (320)..(320): n is a, c, g, or t
  misc_feature (334)..(334): n is a, c, g, or t
  misc_feature (337)..(337): n is a, c, g, or t
  misc_feature (365)..(365): n is a, c, g, or t
  misc_feature (384)..(385): n is a, c, g, or t
  misc_feature (390)..(390): n is a, c, g, or t
  misc_feature (398)..(398): n is a, c, g, or t
  misc_feature (405)..(406): n is a, c, g, or t
  misc_feature (427)..(427): n is a, c, g, or t
  misc_feature (431)..(431): n is a, c, g, or t
  misc_feature (435)..(437): n is a, c, g, or t
  misc_feature (439)..(439): n is a, c, g, or t
  misc_feature (485)..(485): n is a, c, g, or t
  misc_feature (490)..(490): n is a, c, g, or t
  misc_feature (504)..(505): n is a, c, g, or t
  misc_feature (525)..(525): n is a, c, g, or t
  misc_feature (545)..(545): n is a, c, g, or t
ccagatatttattacagaggggcatggngggatacctacttattcttcattatgggaacaattaaaggcatttattagataggaaattaacagatcatctgcttctataactttattagctacattaaataggcagtgagcaataatttaaaaactcaccattatataaaataataaataacaaagtaaaagttaatgttataaaaataaactgatagtaaggnaaatccaaatgggcatgancccattttagangaccaaatgattaatagggttgtcatgttataatagacaattgtctaattatttctgtntttttntttagtgggtagcngangtcgttcagaagagcagaaatatgtagnaaacctctctccctccccnnccctncgccatcnccattcnnccgcacacagctcctctcccncccncccnnncnggggcggcgcgcttagttttcgggtgggggaaatctgccggggganagggngcggtggggtatcnngggcgtaagaggaggagagngagaggatgatctgccacanactgtgggcctccatgtccagttctccctgtcataacacctcctgtgccag

SEQ ID NO: 483592 - DNA, 954 bp, Homo sapiens
taaagagattaggaggctcgatatttgggaaagaagagaggatgctagtcgtcgacgactctcttaataaccaccgctacacaaagaaagtcgtgctgtatccctactgacttctccagctgctggtataaaaacagttgatcctctgcctttgcgggaagattctgaagacaatatccacaaatttgctgaggcaactcttccagtttcaaaaattccaaaatacccaacaaatccccctggacagttgccttctccaccacatgttccatcctactggcatccctctcgacgaattcagggctctcttagagatccagagtttcagcacaatgtgggaaaagcaaggatgaacaatttgcagttacctcaacatgaagcctttaatgatgaagatgaggacagattgtctgagatttctgctcgctctgcagcttctagtctccgggcttttcaaactctggcacgagctaagaaaaggaaggagaatttctggggtaaaacataaacctagctgagttgcctttatctaaggaaacattggcataatttttctttattgcttactgtgttaaaattttttggagtgaagtttttcctaacattttctactttgaaatatttaatttccaatagaacagtttactttggaaattggtaacataagcttatacaaatttaacttttaaagaattctttttacatctatcccaaagtacaaagacctagattattgaactctatcttgaaacttccacaaatagtgtatagtatacattccaattatccaagaattatcacataaactaatacgtgtagaaagtttacaactcagagtgcacgaatttcgccttacatttgacccgactttctaactgaatatcagaaatgaatcagtagattctcacatactctccggtcttctcctatattttttactcgttagtattacat

SEQ ID NO: 483593 - DNA, 953 bp, Homo sapiens
taaagagattaggaggctcgatatttgggaaagaagagaggatgctagtcgtcgacgactctcttaataaccaccgctacacaaagaaagtcgtgctgtatccctactgacttctccagctgctggtataaaaacagttgatcctctgcctttgcgggaagattctgaagacaatatccacaaatttgctgaggcaactcttccagtttcaaaaattccaaaatacccaacaaatccccctggacagttgccttctccaccacatgttccatcctactggcatccctctcgacgaattcagggctctcttagagatccagagtttcagcacaatgtgggaaaagcaaggatgaacaatttgcagttacctcaacatgaagcctttaatgatgaagatgaggacagattgtctgagatttctgctcgctctgcagcttctagtctccgggcttttcaaactctggcacgagctaagaaaaggaaggagaatttctggggtaaaacataaacctagctgagttgcctttatctaaggaaacattggcataatttttctttattgcttactgtgttaaaattttttggagtgaagtttttcctaacattttctactttgaaatatttaatttccaatagaacagtttactttggaaattggtaacataagcttatacaaatttaacttttaaagaattctttttacatctatcccaaagtacaaagacctagattattgaattcttacatgtaactttccgaaatggggtgggggataaatttcaccctgtcccagagagtttctaaaaaatagaaaaggtgaaggaacagtctaagacccgtggtgagagttaatgcccttaggtgagataattggtctctttaatagtgatgttgagaaagaattttgggccttaaccttgtgaggcgtgtctatgatttgatcgctcttaacg

SEQ ID NO: 483594 - DNA, 981 bp, Homo sapiens
  misc_feature (677)..(677): n is a, c, g, or t
taaagagattaggaggctcgatatttgggaaagaagagaggatgctagtcgtcgacgactctcttaataaccaccgctacacaaagaaagtcgtgctgtatccctactgacttctccagctgctggtataaaaacagttgatcctctgcctttgcgggaagattctgaagacaatatccacaaatttgctgaggcaactcttccagtttcaaaaattccaaaatacccaacaaatccccctggacagttgccttctccaccacatgttccatcctactggcatccctctcgacgaattcagggctctctttttacgacgatccagaagtctctaaggacaatggtgagaaagaagcatacgatagcaccatatgagcacgttcaccctaatactatgcactcccgtctactgcatcgaaagaccgcatgaaaatgaatattttatgatcaaaactcgcggctcggcctctaataaatcgccgatagttgataccgggaagcatatattcatatactgtgcgcgccatagatttacgcgaacaaccgataccgacaaactccgactcggtgtacctcttacaatcaagactgctatcattgaagtgtagcctctttatcataaagggaaaagcattaggaaattaagtttgttacttctaattggtttaactagaagnccaaaggatttactatggacgtgccaatgttctcctcttacccccatctcttacccactaatatgagatggtgcatgtcgtatcttaaatattccctacgttctatcaaattagtgtctcatctcgctatgacgtgtcataatttcaagagtatgaagaggaccacacatccgaggacgactacaatgccgatcatgtattacatcctatcctacgtccgttgctcaattttgcatgtgactgtattcccggaagacagttaagctctcgtcgattaccgtatccatttcggcaatatatatct

SEQ ID NO: 483595 - DNA, 901 bp, Homo sapiens
taaagagattaggaggctcgatatttgggaaagaagagaggatgctagtcgtcgacgactctcttaataaccaccgctacacaaagaaagtcgtgctgtatccctactgacttctccagctgctggtataaaaacagttgatcctctgcctttgcgggaagattctgaagacaatatccacaaatttgctgaggcaactcttccagtttcaaaaattccaaaatacccaacaaatccccctggacagttgccttctccaccacatgttccatcctactggcatccctctcgacgaattcagggctctcttagagatccagagtttcagcacaatgtgggaaaagcaaggatgaacaatttgcagttacctcaacatgaagcctttaatgatgaagatgaggacagattgtctgagatttctgctcgctctgcagcttctagtctccgggcttttcaaactctggcacgagctaagaaaaggaaggagaatttctggggtaaaacataaacctagctgagttgcctttatctaaggaaacattggcataatttttctttattgcttactgtgttaaaattttttggagtgaagtttttcctaacattttctactttgaaatatttaatttccaatagaacagtttactttggaaattggtaacataagcttatacaaatttaacttttaaagaattctttttacatctatcccaaagtacaaagacctagattattgaaatcttcaccagaaactttctgacaaggttgtacgaattgatgttccccttgcgccagagttttctgaagaagtagccgggggtgctgcaagtttgaattccgaggtggagcgaatattacccaaagaaagtacgtagtcctctacaaatgagaacgcggaacg

SEQ ID NO: 483596 - DNA, 891 bp, Homo sapiens
taaagagattaggaggctcgatatttgggaaagaagagaggatgctagtcgtcgacgactctcttaataaccaccgctacacaaagaaagtcgtgctgtatccctactgacttctccagctgctggtataaaaacagttgatcctctgcctttgcgggaagattctgaagacaatatccacaaatttgctgaggcaactcttccagtttcaaaaattccaaaatacccaacaaatccccctggacagttgccttctccaccacatgttccatcctactggcatccctctcgacgaattcagggctctcttagagatccagagtttcagcacaatgtgggaaaagcaaggatgaacaatttgcagttacctcaacatgaagcctttaatgatgaagatgaggacagattgtctgagatttctgctcgctctgcagcttctagtctccgggcttttcaaactctggcacgagctaagaaaaggaaggagaatttctggggtaaaacataaacctagctgagttgcctttatctaaggaaacattggcataatttttctttattgcttactgtgttaaaattttttggagtgaagtttttcctaacattttctactttgaaatatttaatttccaatagaacagtttactttggaaattggtaacataagcttatacaaatttaacttttaaagaattctttttacatctatcccaaagtacaaagacctagattattgaattttaacatggaacttcgcaattagtagtactggttaaattttactatcctaaaagttttaaaaaaataccacctgatattatttacaaaccagcgtaaatccattccccccacattggattatattactctaagcgtaacgcggacatcgct

SEQ ID NO: 483597 - DNA, 180 bp, Homo sapiens
ggacgcgcatgcggtcccagaagtgcgtgcacatcataacagctgcagagtatatgagcaggtggaacgtccaacagatgccccactcacaagatagggccctccaatcagtcttctgtgctccctttcactcatagtaactggtttgctcttcctattggtcatagataaatgcacacc

SEQ ID NO: 483598 - DNA, 859 bp, Homo sapiens
taaagagattaggaggctcgatatttgggaaagaagagaggatgctagtcgtcgacgactctcttaataaccaccgctacacaaagaaagtcgtgctgtatccctactgacttctccagctgctggtataaaaacagttgatcctctgcctttgcgggaagattctgaagacaatatccacaaatttgctgaggcaactcttccagtttcaaaaattccaaaatacccaacaaatccccctggacagttgccttctccaccacatgttccatcctactggcatccctctcgacgaattcagggctctcttagagatccagagtttcagcacaatgtgggaaaagcaaggatgaacaatttgcagttacctcaacatgaagcctttaatgatgaagatgaggacagattgtctgagatttctgctcgctctgcagcttctagtctccgggcttttcaaactctggcacgagctaagaaaaggaaggagaatttctggggtaaaacataaacctagctgagttgcctttatctaaggaaacattggcataatttttctttattgcttactgtgttaaaattttttggagtgaagtttttcctaacattttctactttgaaatatttaatttccaatagaacagtttactttggaaattggtaacataagcttatacaaatttaacttttaaagaattctttttacatctatcccaaagtacaaagacctagattattgaattttccattaaccttcgaaattaggtggactggttcatgttccctttccagaagtgttattaaagagttaacctgaggccgtaagtttataatccagagtaaaaatattaaaccttcgtca

SEQ ID NO: 483599 - DNA, 850 bp, Homo sapiens
taaagagattaggaggctcgatatttgggaaagaagagaggatgctagtcgtcgacgactctcttaataaccaccgctacacaaagaaagtcgtgctgtatccctactgacttctccagctgctggtataaaaacagttgatcctctgcctttgcgggaagattctgaagacaatatccacaaatttgctgaggcaactcttccagtttcaaaaattccaaaatacccaacaaatccccctggacagttgccttctccaccacatgttccatcctactggcatccctctcgacgaattcagggctctcttagagatccagagtttcagcacaatgtgggaaaagcaaggatgaacaatttgcagttacctcaacatgaagcctttaatgatgaagatgaggacagattgtctgagatttctgctcgctctgcagcttctagtctccgggcttttcaaactctggcacgagctaagaaaaggaaggagaatttctggggtaaaacataaacctagctgagttgcctttatctaaggaaacattggcataatttttctttattgcttactgtgttaaaattttttggagtgaagtttttcctaacattttctactttgaaatatttaatttccaatagaacagtttactttggaaattggtaacataagcttatacaaatttaacttttaaagaattctttttacatctatcccaaagtacaaagacctagattattgattcttatcctgcacactgccaaaaggggccctggatcaatactctccctatacaaaacgttgctaacactaaaaataggtagttaaagttgcgaacctatagtgagcttaaat

SEQ ID NO: 483600 - DNA, 877 bp, Homo sapiens
gcgtccacttcttcttcctttccactctcccctatctccccaaaataaatctagtcgctttgtggtacgtgctttccttcgtagttcaacaagtgaaggtttactactgaagattgatccattgctgcctacagaagcccaaaatgaagacagtgaaacagaccacgcctaaactgtggttgcactgcgtctattactttcccctggtctatgatgcattggtatcacacccccaacgcaccatgatttttccagtctgatggttttgggactcgtttctactctcgtacgtcccctctcattatttcttctctctcttccatatcgtctatgagactccccactcacagtcctcgtcttcctttcttctttcatcaccccaacaattaaattcatctcaccaccacacttcctcaagcctcggcaattagtttctcttccccttgcagtgcaaacgtgcacgtccactttcttcccatattccctttactctctgtccgcccctttccatctctcttccccccccttcctacttccctctcctatcccgcatcttctctctccttcttctcattcctccccccatactttttccctacttgctgagccaaattcccccatctatcacaccctacgctcccccctacccggtcgttccttccactccccgccttcatttctttcttccactccacctgtctcattacgaccatccagatacccattcctccctagtaatccccgaaatctggccccctacccccctttatttaactatattctcgctatgccagtccctagcctcttctgcccccctcctactctcgttgctcatgcaaccacctcccactctccaccgtttcgcatccaacacttt

SEQ ID NO: 483601 - DNA, 339 bp, Homo sapiens
  misc_feature (329)..(329): n is a, c, g, or t
aaaaaaaagatactttttttttgttttttgagactgagtcttgcttttgttgcccaggctggagtgcagtggtgcagtctcggcttaccgcaaccttggcctcccaggttcaggcgattgtcctgcctcagcctcccgagtggctgggattgtgggcatgtgccaccatgcccggctaattttgtatttttggtagagatggggtttctccatgttggtcaggctggtctcgactcctgacctcacgttatccgcctgcctcggcctcccaaagaaaaaggatacttttaaagggatctttgagtacgagaatgtgtcgtgtcctaaangtagtgttta

SEQ ID NO: 483602 - DNA, 511 bp, Homo sapiens
  misc_feature (157)..(157): n is a, c, g, or t
  misc_feature (488)..(488): n is a, c, g, or t
caactagtgtgacctttggagaggggcaggcagaagagacgggaaggcagacgttcatattctttcttgtgattgcttgcaaaacagctcaagtggtggttctcaaatctgactgcacattaaaagcatccagggagttttaaaaggtactgatgcntgggctccatcatgagattctgattcagctgatgtgggttagagcctgggcgctgatatttttaaaaccccaacaggtgattctagtgtgcagtcagggtactatataaagatataatgaaccacaatatagaggaagagaaaacatagtccattcactccaaatgccactgtgcacatagagaagctgtttcttaaaaatctaaaatctataactttctgggaatattctcctatcccagatgaagagctctgatagacttcctaagataacttgaaatgagcttaactttaccatttgtaactaaagtctttcattttcgtcgacgcgnccgcgaatttagtagtagtaggc

SEQ ID NO: 483603 - DNA, 348 bp, Homo sapiens
gggcctcttccgccttcacctggcacttctccttcctgctgccttgtgaagaaggtgccttggttccccttcgtcacagagatcagaacagaaacgcgtcagatgtcagcatcaaaataggaatcaatgcataaagattctctcggctcggatcgtgatcatccataagtgaatctcagatctgtaaacgtcttcgagaggtcagtctagactgagagattactgcatctgagcactgtcacgatgtacatgcgataccatatcaatataggtgaaagatcaggaatgctctcaagtgaaaaagagaagcgctcaattgaagaggaatgacggatgcctggtcatagc

SEQ ID NO: 483604 - DNA, 327 bp, Homo sapiens
tgcggattgctttctgtaagccaaacactattctgaatactttacacattttaactcatgtaattttcacaaccatatgaggtagttaagatgacgaggtcaggagatcgagaccatcctggctaacgcagtgaaaccccgtctctattaaaaaatagaaaaaatcggccgggcgttgtggtgggcgcttgtagtcccagctactcaggaggctgaggcaggagaatgacttgaacccgggaggcagagcttgcagtgagccgagatcacgccactgcactccagtctgggtgacagagcgagacctccgtgcaaaaaaaacacaac

SEQ ID NO: 483605 - DNA, 316 bp, Homo sapiens
tttttaattttggtagagacggggttcaccatgttgcacaggctggtctagagctcctgagctcaagtgatccatccgccttgcctcccaaagtgctgggattacaggcgtgagccattgcaccgtgcaaaattattttaacgtataaattttggattttccacatatatatacacacaagcatgtgtaccctgtgcacacaacacacatagtaatttatacagggcttaggaagggcaggaataaaggtgtcctctctactttttacaaagatgggatctcatggtgtagccacggtaaaccaccacaagtaccg

SEQ ID NO: 483606 - DNA, 694 bp, Homo sapiens
atcccaccctcatcgtgtcagaagggtacagatggtgacatcgttgctcagagggccttccagtgcctgaaacaggactgttgctatgactacagggagaaccccatctccagcgtggaacgtgaagagggcacgagacattccacttgactactggagcagatggggtttacccaggatttcaaccatcatcgtgcaatcccattatgaggcccagtaaggaagtgttaataggagtaaatttccgtgtaggaccgagggtgctactcgtggcactgcagtcgctctgtcgcttccagtgttctctggtagtgagagggcagtttcttcagtgcagcatggctgtgtccttagtcctaatattatgggactcttctgcgcatactcacttagtctatctgtgtggagaccatcccctccgagatccagggtcttcgtgtgaagaatttctgatggtgggagctacgcctatgccattcataccccgatcatgcttcatcctgggtctgaatgcagctgtatttaagaccagcagggtgcttccttaaatgcagctgcagtctggatattccaggtccctagtcgctgcggaactggttgggtctgggggtctttggctttccagaccgtgaccgtctccatctcttcggagaagaccgggaggctctgtgtcgcaggcagttagtttctctgg

SEQ ID NO: 483607 - DNA, 94 bp, Homo sapiens
acggccgtgtattactgtgcgagacacagaggacttcctttcgctgcttttgatatctggggccaagggacaatggtcaccgtctcttcaggga

SEQ ID NO: 483608 - DNA, 269 bp, Homo sapiens
atctcgagtatcccagcaatcgctgtataggcatacatagacgtggtgggggctctgcgttctcctctacagatgagaatagcaaggtggctctggatcagcacgatggcggtctccacgagagctctgccagtcctgacccccaggactgcctctgtggcgtaacacagtgaggtggggcagccactagaaactgagcccagcttgcacctctcctgtggcctccaggctgttcaccaccctccttgtcatcttccacatccccgatc

SEQ ID NO: 483609 - DNA, 339 bp, Homo sapiens
ggttcacgcctgtaatccaccgctttgagaggtctaagtgggcaatcacttgaactcaggagggggagaccagcctgaacaacgtggtgaaaccccgtctctacccaaaatacaaaaaaattaggcaggcatggtggcttacacctgtggtcccagctactcgggaggctgaggtggggggatcgcttgggtccaggaggcggagattggagtgagctgaagttgtatcacttcactccagcctgggtgacagagcgagaccccgtctcaaaaaaaaaaggaaaggaatccacttgctaatgtgggtaagagtttacatgaggccctttgttttattta

SEQ ID NO: 483610 - DNA, 814 bp, Homo sapiens
gtaggcagtagtaacacagtggtattagtgtatctaaacataccaaaatggaaaaggtaccagtaaaaatatgctataaaagataaaaaaattgtacacctgtataaggagcttgccatgaagggagcttgcaggactggaagttgctctgggtgagtcagtgagtgagtggtgagtgaatgtgaaggcctaggatattcctgtacactactgtagcgtttataaactctgtacacttaggctacactaaatttataaaataatatttttctttcttctgtaataaattaaccttagcttactgtaacttttttactttataaagttttaaagtttttaataacttttgacatttctaatactaagcttaaaacaaacattgtacagctgtacaaaaatattttctttctttatatccttattctatacagtttttttctatttttacaatttaatttttgttgtagtgttgtataaacttttttgttaacaaactaagatgccaaacacatactttagcctaggcctgcacagggctcaagatcatcaatataaactgtcttccacctccatgtcttatcccactgggaaggtcttcaggggcaacgtgggcatgtgtggcaactgtccatctatgataacaataccttcttctggtaacctcctgtagaattggtctgaagctgtcttacagtaaccttattttttaagaaggaggcctggttaaatctgagaaacagttagtaatcactagcatgctagacattccgggccattaattcatgggacacaggtgctgtttcagcgagaagag

SEQ ID NO: 483611 - DNA, 682 bp, Homo sapiens
cacagtggctcacacctataatcccagaactttgggaggctgaggtggatggatcacttgaggtcaggagttcaagaccagcctggtcaatatggcaaaacccagtctctactaaaaatagaaaaatgaggcggctgtggcggcatgcacctgtagtcccagctactggggaggctgaggcaggagaatcgattgaacccaggaggtggaggttgcagtgagccaagatcatgccactgcactccagcctggccaaaaagcaagactctgtctcaaaaaaaaaaaaaaaccaaaaccaaaaacaaaatttccaattttcattaaagggggctaattaaaaaagatctattattaacattgggaggcgaacaagatatattgggataagggcttgggttaaattttttgggtgggaatttcaagtagagccggggtttggcagatgttggcccacccttgaaactctgaggccaacaagaagtccacccaaccaggggcctccccaaagggggccggggaactggccagggggtgagtcagtggaccttgtcgttgaattacaagaaggggtcacgcctgtggccaaaggctgagagggccaggcgcacgctgggcaactggccgctaaactcggggcagagaatgtcgccaaaccaaaaacggaggcaagcgggaatcatac

SEQ ID NO: 483612 - DNA, 292 bp, Homo sapiens
  misc_feature (216)..(216): n is a, c, g, or t
tcagtcgaccacttctcttcatctgtaactcacctgtagacctgggttgtgcctccactttgtgcagtgtctgtactagcgggatttcacagggtgaccacaggacaagcacagatgtttccgaaattctaagtaagggtccacctcagctcccactgatccagtcgtgcgccagaggttcagaatgctctcccacgggacttggttggtggagtntcctcccataacctgtgttaccaagttatcctgattcgagctctagagatgcccccagcatagttccgtaacaata

SEQ ID NO: 483613 - DNA, 460 bp, Homo sapiens
  misc_feature (73)..(73): n is a, c, g, or t
  misc_feature (77)..(77): n is a, c, g, or t
  misc_feature (79)..(79): n is a, c, g, or t
  misc_feature (88)..(88): n is a, c, g, or t
  misc_feature (107)..(107): n is a, c, g, or t
  misc_feature (109)..(109): n is a, c, g, or t
  misc_feature (111)..(111): n is a, c, g, or t
  misc_feature (115)..(116): n is a, c, g, or t
  misc_feature (121)..(121): n is a, c, g, or t
  misc_feature (124)..(124): n is a, c, g, or t
  misc_feature (150)..(150): n is a, c, g, or t
  misc_feature (153)..(153): n is a, c, g, or t
  misc_feature (163)..(163): n is a, c, g, or t
  misc_feature (167)..(167): n is a, c, g, or t
  misc_feature (169)..(169): n is a, c, g, or t
  misc_feature (195)..(195): n is a, c, g, or t
  misc_feature (202)..(202): n is a, c, g, or t
  misc_feature (204)..(204): n is a, c, g, or t
  misc_feature (248)..(248): n is a, c, g, or t
  misc_feature (268)..(268): n is a, c, g, or t
  misc_feature (313)..(313): n is a, c, g, or t
  misc_feature (319)..(319): n is a, c, g, or t
  misc_feature (325)..(325): n is a, c, g, or t
  misc_feature (341)..(342): n is a, c, g, or t
  misc_feature (349)..(349): n is a, c, g, or t
  misc_feature (360)..(360): n is a, c, g, or t
  misc_feature (362)..(362): n is a, c, g, or t
  misc_feature (382)..(382): n is a, c, g, or t
  misc_feature (384)..(384): n is a, c, g, or t
  misc_feature (404)..(404): n is a, c, g, or t
  misc_feature (407)..(407): n is a, c, g, or t
  misc_feature (413)..(413): n is a, c, g, or t
  misc_feature (419)..(419): n is a, c, g, or t
  misc_feature (425)..(426): n is a, c, g, or t
  misc_feature (433)..(433): n is a, c, g, or t
  misc_feature (443)..(443): n is a, c, g, or t
cgggtgaggtacagctacgagaatccgagcaaatgaccaagaccaagaagcgccctcagcgtgcaagatccantgtntntgctatgtntgaccagtcacagattcangngntcanngaggnctncaacatgatagatcagaacagagatngtntcatcgacanggangntttgcatgatatgcttgcttcattgnggaagantncaactgatgagtatctagatgccatgatgaatgaggctccaggncccatcaatttcaccatgtncctcaccatgtaaggtgagacgttaaatggcacaggatcctgaanatgtcntcaganatgcctttgcttgctnngatgaanaagcaactggnancatacaggaagattacttgngngagctgctgacaaccatggnggntcggtntacagntgaggnngtggatnagctgtcacncagaaagcgcctaatac

SEQ ID NO: 483614 - DNA, 220 bp, Homo sapiens
atactgagccggcccgttttactaagattacaatagccctatcgccactgtcttaccgcaaggtgacacctatagcccttatccccatagtagttattatcgaaatcatcagactagtcattcaaaccaatagccctggccgtacgcctaaccggtaacataactgcaggccacctactcatgcagctaattggaagcgccgtcgactacgcacgggtac

SEQ ID NO: 483615 - DNA, 212 bp, Homo sapiens
gctctggatcccgtctctgtaatgttgtccatgtcttgaacctgtgtgaaatttgtttcccataaaaaagcgatcaaggtctctccgaataagattatgacacaaagccggagagttgatatacccctgagggaggacagtaaaggtatattgctgcctttgccagctgaaggcaaattgcttctggtgggccttatggacacgaatgttca

SEQ ID NO: 483616 - DNA, 81 bp, Homo sapiens
gccgaggacacggctatatattactgtgcgagatatgatgggattggttcgtccggtggctttgactactggggccaggga

SEQ ID NO: 483617 - DNA, 1048 bp, Homo sapiens
  misc_feature (20)..(20): n is a, c, g, or t
  misc_feature (33)..(34): n is a, c, g, or t
  misc_feature (83)..(83): n is a, c, g, or t
  misc_feature (90)..(90): n is a, c, g, or t
  misc_feature (134)..(135): n is a, c, g, or t
  misc_feature (152)..(153): n is a, c, g, or t
  misc_feature (163)..(164): n is a, c, g, or t
  misc_feature (168)..(168): n is a, c, g, or t
  misc_feature (173)..(174): n is a, c, g, or t
  misc_feature (182)..(182): n is a, c, g, or t
  misc_feature (184)..(184): n is a, c, g, or t
  misc_feature (194)..(194): n is a, c, g, or t
  misc_feature (196)..(196): n is a, c, g, or t
  misc_feature (234)..(235): n is a, c, g, or t
  misc_feature (240)..(240): n is a, c, g, or t
  misc_feature (259)..(259): n is a, c, g, or t
  misc_feature (331)..(332): n is a, c, g, or t
  misc_feature (351)..(351): n is a, c, g, or t
gctttctcaggagacaccanatcgagacaggcnnagggcagttgccggccaaactttccagcctgttcgttaagtgtctgcanaacccantccagcgacatcaggctggtggctgagaagatgatctggtgggnnaaataaggacccactgnnctcccctggnncccncaggnncatcaagncncatcctgaangnctcttcttgacaacaccaaggataagaacaccgtggtnnagggnctacagcgaccaggcaatngtcaacctcctcaagatgcggcagggtgaagaggtgtttcagtccctctccaagatcctggatgtggccagnnggaggtgctgaacgaggtnaaccgaaggatccctgaacgaagctggccagccaggccgacatccacggagcaggtggacgacagccatcctgacatgagaggcctgggccagcagcagcatggcctgctccacatcttatgctcaatgtatgccattctggagcaatacattggttccactggggagcttggaagcagggcgttcccagaaagtatctccaatatcaatagaccacagccaaagccttgaaatcgaaacccacacacaagctgagaatagcctccttccatcgtctcaccgtttcctgtggaagaagagacaaggaacaaggcacacggccattggcggcctccagagccacagacatgggcgcagacccaaggaaggctgctacggtccagtcacagacaagagatagagtctggaaacataatactaagccaggggcacagaccggggggctccccctcctccatgagccagaacacctggctcgacgagactggtgcaaccaaaacgttttccctacttatcaccgaggtggccaccagagcgtgtgattcctcccacacgagatggagcactagccaggtcattgcaacactagcaagctctcaacggcatatacccctgtacagatgacagtaactcacgatatgaagtcaaacataggacgcataatattaaaaatagtaatcacagtataaatcgagat

SEQ ID NO: 483618 - DNA, 138 bp, Homo sapiens
gatagcttgtcggacatacttctggatgggcactgtgcggaaacttgaggatgagatcagtgagcagcatgcacttgaaaggcatggccatgtctccatcacttgagtgcaaggtccatcgaccaaagccctgtactg

SEQ ID NO: 483619 - DNA, 213 bp, Homo sapiens
gtagctgggactacaggcatgtgccaccatgcatggctgattttttgtatttttagtagagacggggtttcaccgtgttggccaggatggtctcgatcttctcaccttgtgatccacccgccttggcctcccaaggtgccgggattgcaggcgtgagccactgtgcccagccagcttttaaagttttaaaaaggatttgttcagacatggaat

SEQ ID NO: 483620 - DNA, 155 bp, Homo sapiens
tggagttcgccggaggaaaaggttggggaacagcttaatggttgttgttgatttggttaaacaattagtagagggactatgctcactattaggctgtgggctgttgtgttgattcaaaccttatgtgttttttggaacagtcatgtcatgtggta

SEQ ID NO: 483621 - DNA, 84 bp, Homo sapiens
atcggttcctaggagcggacaagtgtatgtacccctttattgctcaaagaaagcaagccccttcataaacattctctttactca

SEQ ID NO: 483622 - DNA, 451 bp, Homo sapiens
  misc_feature (351)..(351): n is a, c, g, or t
ggccaaacgcctgtgtgccgaatcgcttgcttctgatcccgctccgtgtaacctaagtgtgctgcaggcaaagcccaggccacggctgcgtcactactgatgttcacgatgccacacagtcacacacctaattcattctcaagtcggagcaacacataccaaccttgaccttatcctcaagctccagggcagcctggccgagcagcccctgctccctcctggagacccttgtcacctcccgagctcctcttggagacccctgtcacctcctgaccaactttcccgagggggcaccttacaccaacaccggggtgttttaccaaaaaaaaaaaaaaaaaccctccacccttncaaccaccccaacctgaatgtgtgttcatatttttttgttagttttatccaaaatgtttaagatcccaacaaactttattttctaaacctgcaaaaaaaa

SEQ ID NO: 483623 - DNA, 184 bp, Homo sapiens
ctgcatcttgtatgcgaggaaagtgaggctcggtaagttcagtcagatccacgagattccaagagcgctgctcggtggtccttaggcttttctcctgtggtaaaatatcactcttcagacctaagttgtttctttgacagccctaagcccttgggaggttgggggccagagaggggtggttgta

SEQ ID NO: 483624 - DNA, 925 bp, Homo sapiens
gcggttttccacttcctaatggacgagcgcgcgagactggagtgagagtgtccgaggagtgtgggcgttgtggactctttgctgagggaccccgtgcgggcttggtccctgtgtggtgatgtgctgtgcctgagtgctgtgctgtgcttgtgctgtgcgtgcctgtgtgtgtgctgactatggctgtgaagtgagcatgtgactctatcggagtgtggagcgtgagcccctgtgtggctccgggatggatgcccctgcttgcccatctcccctggtggagctgcgccctctgctagtgtgccctgactgtgctgtgcagtgcgtgcgggatctgggccctagcgaagccaagtccctgggtggccagtgcgagcttgggtgcaagtgtcaacgccaccggacgcaagcatgtgacggccgatggctgtgacagatagacaaggttcacccctccgatctccctgccccccccagttacgactagcgttcttgaaccaatcgaggccccttcaaggggaaccccataatttagttgggccaagctcgaggaccaagtgaccttcgttgtggccgttctcacctcgggccctctccgtccccttaataatgtggggccccccatacggccagcacggacaccccattcttaacaacgcgggccagtcttcttgaaccacacaaatgacgcccccattcaagtgtgccgcaccaaaggagtccgaccgatgatccccggcgaacaaccacgttgggggaaagcaaaggtcccaacgttaattatttacggaaacaatatttgatgccactgtgtagcccttaacaaggggtggtggtccccttggttcgggacaagcgacagacgcgagcgcgatacacctagccgaacaagttacggacgcgaggtcgtggcttgtaacaggcgttg

SEQ ID NO: 483625 - DNA, 514 bp, Homo sapiens
  misc_feature (228)..(228): n is a, c, g, or t
  misc_feature (245)..(245): n is a, c, g, or t
  misc_feature (272)..(272): n is a, c, g, or t
  misc_feature (275)..(275): n is a, c, g, or t
tcgccggtgcgagtgtgcgttcgccgcttcggtggcgatgcgcgcgaggtgcggtcggttgtgcggtcgccgtgggcggtctggtggcggcgctcgggggggcggtggggggtgcgttgacctattctcgcggtgggcgagctgtggcatgcgggctcgccggtagagtttgggaagctcagcggtgaaggcgtgtggctttctgtggaggggtggtgtgggtggccnagtccgggggggccccnttcataaggggggccagtaggtgggcnccnccccacccttcttcgggccttgggggaaatattttgggtgggggggcccccctttttttggggggggccaccaccccccccccacatttttgttggggggttcccccgggcccaaagggcctctgtccccgggtccccagggggggggccctccccccagaggggccccccccaggggggcggggggggtcccccctggggggggttccggaccaacatgccctttccctgtttgggga

SEQ ID NO: 483626 - DNA, 1090 bp, Homo sapiens
  misc_feature (459)..(459): n is a, c, g, or t
  misc_feature (471)..(471): n is a, c, g, or t
agcggtatttggtttctattattctaattttataccgaccactcccccctgaagttgactctacacttccctgtggattttcgtggattaattaggaaaaccagagtagtaatccacgatctgagccaaggtaccctggcccaattgggtccattctactctcctgcgtaacaaacaggctctctctctgtgcactttattgtgtgtgtctattgtcaaagttgtagagagtacacgtggcgttggcgctatattcctcgtgacctaaacattaagaccaaagaagacacaaattctctgctgggcagagcctcgttaaatttgttgattggtttccccctttttaccctcaattggttttcagtaagtacgctgggtgttgactctgggtggtggctctttagtgtcgctcgtttgcgcacaactcgctctttgtggcgcactagatagctatcgtanacctcattttgnttctaaagtgcgtgtaggaaccatttttccgtgcaacgcagtgcgtgcaagatgacacacactttatgtttacgtctcccacatacaccgtgggtgttagtcccactcagtatttagtgggcactaaacaaaaacctttctctctattcatggggttgccctccttgtaaaccagctcttttagttttacacacacattgcacatatgttgtgcacaacacaagagtttccctatttgaaaacctcatctcgtatcactatcctccgttttcccatttccccctgtcccctcgtcccagaaagaaatgtctcgggatatatccctaccagaaaaagccccttaagcatctttaacaccacctctgctgggctttttaccacaaatttgcctgtgaaaaacccaacctttttgtaaggtttattccccagagaaaatgttgacattagggacctctgggcgccttgttctcccttcaaccaagcacattttccccgttcccaaaaggagcttggaccatttaaaccccaatatatttcttcgggggccaacatttggttgaaatcccttggggcccccccttttccccccatttccttcaaaacaccaattccaatccct

SEQ ID NO: 483627 - DNA, 743 bp, Homo sapiens
  misc_feature (448)..(448): n is a, c, g, or t
  misc_feature (491)..(491): n is a, c, g, or t
  misc_feature (512)..(512): n is a, c, g, or t
  misc_feature (550)..(551): n is a, c, g, or t
  misc_feature (636)..(636): n is a, c, g, or t
  misc_feature (654)..(654): n is a, c, g, or t
ggcttccggcatctggctcagttccgccatggcctccttggaagtcagtcgtagtcctcgcaggtctcggcgggagctggaagtgcgcagtccacgacagaacaaatattcggtgcttttacctacctacaacgagcgcgagaacctgccgctcatcgtgtggctgctggtgaaaagcttctccgagagtggaatcaactatgaaattataatcatagatgatggaagcccagatggaacaaggggatgttgctgaacagttggagaagatctatgggtcagacagaattcttctaagaccacgagagaaaaagttgggactaggaactgcatatattcatggaatgaaacatgccacaggaaactacatcattattatggatgctgatctctcacaccatccaaaatttattcctgaatttattaggaagcaaaaggagggtaattntgatattgtctctggaactcgctacaaaggaaatggaggtgtntatggctgggattgaacaganaaatactcagcgggggccaagtttttaactcagatctnnctgagaccaggagcatctgatttaacaggaagtttcagattataccgaaaagaagttctagagaatttactagaacaatgtgttntaaaggtacgtcttccanatggagatgatggttcgggcagactgaattatactatatgggaggggccaacataatatgtggagcgcgggtatggggcaagtgggggg

SEQ ID NO: 483628 - DNA, 769 bp, Homo sapiens
  misc_feature (448)..(448): n is a, c, g, or t
  misc_feature (491)..(491): n is a, c, g, or t
  misc_feature (576)..(577): n is a, c, g, or t
  misc_feature (662)..(662): n is a, c, g, or t
  misc_feature (680)..(680): n is a, c, g, or t
ggcttccggcatctggctcagttccgccatggcctccttggaagtcagtcgtagtcctcgcaggtctcggcgggagctggaagtgcgcagtccacgacagaacaaatattcggtgcttttacctacctacaacgagcgcgagaacctgccgctcatcgtgtggctgctggtgaaaagcttctccgagagtggaatcaactatgaaattataatcatagatgatggaagcccagatggaacaaggggatgttgctgaacagttggagaagatctatgggtcagacagaattcttctaagaccacgagagaaaaagttgggactaggaactgcatatattcatggaatgaaacatgccacaggaaactacatcattattatggatgctgatctctcacaccatccaaaatttattcctgaatttattaggaagcaaaaggagggtaattntgatattgtctctggaactcgctacaaaggaaatggaggtgtntatggctgggattgaaaaggagagactactccgatctgatcgttgattgtgcagccgtggcggccaagtttttaactcagatctnnctgagaccaggagcatctgatttaacaggaagtttcagattataccgaaaagaagttctagagaatttactagaacaatgtgttntaaaggtacgtcttccanatggagatgatggttcgggcagactgaattatactatatgggaggggccaacataatatgtggagcgcgggtatggggcaagtgggggg

SEQ ID NO: 483629 - DNA, 717 bp, Homo sapiens
  misc_feature (422)..(422): n is a, c, g, or t
  misc_feature (465)..(465): n is a, c, g, or t
  misc_feature (486)..(486): n is a, c, g, or t
  misc_feature (524)..(525): n is a, c, g, or t
  misc_feature (610)..(610): n is a, c, g, or t
  misc_feature (628)..(628): n is a, c, g, or t
ggcttccggcatctggctcagttccgccatggcctccttggaagtcagtcgtagtcctcgcaggtctcggcgggagctggaagtgcgcagtccacgacagaacaaatattcggtgcttttacctacctacaacgagcgcgagaacctgccgctcatcgtgtggctgctggtgaaaagcttctccgagagtggaatcaactatgaaattataatcatagatgatggaagcccagatggaacaaggggatgttgctgaacagttggagaagatctatgggtcagacagaattcttctaagaccacgagagaaaaagttgggactaggaactgcatatattcatggaatgaaacatgccacaggaaactacatcattattatggatgctgatctctcacaccatgaagcaaaaggagggtaattntgatattgtctctggaactcgctacaaaggaaatggaggtgtntatggctgggattgaacaganaaatactcagcgggggccaagtttttaactcagatctnnctgagaccaggagcatctgatttaacaggaagtttcagattataccgaaaagaagttctagagaatttactagaacaatgtgttntaaaggtacgtcttccanatggagatgatggttcgggcagactgaattatactatatgggaggggccaacataatatgtggagcgcgggtatggggcaagtgggggg

SEQ ID NO: 483630 - DNA, 199 bp, Homo sapiens
  misc_feature (146)..(146): n is a, c, g, or t
gtcttatcttgaggatcccccctaatgtggaactgcttcgtcgcgtcagcggcggctgggtaggtgactttatttttcaagatgcctttcctctgctctgggggctggctgctagcaatgcctgtgctgcgccccctgctctcctnggtccggtggggtactcgtccacgtgtgacgtgcccgtgctccctcgccggag

SEQ ID NO: 483631 - DNA, 164 bp, Homo sapiens
ggctcggtaccgtatctctacattatgtctggggctagattcaaaacccacgtaatgaaaaagtcagcttttacaagcctaatttgtagttatatttcttttatatcaagttaacgttagaaaatggctatcaactatttaagtacaggacggatctatcatat

SEQ ID NO: 483632 - DNA, 1041 bp, Homo sapiens
gtggataaaacagttcacgtccggacccgcgagaaggaacatgtgtatccattaggttcccgggatctggatctagaagagtctctgaggtcaatgtagtatcatgtgcagggaggatctgacggggatgagttccaggaagaaccgctgatgtgacctgggtgcatgaattgatgcatctgtaaggcccttacaacggtgcctagagccgttgctggagcaatgagtcgctacaagacagtagacattactcacgggtactcatgtgctgtacgaattaccgacgcgttgtttcatctcaacaagattgctttcgggaagcaatactcgcttgatgaaccgatggttcaatggttcagggatgaacacccgaaaggttcgataagaataagttggcactaaagcgtttacgccacatgcgtccgtatcactggcaggagtacggacgtgcactagatatatgccggtactagttacactgaagggttgcacaaagagaacgtgcgaaaagagtcagacagctctccctcgacttgtcgtcctcaacattgggcactccaattgttggtcccttgttgtccatgaaatgagccatctggaatcaaatcggtgccaactgggtatctagttcggtgaacacacaaccataggcactaatcacaactcggcgagaactaactgccaacacacacatcggggctgacaacggctggacattgaagcaagcacagaccaaaggataacacacaaccccatagtgaagaccagaaaagggaccacgaacgcccacacgggaggcaatcactgaaccaaagccctactgccgcgaatacatcgagaacaagcggcacaacaccgaggacaccagcagaatacacagggcgcccagggcacgagacccaactaggctacaagacgagacaggagacgaccctacgaccacaataagaagggacacacgacagaacgaagacagacagagaagccgcgaaacaagatgcgccagcagcaacgaaaagacaccaaaaacggaccaacaac

SEQ ID NO: 483633 - DNA, 146 bp, Homo sapiens
gtggaaaaagggggggatagcgccccccccccccccccctttttccctttggggggggtggggggttttgggcccccccccgggtttttgtttgggccgaggctttcctgggccccccgggggaaaatttttttttgggtttttta

SEQ ID NO: 483634 - DNA, 160 bp, Homo sapiens
gtagaaaggagttattgaataggagaaggcactggaaatgttccctgtcttgatctggatggtgttacatggatgtgtacatatgtaaaaatgtatcaagctgtacatttagatttgtgcactatactgtatgaaagttatacctcaatttaaaaacaca

SEQ ID NO: 483635 - DNA, 230 bp, Homo sapiens
ctctgggttgaccaggctgaggccggcaggtctaagaaccaatggaagcacgcaagggcggtgaagagcgcttccaggccaggaaaggaggagatcatcaagatttaatccaggggatgaagagaccaagaaattaaaacttcccatttggtctggtcttacgggcctctggtgataacattagattcagccatttaaaattaaaacaagccttatctgcgggggtaccg

SEQ ID NO: 483636 - DNA, 134 bp, Homo sapiens
aacagcacagtacaaaattatcttccataacacatatatattacttgggtgaccccccctatttacaggatctataaggctagggggaatgagattattacaaagctcaaattcagcggggcatgtggggagcg

SEQ ID NO: 483637 - DNA, 576 bp, Homo sapiens
cccccgtagcagcgcccgcgccctccgggccttctccgccgggatctcgagcgaaagacgcccgccgttcgtccaggcctcgcctccctgcccaccgggcaggagccgcgccgccacgccgactcccgttgcgcacggtctgtccgctgcgacaccagcttgttggcgtcttcgtcgccgcgctcgccccgggctactcctgcgcgccgccaatgagctcccgtatcgtcatgggcgctcgccttagtcgtcagcgccttctccagcgtggacccaggctggctgctctccaactgccccgggtgcgctgccactgtcgcccgtgggggcgcccatggtgccgcgccgggagtcgggctgggtccgggaacaggcctgctggcatgcgtggtacaccggtccttgctgccaaagcaagcttctaacgagggacgggaagacaccacaagcaggccatgagacgcacagccaaagggggctggaactgcaactttcgggcgaccaggtcacaaccgcgtctgatagggggatctgcagagctccagtcagagggggcagacccctgcgggctcatac

SEQ ID NO: 483638 - DNA, 190 bp, Homo sapiens
tgcatcaacgcggtgggagctctccatattgtcgactgcaggcggcgcgaattcactagtgattccccaccaagcctgtttgttggtcactgttgtctgagggcatggctgagaaggacgtgggccaggtataatgggagctgtccctgagacttcctaggggcccatgaagagctccgactaggcgagg

SEQ ID NO: 483639 - DNA, 128 bp, Homo sapiens
gaagatggagacccacatctcatgcctgttcccggagctgctggccatgatcttttgctacctggacgaccggaacaatggtcaaacggcgtttttgtgcaccgcctggcgggactccgcctaccaca

SEQ ID NO: 483640 - DNA, 282 bp, Homo sapiens
catgacaagtgaaatctgctaccatcgcggtgtggacctctcagtcctgtctgccctcaggaagtcctcctttgcttcaaagagaccctgttagccccatcaacactccagaaaggccacactgcctcaaaaaagattgaccaacaacgccaaccctcaggaaatattccacggcagtgacaaggcaaacactgcccgatcacggagagtacaactccctcaggagaaagaaaacaacaagcaagatgaagaagctgagaaaccactcccagtcaaaccaac

SEQ ID NO: 483641 - DNA, 246 bp, Homo sapiens
  misc_feature (21)..(21): n is a, c, g, or t
  misc_feature (66)..(67): n is a, c, g, or t
  misc_feature (75)..(75): n is a, c, g, or t
  misc_feature (86)..(86): n is a, c, g, or t
  misc_feature (92)..(92): n is a, c, g, or t
  misc_feature (115)..(115): n is a, c, g, or t
gcaccatgcgcgcagagccantctccactccaaagttagacaaaatgccaggaatgttcttctctnnctaacccnaagggacttgnaaaggnacccctcattcacttctagacgncaaaatgcaaaaaagggggggccaacgcgcttttttgcattggaattttgaaaggcatacccttaggagtcttggttcccacattctggaaatctggaatgaaactctccccaggtaccagggcgtatctg

SEQ ID NO: 483642 - DNA, 893 bp, Homo sapiens
ttagggtttgcaataacttctatattttaatagaaataaattcctaaactcccttccctctctcccatttcaggaatttaaaattaagtagaacaaaaaacccagcgcacctgttagagtcgtcactctctattgtcatggggatcaacttttcattaaacttgaagcagtcgtggctttggcagctgttttggcttcagacacctgttcacagaaacaagcatgatgggaaaactatttccctgaccttgagctgtatccatctcttctaacactgtgaactttcttacttctcctctctctctaactctaatctcctaacacactaattctaacacccgtctttcatcatatgactctctaacacgatcgctgctacgcattgggcgcttgggcgagcggcatgaacgggcgagctgaatctaagcgataactgaaactaatcagctgactgacaaccacttttcccactcatcctttagttctgaagcattcgcttgtacccctttaacgatatccgatctttttctcttttaacccctaactctttcactctgaaagattcttactctgtactaaaaagtttcacacggtcacataaacttagaggaaaaatgcagctattctggtccaacaacaaaggaacaacataatcaagattttaagggctctccactctcctctctatcgtaactccgtcgtcaaaaatggaacaacacaacctcacaaacgcacacactccactgtgaagaacattctcggcctataatcattagttacagcaaggcattggtcagccaaaagctgtgtgtgcagaagtccatttcccacatctctcctcaagtatcctcctaataccaatcatgaatcccctacactcactgcccggtccc

SEQ ID NO: 483643 - DNA, 114 bp, Homo sapiens
tcctgttggtcgtatctagaggtatcccctgtgtagcgctcgggttaacaggcgtgagcccccgacgcctggcttcttaacttgttctaagcagcatgcgactacgagatcaat

SEQ ID NO: 483644 - DNA, 227 bp, Homo sapiens
ggtaccgacgtgtggaatagtggaagaggcacaagtactctcctacacttaggagcagaatctataaacttgcataaatcatttacagtagatcaacatctagcatcctcaaactgtccagcaactgttggtgtggtatccacctaccatcccactcttcataactctctatactgaactcttctgctcctcgaccccatgccactattatactaggctgtctcaca

SEQ ID NO: 483645 - DNA, 139 bp, Homo sapiens
ttcctcttctctcctacttgtaacgttggagtctgtgtgtaatcttgaatgtatgagacagcttacaccttgaacttatgaattactcagcagctgctacttgtagctatgctagggataaatacttcgatacttggct

SEQ ID NO: 483646 - DNA, 1686 bp, Homo sapiens
ttgttctgctgtgtcgcttcgtgcggtcggcgggtctgttcgcgtcgcttgtttgttgttcgctgtgtcttgctcttgtcttgtcctcttgctatcggttcgtctttcattgcgttcgtgcccgtatgggctgtacttgctcagctggtgctgcgtcgcgttgcttgcgtcgctctcgtctgtttacgtagcttgctgtctgcacgcgtcgtctgccatttgttgtcttgttcttagtcgcgcctgcgcgtgcgtccacgtactgttgttgtgatgttgtcgttctgtccgccccctctccgtcctgcttcgtgtttgtttgtttagtgctccttctctctacctcggtttttttgttgttgtgtgtgcgttactctcgacgtccgttcgtttgtgtttatctgatttgttttcgctgtactctgtggtatgcgtcccgctcctccccacgctagtggtcgtgcgccttctctctctgttttttattcccggtagcactggcgttgcgtgtgtttttttgtgggtcttcgctctgcgtccctcgccccgtcttgtggtttttgtgcttgtcgtctgcctcggctcggtcgtgctgctttgttcagcggtctgtggctttgtgctgtcttgctgacgtcgtgcctgcgtgctggtggtctgtgtgtgtgtgtgtggtgttgttcgtgtcgcttctgctccctccctgcggttgttggtggtgcgtgttcctgcgtggtctgtttcctcttcgtctcttgtctgctttgtgtcttggcactgcagcgctccgccgtcggttgtctctgctctctcagctcggctgctctggtgtgggggtatccttctctctctgccctgcgtggcggctcctcctcagcgcgcggtgcttttgtgtttcgtccgtgcggcgcgttgggctgggggcgtggccccccgcctctcttcgcgcgcgcgtgagtatgggcgctcgtcgccccctcgcgcgcgcctcgcgcgcgctctgtgtggtgtgtggtgagtgtgggggctcgctcccccactcgcgattgttgtgttgtgtgtgttgtgtgtggtcgggtgtgctgcggcgctctgcgtcgtatcgaggtagagtgtgagtgtgatgttctctctcttcctcctctctcgtcgctgtgtgtgtttgttttcttctgctcgcgcctcgcgctcctcacgcgcgcgcgcgcgcgcgtgtgtgtgtcgcgctcccgcgcgcgcgcgcgttagactcgccccgcgcgcgcgccgcgcctcgcgcgcgcgccggtgtgtgtgtgtgcgcgccgcctcctcgcgcgcgtggtgtgtgtggcctctcgcgcgccccccagttcaccacgccgcctccccctcctcccgtctgtgtgtgtgtgctcgctggcgcactcctcttctgctctctcccacccccccctctcctgctcgtgcgtctggtggtgcctccaccctcgcgcgcgctcgctcaccctcgcctcctcgctcgctctctcctctctctctcccgcgcgagatttgccctccgcgcctctgctcgctgcctgcgcgtggtgtggtgctgccacagatgatgtgtttctgttgtgtgtggtgtattatagatagagagggtgtgtggttcttcgtagaggagtggtgtggattaatattaaataataaaataatata

SEQ ID NO: 483647 - DNA, 234 bp, Homo sapiens
caacttgatcactgcacaccaggtagcatagccatatctttaagctggtcttctattgtcaccaaacctggagccttgactgccacaacctgaagaccaacctttagcctattcaagacgagtgtacttagaggcttcgtccatacaagcatctatcaggcggattatagaccaataggcttacggtgagcattggcaatttcaagaagcccttcccctccccccatctccctc

SEQ ID NO: 483648 - DNA, 885 bp, Homo sapiens
tctagccaagaaagcaaaggtacgcggagggcagagacgcaagaaaccaacgacatggtatgggacaaacagcgatggaccaagtgtggtcatgcaaaaaagcgcaagacacccgcttgctcacaggcggtaattgccctccaacaaggggggcacccccgggggaaaaaatggctgggtggcacaaacgggcattgttagagcctttcgcgtttctgcggccgtaaacaggggggaaagcccgccgccgggaaggtccgtcccggccgtggtagcagtccggacgaactgtcgctgccccccgtcctttagacaaggcggggcccccccccaaacggggcagagacccctgtgtccccgcaaaagccgtggcaaacagcccaacagcattacttcgcgtaacagagccgaaggggccaaaaatcgcccagaaaacccattggcccgcaggaatgataggctccctcacaggggcccaccccgcagggcgacaacccgatccaccaagggggcccccctgggcaacagcccccaggagaagctgcggggtgcatggcagcacgctgagacttgcaactccacaaccaggtcgccctcggcaatctgtttcctcccaacaagcgtctgggcagtgaaatttattccgggtagccacacacttcattggagcttagtaagtaattccaggatccacacttctcgcacggcacccagaggttataaaaaggtgataattctcccccacgtgtgtctcatattttctgaagcgttgaatgcccccgccggggccggcaaggaaaccaggtcccgccccgctaagtgtgaacatcatccgcgcgacagcacaaaatttaaaatttaaaaacaccacccaaaaacaaaaca

SEQ ID NO: 483649 - DNA, 527 bp, Homo sapiens
ccgtccttcatcatacctaccctgatttgactaataaaggctggtctattatcagactgtatagaggtgggaaggctaaactgaggaattatgtctgacagaagggaagaaatgactgcggtggccttctcagaccctgtaggtaaggcctttacttattcagtgaaagtgtctatttgaactaagaggtattttagtttcctgactcgggcatgttgagtaaagctaatttgccagtcctgggtgggggcaaatcctcgagcttgatgtgtagggaagggagggggcctgaataatccctgaggagtagtagaatagcaggtggaacactgagaagttatttccttgaggatagatttccaggatggaaaggaaatgagaggttctgagaggcgggctagtggcttgtactatagcatagcctgcctttgctggtgtgtggcgattaggcctggtggaactgccgtcaataaatcaagcgtgatcagggtgaggtaggtatgatgaaggacggggtaccgagctcg

SEQ ID NO: 483650 - DNA, 934 bp, Homo sapiens
cattttttaaatctgacaaactaaaaagtttaacgtcttctaaaagattgtcatcaacaccataatatgtaatctccaggagctaactgcctgtaatttttatttatttagggagttacataggtgatgggggaaattgttaactacctttcattttcctgggaagtcaaggttacatcttgcagaggttgttttgagaaaaaagggcccttctgagttaaggagccatagttctatcaatgatcaaaagaaaaaaaaaaaaaaggagaaccgtgtcccggtttgatccagattcttttaaaagggcaaaactcagggtgcaatttggttctcccagtgggggttttttcaaagattttcctattccagatgtcactttaaagagaaatattagcttaaactctttggactttctggctattggtgacacttcccattggctgggcactggtggcgggcacactccgaaatttttacctactggtctggtaagcctcccaggcggggcatggcagggtcccttaggcaatgtctgtgtttggcctttatgcagagcgggtgctccaagtgctgtgatggagcccgtgctagaggacctgtaatggattcagaagttgtacgcttatacaaggacaccggtcctgctggttaattttaaccagttgttggcttgaagtaccgttgaggcctggactgctggcccgtccttagcgatggactggtccggaatccggaatatggtccacagccgcttactcaggggcctctcccccgcggaggcgactcatttgaagaccccaattctggttcaaagggtctatccccacttggcctccaaaatttcgggtccactcaaaagttcctgcccttctatcttaaaactttccacaaacacacaacacaaaatcttgtcggcctgccccaaaattcacca

SEQ ID NO: 483651 - DNA, 626 bp, Homo sapiens
taggagatggcgttatcctcagctgttagtgagtctagcggccgtttgcccgccccttgtcggggaaagggttgtttcttattgcccccgacggtgtgtatcaccaaactgaggttgcggcgagcatagtgtgctgtgcagcttcactagtgggacgcggacatctctatactagtagtgtacgcgatggggcgcgctcataaccacgggtgggagcgttttgtgataaaagagtatcatcgcggtcagagaactctctgctagtagtgagatgtagaacacctcggtatgacgcggtaacaaaaagaactgccttgaatcctcaatgcatcggcggcagcaaccatagtgtatctttgaaaagggcgtgatgcgcggaccggcacttgtcttgtcttcgtatacgcgacgacaccaagagagggtacaggatgttgctattagacgtaggaaaaactcctctgcggaggtaccctcgcaaatattgcatagtttgggtcaagactccacgccaatagtttgtgtgagtttggtgagtgtcttattagaatgtcttttgcaatttggcagcgatgagaagtgtgttgcaacactcgcccgaagatgtgcaatagcgaaggggtgga

SEQ ID NO: 483652 - DNA, 328 bp, Homo sapiens
tacgagacttctaaaaactagcagacgaaaacagtgaatcacaactataagggaagccccatcagactaacagcagaaatcttataggccaagagagaatcgagatagatatattcaacaatactgaaagaatgaaactactgaccaagaatactacacctaacaaagctgtctttttagaatgaaggatcaataaattctttcccagatgagaaaaaaatcaagggaatttatcaacactagatagccctacaagaaatgcttaagggagttctcaatctgaaagtgaaagggcaatatgtaccgccatggagtaaatggcagggga

SEQ ID NO: 483653 - DNA, 903 bp, Homo sapiens
gaccctcatgtacatcaatattatactaacgtctaccatctcacttctaggaatactacgctatatcgctcaggagcctcatatcctccctactatgcctagaaggcaataagtacaatcgcctgttcatcatagctgagctctcataaccctcaatgcccattcccctcttagccgaatattgtgcctattgccatagctagtctattgcgcgctctgcaagaagcagcaggtgggactagtcctactagtctcaatctccataatatatggctagagtacgttagtataaacgtaagagctactgccaatgctaaaatctaatcggtgcccaacaattatattagcgtaccactgactatgactttaccgattaaaagcagatacatttgaatcaacagcaagcacccacagactaattcattagcgatcatccctctacgtattttttagcctaaagcaacaatcaacctattatagtgtgttccccacctttttcctccgtggcccttaaggaccccctctcctaatagtatctaactgatttataccccgtcaacaatcatggtctgccaaggccgcttatggcagtgaatccactatcatcgaccaaaaaggtctacctgtgctatactagtgtccctagagatctcctttatttatagcatttcgcagcgcagaaggtcttccttcaccccgagggatgggaccatgctgaaggggcctgaaacggcggacatactttctgattctagacctagtagggtcctttccctgactcatggactgacgttaacgcggaccccctaggcggtgaaggtctactattatcccatggccaagaaattaatccgggcccagttcaggagacaccagggggggaaaacctgggaggcctgcctg

SEQ ID NO: 483654 - DNA, 376 bp, Homo sapiens
agcgctaagatacatatgatcttttgaccgaaggcggcccgactggcattgtataaacaaactcatcactagacatgggactacacaacacgtactacgtggtagctcacttgcacgatgtcctatcaataggagctgtatttggcatcatatgaggcttcattcactggtttcccctattgtcaggctacaccctagaccaaacctacgccaaaattcatttcactatcatattcatcggggtgagatctaactttgttcccacaacactttctcggcctatccggaatgccccgacgttactcggactaccccgatgcatacaccacatgaaacattctatcatctggaggctcattcatttctctaacagcag

SEQ ID NO: 483655 - DNA, 124 bp, Homo sapiens
ttcggcatcattctgtcagtcactaagattgaaatcttagaaggagtctatttctgtgctggtggtttccgtccccaaggtctggctacacttcacaattcctcgggacagggaagacgttgtt

SEQ ID NO: 483656 - DNA, 841 bp, Homo sapiens
acacgccgaccagctgcagagaggaactaccctctctgctgacagctggacacttatcaggagacctgcctgcagagaggagctaccctctctgctgagagctgaagagaagatgggccaaccagctgcagagaagagaggagctaccttctctaccgaacacggaacactccttgggacgacctgcccagcagagaggagctaccctccctgctgagagctgaacactcatcgggacaccctggctatgcagaggagctgcacactccaggtctactgtgagctgttctattgttcagtaaagctcctcttcgtcttgctcacgctccacttgtctgtgtacctcattcctcctggacacaggacgataatctgagacctgccaaatggcggggctaaaagagctgtaatacagacagggctgaaacacgccacttgctcgccattttgtgagtgacaaggacgagagaagtgagaaggagagaaggagaggagctgcagctctttgggaaacctagacctgggagctccccaagccagggctgtgactacccctttggggctctgaggttcctggagtctccaagcttctgggcaccactgtgttccctggtgccagccgtggaagctgcttgtggtgcagctggcccagcagcagcctcgcagagagccgacgccctgtgccagcacctgcagctgccgcccacggcagcagtcagtgtatctgactgtgcacagtggctggaccccaaattgtcacaaacccctcaatgctcaactgactgcagtctcctcgagggtgggatccagtgggtaacatgagcgagacagctgcaggtgg

SEQ ID NO: 483657 - DNA, 1301 bp, Homo sapiens
attcctgaagctgactgcattcgggaacggagatgtcatcggtccgctgggtcctatagactgtgcgtcagcagcatactctctctttctggcctggatgctatccagcgttacgtccaaagattcaggtgtactctacagttctatccagactagacgcaatggagagtccaatttccatgaattgctatgtgtctgggttgtccatccccatcactgacctattggaagttatgaacgtctacgtgacatgacatcgggagaggagtaatttcgcaacatcacgtgtggagcgagtttcaaggacattatggatcgtattgccagcgtaaccgggaactgggatctgttcctccattcctcctattgtcactataacgactgggagatttccatcccctcacttgtaaaaacaaggaatgcagtagttgcacttgggccggggttgacaaccattggtgaacctattctgttcaccgagcgccaacacgaattaggtataaagctgtgggactctgaagtaccactgatatacgtccagcaattcaatggaacgggttttgacaatgaatcgtcgcgacaatatcttggattgtcggtgctattgcataagttacccagggaatttctgccatatgctggtggcctatgtttgttaactaattgtggattactgccgttatgaattaacaacttttaccatcctttttatgcctaatcacacaaattgctcagggggcttgactcaacttgaacatttgctctaagccaatgtgaccaggttgaatcttttctcttgactcaatttcctcactttatggacgttgctggttcctcccaactgctcttgacctggttaattccttgatgcaaggtgttttggcatccccaccatgggcttaggacattctctaagggcatgtgggcttgggacaagctttaagtaaaggtgggccgtgatggcaagaatgaaattttcttctttaattccaaaaaattcaaagcatcttttggtcccaacgaattttgacaaccttcttttcaacgttcttctttgggcacttccaaaaaggcttttgttcacaagcaatacgtttaaaagccgttggcacttaaggctttaaacctttcgcaagtttttaaccataccatcctggcgttaagcaagcattttgggcgcggaacaaacattttcgcaaacagtataccaactctggcacccggggagtttattcgggcaccatcttggttactaacttcgcacgtgcagacgccatatcgggtccgtatatagagatccc

SEQ ID NO: 483658 - DNA, 159 bp, Homo sapiens
tgatgtcaacagaaatagttaagagtggagatccttgagctgtcctgatcttacagaagaagcatctagtctttcaccattcagtatgttagctgtgggtttttcatccatgtcctatgggttgaagaagtttttctccatagcttgtttcatgtgctt

SEQ ID NO: 483659 - DNA, 129 bp, Homo sapiens
  misc_feature (10)..(11): n is a, c, g, or t
  misc_feature (67)..(67): n is a, c, g, or t
  misc_feature (81)..(81): n is a, c, g, or t
ggaaagctgnntgctgtcatgacagctcggaaggacatagtagctagactgcagactcaggcctcancaactgttgccatncccaaagaacaccatcgctttgttattggctgatgggagaagactcca

SEQ ID NO: 483660 - DNA, 936 bp, Homo sapiens
gaccaaatgcggatacgccggtgcagcggtggtgtggcccgggtgccctggtggccctgggactgggaaccgcggtggcttccgcggaggttctcggcagtggcatccggtggccggggtcgcggccgtgtgactgtgtggccgtgggccgaggccgcaggagctctgctggagtgcaaggcacgaggataaggagtggattgcccgtcaccaagttggagccgcttggtcaaggacatgaagatcaagtccctggaagggagatcttagtcgtcgtttctcgccatgtacgtacttaaagggaactcaggacgatcagttgactatgtgttccattggaggggccatcatctcaaggactgaggtatacagaacgattattgcccagttgcaaggaacgccgggagccacgtggcccgagcacaagacgacacccaagagatttccaaggggacaattttgggttggcgattattccgggagggaacttagcaaagtggggcccacggatcagagtcttggagaatggttcaaaggttggcattcaccaagagggaaggaggttggacgaaaatcaggacgcaattcccaggatagggggagccaattgaatttcccttgggggccacaggctttcttccgaattcagattaacaccaggtggcggagcaagaatgagcgttaacattgtaggtgagaaacgcaaatgcattcggtggaagaaaaagcagaccagccaagcgaacatttgagttacaccacaactttgacagaggggggatgaccagaaggggcacacagagattagcagagagagcattcattggatggacattaggatacaaaggcagcattcaagtcagccacagttagcgaaacaacaacaggggcgcacaacatatgagagagattcagggataaataagcagaaaagag

SEQ ID NO: 483661 - DNA, 1122 bp, Homo sapiens
agcgaggcttgaggacagagtgcaggagctcactgcagccttgatctcctgggcttgagcgatcttcctgcttcagcctctcacatagtttagactacaggtgtgccaccatggctggttaatttttaaatttttagtaggtgggatctccctcatcttgcccaggttggccttgaactccagccttcaagctatcctcccacctcagcgctcccaaaatgctgggattacaggtgtgaaccacctcaccaggcctatgtatgcactcttaaaccctggaatcagattagacccacgaccctcccacaatcataccttgttctccattgatgttaatggtgcttgaagcagaatgtgaagagaatagggagagggggtcctgggccacgggcacaccacagggcgagacagggacgagggggcgcaagacacacgggaaacacaggaagagaatgatgtgccatccgaggtacaaacacaaaaacaacgagggcacaagaagcacacccggagaagaacgcggggaaataaccaggggtgccccaaccggacaacaacacgaggaatacacaccacaacgggaccagacagataaggcaacattaaacaagaaaagcccgagtataacaacagcagtagctggagacaccaggacagggatacaacggaaagagcacgtagaaaacgtagggggaaaacacaaaaccaaccacatacgagcaacgacacacacaagacggacgccgtggcgcacagaaccaccagagcgaacgacacaacacacagcaagcgcaccacgaggacacaggaagcggcaaacaaagaggagagagcctcgaacatgccaacatagacgacacaacgccaaaacaaaacggcccaaacgacgccccacgagacgcacccaccgcgccaaagagacacatgggaagcccctcggcagctgagcagacgcgggaacgagacaacaccgcgcaaccagtcggggaacagtgggcaaaagcgcaagcggcgaggatagcagcagagacactgcacccctagcacgaaaaggaggcgcccacgacgcatcacacaagcgagcggacagcgccgaaggccgagtcgacgcgacccagccaa

SEQ ID NO: 483662 - DNA, 449 bp, Homo sapiens
tagtatcccttattttcactgtgcgtgagcaatggtcatgtgtcagctgcaaagttacagagaaacgagcagcacattaggaaatgtatgaacatcaccttgcatagactcgcttttataaggcatcaatggttcaggtctattaaatgtcttgcgtggggtaaacctctaggtgcttttaaaagaaacctggaaatgtatttaaacatttgcacatggagcagatgggactaaaaaaggaaactacgttcttcagattacattgcctccaagtctgggcagcaatttaaaacaaaggcacgggttagaaggagatttaatatcaatatggggatcttttgtacagacacacacacatctgtgttgacaggaccaaaaggaatccggatatcagaacgtccaaataaaagagaaaaaagtcttcatgagatgaaggcctgcctggagaa

SEQ ID NO: 483663 - DNA, 1136 bp, Homo sapiens
  misc_feature (191)..(191): n is a, c, g, or t
  misc_feature (401)..(401): n is a, c, g, or t
ggctctgcggtgggtgccgtggggatggcggtagccggagctgtacccggatctcgtggaggagcggcggacggcgggtcgaggtcgtcgagctcgtgatccaccgcccgcggcagccgagtcactatcctcgccactccgtcgcgccttgcggctcgaaggccctctgtgcctcggcaacgtgaatggantggcagggtcatgggggtgctctgagggtctgggcgcacaagcggtcgctccgtccctccgtgcaggcgtctcttgttccgctgatcaacttgtggccgcggttgcgtgaatcgggcagctcgagttcatcacgcgcgtagctccatccgttgtaagtcatgcatcaagtcccagtgtgcggtcgattgagtccagaatgcacacacccnatgccctttggtgctcctgattgtgcttgggcgagggtccggtcccgtcgtatcatgccgtcagtcttcttctcgcataacgccacatgagattcccattcagttgcgacagtttcggtccttggttaacatgaattcagggggacgttgtcttctccggtagcggacacttggaaggaatccccctccgtggcgttggaagggttcgcaatagcagcaccctcatcgtaacttagttggaacttcggagggtgattacgcacattgaaagagcagatgggttttatatgcgcgcattccctatgaattggaagcactttggacgacaaggtcgattttcgcggaaggcacaaggccattcaaatactgtacaggacctttcccgcttgaaaggaaaccacgtttgttgacaacgtcgaagaagaacttccctttaccaggaacaagttgactgtaaattgcaggctgttgatgattcccacggccgtttgtgtgggggcccgaattgcgccttgagattggtttccagtacctagcacattggcggccagtgcttttggccgtccccccgtgttatgccgggggaaccgtccgggagcgtcgctaaggttgcccaggtgggcgctgttgccttgaaagctttcctgtttggcgcccagggatttgggcgcacatgacgggaaagcgcgccttgtggtggggagttccttctggttgggactttttcgcccttat

SEQ ID NO: 483664 - DNA, 248 bp, Homo sapiens
gggtgaggttcagctggagattgagatctctctggggttcatcttggagtttctcccactgtaataaggattaacgaaatccagttccaacaggagcacactctataatggttacccttgatgtgctagtgaattgaagagaagcccaaagcagctttgggagtgctagtagtgttccgtttcatatttctaaatgctgattaccgaggtgtattcaatttgcaaaaagttgttcaagctgtacctca

SEQ ID NO: 483665 - DNA, 904 bp, Homo sapiens
gcgctgaggcacgcgagaagaggccggaccggagagcaacaagcggagtcgccagcgaaagaagtcgactccctagagaagccgcgtagagtaaggccccgcacagttcgccccgtacctctgcccctggtttaaatatgcagacctgcttctgaaagtgtggtacgatcgaagggagtatgtgtaacactggaatattgggtggaagacagtagggatgttatgtacattgtggatacatcaaatattaaattcagtgtgtctcgggaaggaaggtgattaatttgaagcatttgaaatgaaatgggatctattacaatgtatggatccaaatgaatccctaaggataaataatgaacagggaaaaagagtcgatggatatgtggtttacaaagaaggagaattcttggccagtgcaatgagccaagtgttaacaaagggaaaggggcaaacgtaaactggggttaaggtggtgagacctcagtaattgtggaaagagttgggaaacgattgattgcagattgaagacatggtctaatttgggatccgttcttcttgaggtggatgaagcaacatatggtttgatgagcgacggagattcaactttacccacaacactggtagattgggacgcagatggttgattcacctgaccacgtggttgactgacgaactttgctgactcgggactagggaatagttgtctcccggggactgggacgcacgaatatctcctgcagaatccatatgcgagaatccgagtggtacttgaaggaaatatggatacggcactgcacctttcaactgtgggtaacacgccagtacggggttgccagtgttgcgtttatcacgagaaaactgttaattcgcgcaacgtgcccgacatacggacaaacacacttta

SEQ ID NO: 483666 - DNA, 458 bp, Homo sapiens
  misc_feature (48)..(48): n is a, c, g, or t
ccgcacgagttcggagttatttgggagaactggctcacatgattacanaggcaaatccacgatatgaggtctgcaagccgggaaagagagctcgtagtggctcagtccgagtctgaaagcctcaaaaccagggaagccaacagtgcagccattagtctgtggcaaaagcccaagagcccctggcaagccactggtacaagtccaagagtccaaaggccttagaacctggagtcttatgtggacgggcaggaggagtgggaggaagcatccaggatgggagaaggaaggaagccaggagactcagcaagcttatcccaccttcttctgcctgctttgttctagctgcactggcaaccaactggatggtgcccacccacgttgagggtgggtcttcctctcctagtcccccagctcaaatgtcagtttcctctggcaacaccctcctcccaaacaccccc

SEQ ID NO: 483667 - DNA, 137 bp, Homo sapiens
gatgctggtggacaggtgcatagcaactgactcgtcgtgaaccagaccaagagcgggaatgtgtggtgcgtgcggccctggtggcaccgtgaggggccgaggccgagtgccacctgcccacccatgtcacctcatgg

SEQ ID NO: 483668 - DNA, 255 bp, Homo sapiens
  misc_feature (100)..(100): n is a, c, g, or t
  misc_feature (131)..(131): n is a, c, g, or t
cttaaatgcaggaggagtagagtagtcaatttcatgtgtcaactgcactggactacagggagcccagatacttggtcaaacatggttctgggtgtatgtnacggtgtttctggatgagattcccatttgantccatagactgaataaaccataatgccctccccagtgtggatgagcttcattcaattagttgaaggtctgaatagaacaaaagggctatccttcccgtaagtaagagagaattctttctgccca

SEQ ID NO: 483669 - DNA, 595 bp, Homo sapiens
gcgttcagatttcagccttccaggcatcttgcccacctccccaccctcggtattaagggtcgtgactgtgactaaccctcgggcacaggccgtgctgtagagaggccagtggtcacaatgagcccacgacaggaggaggagccctggcttgagggaaggggaaggcccaggcctgtgccgggccccagggctggcagccaccagctcctcttccaggcatgggggacaccctgacgggatccggaagtctccatttacccaaaaatgcaagagccatgatcagtcatggcgacactgcaggcggtactgagtgaccatgtccagtccggctccgtccctcccacacgggggacgagcttctccgaggaggcctggccaaggtggaacaaataccctgatgtcgaaaaatgcctaaaaatcccacagacggaattttcaaaaagaggagaaacctcccgcgggagggaggcagcgagactccgaacacggtagcaagcactctggacagactcatgtatgaaaaagtcatcatggtttcaggaaacagccccacaggctgggctgctggagaatgatccttttccaaaaccgaaag

SEQ ID NO: 483670 - DNA, 472 bp, Homo sapiens
cttgggccaacatggtgaaacccgtctccactaaaaacacaaaaattatctgggcttggtggcgggcacctgcaatcccaggtacttgggaggctaaggcacgagaattgcctgaacccgggaagcggaggtagcagtgagccgagattgcaccatttgcactgaagcctgggcaacatagcgagacaccaatcaaaaaaaaatagtttctaaaaaacaaatccttcaagtgtcataatcattttaaagacattttccatcatttaagcccctctttatttaaggataaaagtatacaggttttggtcttaagttgacttgggaattctcttaatattgtgaaaatccaagctagggctttgagaatgtgctaaaaaaagggtttgacattattttcccccaccaaatacttcgttatttcatttaacatgtgatattacagggccgggccccgtggctcaacctgtaatct

SEQ ID NO: 483671 - DNA, 255 bp, Homo sapiens
gggatcctcctggcaatgttgtggtggtgctgattctggtccctctgaaggaccgcttgctcgaccctttactgctgcggtgcaagctgcttcactctgatctgcacaagatggcgctggggatgtacataaggatttacctccggggattgtggcaagagtcctggagatggagcgcttacaatacattcaccaaaacgagaccgtgtcccagcaaattggggaggtccctgtacaaagcggcaccactgtcca

SEQ ID NO: 483672 - DNA, 306 bp, Homo sapiens
gaaagggatgaatataaaattatttatggtaagccaggcacagtggctcacgcctgtactcccaatgctttgggaggctgagaaaggccactcacttgaagtcaggagttcgagaccagcctggccaacatggtgaaaccttgtctctattaaaaatacaaaaattagccaggtgtgatggtatgcacctgtagtctcagctactcaggatgctgaggcaggagaattaattgcctggacccaggaggtagaggttgcagtgagctgagctcatgtcactgcacttcagtctgggcaatagccgtt

SEQ ID NO: 483673 - DNA, 245 bp, Homo sapiens
  misc_feature (213)..(213): n is a, c, g, or t
  misc_feature (245)..(245): n is a, c, g, or t
ggggcaggcctctttgagactccagctcttcaaatggcagcggtaggagttggtagcccattaggcccaggtgccgctccctcaaggcccgcgagcccagcagcaccctgccgtctcggagaaaatgccagccgttctctcagcatcagcaccacccttttgggcaagggtcttgggttgtggagttaaagtttgcctggtcctggttggcangaccgtggtggggtaaggcaggaaaggggtcn

SEQ ID NO: 483674 - DNA, 726 bp, Homo sapiens
cgcggtggctcatgcctataatcccagcaccgtgggaggctgaggcaggcggctcacttgaggtcaggagtttgagaccagcctggccaacatggtgaaacccatctctacaaaaaatacaaaaattagctgggcatggtgatatgcgcctgtaatcccagctgcttgggaggctgaggcagaagaatcgcttgaactcgggaggcggaggtcgcagtgagctgagattgtgccactgaactccagcctggggggacaaaggcgaaagactgtctcaaacaaacagaaaaaaagaggaagtgataatcttgggaaagttattttcttttctgaggctaagtttttcatctataaataagatctacagcctagggaattcctaacgggtgaatttcatttatttcattttcatcattcttttgacgacagagccttgccagtgtcaccccaggctgcagtgcatgtgtgtgcgatctccagtttgattggcgaccctccgccctcctgaggttcagcgcggatccctcatgcctcagtcttgtaagtagactggggatcacaggctttgaaccaacttgtgtccatcacaattcacggggtgaaattctttaagaacaaataacttctatcaggcctggtaagcgttagtggctgatcacgtataagcatcagatagtattaacctatattgttcgccttggcccaagcaggtatcggtagacatgg

SEQ ID NO: 483675 - DNA, 1104 bp, Homo sapiens
gacatctcgtgactgggcaggtaccctcataggttcgcaggtggaggatgctggatagacaaggttggcctactaagtgctgaatcagtagcatgcgccgctgtcgtagtgatgactggagactgagctctggtggctgagacagttgctaccacagcaggagggatggcattggaggtggtcacaggtggccgagactggattggttggtgaatgatgtgctgtactgctggctgagcagtagcagcatttggcagctgtgaggtcggcctcaggactgtggttactttagaactggacatcaacagcagcagcagctgcacctcgaggtaaatgagaagctccaatgtgaagagggggcccaggagcattgctgcggatgatagacatttgcacatttgtagtcatgatgtgatgcaggttactgggatggccctgttgtccactgattgttgccacaggaatggctgaagcttgagggatgctactctccatggtaacggtaacctgccctggaaccttggggggaagtgacagggtagaaggtggagcaggagcaatgggacggctaggcatggtgggcttcgggggcggcttcataagtccctccgaaaatgaaagtggcactgctggcgtcaggtgtgctggcggggctgtcactgcaacaggtgtggctgatgcgacagcatggtgtgtcgacaacatctgcacctgtggatagggccttaccacaacaggctcttgcttctcctcccgggactggagggagctgctggaactcatgtgctccctggcactgacttcagaatctcgaccagattcatcattgactgtagcagctgggtttatcaatccagcagaaccactgtttgcaatctgagaaggggcctggctcagcccggtagaaggggctcctaaccgaggaaactgttgagaactcatttccacctgggtgctgcgcccagtggccgccgcgccgccttgagctcgctcccgcgcgctctccgtctgtggggccgacgtccccaggctccggacccgcagccaccgccggggagctagcactctgccccccacccctcactccagcgccgctgctccgct

SEQ ID NO: 483676 - DNA, 1118 bp, Homo sapiens
gacatctcgtgactgggcaggtaccctcataggttcgcaggtggaggatgctggatagacaaggttggcctactaagtgctgaatcagtagcatgcgccgctgtcgtagtgatgactggagactgagctctggtggctgagacagttgctaccacagcaggagggatggcattggaggtggtcacaggtggccgagactggattggttggtgaatgatgtgctgtactgctggctgagcagtagcagcatttggcagctgtgaggtcggcctcaggactgtggttactttagaactggacatcaacagcagcagcagctgcacctcgaggtaaatgagaagctccaatgtgaagagggggcccaggagcattgctgcggatgatagacatttgcacatttgtagtcatgatgtgatgcaggttactgggatggccctgttgtccactgattgttgccacaggaatggctgaagcttgagggatgctactctccatggtaacggtaacctgccctggaaccttggggggaagtgacagggtagaaggtggagcaggagcaatgggacggctaggcatggtgggcttcgggggcggcttcataagtccctccgaaaatgaaagtggcactgctggcgtcaggtgtgctggcggggctgtcactgcaacaggtgtggctgatgcgacagcatggtgtgtcgacaacatctgcacctgtggatagggccttaccacaacaggctcttgcttctcctcccgggactggagggagctgctggaactcatgtgctccctggcactgacttcagaatctcgaccagattcatcattgactgtagcagctgggtttatcaatccagcagaaccactgtttgcaatctgagaaggggcctggctcagcccggtagaaggggctcctaaccgaggaaactgttgagaactcatttccacctgtagccgccgcccgccgcccgcaccgcccgcttctatctcgccggcctgggggtgccgcggagggcccatctcggcggcggcgatgtgctcggcgggcgcggggagggatcgcggcggcggcgcccggggcccgctgctgtccagccccgctggccccactcaccccc

SEQ ID NO: 483677 - DNA, 317 bp, Homo sapiens
ccgggtcgacgggggacatttgggatagcattgaaaatgtaaatgaggaaaatacctaattaaaaaaaaacaaggcattttaaaaacatgtaattacacatacgaaaatatttacctgcataagagattgatcaaggccataaccaataccgtttaaccctctcttggttgaaaagctaatccatggacatgccaataaagatggtgtgataaaacacacttcacactgtgggtgctcagaaagccatctgtccttgtagagttaaataactgtattccccacatgcatatgcctcaggtaaatgcttggtcgacgc

SEQ ID NO: 483678 - DNA, 127 bp, Homo sapiens
agattctgaggatcccctccaaggatgaggaagtgtactgaggggcacgggggacagaaatgagtacactccctgcttcaaagggctttggatttaatagacatgatggccaaagaaatgacaattt

SEQ ID NO: 483679 - DNA, 327 bp, Homo sapiens
gagccggcccccaccgcagactcgatctgcgcggcgccccccgactgcttggcgaatccgtagaccatcgacaggccgaggcccgtgcccttgccctcctccttggtggtgaagaacgggtccatcacccgggcgagcacggcgggcgggatgccggtgccggtgtccttgatggcgatgctgacgtagcggccgtcgcgcagcggcccgatctcgcgaccgcgcgaggcgacctcgctgttctcggtggagatccggacggtgccgccctccggcatcgcgtcgcgggcgttgatcaggacgttcaggatcgcgacctcggcctgg

SEQ ID NO: 483680 - DNA, 93 bp, Homo sapiens
ggacgcccgtgaccatgtggaggctgctggtcgcgcatgccgctcctgggtgcccttgtcagattcctgggcactcctccccgccagtgctgg

SEQ ID NO: 483681 - DNA, 1232 bp, Homo sapiens
gacatctcgtgactgggcaggtaccctcataggttcgcaggtggaggatgctggatagacaaggttggcctactaagtgctgaatcagtagcatgcgccgctgtcgtagtgatgactggagactgagctctggtggctgagacagttgctaccacagcaggagggatggcattggaggtggtcacaggtggccgagactggattggttggtgaatgatgtgctgtactgctggctgagcagtagcagcatttggcagctgtgaggtcggcctcaggactgtggttactttagaactggacatcaacagcagcagcagctgcacctcgaggtaaatgagaagctccaatgtgaagagggggcccaggagcattgctgcggatgatagacatttgcacatttgtagtcatgatgtgatgcaggttactgggatggccctgttgtccactgattgttgccacaggaatggctgaagcttgagggatgctactctccatggtaacggtaacctgccctggaaccttggggggaagtgacagggtagaaggtggagcaggagcaatgggacggctaggcatggtgggcttcgggggcggcttcataagtccctccgaaaatgaaagtggcactgctggcgtcaggtgtgctggcggggctgtcactgcaacaggtgtggctgatgcgacagcatggtgtgtcgacaacatctgcacctgtggatagggccttaccacaacaggctcttgcttctcctcccgggactggagggagctgctggaactcatgtgctccctggcactgacttcagaatctcgaccagattcatcattgactagtaaagacattaagagtgagacagtatgtcacagtctcccagtgtaagatagcagcacagacaagagtggtacctgaagttaaatctcaggattgacaaagtggccatttccttgtgatgttttcttaacaaggtcaatatgggcactggattctcctgatggacatcagacaaaagagccacaactgtggaatatagaatttattctggatattgtagccttatgaacaaactacctgaaaatcatctaaaatgagctgaaatagttaaaagtacaatacaggatgtaagacaatttcatttaaaacatcctcttagaaagttataaaagcctgacattaaaaagatattttatgctggccaacatggcaaaaccctatctctactaaaaatacaaaa

SEQ ID NO: 483682 - DNA, 244 bp, Homo sapiens
ttgctacgattgatgtatcattctccaactcatccttggatggctgatccagcatcacaaggtccttcatggaagtgcaaggtatgggaccacaccccatcgccggagccagacctcgttgccttcttggagtgtggctccagaggagactgcagcttcacctcctgcacgagcagctcccgactctgagaataattatcctcctcggagaaaatctggcagaggctggaaaagactttgaggc

SEQ ID NO: 483683 - DNA, 385 bp, Homo sapiens
  misc_feature (9)..(9): n is a, c, g, or t
  misc_feature (75)..(75): n is a, c, g, or t
  misc_feature (153)..(153): n is a, c, g, or t
  misc_feature (162)..(162): n is a, c, g, or t
gagaaatgntctctcatacatactctcgtctggtaaaatataagcaagaaatattcatttctgaagtgctttccntcactgtaaaggtctgatctcctcccatatgcctatgtacctttactgttaggaagctttgcctatgtagttatagangatagctantaaatactaaagatatgtcattctccccaaggagacacaggtggcaatgattccttgcctcatgttgatgagtctgtagaattcagaacccatttggacacagctaatatccctgctcttggggtagaaataaggacaccaagtcattggtagggaggtacaggcccttcccctgctgctgcagagagagaatgactcaagaaaattgggctaaaatttgtct

SEQ ID NO: 483684 - DNA, 215 bp, Homo sapiens
gagtagaatgcttgaccccaggagttcaagaccagcctgggcaacatagtgagacccccccatctctagaaaagatttaaaataaagtaaaacaaaacaaaacaaaataaaataaagtaagaggacagcaaaaaaattcctaaataaaactgggaaagaacatcaggaaaataacatgagaagaaaagcaatgaaagagtgactattaaatcact

SEQ ID NO: 483685 - DNA, 384 bp, Homo sapiens
gacatgattcgaaccgagcttgtacctgtgggtatgcacaataaggataggtcccaggctggggagagccccaacgttgagaacaagtaagtgaacaagttagttgtatgaacaattgttgagagactagctagatcacaaacaacctgcggtgcacaatgtatctcattacacactgtagcacccttcagtcagtgaccgctataaatactttccgtccagacccttggcctctattgcatggttagccccattctctagctgagactgcccacttgtcaagcatattttcacaattttctcttaataagatctgccacttctttacctacaatctatcttggttaaactggctttaccaccctgcataaactgagccctagg

SEQ ID NO: 483686 - DNA, 848 bp, Homo sapiens
gtctcgataatggatgcagtgattgcgattgtgtgttcacacagagtaaaagcactcaggcctagacttttggagacccagattctctaataaggtataggagttggatctttagttttagggcagctattcacaaatactgccaaggcaatttctcccactgcatattgtttaattgtactgtatttccaaatccctaagcttttaaatgaacagaaaactgtacagtccaaaatgaattactatcacagttaggttgggcacagtgcatcaggatgtaatcccagcactttgggaggctgaggcaggaagatcacttgaggtcaggagttcgagaccaccctggcaaacatggtgaaaccccacctctacaaaaaataccaaaacttagctgagagtagtggcacatgcctgtaatcccagttgttcaggaggctgaggcaggaaaatcacttgaacctgggagatacgacattgccgtgagctgaagatcaaaccatgcactccatgccttagacaacagaagcaaagaattttgcccttctacatcacaaactacactgtatacataagcaagttcctatatttccgcatcaaactcttttatcgggcaccctgaccataaaatatttaacagcgccttgactcacggtatctccgatgaatgatagacaacatagaatgaaatatggtaaaaatcatcgtaatatcttgggagagaccacaccttctagtttccgggtgtaccatcgattagtaacacagagaacaaatactccaatataagaacctattcaactctacggcaagtatgcaagggtacacaggtacctaaaaatcttcgtacg

SEQ ID NO: 483687 - DNA, 956 bp, Homo sapiens
  misc_feature (123)..(123): n is a, c, g, or t
ggctgaacaatcatggatttttctgatcaattgtgctttaaggaaattattgacagttttgcacaggttccttgaaaacgttatttataatgaaatcaactaaaactatttttgctataagtnctataaggtgcataaaacccttaaattcatctagtagctgttcccccgaacaggtttattttagtaaaaaaaaaaaaaacaaaaaacaaaaacaaaagatttttatcaaatgttatgatgcaaaaaaagaaaaagaaaaaaaaaaaagaaaagaaaacttcaattttctgggtttgcacaaagaccatgaagacttatccaagtgcatgaccggattttgggggtttggtccatttggtgtttaccttggtgtttttttttcccagctgtttgaaaggggcttcctgaagtttaaatagtccgatttccccctggggtgttctgtgcttgcagcggcgagtgtggctgtatatccaggtgtgtcgccgcagggtctctttcttaagcttctgtctttcttccacgcgtaggtggtgaagtgtcttatccttttctatgaattccccaatttgcccttaacctcttttggatggctgtacctgtttccggtacaagttcggttcaccttatggtgtcacattgctctgcccaaattgagctgctctattatgcctggtaaccagacggccatggctttaaatggttcaatacagtgcgacattggcctcttacaactttgactgggtctcacgtttcccatacggtgtggggaccgcagggaaacgtcgttgcacctcttctgggaccgtaggaggtggtggggcgccctccctgtttatgtgacatcgttgcaagctccgtttgaaaaagggcgtcttgcccagccccttgccaggtatatgtttcgtctgtcttgtcctaatagaattataagattcagtttccattctttg

SEQ ID NO: 483688 - DNA, 1224 bp, Homo sapiens
gatcacctataatatgcaacttccagaccctgttctacctctatctggctgtcgatgcgtgcggactgtccacattgcgacatggtcatccagtcgtgtgtgtggtacatactggacctgttggtgcccgcgacatcatgcaggtgtggtctccatcctgtgacgataccatgagctgcctcatacaagcatgcttgcatccttgactcttatcatgcagtttagcactacctacataagtggttataaggaggcatcctggtacatcaacgttggatcgagaggacgcgaatataatacacactgatcgaaatcgcggcagagtgtgggatatccgcatagaagaacagtctctctttgagctagttgcatcccacttgcatagcatctgcgagtttcactcagcacaacacgggatccctcctaaagttgcgcgaacactgcgcaaaaaagggcgtagctttggacatgagattggaaacaccactgttgggcaaaggtatccacgcttaccttaggaagcacgcaccaacacgaatggagagacttacttattgagaggacccaaggatacgcggttccgtatttcgcacaggaactaacggcgttgccaccgcaggaacgtgaacgtggaaaaggaaccttactttgatacaccggggaacccatggttacgccattagcaattcgcaaaacaaattttgttaaataccatggtaaaggacacagggggcggatctaaagacaaagacttagtgaccaaacctgtgcaccggcctcgggtacaatttgttagcgagttaacacggttaacccactacgcatattggcacttgggacacatagtttacggagacccaaacatatacttggcacacgatacgaaggcgaagcacaagaagcgtggtcgccataatagacaaagctttaccccttgggggaaccaaacatgagggaaaccgattggccacagagtatggtatggttccattggcccaatatgcgccaaagaggttggcccaacgaacaaacagacaattaggaagggatccgaaagcatattccccagttataactagacagataataaactccagcgacagtttcgtataccacataggccccatgtaagtcacccccccgttttgtcacccagtagtactgccaaatagctagttgattggtaaaacatacactatacgctatacgggacgagcgtaaaca

SEQ ID NO: 483689 - DNA, 373 bp, Homo sapiens
  misc_feature (326)..(326): n is a, c, g, or t
taagagacagggtcttcttccatcgcccgggcaggagtgcagtggtgccatcatggcttgtggtagccttgagctcttgggctcaagcagtcctttcacctcagcctcccgagtagctgggactacagacgtgcaccaccatacctggttaactttttaatttaaatttttgtagagatggggtctcgttctgttgtccgggctggtctagaattcctgggcctcaagcaatcttcccgccttggcctctcaaagcagtaggaatacaagcatggggccaccgtgcttgaatggatttagattcatagaggggcaaaaagatcatnagggaagtttgttttctctgattttgaagtttgcttgttacatttgc

SEQ ID NO: 483690 - DNA, 958 bp, Homo sapiens
ctttaagtactgcagaatctcatcatgggctctgttgaagatggtgatgcatgccagtatcgggaggcaacttggaagtgatgggtctgatggctaggaaaggtggatggtgaaaccatgatgcattatggagcagttttgctttggctgatgtgaggtgcacatgaagacccggagtaaagtgcatcacggctgcgtgcatgatgaactacgatggctgcatacgatagaagaatgcgataacatggttggccgccttgaaacatgcacatcggcgtggtatcatagccaccctggctacggctgcatggcttctctggcgatggactgttagtgactcacagtgctctatcagcagttcgctggaaccatttgtgagcagtggctgattgatccatacaagatacaattatccgtcagggaacagtgaatcttggcgcgttccaggagcatacccagaagggccgtacaaagcctccgtgatgaaaggaccttctgagtatcagagtattccacgttaagtaaagataggaagattttgggtgtacactggaaagcaatattatgccttagaagtctgcatatttgaaatcctctttggatcgcaagattgcttgagctggtgtggaataaatactgggtgaatacgtcgagttcttgtagctggcttactaatgcggactataccagtggtcgggtgtttgattcgtcatgagacgttagagcagtcagaagctcagctgggacgagggagttacatgttgggttgaggaaagcttgacgatgaatccgaatgacagaattggcatcatgctacaagagacgagctggtcaagatgttgcatagaaggtatccaagggagttgatgtttccaggttattgaggataaatggtaaagcatatgacatctctttaaaatgtggttgaaagtattaacttgaagagagctgagaaatt

SEQ ID NO: 483691 - DNA, 260 bp, Homo sapiens
tacaatgcatgaaatattttaattaatctaaacatttatagagtatacaaaaaaatgggggtaggtccatgcaaatattccattttataaaaaagctggcatctgtggatttaggtatactcagggggtactggaaccaatctttttgcaatatagcaggcagcaactttatttgaaagaaatggaaacttttttttttttttgaaatggagtttcgctctaccacccaagctggagggcagtaggtcgacccggccgca

SEQ ID NO: 483692 - DNA, 116 bp, Homo sapiens
atcgatctagaggatccctgggagaatggagtagacgtcccttggtacaatgctcctctcccccttcttttcccaccaattcctatttccctaccaaccatagggagcctccagaa

SEQ ID NO: 483693 - DNA, 243 bp, Homo sapiens
ctatagtcactccaggtctatagagagggttcttctactattaggacttatcgcttcgaagcgaaggcttctcaaatcatgaaacttattaatattactgctgatagagaaatgaatgagcctacagatgatcggatgtctcatgtggtgtctgccgtcggggtggtccgagtacaccgtcggggcattccggatacggcccgcgaaacgtgtcgtgggaagaactttttagcttaccgccga

SEQ ID NO: 483694 - DNA, 146 bp, Homo sapiens
taatgaagctgaacgatatacacagcaattccaaccacagaagacctactgtcaccacatatagaggagcaatacctggaggagccaagtcagacaatcgaaaatcctgaataagcaaaaagtaagtaaataaattgccatctgga

SEQ ID NO: 483695 - DNA, 177 bp, Homo sapiens
catggactgtggagtcacctcattgtgcccgatgccactcgtactataatcgagcgtacgttcaatcccttctcgggaatgtgcgtctattcccccagtagagagtaggaccagcctgctgaggctgtgggaacctgtggctgccttggacgctgcagccacatccgtactggcccg

SEQ ID NO: 483696 - DNA, 214 bp, Homo sapiens
tgatacaagaattcaaaagtacctgcactacgataggccatcttttttgtcgctttcaacgcgacatctaacatctcagagcgtgtggctgcatccaggtactgactggggcttcttcaataacttttttgatgacgaactttgattagggcaggtcacgttcacccaagacaattagcatctgcctaacccatcacctaataacctggtactt

SEQ ID NO: 483697 - DNA, 118 bp, Homo sapiens
gccgcccaagatgccgaaaggaaagaaagccaaagggaaagaaggtgcgctccgggccccagtctgtcgtgaagaagcaggaggttaagaaaagtggtgaatcccctgttttagaaaa

SEQ ID NO: 483698 - DNA, 327 bp, Homo sapiens
cttcgtaccacaagtctagtctatctgctcatgagatccactttattagcctccacaagtgagaccatgtgatacttgtctatcagtagcttggtttatttcatttaacataatgacttccagttccatccatgttgctgcacatgacaggatttcattctttccttttttttttgttgtagtgggtatgtctgtagtcccagcattttgggaggccgaggcaggcggatcacacggtcatgagttcgagaccagctgggccaccatggtgaaactctgtctctacaaaaaaaatacaaaaattagaaggcgtgtggggcgataaca

SEQ ID NO: 483699 - DNA, 294 bp, Homo sapiens
  misc_feature (30)..(30): n is a, c, g, or t
  misc_feature (125)..(125): n is a, c, g, or t
  misc_feature (251)..(251): n is a, c, g, or t
  misc_feature (277)..(277): n is a, c, g, or t
  misc_feature (290)..(290): n is a, c, g, or t
ctttctctcctgttctatgttgactttatnctcagacttcattctcagactggttctaatggcaacaaagatagcctctgacagttccggatcaacttacttcttagtacttgaaacctctgaanaacagagggaccatctttccaatagttctagcaaatgctgggaagagatttgattggtccatcttggttcatgtgaccattggctgatcccagacagatacagaaccctgattagctagtctttgngttacaggcctgtactttgatgcgtnggagggtgggagncacc

SEQ ID NO: 483700 - DNA, 875 bp, Homo sapiens
gattcccctttgtcttctctatttctgtgttggtaactcattgtttgtattatattcagaacttgcattatgggtaattaaagtcctttggaacgtgctttaagtttttgaggcttttctttacccttctagtgtattggagtagaaatgcttatactgcagcatggtgttaaggaaagtgcgcacactgttttttgtttatggtattccacggaaattaagtgcacacactttgaacttcctaactgcctacttcctcagtttacttttgcattttacttatcattgggccatatatatgtgtgtgtgtgtgtgtgtgtgtgtgtgtgtgtgtctatattttatatttatatttatatatttttgagagtcagagtctcgctctgtcatccaggctggagtgcagtggtgcgatctcgactcagtgtatcctctctcttccaggttcaagcgattctcctgtactcagactcccgggtggctggagactgcaggcgtgcgccaacacatctggctaattttatatattttagtagagacgaggtttcaccgtgttggccgagctggtcttgagctcctgggctcgagatctgctgccctggctcccagagtgacgggattacgggctgtgagccactgcaaccgggccctatgtgagctttaatttagaatatttctcactaaatcactttctaacacccctcagtgtggctggcaagaacactttagacatcagatattacgcattattaaaccctaatataacatatatctaaaaatctgtacaagctgtcaaaacccatccgaattcctttcaaatattcataaactctctcatttataaaaactccctcctcaagatatataactactaa

SEQ ID NO: 483701 - DNA, 1015 bp, Homo sapiens
gttgacaccatttcgtttggtctcgcggtgaccagctaggttctagtgacctggtgcatatctagttcgatagagtagatatttgtctgtgcggagatggtaggtattcatcatcactgagaaactaggcgcactggtggcgaagctgaacgttcatgtgactagctccatgatgattaagccggggggctattacagacagtttatttgagcaggatgtcccgaaggggaaccccaatgattctaaaaattagactccagtctgtgggacagccaggagtgccaaatagcattaattacattcatttgtgttggccaacgaaaagttaaaagaaaaaaacataaagatacagagtataaaaaaacacccgacataatgtataccacaaaaacaaaaaggcagtacctagagcaaggaaagaaaccaggcacgagaaagcacgcccctggaaaaaaccaatggccctgcaaccgaggcaaaaaacagccaaaatgatggtgcaccatgcttgacacaacacgacagaggcacacgtgacaccctgaggacacacgcacgtggcccgcacagcaacttgcaacatcatagaaagggcacacgaccgaaaagtcaatcaactcaaataaagtctgggtcagaggatgagatgacacgacagccagatgagagcaccaggaatcctgcagaattgggacagataaaaggttcatgttacgccacacgaagaggttccgagcagggcctaaactacgatggcaactattttaaattccccgagaaggcattgtctggcccgttgtacacatcagttgcagaccttgacttttaaatcagtctgcccaatccggtctaacattttgagccaacagcttatgtcgtccaaaacgtaacattatggccttcattccacaggacaaaaacaccttgacgtgcgccatctgtgcttgcatgacgttgggcctatcactcgctctagattacaccacatcaccgcgtctcgcaaatgctcagcaa

SEQ ID NO: 483702 - DNA, 544 bp, Homo sapiens
gggggggtcgaggatcccaatctgcaccacagctgtatttttttttaaaggcactcaatggtagggcattttaaactcttcgggataacagagtatctttggagaaataaaaatcgaatggaccattggcaatatggggtttccctaataggtacggtctaagtaaaggtttaaatccaaacaattcttcggtccacgggaaaaatactattaaaaatacatctttctaaaaagaaattaagaaacactagggaacacctaaggtaacagaaagtagtccacgttggtaaataaccggtattttaaaatagtccttggttttaaaattttaaaaccgtgcagataaggtcattgggatgaaattataattgaaacatcaggtcactctgggtttcacagggtggcacacgttaaggtaataatgcacacaaggtttaataagggcctaattcataacaggggctgggaaagttctaacctcagtcagaatgacccttggaggtgttaatacgggtgtaaggtggtattggtcaccctcgtttac

SEQ ID NO: 483703 - DNA, 290 bp, Homo sapiens
ggcggactctagctccatagccccgatcttctatgcctccatagtttccttttctggaatgtcatatagttgaagtcatgcagtatgtagcctgttcagatggcttctttcacttagtaatatgcactttagtttcctccatgccttttcttgacttgatagttcatttctttttagtgctaaatcatattccatcatctgggtataccatggtttatccattcacctattcaagggtatcttggttgcttccaagtcctgtgctcttttaagatttcagtttttgaccc

SEQ ID NO: 483704 - DNA, 198 bp, Homo sapiens
gggaagaggctgacatgcagaccgagcggcctactcaaaagcagccttccatctccataactaagatgtggttccctgccgggagatactttcaaggagatgcttcctcggactacaagatcaacggtctgggcttcaagacacctaaggaggcgattgagggcacccacactgacaagatatgcccctcacagtaaa

SEQ ID NO: 483705 - DNA, 237 bp, Homo sapiens
agcttagaggatccccacggcaggttctaagggaagcgggaaggtgggggctgtggacacagtggtggcgggcgctgctctcatggcttcttttctcccttgtgtgctggtgggctagtagctgaggccggcggcctctcccccgggagcaggcagatgactttggcaaggggtggtgtggcgggtgctggggttactccgtctgggcgtcgtaattggctccccccgctaaactcg

SEQ ID NO: 483706 - DNA, 436 bp, Homo sapiens
ttggggctcattcaggcgtggtgaccttggcaaggtatcaggtgaagaaggcaggcacatggtatggctggtagataaataggatcaaggacaggaatataggatataaaccttttggctaggtctaaaccatccttaactatgccaggagtctctcactatcttaaggaggtagggtcatcatttaaatttttgaatggtagtatgcatcttgcaggggggtcttcaatataggtcaggggggatcatgtaaggtgggaaaaacgggtaaagacactttagtggggggtctacttttacaatttatacttttcttctcctttcctccttctacaaagattatgtccagcagtatgcatcttccggactggcagattctagccggctataaaattaggacaccagacaccgcacatatggctagaatggcggggta

SEQ ID NO: 483707 - DNA, 153 bp, Homo sapiens
tggcgcggcaatacagctatacatcactggcctgtcgttaacacttaatcatgctataccactcacctggccgtcgtttacacaaacagctatacatgcactggcctgtcgtttacagataactagctataccatgctactggctggcgttgg

SEQ ID NO: 483708 - DNA, 767 bp, Homo sapiens
gaccgcgagaccgcgtccgccccggagcacagagcctcgcctttgccgatccgccgcccgtccacacccgccgccagcttcaccatggatgatgatatcgccgcgctcgtcgtcgacaacggcttccggcatgtgcaaggccggttcgcgggcgagatgccccccgcggccgtcttcccctccatcggtggggcgccccaggccaccaggccgtgatggtgggcatgggtcagaagggattcctatgtgggcgacgaggcccaagaagcaagagaggggcatcctcaccctgaaagtacccccattcgagcacgggaatcgtccaccaaatgtgggacgacactggagaaaaattctggcaccacacctttctacaatgagctgcgttgtggtcccggggggagcacccccgtgttggtgacggaggcccccccttgaaccccagggccaaccgcggagaagatgccccaagatcattgttgggaggacctttcaaacgacctcgagcagtgtacggtggcttaatccaagggctggtggttatcccttgtagggcctctcgtgccgtaccaactgggcattcgtgatgggccttccggtggacggtgttccccccacattggtgccaatcttagaaggggttaatggctttcccccatggcagttctgccgtctgggcactgggttgggccggcgacttgatggtctacctcagtgaggtcctcaccgagcggggtacgggttccacaacacggcgcgggcgaatg

SEQ ID NO: 483709 - DNA, 259 bp, Homo sapiens
aacaggagtcaactcccagcagagacagagatatgggacctttcagaaagagagcttacaactagctgtttacgaggaacactcacaacttcaaggtaacacagcaggaggaactcacgaatattatcagcatacatttagacaaagcgaattgacagtaagttaacgagaatcagagcagcaaattctcgcagctgctagaatgcacattgagcgtactgaagcaatgcgtcagagctctgttagatagcagcacact

SEQ ID NO: 483710 - DNA, 1345 bp, Homo sapiens
  misc_feature (835)..(835): n is a, c, g, or t
cttaggggagagagaaagatatatatcttttgtttactaatagggggggggggctattcatgcgcgttatgtgtggttgtctgccgcaccgaacaagatagtatgtttgcccaccaaccatgattaataaataattatgggggggtctagaaggagaatttttggaaggaggcgaagaatattattttctagttttattgcgtcgccggataatgagggcctcgcccacaaaaaaaggaggttgtggtagtagaggaggggggaggagctgcttataataatattataggtggttataaccgcccctccaccacatgatttgtgcggcctgtgtgagaggaagaggcgagaagatctggttgagagaagatgagagcggtgggtataatgacgtattgcgccccacagagagatgttgtgctgatatgatgtatgacatataaagaggggcgctttatattatatttttgtcggggtgaaaacacacaacatgtttgttcgtcatagaatatatgtggtgtatgagacctctgcacacagcagcggagatagtgtggtcacactctgctgtttgggacgacacactactatagtagtggtgtgtaaaaaaaagtgggtgaagtagaaagaacgcctcacacagtgtgctctctactacacatatagagagtacatagagagagtggagtagtcctgtaaatagtgtgtcgtcacgacgcacactaggatgatagatactctatacacacactactcttctctctgtgagaaatattgtttctctccacagacgcacgtctccacagagagagaatatacactactcactagtgtnttagacccacagcagagtcccaccagcgagaggagaataaataatagagaaatataaagtatgtgtgtgttgtgagaagagatatctctcttgtgagagtgtgtgagagtgggtgacgacacatatctctcgctcttataatactgctgtcgcacacaccctgtgtggggtctacaccacgggtgtgtatatatagtggtgtgtgtgagagacacatgtgtccgacatatatatgtgtgtgcgtataagaatatacatggcacacatttgagatggcttgttttctgtttttgttgtgtgacacacgcgtataggtatgtgttgtgtaaagtggggtttgtggagaaataaaatatcctgtatattaaaaatatatggccaatttcccacaaaatcccttttatatgggaaaccacattttttttaaaagaggagaaggaacacccaaatccacacacagagagggactgggggctgggcctttatttaaaaaaaatttgaaaaaacgga

SEQ ID NO: 483711 - DNA, 722 bp, Homo sapiens
  misc_feature (13)..(13): n is a, c, g, or t
  misc_feature (88)..(88): n is a, c, g, or t
  misc_feature (205)..(205): n is a, c, g, or t
  misc_feature (231)..(231): n is a, c, g, or t
  misc_feature (285)..(285): n is a, c, g, or t
  misc_feature (411)..(411): n is a, c, g, or t
  misc_feature (516)..(516): n is a, c, g, or t
  misc_feature (705)..(705): n is a, c, g, or t
aagctcaccgtcntacgaatggctgttgagaggagcaataggaataaacattgtaaaagttgttgcgaccattataattgttgtcacnacgataatactgggtataagtggcgccatacccgttggggaaatagcagctggactaacagggcacggaataatggacgccaaagacgtcgctgacattggtactgtagctgtactngagggtggtaaggaggatgaactacnatattggatacgaatagctggtgctggaatgggaggggacgctggaatagacgnattgacgagacctgaccagataataaaaggctgggtcaaggagaaagactgataaaacaggccgagcgggatacgagggaaattatagcaagggtcgttgctggtggaaggttaaaggccacggtngatacgggtactgaaacggaataggccgcgataacgtaacacgacgggtgagggatgaaaggtacgtacatgcattactgtaactatagggctaatgactgttanactcattgtcggtggatgaacatgacatgatgtggcggataaggaacaacggcggtaatgacagtgacgaatgggaacgggaaagacgaccgactcggagtggtacggacgagactatggtggactcccccgggctggcgggtggggtgtgaaaccgccaactaatattatgcgcatggacaagaccgnctaaaccgtataacatg

SEQ ID NO: 483712 - DNA, 316 bp, Homo sapiens
acatttaagagtggactggctgtgtctaagaggctacaatcaaatgcaagagcacaggaatgacttaaagttggaacttacattttaaagggaggcagagcataaacatttggaaaattcacagcctggccatgtggtagagaaggaaagccccctctttttgttgttttttgttttaaagacagggtcttgctctgttacccaggctggatcttggctcactgcagccttaaccttctggactcatgtgttcttcctaccttagcctcccaagtagctgggaccacgggcatatgccaccacacctggctaactt

SEQ ID NO: 483713 - DNA, 302 bp, Homo sapiens
gggggggaaattttttccccccccttttttttttaactggaaactttggggggaggggtttccagggggggccccggttctttttccgttaattaagggagccctgaataaaaacccccttttttgggggaaaaaatttttccgggacgccaatggcccccccccccgggtttttttttttgggggggccccctgttttcccccccccctgggtttggggttctgttttcccctcccccccaaaaacccctgttgttttttcttgggaaggggagggttttttattttattttttccggtta

SEQ ID NO: 483714 - DNA, 373 bp, Homo sapiens
  misc_feature (16)..(16): n is a, c, g, or t
  misc_feature (34)..(34): n is a, c, g, or t
  misc_feature (86)..(86): n is a, c, g, or t
gggaagccagaaggtngggaagaatggctttcanccccaggaagttggagacccagccttggggcaaccatagtgagacccccatnctctacaaaaaatcggaatattagctgggccatggcggccgtatgccctgtagtcccagcttaacgggaggctagggcagggagaatcatttgagcccagaaagtcgaggctgcagtgagctgtgattataccactgcactggatgacagagtgagactctgtctcaaaaaaaaaaaaagaaaaaggaaagcagaccctctccatggctttgggtttttgtttgtttgttttgtgtgtctgtttgttttagacagagtctcgctctgtcacccaggctggagtgcag

SEQ ID NO: 483715 - DNA, 100 bp, Homo sapiens
catttctgttaaggccatctatggatcacatctacctctgaaagtacaactaggaatacaacacacctagcaagtctctgtactgatagcgctagctcat

SEQ ID NO: 483716 - DNA, 310 bp, Homo sapiens
aggtcttttcccctcaaatcaaggctttcattcgaatgtctgcaccagagcttccccttcagaggtcgttgcattgctaagtcccatagcccctcccacttcttatcctacttggcctgtttcacgctgccatcccctatacttgtccccttctcctgtgacttcactttcttcagtggctccaggctgctgcattcgtctcttttccttctacatgggtcgtagaaggaaactaccaagtgggactgttgctgagccctgaagctcagtctttgagaccctctcctctccagctgcgtttcacttccga

SEQ ID NO: 483717 - DNA, 263 bp, Homo sapiens
ggcagcgctgcgatcctcagtcaagacaattggggctgaggtttgttccccgagcacagtttccctttgcagaatgcagctcctagaagggcgttttgtgccgtttcggagctaggccctaggtgggtccctccgtagctggctatgggtgggttgctagggccagtgcacccagggcttcttcaggccaaatcagccttctccacgaaggagaagacgcttagatttggttcaagctgcggagaccaccaggcaagcagcag

SEQ ID NO: 483718 - DNA, 995 bp, Homo sapiens
ctgtgagtggtcagtggacccccgtagccccgtgcgggcacccccgtggccatggctcagtggagcagctgctagaaggagggcgatgagtctgttcaaatgtggagactacggtggtgcgccctggcggctacactcaggccctgggtctggacgcgacgccccagtgaccaggccgttctgcaccggaaccgggccgcctgccatctcaagctggaagattacgacgaagcagaaaccagaggcatcaaaagctacctcaacttttctgaggctgaaagcaacgaggcccacattcgttccccccaacctttcttcttgggccttttcctcgagatcttttcccctacgtgcgtccttggcgcttggaggaccggtgggcctccactgggggtgcgtgacacagggccggtcccttgggttttggggcgtccacgagcccattttgacaacgggcgtgggtgggggcgtgtgtaaagccacttcctataccgggggcggagaagcacagaggccctatagaaaaaagagctggggggccgagcgcttgtgaaccccaacggcgttgtggcccttttgagaaccttgtggcgaagaagattgtttgttgtgagacgctttgggagacgccccaagagaacccacaaaggttttttcaccccgggagacggcgcccttttgggcgcgggaaaccacattgtcgcggtggtggtggcgccccacggggagaatttccccacgggggccagacagacgggcggtgccggaaagttaccgtctgggttctccctccgtgaaccgcgggagaattgtcccccacacagggttgtgtgcacccacccgacaatggtttttccacagaagattatccgtgtggttgtgtggagaacccccccaggaaaagtacagagcaccgcgtggcgcacaccttgtggtggtgaaaacaacagcaagggccagaagaagcgcggcgtgttcttctacagggaaaaacc

SEQ ID NO: 483719 - DNA, 372 bp, Homo sapiens
agcagagtaatacttcgatggcagtaaacggtggacacaagcgaaatggtcaacggacgctacagaacaatggacgagctctaaagagtccagccccatcctctgcccgacctctgaacgtaaagccaagactgcccttgcagcccagagagccgtcaccttaccaggcagaacccacgagacaccttcggtccagatggaaggctttctcaatcggaaacacgagtgggaggcccacaataagagagcctcaagcatgttctggcacaatgtttattgcgtcataaataaccaagaaatgggtttctacagagatgcacagactgctgatactggaattacgtaccacagcgaggtccgtgtggtttgggt

SEQ ID NO: 483720 - DNA, 352 bp, Homo sapiens
  misc_feature (53)..(53): n is a, c, g, or t
ctcggccccattttctgcttctgaaaggctgaggcagaattactcaaacaggnagacagacagaggttgcagtgagccgagatgcaccactgcactccagcctgggcgacagagtgagactctgtcttaaaaaaaaaaaaaaaaaaaaaaatttaaaacaaaatttttcttctgatttaaagtctggtaattaaaattttggtttccctccctttcagtatgatcagttggcttcaatttatttctagggatatgcagattctttcagaaaagctttggacttactatgtcacccagggatgagcttctgggggatgttttatttctggtttcaaggaacgcgggaacgggg

SEQ ID NO: 483721 - DNA, 384 bp, Homo sapiens
tcatatacgactgagttggtaccggaacattcgtagtctgagccctaggatttgaagactgcagtctccagtgaggccaccacgcctgtcagcgtgcagcacatgcgccctgccatagatgaagaggcgcaagagagttctgcccgttcctcgctctgccgatcgtggtgcaggtcatggagatgggatttcccatgaaggaacatcgaatttgccctgaagtctctcactggtgcttccgggaatgcgtccggcttgcctggtgtggaatccttggccggaaggctgctggaccactccgacatacaggtcacggagctctcagatgcagacacggtgtccgacgagtattctgacgaggaggtggtggaggacacgaatgtt

SEQ ID NO: 483722 - DNA, 791 bp, Homo sapiens
  misc_feature (125)..(125): n is a, c, g, or t
  misc_feature (138)..(138): n is a, c, g, or t
  misc_feature (151)..(151): n is a, c, g, or t
  misc_feature (154)..(154): n is a, c, g, or t
  misc_feature (330)..(330): n is a, c, g, or t
  misc_feature (340)..(340): n is a, c, g, or t
  misc_feature (369)..(373): n is a, c, g, or t
  misc_feature (375)..(376): n is a, c, g, or t
  misc_feature (378)..(378): n is a, c, g, or t
  misc_feature (380)..(380): n is a, c, g, or t
  misc_feature (384)..(384): n is a, c, g, or t
  misc_feature (391)..(391): n is a, c, g, or t
  misc_feature (394)..(394): n is a, c, g, or t
  misc_feature (401)..(401): n is a, c, g, or t
  misc_feature (407)..(407): n is a, c, g, or t
  misc_feature (412)..(412): n is a, c, g, or t
  misc_feature (415)..(415): n is a, c, g, or t
  misc_feature (425)..(425): n is a, c, g, or t
  misc_feature (437)..(437): n is a, c, g, or t
  misc_feature (442)..(442): n is a, c, g, or t
  misc_feature (455)..(455): n is a, c, g, or t
  misc_feature (472)..(475): n is a, c, g, or t
  misc_feature (488)..(488): n is a, c, g, or t
  misc_feature (504)..(504): n is a, c, g, or t
  misc_feature (555)..(555): n is a, c, g, or t
  misc_feature (578)..(579): n is a, c, g, or t
  misc_feature (588)..(588): n is a, c, g, or t
  misc_feature (591)..(591): n is a, c, g, or t
  misc_feature (603)..(603): n is a, c, g, or t
  misc_feature (606)..(606): n is a, c, g, or t
  misc_feature (634)..(634): n is a, c, g, or t
  misc_feature (654)..(654): n is a, c, g, or t
  misc_feature (783)..(783): n is a, c, g, or t
ccttttttttttttcttggtaaatagtagaatttcatacaaatataaagtttggcaccttcaaagctatcactccaataagacacttattcaattaaacaaataatcttaaactattttaacaangtacaaatatatncacaacataatcngcngattaagacttcaacaaagtttataatacctacaacagaatttacagatgcctacaatagtttgtagattggtttaatttacagttacatagattgctttaagaaataccattaatacaaatgcataatttacaatatccccattatagcaagaaaaaaatagattcagaaaatanaatgtctttnaggcatttattagtgccaagtgtgtgagnnnnngnncncnttanggcatgngantaatgcncttttngtggnganagatctattngctcaagggccnctgangagctttcaatcnagctatcctttctgtgnnnnaaatggaacagcngcgatctctgggtatnccttaaactatgatgattccgcttatattaactgggccttaagtagatganttcttacaaacaaaaataaaatnntagaaaggngtnaataccactggnccnaattgtgttcacttgcgtgcatacgtcnaagagatttccccacgaagncaatattaaaaactaacaattatttctaacttatacataagccaaagtgctcactcttaccatagaagcaaaactttctcctgaaaacaatctacagaaataatatgtaaacatatagagctttgaganagactaag

SEQ ID NO: 483723 - DNA, 84 bp, Homo sapiens
aattcaagcatctaacgatgtacggggacatgaagaaaactgtgtttcatttaaagatgttaattaaatgattgaaacttaaaa

SEQ ID NO: 483724 - DNA, 203 bp, Homo sapiens
catctagaggatctacacgtacgccttcacgtacgctctatgataacattcttcttcatttacaagaatactatttttcatttatcattgatatacacagctatgctttaaaaaagataatcgccatttccctacattacttttaccacataatgaggtctagtaatctgtcactctataaaaagccagtgtcgggcgggcac

SEQ ID NO: 483725 - DNA, 349 bp, Homo sapiens
gctgccagtcataggcccgtgccctgtaggaaggcagaatgtaactgttctgtttgtttgacgattaagtccaaatctccaagtgcggcactgcaaagagacgcttcaagtggggagaagcggcgataccatagagtccagatcttgcctccagagatttgctttaccttcctgattttctggttactaattagcttcaggatacgctgctctcacccctgggctgtagcccggagccaaaatattttcccgcctccccctttcatagctgaggttttttctgaactatgtaaatgactctactaaaagtttagggaaaaaaaacaggaggagtatgacacacacagca

SEQ ID NO: 483726 - DNA, 427 bp, Homo sapiens
  misc_feature (1)..(1): n is a, c, g, or t
  misc_feature (167)..(167): n is a, c, g, or t
ntctagaggatcccaccgtaatatgtaccatactctttacacacatttgtgtgtatattggagattctttactaaaaaagcagaagttaaaaagaaagtgtggtggcacatgtagccccagctactcgggagacttgagatgggaggatcgcttgagcccaggagtntgaggctgcagtgagccatgaccctgcctgtgactagcactacactaagcctgggcgacacgcgaagaaaccaccgctttaaaaaacgaaaaggaagaaaagaacttgtggaattccagttatctataatgcttccagctcctcagcctcttaactctcgccaaaccctcagcctttgcttttcaaaatactgcatttgctatctactgtctcacagaaatgcagaccttttgcctgaatttcacacttgctgttctccc

SEQ ID NO: 483727 - DNA, 105 bp, Homo sapiens
attgcttgggcagtgtgatgttcgctattgcgctaggaggtgttgctgcgacgttcagtggaagtcttgccgaactgcctagcgagcgtctcaatccggtcgtgg

SEQ ID NO: 483728 - DNA, 605 bp, Homo sapiens
  misc_feature (182)..(182): n is a, c, g, or t
cgaggggcaggagatattccggctcgccggtgaggaggctgaccacggtgcggcgctcgaacagcccgcgggtgttgccctcgcggacgaaggcggtgaggtcagcgccgaagagcacgttgaagatgccgtccggccggctctgggcgagcgcgccgacggtggcgccggcatcgacgcgnccgagggccgggaactgctcggcgaccacctcgaatcccggcaccgccgcgcccatcaggcgcttgaaggcggcgaccgccgactggccgtactcgtagttgggcgccacgacggcccagcgcttcacgcccttccccttggcggcatcgaccagcatcttggtctgcatgtaggtgccggggcggacgcggaacgtgtaggggttgccgctgcccatggtgagcgcgtctgtgagcggctcggtggcgagatagagcaccttcttctggttggcgaagtcggcgagcgcgaggcccacattcgacaggaaggcgccggcgatgaaggagacgttctcgcgggtgacgagctcctcggcgacgcgcaccgcgtcaccgggggtcgagccgtcgtcgcggaagacgatttcgagcgggcggccg

SEQ ID NO: 483729 - DNA, 593 bp, Homo sapiens
agggcctccctggcttgggagaccgctctctgcaagggagggggagagaggcacagggagagagaaggtgacacggatggaagagtgggaaggagctggcctggctcaaccctaggctgtccctgcaggcagggtgtccgggggctggccagtcagagaaagggggccatggactggtgtggcaaatagggagacacggagacagaccctgcagtcctactacaggctggagtggggtcctaagaagaagggtcccacctcaacccctgtcagtgtccactgtggggtgggggctgacccctggctttgagtggcattctcctgggaaggccagtcttagtcccttccccaacactgtgcacactggcccttcccactgtgtatttattggacggatctaaggtattctccccagacagagcccgagctcctgcttcctgtggaggcgtatggccctgagctgtgctctatatattatatctgcgaataaatcacatattatattatatttaggggccggagagcgacaacacgagttcaagggagggggatcgcttgagtccaagagtttgagaccagcctgtaccttgggg

SEQ ID NO: 483730 - DNA, 256 bp, Homo sapiens
ccccccccccccccccttttggcccccccgggggggggggggacccccttttttttgggttttccccccccccctttttggggttttctttctcagaaccccccggttttttgtttataatttggcgcggggggtgaaacccccccccccccgggccccttttttttttttttttttttgggtttttttttgaaaaaaaaaaccgggggggcccccccttcccttggggcccaaaaaggggtttttttttttttta

SEQ ID NO: 483731 - DNA, 626 bp, Homo sapiens
cgatgctatgtaagacatagtaaatcttgaccattggtaatcatagcctgatcgtatgcataatcaatagtataaaggaaatattggacttgatgcgaaattaaaaggctctgtgattaagttaccgaagggattttggtggaggggagcactgtgtatatgctggaatatgaagtctgagaccttccggtgctgggaacacacaagagtggtagaaagttgacaacgcagacatggcatgtctctgagtgcttagtgatcattgcttgagacaatcaggctcggtcacgtggacaataaacagtattatcagagagaaaatgtagaaataataagtatcataaaacaggattagtcgccccgcgccggtgggcctgaaaagagatttaagaaccagaggcttggggaacagcgagctccaaagcagtatcaaggagtgggccaagacacagggtgctcaagaactcctgcacctcctgagcagcgaggaatggcccgaagaaagaaaccgcgcgggcgcatacgcgcggggcctggaaaaaggtgcaagacagggacgtgagggaaggagtgctaattgacaggggagaccagcagagtcaggaaacattacgccggccccgggt

SEQ ID NO: 483732 - DNA, 161 bp, Homo sapiens
cagagcgtagggaggtaggggttcttccagctgcaccggctgctgccaggtgagttggcctggctttgtgcggaacagactatccgtcagtgggtgtgattgatggcaacttccaggccatgtcctgcttgattgttggagtgcattgcccttgagtgtga

SEQ ID NO: 483733 - DNA, 1246 bp, Homo sapiens
gtgtttgtctacttcctcctgcttccccggcgcgcctggcgatcgacgtacatcatgatgaggaaatcagtgcacttgcatggccagggtcgagctgcggcaaccaaagtcggcagccaagtttatggtgagtgtgatcagacgagtgagcacgagcattctgactccctagcgggtcatctaccacggggacagcgatcctgtcagctggaacgcatcaacgtgtactacaatgaggacaacgggcaggcaagtacgtgccccggcctgtgctcgtggatctggagcccggcagcatggactccgtgcgctcggggcccttcgggacagatcttccggccggaacaacttcgttctatcggtcagagtgagttggctgggaaacaacctgtggaccaatggggcactagcacagaacggcgcggagctggtggactcggtgctggatgtcgtgaggaacagggaggcttcatgagtctgctgactgaccttggctgggctctgccagactgaacccactacccatggggtgcggggggacgtgtcgatctgtggatgcgtgtacccctactccctgaggcctatcactggagatcggaggtacggcaagaagaagggattcgtggactcaacatacacagggtataggccttcaaccctaaggtgtgtaaccacaaagggatggatgttaccaacttaaggacaaagaatccgatcgagagttcctaacagggacgataaacagcagggcaggaccagaacaggctaaccgctcaaacgaattaaccgagaatagcatcgaacagacgatggggcctaccagaaaatccgtcagcaaggagacgacgacccacctaagggcaaccacgaaggcccaatgcggggacgtgcaaccaagcacagggagtcacaggcaagaagacgggggcattccaaggacagacaaaagaccaacctgacaagaaaggcgggggaacccaaggcccatgagtcacggcataggcttgtacaagccaggagtgtgacccacaacggacgggaacagtagaaacggagggacaacacaacgagaagaccagacagattaaggacaaaaatctggcagagaacccagagacagataaacacagtagtcacgccaacaggcaaaatgatcgacaaccaaccaagcaagaccgagtgatccttccactacagaagtagaagacaaaaaggaatcgcgacggtgcagagacaagacaaacaa

SEQ ID NO: 483734 - DNA, 166 bp, Homo sapiens
gggcttgaccaccagggagttctccaggcctagggcaggagagaggcctggcaccctggcgtgggtgcccgccaaacgccctgcgaccgctcagaagcacaaatgctgtccatggccgtgagtgtcctgccaggtgaatgacatagcgtagaagcgtaaggccagg

SEQ ID NO: 483735 - DNA, 841 bp, Homo sapiens
ggaagctccggaggcattcggtgagcgctccctggagtcccatgcgctccctttggtgtcggtgttgacttggctgcgcaggctctgtcggggggagctttacccactaggtccttcaagtggtgatccaggcctcctatgcccggccgggctccagaggtacgtggtggcaggagtgggctggacgactgtccccatggcatcgcacttccagcggtgtgttagagccgtgtgggtgagtctactggacgtcctagtagcacgtgaggtctaggtcctgattcatcctctggattagagaagtattcggccaagatactcaaaggaacaaggaagagtctgttaagtgggactcagtaaacaagttggcggcacggaacgggtggttgagatatccaggtcccctaaaactaggaagctaacccttcgttgctatatcttactgacaaagaaactctctctgttggacctggtggagcagcgcgcgatgcggtgggtcaacacctgtaactccctgcgatcgtttgggagggtcacaggtgagaggatcgtatgaggccagggagtgccaagactagcctgggcaacactagggagaccttgtgtctactgtcaaagacattcgctgggcatgtgggcttggacctgtgtgtcctggctacttggggcgctgatgcagaggatctcgagcccaggagttggaaggctgcattggggctcgatcgccccactgtactccagctggtgtgggtgcgcgagaccctgtgaccaggctggggtgccgaggctcttggggtgtcgttagggctggacctgcgggggcttggaacggcctagtcgc

SEQ ID NO: 483736 - DNA, 148 bp, Homo sapiens
ttacgcatactcactattattttctgtataaacaccctatgttgtagccacaggtggagcctgagtccgctgcacggagactcgggtgtgggtctggacgagggggtcagtgaactcctgatagggagaacttggtgaattacagtct

SEQ ID NO: 483737 - DNA, 783 bp, Homo sapiens
  misc_feature (520)..(520): n is a, c, g, or t
cgggctgagccagacagcaggctccaggctccaccgccccagtgatttccaggctctctggctgaggctgcctgcctggaggggacatcagggaagaggcttccggaggaggggatgggagaaagtaggggatgtggcttgagctgcattcacaggccttggctggaccagggatggcccccatctcccatgagggcccactgaccctacaactccaaccttctccatacttcaacaaataatgagttatggcaatgagggaagagagaccctctcatattattttatactcattacctgttttaataaaaaacaacaatgaattaaaaccaaatacaggcatgcaacctgacactaggcccaaaaccagacctacacctgcctagcctaaacccattatttaaaaatcaattcataacttataaacctatattattcatatattccacacattgtatacaataacatttcttaaactcgctaccatattctattgctctctaactcccaatacatacanccgctatcacttaccacctacttactcaaatcaactactatcctgtcatgttaaatcttcatattattatcccttacaaagtacataaattatcactttgcgaactacactttaatgcatcacttaccaatactcccacctaataaactcttgcttctacaaataacaaacacataacttcatgagggacccactacccaattcccctatactccttatacattcacttacctctttgcatctacttacctacgttcccactt

SEQ ID NO: 483738 - DNA, 283 bp, Homo sapiens
ggagaggaaggatgtgagctgttgctggcgtgttaaagccctggaacagatagtcgggagacggggttcatgtcccagatggtactagcttggggaaaattttgacaaatcagttgctctctctgggtctctgcttcctcatctggaaactaaaaagattgagctacaactgaaagagtcgagtgtttctcaaaatgagggtcgtttatttctgctatgctttctgaaagctaaaggaagcccccaaaatacaaaattagccagccgtggtggtgtgcgcctg

SEQ ID NO: 483739 - DNA, 459 bp, Homo sapiens
tcggatggatgtctctgtcagagaaaaatgcataaaggcttaaattgaggcattaacagaagcagattaacctcagaaatgctgtctggctggcagatttcaagtaaaaaaaaaaaacaaaggtgggttggggggacctttttctttctagttgtcttaaaggaaaattaattttactttttttttggttctggccgaaatttttatgagatatctcccacttgtctaccattttgacccggtaaaagctcatagctgtaagatctgaatagaggaggggagaagcccctgggtcttactatgaaaggaatccgctgattgagggctgcctccctcatggtgtgcgtgtggtaactctacctgacgcatctggtgatatcagaggtaaatatgcaaagaatccaggcggtactaaatgtgaagcattacacccagaagagtcccggtgccctctgtccc

SEQ ID NO: 483740 - DNA, 570 bp, Homo sapiens
cgctctgcatacataccgcaggcctggaatgaaccacaccatggcacggatgcaggtgccgtagatctgtgtgagggaggcggggcccggataatccacgtacacgacaggcacgtggcgcaggaccctgtgtgagaggggcttacttccagggtctgtggagggattacaagccccaacaaactggcttctctccagctacacccatgttagatctgaggtacggtaaaagcctccgagctccaccatctgtctgatgaaggatatgaccctctgggtcccatatatatccatatctggcaagttgatttcatcacagaacaacaccagccactttccaagttgaacaggagccaacaccaccccattaggtgtgcgcctgtactcgcagtagtgatcaaaagtcttcagaagcagctctggagtagtagcactggaaaagttgagacccaccacctccatgtcaggcaacgcccgaagggcgctgacgagtgtcatggtcttgccagaccaacgagggccacacaagaccaggggcttgtgtacggccagccaagtatacaagagggc

SEQ ID NO: 483741 - DNA, 130 bp, Homo sapiens
ttgtcctctactctggggcatgagcgcctgccctgctcataggagggaagcccatcatcacaccagcagtctggcatcaccctgccacagattctcctcgaagcccggcccaggtcccaggcctcagggg

SEQ ID NO: 483742 - DNA, 1131 bp, Homo sapiens
gctcgcctcagcgctgcggggaacgcgcgcgccgccgtccgcggtcgcccgtaggtgcctgcacgcgtcggggtcgcggcctttggccgaccggggcaagaagactgaggagccgccccgcgacttcgatccggcgctgctggagttcctggtgtgcccgctctccaagaagccgctcagatatgaagcatcaacaaacgaattgattaactgaacagttgggcaatagcttatccaatcattgatgggatccctaatatgataccacaggcagctaggcatgacacgtcacacagtaagaagcacgaagaagtggagcagcgctagttcatcacttcaacacacacaattacccaaaacgcaacagccaacttttcttaataccatataccttttaaaacacagtggcaggtaataagtgcgcacacagaacgaaggtcgctgctctcttcctaccgttgcactgttcttattccactggttctctttagcagcgactgttctactacacgcctctgtggaccgaccacttcccacagggcctgcactagcacagccagcctttggcttttacagcctgactcttgcctatttcaccatacccagtgtctgtatatccttccaccctttggaacctgagactgcgcgtactttcaaccgcttccagaggcactaatcgcacagcccacctagaagtccacacactgctcgcctaatctccaccggcaacgccccgagcacatcgacatctccaaaacgcacacggccatggccaccaccacatcagcgcgcgccaccacagccatcgccacggccacaaacagggcaacacaacgcggggcgagaacaacacatctcaacccatatcagtctacccaacctcggtcaccctcgggtcatgcagcacaactgctactatcaagcagagactacaccctacatacctaccgacagcacacacgagcaggccactctccgtaccaccaccatcacgaccacccaccaactcactctctcccctatcagacctcgctcaacgatcgatcatgttctacccccgtccacaatagcctgcaccaacaacactcacatatcacgatcagtcctactcacacacatcacatgtcccgg

SEQ ID NO: 483743 - DNA, 811 bp, Homo sapiens
  misc_feature (1)..(1): n is a, c, g, or t
  misc_feature (89)..(89): n is a, c, g, or t
  misc_feature (105)..(105): n is a, c, g, or t
  misc_feature (139)..(139): n is a, c, g, or t
  misc_feature (147)..(147): n is a, c, g, or t
  misc_feature (177)..(177): n is a, c, g, or t
  misc_feature (193)..(193): n is a, c, g, or t
  misc_feature (212)..(212): n is a, c, g, or t
  misc_feature (233)..(233): n is a, c, g, or t
  misc_feature (336)..(336): n is a, c, g, or t
  misc_feature (414)..(414): n is a, c, g, or t
  misc_feature (425)..(425): n is a, c, g, or t
  misc_feature (560)..(560): n is a, c, g, or t
  misc_feature (565)..(565): n is a, c, g, or t
  misc_feature (640)..(640): n is a, c, g, or t
  misc_feature (647)..(647): n is a, c, g, or t
  misc_feature (655)..(655): n is a, c, g, or t
  misc_feature (657)..(657): n is a, c, g, or t
  misc_feature (718)..(718): n is a, c, g, or t
  misc_feature (724)..(724): n is a, c, g, or t
  misc_feature (740)..(740): n is a, c, g, or t
  misc_feature (747)..(747): n is a, c, g, or t
  misc_feature (810)..(810): n is a, c, g, or t
ngtctggttaacttgaactagataaagctgcaaaaattggtttggagaacatggcagggccatggagaagggctaatagaagcaggtcncttgcccagaccctcngggagcccttttggtggatagcggtacacctgangcaggagntggcaggggccaagtccaggcatggcagcngcagggctgcaactgnaagcggaggctggtgaggnagcgctcggccctaacctgancctgcaggtctcaggccctggggtcgatatactctgccccatgaagacaggtgaacttgtgtctgtcttggtgcccagagcacgaagaggaagggctgctgcncgtgcaaagaccagcagggtgcgtggccacaggagatggcggaggctgcagccgcctccaccccagtctctgtgagtnccagcactgtntggtgctgcatcgcagaaacctgtaagatctgggtcctctgttagcccacacaggttaaggtcatgaagaaaaatcgaagaattccaatttctccatgactgagagcatatcctggctggtcgtcactatgatgnggggnagtgttaggagagtgggctggaacttggacatctccagtttctccatgatgtgccttgaaaacagaagggctgantagcctntttccatntnttcaagacgatgtttcaggttctggggtacaggatcaccaaactcagattgtgggagagcngcagcngccccaccttggcttncaaagtntggtcaatgaaatgggccacagggtacttcttgctattcatcaggggcacttttataactgant

SEQ ID NO: 483744 - DNA, 137 bp, Homo sapiens
tagctagttaacttcgactatgctaaggttatcactgctgtttccgtggggtgtggctaggctaagcgttgagctgcattgtgcgtgcttgactgcttgtccctttttgatcgtggtgatttagaggggtaccgagc

SEQ ID NO: 483745 - DNA, 134 bp, Homo sapiens
  misc_feature (40)..(40): n is a, c, g, or t
  misc_feature (63)..(63): n is a, c, g, or t
  misc_feature (76)..(76): n is a, c, g, or t
  misc_feature (83)..(83): n is a, c, g, or t
  misc_feature (89)..(89): n is a, c, g, or t
  misc_feature (93)..(93): n is a, c, g, or t
  misc_feature (105)..(105): n is a, c, g, or t
  misc_feature (108)..(108): n is a, c, g, or t
  misc_feature (112)..(112): n is a, c, g, or t
  misc_feature (115)..(115): n is a, c, g, or t
  misc_feature (120)..(120): n is a, c, g, or t
  misc_feature (123)..(123): n is a, c, g, or t
aatgctgtaccacgatcacaggtcggacataaaaaacaancaaaacaacaaaacccccaatgntcctagcaatttnagaagantaactnaagnattaagaatccnganctancanaagantanaaggttgcttg

SEQ ID NO: 483746 - DNA, 891 bp, Homo sapiens
  misc_feature (1)..(1): n is a, c, g, or t
  misc_feature (69)..(69): n is a, c, g, or t
  misc_feature (87)..(87): n is a, c, g, or t
  misc_feature (149)..(149): n is a, c, g, or t
  misc_feature (186)..(188): n is a, c, g, or t
  misc_feature (288)..(288): n is a, c, g, or t
  misc_feature (312)..(312): n is a, c, g, or t
  misc_feature (365)..(365): n is a, c, g, or t
  misc_feature (390)..(390): n is a, c, g, or t
  misc_feature (392)..(392): n is a, c, g, or t
  misc_feature (410)..(410): n is a, c, g, or t
  misc_feature (421)..(421): n is a, c, g, or t
  misc_feature (447)..(447): n is a, c, g, or t
  misc_feature (453)..(453): n is a, c, g, or t
  misc_feature (471)..(471): n is a, c, g, or t
  misc_feature (486)..(486): n is a, c, g, or t
  misc_feature (491)..(491): n is a, c, g, or t
  misc_feature (500)..(500): n is a, c, g, or t
  misc_feature (541)..(541): n is a, c, g, or t
  misc_feature (551)..(551): n is a, c, g, or t
  misc_feature (574)..(574): n is a, c, g, or t
  misc_feature (584)..(584): n is a, c, g, or t
  misc_feature (591)..(591): n is a, c, g, or t
  misc_feature (593)..(593): n is a, c, g, or t
  misc_feature (606)..(606): n is a, c, g, or t
  misc_feature (632)..(632): n is a, c, g, or t
  misc_feature (636)..(636): n is a, c, g, or t
  misc_feature (678)..(678): n is a, c, g, or t
  misc_feature (688)..(688): n is a, c, g, or t
  misc_feature (690)..(690): n is a, c, g, or t
  misc_feature (708)..(708): n is a, c, g, or t
  misc_feature (716)..(716): n is a, c, g, or t
  misc_feature (747)..(747): n is a, c, g, or t
  misc_feature (756)..(756): n is a, c, g, or t
  misc_feature (758)..(758): n is a, c, g, or t
  misc_feature (779)..(779): n is a, c, g, or t
  misc_feature (791)..(791): n is a, c, g, or t
  misc_feature (799)..(799): n is a, c, g, or t
  misc_feature (802)..(802): n is a, c, g, or t
  misc_feature (818)..(818): n is a, c, g, or t
  misc_feature (820)..(820): n is a, c, g, or t
  misc_feature (844)..(844): n is a, c, g, or t
nagcgcccaaagccccgaaaaaaaaagcggcagcgacaaaagggacggcgaggtaatcctaggctcatnctatatcgccgacggccntctcaaggcaaacaaaaacacgagaaccgcccccacgcccgcgacagcggccacgacccccnccaaaaagccgcagagcgcggcaaacccggcaaaggnnnccccaaagaacaacaagcaggaaaaaaaggaggcggcgaggaggggggccagccgggggaggcgaccaaccgagccgaagaaaagcgaaacggccagcgncccgagaccggccaaggcaaccgngcaggaaacggagcagaacccggcgaaggcaaaaaccaaggccaccacaacgnctccaccccggcggcggagccgcgnanaacaccaaagagacaatntcgggaaaccnccccaatgaatattgaggagcccgcnttcgtngccaagcctagcgccgangctcggaggaatacngtaanatcggcgtngcccgctaaggccaaaccccgcagttcatcgtccgccgcancccccatggnagccgctgaggccccagcggcgngggaggagangccggananaaaagctactcangcccccaagaacagcccccccatccntgcngctaaaggggccagaaaaagcaattgcgcaaaaacaaggagnaagccgccgncnccacaccggccagaaacnacggagancacaaaagacaaaaaggctggggccccccgngcagagccncngccgcgccctggaaggcgcancaggaacgaganaaggtacncangcctggcaagccgccngngggcccaagcgttaagcgcgcccnatgctcccgaggcgccaatgggaagggaacaggttcacaagcgcaac

SEQ ID NO: 483747 - DNA, 244 bp, Homo sapiens
ataacaatatggcagtgaacacctttgatgtatgtttggcacttattattagagatggagtccgcctgtcgcagctggagtgcagtgggaacttggccatgtaactcactctgggtcaagcgattccttcctcagcctctgagtagctgggattacaagtgtgcgctaccacaccagctaatttttatttttttttgagacggattctcgctttgtcaccaggctggagtgcagtggcttgatg

SEQ ID NO: 483748 - DNA, 851 bp, Homo sapiens
agcggggcctcccgcggttctgtgcggacgctggcccgctcctgttgcctcgctgctgtctgcccggctcctgtgcttgtccttagcgcccgcaactgacgaggcactgcgccagctggaggccgagctgggctgccgagcggtcttggcctgctgcgtggtgctgtggtgccctgctcggacctgtgtgctgccggagggcctggcttgacatacatgctgctcgtgctgccctgctgcgtagctccccctggcccaaggggctttgcagctgacttgcttgcttatcaacaacgcggtcctctcttgcgcggaatgtgtccaaaggcttcgtggacctagagtagactccactcaaatgttgaacaacgtacttgtgtcacattgaacctattgacctaccaagtagcatcttgccttgaacttcccatgcctgtccttgaaaagagccttttccccagagaacctaggtccattgagccatcaatcgatgacacccctgtgggttaaacaattcctcggtcaccctctttgttgccccctggcaaaaacacctatatcaaaaactgtgtcttaggcttgcatgcttaggataacctttgcttgacaaagtggactaacaagtgtcatctgcctcggtctagcaatcatttagccttatagtaataccccaaggtggtcccccttgatgacagactttggaacatgcgaaaaaccactcaacatcatggttagaccgtggcgctttcgccttgacacacctcatttggacaccacccaagggattcacttaccttgagagaacacaacaagccacattgacaagtaaaaagatacgctgaccccctcgg

SEQ ID NO: 483749 - DNA, 149 bp, Homo sapiens
gtcgatctaaggatctcggaatacccagcgtaggtgactaggacaatcccagccagttagttattcactgtgctcctgtttcctcagctgaaaaaggaagttggttatgccaactttcttgggcttatatggcttttaattgaaattta

SEQ ID NO: 483750 - DNA, 103 bp, Homo sapiens
aggaagctctagctagaaaaaggtactagtattgcatgaagaacagcaactattaacactaggttgctacccacatatgttagccaaaagttaaccaattcat

SEQ ID NO: 483751 - DNA, 140 bp, Homo sapiens
taattttttaatttttctgtagagacaggtcttgctgtgtgcccaggcaaatctcaaatcactggactcaagtgattctcgtgcctcaggctcccgagtagctgggattacaggcgcccactaccacgccaacgttgggc

SEQ ID NO: 483752 - DNA, 85 bp, Homo sapiens
  misc_feature (49)..(49): n is a, c, g, or t
tccacgggggcccagcacccacttttctaatcatgaatgaacaataaancccacgctctttgtcgggctccaaaaaggtaaaaaa

SEQ ID NO: 483753 - DNA, 181 bp, Homo sapiens
gggggggggggggggggggggttggttccccttaaaaattttttccccagacggggtggcccccaaataaacggggaggccttttggggggggttggccaaattttttttgggttttccccccgccccgggggggggccctggcccaaaaagggggccccttaaatttttttggggatgga

SEQ ID NO: 483754 - DNA, 269 bp, Homo sapiens
  misc_feature (9)..(9): n is a, c, g, or t
catcgcccngaacgaggaccggagctcctggaccgcggcggacaccgcggctcaaatcacccagcgcaagggggaggcggaaccgaaggcgtatcagcttagagcctacctgtagggcctgtgcgtggagtggctccgtatacacctggagatcgggaaggagactctgcagcgcgcggaccccccaaagacacacgtgacctaccaccccgtttctgaccatgaggtcaccctgaggtgctgggtcctgggtttctaccctgcggaga

SEQ ID NO: 483755 - DNA, 101 bp, Homo sapiens
  misc_feature (5)..(5): n is a, c, g, or t
aaatnggctggggtggtgttaaggaaggtgatacaaattctttttctataacagttccagaaaaagcctcaggtgttactgataagggcaaaagtttcttt

SEQ ID NO: 483756 - DNA, 269 bp, Homo sapiens
atggtagaagcatctaacatagagaataagcattcagggatacttagctcaaatatataaaacaatattatgataaaggacacaaactagttgtagtgagcctccacagaggacaaaaaatgtaatcatgaatgttccaatagatatcaaaaacaagctgtcatacggatgattacaattgtcgctaccaggccagcaaacaaagtgtgcaagaattacgacatactgtattaaatcatataatagtcatcgctacatgttacgagata

SEQ ID NO: 483757 - DNA, 108 bp, Homo sapiens
cacgaggtgtttgtttacttaactatcataccatttgccaaaaacaaatttctctctttttctgtaaaatttatacctccttctctcccccttttaagtcatttcaat

SEQ ID NO: 483758 - DNA, 684 bp, Homo sapiens
  misc_feature (61)..(61): n is a, c, g, or t
  misc_feature (96)..(96): n is a, c, g, or t
  misc_feature (215)..(215): n is a, c, g, or t
acggttcctttcctatcaaaaaaaagcttaacacctttcatggtcaggccctcaaaaacantttcccctaattggcttcctagtcctgtatgcccntttccataacactcccaccaaacttactaatactaacatctcagacgctcaggaaatagaaaccgtttgaactatcctgcccgccatcatcttagtcctcatcgccctcccatccctangcatcctttacataaccagacgaggtcaacgatccctcccttaccatcaaatcaattggccaccaatggtactgaacctacgagtacaccgattacgggggaataattttcaactcctacatacttcccccattattcctagaaccaggcgacctgcgactccttgacgttgacaatcgagtagtactcccgattgaagcccccattggtataataattacatcacaagacgttttgcactcatgagctgtccccccattaggcttaaaaacagatgcaattcccgggggtttaaaccaaacccctttccccgctacacgaccgggggtatactacggtcaatgctttgaaatttgtggagcaaaccccagtttcatgcccatggtcctagaattaattcccctaaaaatttttgaaatagggccggtatttaccctatagccccccctttaccccctttagagccaaa

SEQ ID NO: 483759 - DNA, 177 bp, Homo sapiens
tcgtgccaggtgctgcatctggtggagcgaccactcccctcacattccacaggccatggactcacttttgtaacacactcctaccaacactgtaccaataaaaaaaaatgtgggtttttttttttttttttttttttttttttttttttttttttttttttttttttttggggggtc

SEQ ID NO: 483760 - DNA, 731 bp, Homo sapiens
  misc_feature (143)..(143): n is a, c, g, or t
  misc_feature (262)..(262): n is a, c, g, or t
gtttttttttggtttgcagcgcaagtaggtcgacaagacgcgacttcccctatcatagcagagcatcatccacctgtcatgatcacgccccctcatgcaatgcatctcttccatctatctgcgttcctagtcctgtatgcccntttccataacactcccaccaaacttactaatactaacatctcagacgctcaggaaatagaaaccgtttgaactatcctgcccgccatcatcttagtcctcatcgccctcccatccctangcatcctttacataaccagacgaggtcaacgatccctcccttaccatcaaatcaattggccaccaatggtactgaacctacgagtacaccgattacgggggaataattttcaactcctacatacttcccccattattcctagaaccaggcgacctgcgactccttgacgttgacaatcgagtagtactcccgattgaagcccccattggtataataattacatcacaagacgttttgcactcatgagctgtccccccattaggcttaaaaacagatgcaattcccgggggtttaaaccaaacccctttccccgctacacgaccgggggtatactacggtcaatgctttgaaatttgtggagcaaaccccagtttcatgcccatggtcctagaattaattcccctaaaaatttttgaaatagggccggtatttaccctatagccccccctttaccccctttagagccaaa

SEQ ID NO: 483761 - DNA, 679 bp, Homo sapiens
  misc_feature (112)..(112): n is a, c, g, or t
  misc_feature (114)..(114): n is a, c, g, or t
  misc_feature (116)..(117): n is a, c, g, or t
  misc_feature (119)..(120): n is a, c, g, or t
  misc_feature (126)..(127): n is a, c, g, or t
  misc_feature (395)..(395): n is a, c, g, or t
tcatacggcgcttcatcgggtggagaccctgtgtcgtcaatctgtatcaaggcgcgatggatgcctacgcggtgcaaaagagtacaaacaccaatgcaaatcctttgggcgnananngnnctcggnnacagcggaacaagcaaagtgatgagccacctttttgctccaatgcagaaaataacaacctcactggtaactgatgttaacttcaatggagagcaaggcggtcagcttaacccgctcatcaagatgaagaaccttggtgacactctcatgggaacagccgaagttgccgtagccacatacggtggattgaaagctttggaaagagttaccgatggcaatagcgcagtgggtttaacgacaaagttcgtaaactttttctcaggaggatnggatgctggcaaaggtttacttgatgcaatgtccccatttatcataatggcgatcttcgcattgtttctgctaggagcgactttatcaatatacctgccaatgacgcctttcattatttggttcggtgcagcaattaactggcttgttgtcgttggagaagcaataatcgcagcaccgctttgggcttttacccatcttggtggtgaaggtgacggtatgggacagcgaacggcacacggttatctattccttctaaattgcttgttccgctgggggatcctct

SEQ ID NO: 483762 - DNA, 398 bp, Homo sapiens
ggtggctgcatatatgatattggcggttagccgttcaactttgggctttggggagtccagctgacttagggtggatatagcccaccagcacagcacagctgctgtacaaaagcatggccagactgcttctttgagcaggtcccggattcattcctcctcgctgtttgggacttcccaactggggcctccagccgcccccactggtgttctcctgctgagggtgatttcagttttttcttggctggagctccctgatggaggggcaggccgtcatgtttgctgtttttgcaacttaaccacttcaaccttcagtctttggagtgtccaaggagaccgggggctgatgtggaccctcagcatagcacagatgctctataaaaatgtggtcagactgctta

SEQ ID NO: 483763 - DNA, 240 bp, Homo sapiens
  misc_feature (66)..(66): n is a, c, g, or t
  misc_feature (88)..(88): n is a, c, g, or t
  misc_feature (107)..(107): n is a, c, g, or t
  misc_feature (109)..(109): n is a, c, g, or t
  misc_feature (239)..(239): n is a, c, g, or t
tcagttcagtgttttaatctgacgcagcttatgcggaggagaatgttttcaatgttactttatctnacaataagtttccttcctatangggtgataagattggtccnanttggtgtgaggagttcagttatatgtttgggattttttaggtagtgggtgttgagcttgaacgctttctttaattggtggctgcttttaggcctactatgggtgttaaattttactctctctaccaaggnt

SEQ ID NO: 483764 - DNA, 544 bp, Homo sapiens
  misc_feature (260)..(260): n is a, c, g, or t
cactagaatcgtgctggggcctgctagtggatgggccgtctgttaaaccatacagtggtgactgatgtaaccctggcgggagagcaaggcggtcagcttaacccgctcatcaagatgaagaaccttggtgacactctcatgggaacagccgaagttgccgtagccacatacggtggattgaaagctttggaaagagttaccgatggcaatagcgcagtgggtttaacgacaaagttcgtaaactttttctcaggaggatnggatgctggcaaaggtttacttgatgcaatgtccccatttatcataatggcgatcttcgcattgtttctgctaggagcgactttatcaatatacctgccaatgacgcctttcattatttggttcggtgcagcaattaactggcttgttgtcgttggagaagcaataatcgcagcaccgctttgggcttttacccatcttggtggtgaaggtgacggtatgggacagcgaacggcacacggttatctattccttctaaattgcttgttccgctgggggatcctct

SEQ ID NO: 483765 - DNA, 239 bp, Homo sapiens
  misc_feature (14)..(14): n is a, c, g, or t
  misc_feature (38)..(38): n is a, c, g, or t
catctcagctcggnacccagtagtgcggcaggaacagntcccagctgaccgagcacgtgaatccgatgaggaccgtgatggggtgagcgttgtgacggcccaccgcattaaaggtcgcgaattcgacgtcgtcgccgtgtgtggtctcgaagaaggtaattggcctgctggtaaccacacagggtcccttgttcgcgcagaccgctggtctcccgacggcctcgtagcagcgcctggat

SEQ ID NO: 483766 - DNA, 421 bp, Homo sapiens
ggcaacctcggcctcctaggttcgagcgactctctgtgcttcagcctcccaagtagcggggactacgggtgcgaaccaccaggaccaggtaattttggtattttaagtagagatgaggtttcaccaggtgggccaggctgggtctcaaagtggtggactcaagtgatccaccgggccgggcctcccaaagtacaggcttgagccatttcgcccagggataaaggctggtttaaagcttcggggtatggggggggggtgtaaggcagcctcactgggggcaggggctgaggggtacaatcagatagaacccggaggccccgggaagcttcgagggtctatgagggacctttccgggcctttacagcccaaattggaagacccatttctcgtgagggactgtatggaaatttctaaaactagg

SEQ ID NO: 483767 - DNA, 127 bp, Homo sapiens
tagatcgagctcggtcccatggtttagcagaggcccatcgacgggggcctgggtcatcgtctggcctgcgggggtagtacgcggatttctgccattcatctccagtgtccttcagcgattacctcta

SEQ ID NO: 483768 - DNA, 633 bp, Homo sapiens
  misc_feature (218)..(218): n is a, c, g, or t
gcgtcgacaggcaaaataataaaaagagccttgggtcattgaaaaaaaaaaaggagctgccattactttggatccacatggaagtttggtgaaactctactgtgaataatttttactgttgatcccttttggacaggaactcttcaccctaagacagtagatgtaaaatctggtttcattctcctgctcctttaatcctcatccatgctcttttcttngcttgtggtatgaattgacttgataattgggtctctgacatcttccaactcccataaccaactctgtcattaggacttgcccagtattctgtattttttaaagcaagcattattgagtgcatactttatgccatgctaagtgctttatatttattcattaaatcctcaaaacaatcccattactatacctgtttcacagttgaggaaactacattagtttttctttctctctggatcattcccttcaacataacaaaaagaaaaaaaaactgttcttttcataagaaaaaaacaaagttcttgacctaagtttcccttcagctaccatcccattgctgtgcttctcttgacagcagaattttattcttataagagttgtctgcactgtgtccagttcctctcctgtcagtctctg

SEQ ID NO: 483769 - DNA, 100 bp, Homo sapiens
acccgctgatatgacagtcggcagctcagtaaattggaagagagaagaaaaattatccaattctggccaggcacgctggctcacacctgtaatcccaaca

SEQ ID NO: 483770 - DNA, 123 bp, Homo sapiens
ggctatctagaggatcccgaaggtcccatgttatttatactacattagttcttctatagggtgatagatgggtccaattgagagagcgtgacgaagcgcaacactcgctatgagctaaaaaat

SEQ ID NO: 483771 - DNA, 170 bp, Homo sapiens
aatgtgggagcccccggacaagctgaccaatctctgtgattgtgtcccatcacccttgttttgaaaaggggatgctgatggtatccacctcctaaggttgatgcgaggatgaaattatttgacctataaagtgctgagccttggaaaggacaaataaagcaatgaataca

SEQ ID NO: 483772 - DNA, 757 bp, Homo sapiens
  misc_feature (351)..(351): n is a, c, g, or t
caggcacctcggggcctcccccgggaaacccgagcatgcccccacaactatgcctcctggggcgcaggacatggccccccatcggcaggaacccaaggggcaggacatcctcggtcaaggacactcacatcctcacccattccacaccgggtgggatgcgcccactccagggatgtctcgagatgcaagcttgcacaccatggccctcataggcttaggacatccccacgcctggacccccaggctctgggggccagccagccgccccgaccacgcacactggaatgccctcataccctggacctctctcctaaatgggcatgcacccctccgagcggccatgccacttcnggagtctcccagatgggtcacccaggctcctatgcgcgtccgcatcggtaagacgtggaccatcctcacagcatgaagcgcccacaaatggatagcagcatggccgctgccacggacctccacgacgccgtgaaggcgtaacacgagacgggggcactactccccgtcgcatctccagaccgcagctcccgcaggccaccagttcccgcctcgaggccgcacttgagaggccctctcgcgctcaggaaattcacatgtttccttcctcctgttacattttcccaatatcttttctattccttggaccaatcagagatgctgtagctccatggggcaaaggtactaatccctctcagcacccccactccattcccctttttaaggtaactgtttccacaggagtacc

SEQ ID NO: 483773 - DNA, 382 bp, Homo sapiens
tgacacagagttttactcttgttgctcagactggagtgcaatggtgcgatctcggctcagtgcaacctctgcctcccgggttcaagtgattctcctgcctcagcctcccaagtagctgggaccatgggcaactgccaccacaccccactaattttgtatttttagtagagatgaggtttcaccatgttggtcaggctggtctcgaactctggaccccaggtgatccgcctgccttggcctaccaaactgctgggattagaggcttgtgccactgtgcctggccaaattccaaacattttaactgaaaaattgttttagtcatttacacaaatgccactttccaaatgttttctaggatttggagaaattcactttatgaatg

SEQ ID NO: 483774 - DNA, 729 bp, Homo sapiens
tggcaccaggaccacgtggcgttaagtctgccatctcccaggaagagaatcagaagtttctgagagcccgtgaggaaaccagagagtgcgctgtccctgattcttcactgtgatgggcgcgttcttcatggttatccgcagctgttcacaagtaactggagccgtagaatgtccactgtgatcaggagccataagaccctacccagagcccaagggggcttcaccgcagaccctcaagccattgacgcacatcatcccaaagcacgtgcgccaacatcctgcggatcaccctgatgccttgtcacatgatagcggtagctggtcctacaggcgttgagggacactgctgggtcgatgtgcggctcggattcatgccagtttctgctgctgcagccaaacgatggtcacgaagcattgtcactatcaagtaacatcaagtgctcaaagacagtggcaaccgttcagtggtacttagagtattcaacaatatacaaactagcagattctctgagcagaaacccagcacggggtcttcaccttcattcaccccacaggcgacatgcgagggagaacagcatctcagtgctgatttccaaaccaagcctgttgttttcggtgtgagggttttgggggtatgcttgtaatgctttagtgaaattgtaaatgttgggctttttattttgatgtaaactgagaataactggaaaacttagggcctgtgacctaaaa

SEQ ID NO: 483775 - DNA, 128 bp, Homo sapiens
ggagactggtttctctcacagtgaagctccatgtttatgattcttgggcctagatgtgtattagaatcacttgttgccgggcgtagtggctcatgcccgtaatcccaacacttgggaggctgagatgg

SEQ ID NO: 483776 - DNA, 667 bp, Homo sapiens
tagggctggcccgcctctcttcagtctggtgtctggccaacatggtgaaaccccatctactaagaaaaatacaaaaattagccagacctggtggcgggtgcccgtattcccagctacttgggaggctgaggcaggagaattgtttgaacctgggaggcggaggttgcagtgagccaagatcacgccactgcactccagcctgggtgacagagcaaggctctgtctcaaaaaaaaaaacaaaaacaaaaacaaaaaagacggatatcgcacctaaattattattatattaaaagaagcagagtatgagagacaggtgacatggtccagtaggaagagaagcagccctgattctaccagttaaggtgatggtatggatcgttaggctgggacagttctctccctcatcggtttgcctcttcaacataatgaaatagatggaaagtctctaaggctctatcagttcggacattctaggctctcatatacattcaacgtggagccatatgtaatccacgggtgcgtcaggttagaaacagtgagtatcgaagttcatatatggttccaggctactaccttgcaatgtggctggcgaaccctttcgaatccagaacctatcccagatctcagtagaaccatccactgtcctgttgtcacgttccaccttagg

SEQ ID NO: 483777 - DNA, 1182 bp, Homo sapiens
  misc_feature (189)..(189): n is a, c, g, or t
  misc_feature (191)..(191): n is a, c, g, or t
  misc_feature (201)..(201): n is a, c, g, or t
  misc_feature (209)..(210): n is a, c, g, or t
  misc_feature (214)..(215): n is a, c, g, or t
  misc_feature (226)..(226): n is a, c, g, or t
  misc_feature (231)..(231): n is a, c, g, or t
  misc_feature (237)..(237): n is a, c, g, or t
  misc_feature (239)..(240): n is a, c, g, or t
  misc_feature (257)..(257): n is a, c, g, or t
  misc_feature (260)..(260): n is a, c, g, or t
  misc_feature (263)..(263): n is a, c, g, or t
  misc_feature (275)..(275): n is a, c, g, or t
  misc_feature (282)..(282): n is a, c, g, or t
  misc_feature (293)..(293): n is a, c, g, or t
  misc_feature (301)..(302): n is a, c, g, or t
  misc_feature (310)..(310): n is a, c, g, or t
  misc_feature (312)..(314): n is a, c, g, or t
  misc_feature (320)..(320): n is a, c, g, or t
  misc_feature (333)..(333): n is a, c, g, or t
  misc_feature (342)..(342): n is a, c, g, or t
  misc_feature (354)..(354): n is a, c, g, or t
  misc_feature (363)..(363): n is a, c, g, or t
  misc_feature (367)..(367): n is a, c, g, or t
  misc_feature (371)..(372): n is a, c, g, or t
  misc_feature (388)..(388): n is a, c, g, or t
  misc_feature (390)..(390): n is a, c, g, or t
  misc_feature (393)..(393): n is a, c, g, or t
  misc_feature (396)..(396): n is a, c, g, or t
  misc_feature (403)..(403): n is a, c, g, or t
  misc_feature (405)..(405): n is a, c, g, or t
  misc_feature (408)..(408): n is a, c, g, or t
  misc_feature (412)..(413): n is a, c, g, or t
  misc_feature (418)..(418): n is a, c, g, or t
  misc_feature (428)..(428): n is a, c, g, or t
  misc_feature (432)..(432): n is a, c, g, or t
  misc_feature (445)..(445): n is a, c, g, or t
tagtctcatctgtctcccgggctggagtgcaggggtgtgatctgggctcactgcaacctccttctgccgggttcaagcagttctccgtgcctcagcctcccaagtagctagtactacagatgcatgccactattttttagtacaaaaatattaaaaatttgggtcgggtgtggtagcttacgcctgtantnccagcacttngggaggcnnaggnnggtggatcacnaggtnaggagntnnagaccagcctggccaanatngtnaaaccccatctntactaanaatacaaaatnagccaggnntggtgcangnnnctgtantcccagctactcnggaggctgnggcaggagaatngcttgaacncagnaggnngaggttgcagtgagcngnatngcnccactgnantcnagcnngggcnacagagcagnctcnatctcaaaaaaanaaaaagaagtaacaaaacagaaaaatgaacaaaacaatttaaatgttaaacattctattcaccaggctggtaattgtgctagcactgaggatacaaaaattaaagactctggttggcagcttacattctaaagagagcgaggaatagatttccagactctgtgctaagtgcagtaatgacagtaggcccaacatgctgtaggagctccacgtcagggggtaccctgggggcaggagggtagagggttttaagaatgtcagacagaacaatgagtaaagtaggaaggcaaatagctacaaaatatcacaagcactgtgtatagctggaaccaaaagtgtgaggcaggacctgggtggagaggtagacagggtcagagcttggagggccttgatactatgctggaagactgcactttatcttgttgataatgggatcctctgaagcatttcaagcaaggaagtgacaatgtcagttttagtttcagcaggatcagatggtagttcaatatggaggaaatatgtgtggcagaaagatatggccctgaactagggcaggtatagtaaaccttttattataagtatgtatgtgtatcggtatatagatagatataggtatatatgtatgtatatgtattccaaatgacaacagtatcatgacttattataaagttaaaagctcattttttaaaaaatggcaatatggaaaaatataaagcaaaacaattatttgaaatctca

SEQ ID NO: 483778 - DNA, 345 bp, Homo sapiens
tgggtggatcacgaggtcacgagttcgagaccagcttgaccaacatggtgaaaccctgtctctactaaaaatacaaaaattagccggccgtggtgaagggcatctgtaatcccagctactcaggaggatgaggcaggagaatcacttgaatccaggaggcggaggttgctgtgagccaagatcgcaccactgcactgcagcctgggcaacagaatgagactccatctcaaaaaaaaaaaaaaaaggcaattcctggagccccatcacgggcctgtggaatcagaaactctgaggatgggtctagcagcccgctttaccaattcctccggggtggtcccataattg

SEQ ID NO: 483779 - DNA, 2468 bp, Homo sapiens
  misc_feature (189)..(189): n is a, c, g, or t
  misc_feature (191)..(191): n is a, c, g, or t
  misc_feature (201)..(201): n is a, c, g, or t
  misc_feature (209)..(210): n is a, c, g, or t
  misc_feature (214)..(215): n is a, c, g, or t
  misc_feature (226)..(226): n is a, c, g, or t
  misc_feature (231)..(231): n is a, c, g, or t
  misc_feature (237)..(237): n is a, c, g, or t
  misc_feature (239)..(240): n is a, c, g, or t
  misc_feature (257)..(257): n is a, c, g, or t
  misc_feature (260)..(260): n is a, c, g, or t
  misc_feature (263)..(263): n is a, c, g, or t
  misc_feature (275)..(275): n is a, c, g, or t
  misc_feature (282)..(282): n is a, c, g, or t
  misc_feature (293)..(293): n is a, c, g, or t
  misc_feature (301)..(302): n is a, c, g, or t
  misc_feature (310)..(310): n is a, c, g, or t
  misc_feature (312)..(314): n is a, c, g, or t
  misc_feature (320)..(320): n is a, c, g, or t
  misc_feature (333)..(333): n is a, c, g, or t
  misc_feature (342)..(342): n is a, c, g, or t
  misc_feature (354)..(354): n is a, c, g, or t
  misc_feature (363)..(363): n is a, c, g, or t
  misc_feature (367)..(367): n is a, c, g, or t
  misc_feature (371)..(372): n is a, c, g, or t
  misc_feature (388)..(388): n is a, c, g, or t
  misc_feature (390)..(390): n is a, c, g, or t
  misc_feature (393)..(393): n is a, c, g, or t
  misc_feature (396)..(396): n is a, c, g, or t
  misc_feature (403)..(403): n is a, c, g, or t
  misc_feature (405)..(405): n is a, c, g, or t
  misc_feature (408)..(408): n is a, c, g, or t
  misc_feature (412)..(413): n is a, c, g, or t
  misc_feature (418)..(418): n is a, c, g, or t
  misc_feature (428)..(428): n is a, c, g, or t
  misc_feature (432)..(432): n is a, c, g, or t
  misc_feature (445)..(445): n is a, c, g, or t
  misc_feature (1225)..(1225): n is a, c, g, or t
  misc_feature (1233)..(1233): n is a, c, g, or t
tagtctcatctgtctcccgggctggagtgcaggggtgtgatctgggctcactgcaacctccttctgccgggttcaagcagttctccgtgcctcagcctcccaagtagctagtactacagatgcatgccactattttttagtacaaaaatattaaaaatttgggtcgggtgtggtagcttacgcctgtantnccagcacttngggaggcnnaggnnggtggatcacnaggtnaggagntnnagaccagcctggccaanatngtnaaaccccatctntactaanaatacaaaatnagccaggnntggtgcangnnnctgtantcccagctactcnggaggctgnggcaggagaatngcttgaacncagnaggnngaggttgcagtgagcngnatngcnccactgnantcnagcnngggcnacagagcagnctcnatctcaaaaaaanaaaaagaagtaacaaaacagaaaaatgaacaaaacaatttaaatgttaaacattctattcaccaggctggtaattgtgctagcactgaggatacaaaaattaaagactctggttggcagcttacattctaaagagagcgaggaatagatttccagactctgtgctaagtgcagtaatgacagtaggcccaacatgctgtaggagctccacgtcagggggtaccctgggggcaggagggtagagggttttaagaatgtcagacagaacaatgagtaaagtaggaaggcaaatagctacaaaatatcacaagcactgtgtatagctggaaccaaaagtgtgaggcaggacctgggtggagaggtagacagggtcagagcttggagggccttgatactatgctggaagactgcactttatcttgttgataatgggatcctctgaagcatttcaagcaaggaagtgacaatgtcagttttagtttcagcaggatcagatggtagttcaatatggaggaaatatgtgtggcagaaagatatggccctgaactagggcaggtatagtaaaccttttattataagtatgtatgtgtatcggtatatagatagatataggtatatatgtatgtatatgtattccaaatgacaacagtatcatgacttattataaagttaaaagctcattttttaaaaaatggcaatatggaaaaatataaagcaaaacaattatttgaaatctcactaccaagggattataccaatgtacactttttttgttttgttntttttttnagtctcatctgatctcccggcgctggagttgcagatggatgatgatcatgggacatcacgtgagaacctcacttcatgaccggagttcaacgcagattactccgtgaccatcagacacttccacaagatagacatagatacatacagagtgcagtgccacatatttttatatagatacaaaaaaatatttaaaacattgtgggatcggagtgtggatagctatacagccgtgatagataccagcaacttggaggaggccaagggatgggtggaatcaacaagagtcaggagtttaagagaccagccgtggccacagatggatgaaacacccaatcgtcatactaaggaaatcacaaagtattcaagccagagttgttgagtgacagaggagtgcacagtgataagataacacagacataactactagagagagacatgggagcagagaagaaatgggagttgaaacaccaaagaaaggggtggaagagtatgaaagattgaagtgcaaggagatcaggagacacaagtgataacatccatacgacacgtgtgggcccaaccaagaaggcaagggactcccaaatcgttcaacagaaacaaagagaaaaaaaaaaaacacaaagaaagaggagaatcaataaagtacaggggagtggacgagaaacaaaaaacagaggaaaaagtgaaaccaatggaaacaaaaaggaaacaaaaaacaagagatatcacagtagcaccaccaaagaatacagagtaaggaacacagaagtgggagcaaaaaattacacagaggatacacaccatatattagcgtagacggcaggcgacgtagattaaagacaagaaaaagacacacgtggtcagaaccgagagaaataaacggaagcacacgagagcagaaaagcagagaagcgagaagaagaagaagaaaaaaacaaaaaacaagaaaaaaaaagaagaaaaggaaaaaggaagaacataacaaaaaaaaaaactaagaaaaaaaagaaagcaaaagcgaagagaaaaaaggaaaagcaacaaaaagaaaggagaaaagaaaggaacaaagaaaaaaaaaaggagacagaagaaaacaagagaacaagaagaaaaaaagcaagaaagacagaaaagaaaggaaaaaagagaagaagacaagaaaaaacaaaggaaagaggaaagaaagagaaagacaagagaagagaaaaagaatagagaaaaaaacaaaaaag

SEQ ID NO: 483780 - DNA, 459 bp, Homo sapiens
attgagcccttgatgctgtcttccttggtgttcgccatcaagcaggatctccccaaagccatgtaatgcggccgtagatcacagacaagctggtgctgcactcacgtatgccataggaactgatacattcaggccagctgcgccaccagcggctacggtctctatgaaggactggactggctgtccaatcagttccggaaccatacgtgaccgcgagccccctccctctcactcctcttgccctctgctttactctcatgtggcaatcgtgcggctcgtggtgtgagtgacagaagctgcctccgtgggtatggtcaccgtgtgcattgcagctgtgctgtagatttgggagacgcatgctgcggccaggcttttcattttatgtcccttgtccctgtttcccatgaggtcccttctggtactcctattcggtattactccgcttttgttcttgtcgac

SEQ ID NO: 483781 - DNA, 397 bp, Homo sapiens
tactgggatagtttgtaaagaataggtatttattcttctttagaagtgtatggtataatacaatagataaagccgtctggtttaggattctctggtagttgaagtatcttttactactgaatctctctcagtgacttgtagatcaggtctataagtgttttctaatcctactgggttccatctttatatcgttgtatgtgtccaggactttattcatatcctttaaatttccaaatttatagggattttgtagttcatcatactctctaatgatccttttaatactattgtgtccattgtgactttttctcttccgtttatgacttgtgtacttttgattcatacattgtctgatcgacctactttcattctctttattttaactttcgtgcatcta

SEQ ID NO: 483782 - DNA, 413 bp, Homo sapiens
gcgaggagtatacaagccctgaggagatcgagcgcagtgcggctgagacgcagacggttaaaaaaaaaaaaaaaaaaaaaaaaaattgggggggcgcgggccggaaaaaaggctttctaaaccccacttttcggtggtcggcgcgcgcgccccaacgaagtgtaagtggaacatggggacaagacggctgcccccaaaaggagagaatccgtggcgcacagcacataaagcgcttgcgggttttccccaccccaaatagaaaaaaacccccgcggggggacaccccggcagctgttttggacacaaatctccaagagtgggggtgtccagcgagcaccaagcacggggtctctaaccacacgaggggcgccacaagcgaacgccgaagataaaaataagccccgccgggggca

SEQ ID NO: 483783 - DNA, 140 bp, Homo sapiens
gaaggcgcacgatggcgcgtccgctacatggtggactgacaaggttcacagaggtccagaaagcaggggggcctgagatcaccatatgacagacctggtccctgccgttccatgaacctgagtgaacagactgtgagcgc

SEQ ID NO: 483784 - DNA, 141 bp, Homo sapiens
gaaacaggggcgtttcctaattggtctttatcctgcgacacactttcagcagactagcctctcctatctcacagatcacaggcacccctagatagtgtgatcctgtcaagaagcattacgaaaacctctataggtaaaggc

SEQ ID NO: 483785 - DNA, 278 bp, Homo sapiens
  misc_feature (54)..(54): n is a, c, g, or t
  misc_feature (78)..(78): n is a, c, g, or t
  misc_feature (81)..(81): n is a, c, g, or t
  misc_feature (133)..(133): n is a, c, g, or t
  misc_feature (194)..(194): n is a, c, g, or t
tttttaaaatccgagttgtccggaaatcccttgcccgtgttttcccagtttttnacccgactccaaaaaaaaacctcnggnaatttttcaagggcaaaaagttcaagcccctggaccttcggcctaaaaaaanccgtgccatgggcccccgggtcaacaagcccgaggaaaaccttaagacccaaaaaccccancggaaggagcggctgttcccccttcggaagtacccggtcaaggccttaggggggccttgtccataaagcccaactggtttggga

SEQ ID NO: 483786 - DNA, 1609 bp, Homo sapiens
gggcatataaccagattaaagtgactggcactttctgctggttatgtgccaccgctcagcggtctggtaaaatagggaacacacgctagctggttctagtaatcctggtgtgtttatcacggttcagagaaactcaagctatggcatggagttagccccctatctgaacagaggaagagcccctatacaggaaggaaacagacaaacctgcgcctgcgaccgcctctgcgtcctgggtagtctgtgctgtgtaatccagcatgtgtcacagagtaagcctgatgtgacttagcttttggggtctatgtcattggtttctgatgcttgtacaaacacgcacacacaaatggataaaacagtacctctggctgttacattaccataaaccatatcagcatgcctacattttacaaatgatttctggtgttctctatagttgcttctctaacatagtactttcgtttccagcaaaagcgaaaatgtgtttgcagattcgttactttaataaaggttatccataccaataaaaagtgtacaacacagcattttctgtagattatcatggttctcagtgtaaatttgtattttatctggcatgcgttattaattattaaactgggttctagcaatacaacaatatggaagcttaactttttctcctaaaatattcgggaacagtgttggccattataaatacgggaacttttggacctatggttcggaaaaggaagtcaaacaagctctttacacgtgcctgcaacatcacaccactattctctaaacacggggtacagactaatgctgatcctacgggagcggagccctcaccaaacgacatacctattaagttaatctttttttccttttgtgtttcatacatctccctcactgatacacacaactacaacaaatactactctatcaacacagagtacatatagaactagacaacacagacatacaactaacacacaaaaatacaccagacacacacacagaccacaagaaaaaaacagaacaaggaacagagaaagaaacaaagagaaaaaagcacgggagggaagaaaacaacaagcaccaagagagcaaagagaagaaacagcgcaaaacagaaaacaggaagagagaaagagcagaaaggagaaaaagagagaagagcagaaaaacaaagcaagagaagagcacaggaaacaaggaaagacgaagagaggcaacagagagagaagagagaaagaagaagcaggaagaagaacgaaagaacgaaagaaaagaacgaggtagaaaagcaggagagaagacatcagaatatagagacagagacagaagagagacaccagagaaagagcaagcaggaagaaaaatcacgaagcaagaacgaagagataaagaagagacacagaagaaaaagatcagatacaaagacaaagaagagacagcgagacgaagcaacgagagaagccgaagaagaaagaagaggaggaagcagagaagagacagaagaagagaaaaaaagaaagagaaaaaaaacagacaagagaaagaaaaaaacataaaagacacacacacaaaaacaagacaaacaaagaaacagagaagaacacagcagcaa

SEQ ID NO: 483787 - DNA, 327 bp, Homo sapiens
atgcaggccgtatctctcttgaccctcaggtcctgggctaccatttcctgctatatgaattccggttggggcgaccctcggaccgaactccaatctcctagcagtacatgctttgacttcaccagtctttgcgaactactgtactctcttgatcccctgacttgacctccggatcgtgttaccctttgtatttctgcgctatcctattctaataggtccttttatccctagggtttccgaccccgatgttcgattttgagcttccgttggttctgccgcttttcttggttcgtttgttccacgatttgtgtccgttctgatctgggg

SEQ ID NO: 483788 - DNA, 98 bp, Homo sapiens
  misc_feature (66)..(66): n is a, c, g, or t
  misc_feature (93)..(93): n is a, c, g, or t
gtgtgtcgcgatgccggagctggcagtgcagaaggtggtggaccacccccgggtgctgctcagctntagtggtatcatcatcaaccagattcntccat

SEQ ID NO: 483789 - DNA, 623 bp, Homo sapiens
  misc_feature (48)..(48): n is a, c, g, or t
  misc_feature (78)..(78): n is a, c, g, or t
  misc_feature (104)..(104): n is a, c, g, or t
  misc_feature (154)..(154): n is a, c, g, or t
  misc_feature (165)..(165): n is a, c, g, or t
  misc_feature (168)..(169): n is a, c, g, or t
  misc_feature (171)..(171): n is a, c, g, or t
  misc_feature (174)..(174): n is a, c, g, or t
  misc_feature (178)..(178): n is a, c, g, or t
  misc_feature (186)..(186): n is a, c, g, or t
  misc_feature (200)..(200): n is a, c, g, or t
  misc_feature (203)..(203): n is a, c, g, or t
  misc_feature (214)..(214): n is a, c, g, or t
  misc_feature (219)..(219): n is a, c, g, or t
  misc_feature (246)..(246): n is a, c, g, or t
  misc_feature (248)..(249): n is a, c, g, or t
  misc_feature (252)..(253): n is a, c, g, or t
  misc_feature (256)..(256): n is a, c, g, or t
  misc_feature (259)..(260): n is a, c, g, or t
  misc_feature (274)..(275): n is a, c, g, or t
  misc_feature (282)..(282): n is a, c, g, or t
  misc_feature (297)..(297): n is a, c, g, or t
  misc_feature (307)..(307): n is a, c, g, or t
  misc_feature (315)..(315): n is a, c, g, or t
  misc_feature (317)..(317): n is a, c, g, or t
  misc_feature (327)..(327): n is a, c, g, or t
  misc_feature (355)..(355): n is a, c, g, or t
  misc_feature (368)..(368): n is a, c, g, or t
  misc_feature (376)..(377): n is a, c, g, or t
  misc_feature (408)..(409): n is a, c, g, or t
  misc_feature (422)..(422): n is a, c, g, or t
  misc_feature (430)..(430): n is a, c, g, or t
  misc_feature (432)..(432): n is a, c, g, or t
  misc_feature (436)..(436): n is a, c, g, or t
  misc_feature (452)..(452): n is a, c, g, or t
  misc_feature (460)..(460): n is a, c, g, or t
  misc_feature (466)..(466): n is a, c, g, or t
  misc_feature (473)..(473): n is a, c, g, or t
  misc_feature (476)..(476): n is a, c, g, or t
  misc_feature (512)..(512): n is a, c, g, or t
  misc_feature (516)..(516): n is a, c, g, or t
  misc_feature (520)..(520): n is a, c, g, or t
  misc_feature (579)..(579): n is a, c, g, or t
  misc_feature (586)..(586): n is a, c, g, or t
caaacatacagaagtatgtgtgtgtgggtggggtgagtgtggtggganccgttaggtcgccatctctgccaatgtggnaaaaaataaaaaaaaaaggaaaaganaaaatgactgagacagcgaggttcattcttgtgttggagcggaggcagcngccctagctcntgnnanagngggnatactggngggcgggctccctnggngtaggtgtggngggtngggggccccgcaagcgcgtagcagagngnngcnnagnggnnggccagccgcgtgnncgctccngccttgcgatcgcanaggcgctgcntgaggagngngggagggggnatctctacattggacaccatggtctctncttgtccccaggntcttgggnnagggactgagagtagaaagcgacattttggnnagcccgagggggngagggggngngggnaaggatctgtgtgggnggggcagnacagcngaggagnggnggggggagggagtgacaggaacctggggtaccaggntgcngggnagatgcagaggatgagagagcttgcgcgatgctggcaccccatgccaaccactctgcgnggctttnctcttcggagaggtggtgggctcccttcttcactgtg

SEQ ID NO: 483790 - DNA, 1128 bp, Homo sapiens
  misc_feature (1128)..(1128): n is a, c, g, or t
ggcggttgtgcatcccgtcgctcgtgcgacggggcagtggaggatcgaggacacctgggtggtgcaccgtagatgctcgtgacccaccggtggagaaccctgcgagtcacacgccaaatgcgaacaggagcgcccataccgagccgacgaacctgatggtggactccatgtcagggtgggacactgcctcatggaagacatgacggctgggatgttggaatgcctataggaatgactaacctgatcgagtgctgtatagaaaaaccgaggcatctattcaggtgagagcacgcacgctttaccaccatggacgaccggtgcaactagaatcgttgctgtgatgccccaacatactatgtccccatcataagattggcaatatctcggtcccgatgcgtgcaatgaatgctacacctatactatgtatgcccttacttgctacttgccatgggcatgccgcggtacccgtagacgcgcagggcgtcgcgcggctgtactcggctagtggtcgcttgtgatcgtggctgcttatgatgacagattgtgtgtgtatgtagccgtcgcaaacggggtgggtacaccccccagaaggcacaagcgagaacaagacccacatatagaggacacagagagagcgatgggaaatgcgcccagataacgagccaggcacgggaaatagacaccaactgccgaggacacataacgagcaatggatcggaggacgatcaggagaccacaacaatgcacgagcataccatgggcattgaaattacacgccaagcatcccaacaagtaacaaacacagtattagtaacaacatcagaagaaaacccaaaatggatgggaaccaattgaagatcaaaggacctttggcgttgctgtgatagagacacggaccaaaacagataatccccttggacgacccttaacgagacatgcacctgagtgcttcctttcgctagccccatgcattagggcacaaacactgaaccgtttgtgcatcaaactaggctctacctcatgccacgagagaccatgtgatccatagcaggtagatctcttcgaaagcttaggtggtcaggcatttggatctatcggtatgagcaccgccgataaagagacaaaacn

SEQ ID NO: 483791 - DNA, 434 bp, Homo sapiens
gcatgtctacacattagctctacagacttcaggctttcagaccatgacgacatgtgtgttgacacgtcatgaactgtgtaacaggtatacgcacggaggacacaaatggaagggagatggctgaagaaacgttcaggttggaagaagttggtcctccatggtctatagagcaagagaacccaggaggggccgctggcagataaaagtataatacaccagctactatcacctcttcatgaacgcatgccttatttatgacaatgttgcttttacagctcctctacgctaaaagccaatactatagtgtagactctaggctcccgcagggaactgggcaggtaaataaccttctgtcggctatggaccgctctaggcatggctcctgtgtacatccttgcaaaggtgcctgctgacctgctactctgtactgtaca

SEQ ID NO: 483792 - DNA, 229 bp, Homo sapiens
actctagatgtgatcccccaattttgtgtgctgtaaccatgtgaataatgtggttgagatgttaaattgagccacttattagtaatgtttgatagtagaatgatgtgctatggtgacttcatatagagatttgtttgggctacttgctcgcagtgtgccgatcatggtgtattttgagtttgatgctcaccctgtatcagagtgatttgagtaaactggctagtgctag

SEQ ID NO: 483793 - DNA, 142 bp, Homo sapiens
agtgctatgcccgcgctaccgctggatatcgcgccggatcggtgtcgaatttggccttgcattccggtgctgcaaaacaagtacgtgttccccaagtgcgtggagcggtgctccgacgccgccgtgaccgccatgccacaca

SEQ ID NO: 483794 - DNA, 806 bp, Homo sapiens
gactggccgcgcgatggacccgctgcccgcggctgcagtctggggcggcagcttgaggcggaggctgacgaggaggcggatcccccggcgtcagatctgccgacacccaggccatcgagccccagtgcatcgtgcagcaggtcccagcccccagtcgaatgcagatgccgcaggggaacccgctgcatgctgtcccataccctgcaggagctggctggccagggacaccgtgcaggtggagctcattccggagacgaagggcctcttccttgaagcatgtggcgtatgaggttccagccagcgcttcaagtcctcgggtatacagacggtacaattgactttcgtgggtcttcccaggagatgctccgtgcacaagttccccataccgtatggtggcctgcccttgccaaccaagagcaatgctgggagctgacaggggagttcatcgaggccaggaggaagagccctgaagcgcttccgtcgaactgtgtggacgcagacaaccccctgttctccgaggatggtgggtcctcaaggctcttcctgtcctttcagcgggctcggatgttgaaggaagcaagtccacaggaagtcaggaacagtgcgtcagggggaccgaaattccttgaacttgtaagcttggtaccaagggcaatggaattcatcccaggtttgacatccagggctcacgtttgccataatgcgtgtaagtgatctgggaacatctacaaatagctttaaaaagacttgagaaagggccgagaggaatcgagtcggggacatggaaagttgtgagatttctcatt

SEQ ID NO: 483795 - DNA, 995 bp, Homo sapiens
  misc_feature (89)..(89): n is a, c, g, or t
  misc_feature (933)..(933): n is a, c, g, or t
ggcggggcgcgtggctcacgcttgtaatcccagcacttggggaggccgagggggggggatcacgaggtcatgagatcgagaccatctgntaaacgggtgaacccggtctctataacacttacaaaaaaatttagccgggcgtgatggcgggccgctttgttagtccacagatactcaggaggcttgagggcagcgagattggctgtgacccccggggagccgaaggtttgccggttgacgcccggagactccggccacccaatttggccacctcccagttgtggggccaccaaggaggtggagaattccgggtcctcaaaaaacactatcagatggcaacagcggggacgacacaaacatgtggctattaatataccctttagttcctgtgtgtcatcacgggggcttggtgaaaatttttgtggaaccacttcaaaatttgcagggtgggaatatatttcaaaaaacagaaggtttatataccggttttaacacatatagttttacacgttctgtaatatgaggaaagaagaggatattcatttaaacaagaggcctgcaggggaaatattatacttttcctaacgagcaggttaccaatttcaggttgacggctacatatttaaccccacgttatgtgtccctcttaggttggacgacacacgttagggcttattttcaaattggtgtggtatacagccctcagggtgcctaacgtttgctgtcgccaataaaattctcgggagaaattaccttggatgtgtaaaacccattcgggttgtggtttacaattggccaagaattttacaagaggactggtattatatggtacattcctggaccattattactttaagattggatcctccaagtattagctgcggggggtggactagatcactatcgtctccaattttattaactctcaattantggttgtgttacaagctcttcctttcttcaagcgtacttttcacacactcgtgcgtctctcc

SEQ ID NO: 483796 - DNA, 377 bp, Homo sapiens
aaattaacatattcatcatcttacagttacctgttttcctccctgtggcaagagcaaaaatcctgactatagcaaactcttattaaaagtcctcatggctgggtgcgggctcatatctgtaatcctagcactttgggaggccgaggcaggctgatcacttgagcccaggaggtccaaacctagcttgggcaacgtggcggaaccccgtctctacaaaaaatacaaaaattaccttgcatgttggcatgcgactgtagtcccagcaacttgggaggctgaggtgggaggatcgcttgggcctaggtggatgaggctgcagtgagttttgattaagccactgtgctctagcctgggcaatagagggagaccctgttgct

SEQ ID NO: 483797 - DNA, 132 bp, Homo sapiens
ggttaatgcgggccctggctcgcaggtcagcctgctgcggccacctgagccgagttggaaatcctacggtagggccctatgtcactgaggccacccgagtgcagctggtgctgccactcctggtggctgaag

SEQ ID NO: 483798 - DNA, 802 bp, Homo sapiens
  misc_feature (484)..(484): n is a, c, g, or t
tggaaaaagtcagggaggccagggggtgggcttgaaaccagcttgggggggtctcgatccctccctttttggtctaaatttaatgtaatacgggttcttcgaatgtgtggtaggggtggggggcactccattattagcctcacctccgaggggttaagtgggagggttcttctctacttatttaggacttttctcgctctcgaaagcgaaaggcttcctcaaatctcagtgaaaaattattaaatatatacgtgcgtgtatagaagaaaagtgcaatgtgagccctctacagacatgtgatatgaggagtgtgttctacagtggtgagtgtgtgtatgtgcatctgcggggaaatagactccgcagtataagcggctgcggggagacatatctcgcggatatcaggcccgagaaacgagtgtgtttgtgggtgggagaaacacacaggctctagacattctactacgcgcccccgcgagatganaattctagttgacaaatgagggtggaaaagagggtgggaatattttgagcggcgcgtaaagagggcgtgggagcgcccccaagtaggggggtttgtattacccccttgtggaaaaacattctaggggggggaacacatcttcacgtgtggaaatgttgagagggccctctccctataatgtagaagtgggggcgaaaaatcatccaagggcgcctccccaataatgttgggcatctaagggggaaccatatatgtggcgcggaaataggggtggagcgctatcaccacaccggttaagacacccggagtgtctccagg

SEQ ID NO: 483799 - DNA, 137 bp, Homo sapiens
ctgtgttgtggcgggatttgtgtgaagggagtcgataggggacacattgatgttgctgccgtagcagcgcaggcaaataagtcagcaccccgctctgcaataccacggacccatgagggacaccctggaacagggcc

SEQ ID NO: 483800 - DNA, 84 bp, Homo sapiens
  misc_feature (44)..(44): n is a, c, g, or t
tttaggtagagctggagacgctgccgggggacggggccccccantgcttgttggggcccagggctgctgttcgctatatgatgc

SEQ ID NO: 483801 - DNA, 408 bp, Homo sapiens
  misc_feature (171)..(171): n is a, c, g, or t
  misc_feature (311)..(311): n is a, c, g, or t
gtggtatgaggtatcaatgaaatacatttaagatgtacattggtttgtttcagaaaggcgagacaagtcaaagcggggacttccaggctataggtaaatttatacatttcctggttaagattggttgagtttgtctaaggacctgggatcaacagagaggaaatgtttggnttaagacaaggattgtggagaccaaagttttactacgcagaggaagctcttagctagcaggcataagacagaagaggctgtaaaatgttttcttatgagactgaaaagggtgcctgactcttaattgattatctcctggntctggaaagaaaaaaaaaagggaatggccaggtgcggtggctcaggacgggtctggtggctcacacctgtaatctttcttaaaacgttatgaagttc

SEQ ID NO: 483802 - DNA, 458 bp, Homo sapiens
  misc_feature (30)..(30): n is a, c, g, or t
  misc_feature (289)..(289): n is a, c, g, or t
  misc_feature (297)..(297): n is a, c, g, or t
  misc_feature (303)..(303): n is a, c, g, or t
  misc_feature (315)..(315): n is a, c, g, or t
  misc_feature (324)..(324): n is a, c, g, or t
  misc_feature (336)..(336): n is a, c, g, or t
  misc_feature (343)..(343): n is a, c, g, or t
tgtgatgtccctgaagtgttcatctaaaanagctgacctcatagaagtagcgagtagattgatggtgaacaggggctgaggagcagatgtgtagaggggtggcagagggaagaaatgggggggttgttggtcaaaggaccaaagtctcagttggaaaggatgaagaggttttgacatctagtgcaccgtagggtaaccagagtcaatgggaatgtattgcctatggcaaaacacctgagagagtccatgtcgaatcctggcattcagaatggagaaaacaaagccctgnagttcaanaacatnaaaaacctgggnacaaattgnaccatgtgtagnactccanacagctgtgggtgagaaccgggcaagatgacgacgctgccatgtgcccaatacacctggcccagaggcattcagcagaggacggaggtgtacaaactgctaccagggtcaatgaa

SEQ ID NO: 483803 - DNA, 112 bp, Homo sapiens
gtactgagaggcagaggttgcagtgagccaggaacacgccactgcactccagccgggggcggacaagagtgaaacgtctgtctcagtaccaagaaaaaaaatgttcatatat

SEQ ID NO: 483804 - DNA, 209 bp, Homo sapiens
ccattcccttaccgtctcatctcccttaccgtcactcatctccctataccgtactcatctcccttaccctcctcatctcccttaccgtctggcattaagcctgtaaaatataaattagcaatacaatattacagtggatctagggtatctacagacagtctatgcaaagcggaactgtggtaacactggaggacagagagaggccctgg

SEQ ID NO: 483805 - DNA, 511 bp, Homo sapiens
gtgcccgccgccgattcccaggcgctctctctcttgcgtcgcgcccctccgcccggcgcgacacggggccctcgtgtcgtccgagttctcccggggctctgtccccccccgggcctgccgaggcttcttttggcgatgttttccaggcccgtttcgctggatttctcctcacccccggggcccagttctggcccctccccccctggccccggttttcccggcccccctcctcccccccggggggggcctttcttcaaccctaaaccaaagaaccccccagcccttgctgtcccccctactccggggcctggaagttaaagtgggggggagcgggtgaaccccagaaagcagaaccccttttgtttttcccccccccggggtttggggggggggcccctataagaactcgcccgggggggtttatcccccccggcccaattctttttttaaactttttagaataatttaaaatttccaaaaagtggcaaaaataaaaccccgtaaactttta

SEQ ID NO: 483806 - DNA, 419 bp, Homo sapiens
aattcgctacggttaagtatagcattgtccttcaaccagtcaaaagaattgggggctaagaccgaccagcagcaacccgctcaaaatggagggataaaccaaacctggtggggggaaaccccgaaaaaaagccgggaaataccactccaaaagcggaaaaggggggggcccctaaaagaagccttgggaatggggaagaagaccgtaggaataactaaaagcgggggaactggggaacggcctgggggcccttggaccggcgggcctaagcacagttcccgggccggaaaggcgcaagggccgtggaacccccggagagtgaagggggagcgcctgggtgggaagcgccaggcgggaaaagctcgcgagggaagcgcgcgaaaaaaacgcggcaaaagagagcacgaggccccaagggc

SEQ ID NO: 483807 - DNA, 244 bp, Homo sapiens
gcggcctgctgaatattgagtgaagacataaaaaagaaatgctataaaacaataatttagctacagtattgtttaatatcaaaactcaccagataatccaattttaaatgaaattgatggaaaaatgcttcccctaacgtgaactatggttagatagcattgtctgtcaggaaatatcacgaaatgcagaaataacattaatgtaggaaacaaaaataaggatttgtccttattcataagtaca

SEQ ID NO: 483808 - DNA, 549 bp, Homo sapiens
  misc_feature (107)..(107): n is a, c, g, or t
tttgaatctttcttttcacaaattggacgctgtaatacccataacattgttgtatctaactaaataaatgactgcgtatacacacataccctcaattctcttgcttncccatatttctttttcatacccctgtgctcaggacttatatatttcagtgttgagctttggtttgtgcctatatcactggtataggaaatctcctgagaggaatgactagtgaccccactctccaaatgtctaagttagtagttaccgctgattttttatgatgcctaattggcatgtggagcctctgaagttgtgataagcttgtacattaatttccgatgtcattctaaagaatgaggggtgtgagggatttatagttagaaacgacagtgcaggaaggagtattttcttgttggtcagggctggaatgaatcactgctgctccagtccaaggttcttgaatatccttagtttttgcatttaccctccttttcctttgacctttatttatttaattatgtatacacttatatatttatatacttttgctccggatcagcg

SEQ ID NO: 483809 - DNA, 1075 bp, Homo sapiens
ggtcagtgatttcagcaggtcctcagactagtgctgagtctctggggtactgggcagagctgtggctcgaattcccaggagttcgaggtggtgggactcaccagtctggccagggtgcctgtttgagcatacacatgtgtcgtgagagggccggtagatgtttgcatccagactcgaaaagctttggagccgtttgggattctgtacgagtgaatcacgagagccctaaaaacgagtatcgccgatctgttcatgcgcctggcttggcttcagacccgtactcaggctagcgtgagtcattggtcctataacggtcgatcgtacttgacggaaggttcctgaagcttcctcttgggtagcttgacacgatagaacgttgacagggctacaagaaggaccgcggaaagctgtctcttgcgtccttaatgaaacttactggcctggaactgactatcaaagaggtctatgcctctcagccgaactgagagctggcgaaatgggctgtactgagaagagcgcggtcggacgtagtccaagcagcatggggcccgtgcaatcactcctagtaatgaggataatgcgtatcatcatagggccttcagaaaaacattgccgtggaagttcactcgtgcttctacatgtaagggcaagctgagacattacagaagcttgcgtcctgcgtgggagcactggtggcgacagttgtctggcattttggactggacacagttgcattacccggacagttgcagatcgaaattgtacgggcaacttgggctgtaaagacaggttcacccctcaacgagtaaactaacaaatcttacacgatgcgacaaggactgccttcaatccacagaatccacacggagcaacttctggacaaaggcacagaggaatccagcaaagaagcccaatccaggagcgaacaacggaaggaaggaatccatcggcagagagcactacaagaaagaacgcacactgagaaaacctggagacaccaaggcggaagcgtcaaaccccataactgcaaagacgcaagcgcagggacagcagtactcgaagggcccggaaacca

SEQ ID NO: 483810 - DNA, 273 bp, Homo sapiens
  misc_feature (248)..(248): n is a, c, g, or t
gtcgctctagaggtcccacgtagccactgattagaaaagggaaatgaaatgaagatattttcttagtacaagtgcatacatcgcacaaacatgtttttaacaaaagaaggaaatactcatgatagttccagtcctcatttctgcagctggtcaggtggttgtagctggtattgataactactttattccactattcattctgtattccctttgccttcagaaagcacctcagcaggttgtgccccaanggggtgggctcaggagcccgtgcag

SEQ ID NO: 483811 - DNA, 650 bp, Homo sapiens
gtgaatgtgcctgtgtgtgtgtgtgtgtgtgtgtgtgtgtgtacatgtagcgcgtgtgcagtgaggagagagagactgaacagagagtactgtgctgctaacgaatccatctgggactaaattctgacggaggcctcagtttccccagtgttgtgcagggagtaggtcagacagggttcttcagtgtctagtatgttagctggattagattttcctctaaaatcttaccggcagatgctgaatccataaagccaaggagtgctgagggctggagtgggtgggccctctctcccacaggccccagggagatacatctggagctcctgggactctggattaagacaacgtcgtgctgatgaaagaggacggagtgctcacgccactcgtgacccggggagagtgtcccgagtctggttgtggtctggtgtgctcctagaaggggatgtggcccagacgtggggactcatagacagagagatgaagtaggggaggggatgtcctccacgcggtgatctctctcctggaggactggatatgctttacactagggtggtgggcagccctgacaccctcatcccctcctcagccaggagctctagagcaggtggtgctctcttgatggcaggaatccagaatgttgccttcccaaa

SEQ ID NO: 483812 - DNA, 637 bp, Homo sapiens
agcgggggggcgggcgcctgtagtcccagctactcgggaggctgaggcaggagaattgcttgaacccaggaggcgggggttgcagtgagctgagatcatgccactgcattctggcctgggtgacagaatgagactctgtctcaaatagtaaaaaaaagccaagaaaccagaaaacaaccaagcaaagtctgagaaactgtcacagcctagaggaacctggagacagctgatccctaaatgtcacgtgggatcctgggctggggctcctggcgagagcacaagcaagcacattggcagggaacactggaggcaacactactgcacactacaagctactgcgcgctcttagggcttaactaaaacaaacacagtgaacagcacaagaggaaccacacacaagaaaaacgtgtctcccaggcgcgcgggacccccggcgcccaatagaggcgccctagaactccccttccgaagggagggacccccgatatacacacccactttgtgcgaatccccttttagagtgaaacggcgttaaattaccaaacatctttgggccttcaaacacctgtggtacctattacgctgttaccccccgtcagtctaaccatgtggtaatccggctcacaaaattttgcca

SEQ ID NO: 483813 - DNA, 225 bp, Homo sapiens
cagaggacctgacactgaaacgtaagacgtcccagataagtttaatataaggcagacactctcaaggtcgcgcagacgggacaagacctcaaagaggagcatccggtgggtcgcactacactcgcccctttcctttaatcactcgtgcgtgtttacagaaccgtgggcgttgctgacacccttcagacagtcagcgaatgacgctcatcaacgctctatcgtgta

SEQ ID NO: 483814 - DNA, 346 bp, Homo sapiens
  misc_feature (288)..(288): n is a, c, g, or t
gtcgaccaaagctttagcagaaaaacactagctagaaatttgttaaagagtccttctccaccatgacaatgctcctgctcattcctgtcatcaaacaagggcaatttttaaagagtttcaatggaaaatcaatatagtcctgatttggctccttctgacttctttttgtttcctaatctttttgtttgtttgtttttgagatagtgtcttgctctgtcacacaggctggagtgcagtggggtttggtatcttggggtcactgcgaccttgacctctggggctcaaggnaagatcctacctcagcctcccaagtagctaggactacaaggtgtgccaccatgcctgg

SEQ ID NO: 483815 - DNA, 133 bp, Homo sapiens
tactacactgaattcacctcctctgaaaaagatgagtatgcctgccgtgtgaagcatgtgactttgtcacagcccaagatagttaagtgggggtgaattcagtgtagtacaagagatagaaagaccagtcctt

SEQ ID NO: 483816 - DNA, 523 bp, Homo sapiens
ccatgcagcgggcttcatgaacagtggcctgcccactacataggcacgggtctccagccgtggggtcagggtggcgatagacgtgagtgtcattaagggctccacaaatatctgggcatatagagcatgcttggctgatgggaagattccagtcagtgcatccacaggacgagactgctgatttggcggaacagaatccaaaggaatttgacgaagtcaccaaactccagcaaattccacacctgcaatctatccagagttgtgccaagacagggcaggagataaggagatagataaaactttgaatccatcagggaagtaagaggctaaatcctctcccccaaaacaaaaagcaaaccgatatttaggtgattggggaaaacattcagtcatgagcagcctctaggagctgttctgagaggccaaaatccctgccccattgcccccagctggcagggtggggttggttttctccaggaggcggccagggaataacctttaatttgatggaagcgtcgcgcat

SEQ ID NO: 483817 - DNA, 416 bp, Homo sapiens
  misc_feature (222)..(222): n is a, c, g, or t
  misc_feature (325)..(325): n is a, c, g, or t
  misc_feature (372)..(372): n is a, c, g, or t
  misc_feature (409)..(409): n is a, c, g, or t
aaaccttgcagaaggcctgggtaaccacagctcagctacattccctcctaccttcaggctactgagaatgcaggtccacgccagccgactctgaaagactagagctagtttacaaacactagtaatagagtgagttcccacctattgttccatagtaaaaatccccattttttcctctccgtatggcataccacacctgtgatcccagaactccagagtcangtaagaccttgtctcacccgtgcagcaagcaaaatcacggatgacaagatgaacaagcaaaaggaacttgtccctccacgtgggcaggaaaggaacaaaaggngctttgtttgagcagcctgggtttgtcgaattttacgggttttaggnattctccttaattaccggggaactggcaaagttcatnaatgggg

SEQ ID NO: 483818 - DNA, 455 bp, Homo sapiens
gggaacaagtgtgacatggacgacaagagagttgtaccgaaaggcaaaggagaacagattgcaagggagcatggtattaggttttttgagactagtgcaaaagcaaatataaacatcgaaaaggcgttcctcacattagctgaagacatcctccgaaagacccctgtaaaagaacccaacagtgaaaacgtagatatcagcagtggaggaggcgtgacgggctggaagagcaagtgctgctgagtgctctcctgtccatctgctgccatccaccatccggttctcttcttgctgcaaaataaaacactctgtccatttttaactctaaacagatatttttgtttctcatcttaactattcaatccacctattttatttgttctttcatctgtgactgcttgcggactattataattttcttcaaacaaacaaacaaaaatgtatagagaaaaaaa

SEQ ID NO: 483819 - DNA, 373 bp, Homo sapiens
caatttggaatttaaaaaggtaacccattttaacttaagttaatccaaaagcggccggaaaaccggtggactgaaaccggcctggggttgggggcccttgggggacccgttgttttttgggaaaggggggacctgaagggacattttttcaacatttaacccaagtggggtaaatacttaaggtttgtttccaaaacccagaaggttttccgggaccacaggtttaacacctttttggattcaaagttggaatggaattaatagttaaggggaatcgggaacttggctggtggaataaggcactttaaaccagggaaccgtttaaggccagcatgggggttaatgcctgaaatccaagcatttgggaaggtta

SEQ ID NO: 483820 - DNA, 1322 bp, Homo sapiens
agcaggtgtcagtgactcaatgacaccaccccctccaggtggctggggcccagtgagcctctccctgctacagggggtgggggtcctgctcagcagtggctaggtaggtggtttaaggtcttgtcaccctcactcagctgtgaactgcctctgtggagctttggctgtctgtgactaacaggtgacgctggattgctcagtgtcagctgctcggtggctcccagtgctggtcgtgtgccttagccacaggcacgtggctgtcaataacccccttacctcactggccaccaaccatgacactcatgcacctagctgacccgcgctgtgtccacgcacgtggccgtcggcccctggcgtgaacgggcttatgatccctaaagaatgtgacccacccgcccatcctcattggcgtcctccaccggggccacaagcccctggacccctgtccctctatgctaaccccatgtggcttgctcccacaggtgccccactgacatgcccacatacgcgacgacgccgtgttgggccactgcgaccccaccaaaaacatagttcccttgttccttaggtccttcccttccccggaagctcatctgtgccttctgcctagaccttcccaacgccttctgcaacaagggagtgcccacctcgcgcccacgtcaatccccattcgcgctgctaacgattctcccacgaagcgaattgcccaacagccagaccttttggctagttacttccccaaccacgaccctgctgcctttctccttgacccccacgctccccggggtgctatcaccgcgcgaccattgcttcccggaatcccctccttgggaccagcaccactcctcaagcctgctccaacttcgtttcccacccactacaccgtgtggcttgttatgcccagctcttccgaccttaggctcctccacgactttcaccctcgccagaagctcctccgtcactgttagctcagcgttttcacaaaccgcggcctcctccatacattcccactccactgggccccttctgggctatcacgcgcgggtccaagacttatcatcggtccggcacaacgcttcgcccttaccgcacactgtcccagcgctcatgcgcacacacaagaccgcgtgctagacgaccgccgcttcccataggtcaggcacccgcccattcacaacgccacatctcccttctcgcatccgcctgtggccacactcggatccacacacgacgcgatcgcccttctcctgccacgttgcgacacccccaaccgccccacgtgctgtcactcaactttcctcatcgcttcgctcttaatctcg

SEQ ID NO: 483821 - DNA, 863 bp, Homo sapiens
caaaaacgaaacgaagaacagcggagacaagacaaagtttatcagcgtatcgtggccaaaggacccgtacagcctgtcccacacggttctccaaggccctgggcacgttcggccctggcaacagggcccaagctgcgaacagacctgagcactttgggcagaaagaacaacactcagggcggacaaggcaacgcacccaaaggggtcaccacagtggggcaccccagagatcacgcacgaacacatgggcctgtgcccagtgcccctaacttgggcagaactcccctggctaaccattctttgggcaccccgcctgggcgaaaaagtcatccactttcatcgctcctggcagttaccccaaggaaaggtctttaatgatttgcccggggaccatttatactaggcccgcactctggtcacagcatcaaatgatgccctcagctactgacccgttttgtacgcatagcggatgaaccccatgggggggccttgtccccacacaaatgaaacgcagcccaaggaagtggggtgcacatctcgaccagtcgttctcgcgggacaccacaaccggggggttacaccctacgagacagcgtccttttcggtctcacaacgcacaaggctgggtcattggcagacagttgtacccctcaggttgcctggcgacgccccccccacacgttgggcccattgcaccctttccgaaccctctgtccagaggtaacaacacacttcctctggggcccccttacacgaaggacacccacttcgcgacaggagacatgtggtgtgtaacgcaccgcgaccaaattttccatcttgggcgggcgttccaaaaaaagtaattttccccccacataaca

SEQ ID NO: 483822 - DNA, 471 bp, Homo sapiens
  misc_feature (25)..(25): n is a, c, g, or t
  misc_feature (28)..(28): n is a, c, g, or t
  misc_feature (35)..(35): n is a, c, g, or t
  misc_feature (43)..(44): n is a, c, g, or t
  misc_feature (57)..(58): n is a, c, g, or t
  misc_feature (61)..(61): n is a, c, g, or t
  misc_feature (337)..(337): n is a, c, g, or t
atccccgcaggcggacattgtcgcnccnacagggntgtcgcanncgccgtgacaggnntcntccagatcaaaaattaccaaagccatcagtcacgctctctcaaataaatcgtgcgtcaggctacttcacacaacgcacttgggtcgatggaaagtgccaatcgcagaccgtccgggtgcaaatcgtcggccgaacggttgagtacatcgaccaccagttccaccccacgggcttcgatgcggtagcgaatcacattgcccaacaggctgtggctgcgcaccagcgcgtccagttcgccgctgcggctgagctcgatggcttccgggcgaatggcgntgcgcccgttgatcgggcgctgcaacagtttgctggccttgtcggcgtccagcaggttgtagttgccgataaacccggcgggcaagctgttcaacgctgccaagcacaagcatcagcagcagttccagggtacc

SEQ ID NO: 483823 - DNA, 167 bp, Homo sapiens
tgtacgacgtaagcagtggatgtactaggggaatgtaaaactgcaaacttaaaaactgcatcttcttgaagcatcagttttactttaccaaatggtttagagtcataagagtgacctattttatataaaaagttatattatagaataaaatgttcatacgcatagac

SEQ ID NO: 483824 - DNA, 418 bp, Homo sapiens
  misc_feature (93)..(93): n is a, c, g, or t
  misc_feature (164)..(164): n is a, c, g, or t
tcaccatattctcaaggctctcagggtccctttttcttggcaaccgttccagtccattgcgagggacctttggtgttcacccgtggcatttantagggagcttgggtccttaaccagaaccttttttggccaggattagagaatacaaatctaagcgccagacnatctggaggacctgttgatgctagttcaaagtatcaccaaaagctggaaagggagctttttaagctcaagcaaatgtttggtaatgcagacatgaaaacctttccccccttcaaatttgaagatccccaatttgaagtcctcgaaaaacccccggcctgaaaaaataaagtaaaattaatttggtaatttgtcccggattagttggccaactagttaaaagtttcagaataaacatgcctttcataactgtcca

SEQ ID NO: 483825 - DNA, 415 bp, Homo sapiens
catctagcgatcctatccccggctctgggtattacccaaaggataagaagtcattataccagaaagacacttgatggcagtacaagtcacaattgcaaagatgtggacaccaacccatcaaccagtgagtggataaataaaatgtgtatctctacaccatggaatatgacttagcaataaaaaagaacaaaataatgtttgtggttttttttttttggcagcaatttgggatggcgctggaggatattatcctaggtgaggcacttcaggattgtaaacccaaattctgtgtgtccccctttataggtgagagctaatttatggttccaaaaggttatccagagtgccttattgccccctagagcctcaaagtggggagggtaagagggggccaaggtataaaaacccccttttt

SEQ ID NO: 483826 - DNA, 208 bp, Homo sapiens
  misc_feature (29)..(31): n is a, c, g, or t
atagcattttcttggggactttctagtcnnnagagctctctccatactggacctgcagccgggcgccccagtggagggcagccccgcactccgtggtccttggtctggaacctcggtgctgcccagggctggaggggagctgcttgcagagtctgagcctggcaccctgcactgagctatggaggcggctgagaggcctggggcgccg

SEQ ID NO: 483827 - DNA, 170 bp, Homo sapiens
gacgttcggcgcaccgtgcgtcgctgcgcccacgacctgcaccgcccgttgtgcggcggcctggttgtcgccgtactgcaccaccgccggtttgcggccggctttctccttggcctcgttccacgcccgcaggactttttcctggttggtgccggcgccgacgctgctct

SEQ ID NO: 483828 - DNA, 359 bp, Homo sapiens
aaaaaaaagggtccaagggggttggggggggggaaaaaaccccccctgggccctaaaccccccaaaaaggtttttttatcccccccctttttttctccccaaaaaaaaaggacccccccggctttgggaaggggggtaattcccccacaggggtttgggccggcccccaagggaagggggaccccccccccttttttttggaaaatttccttttttccctttgggggggggtccccccccccccccttgggtttggtttttccccccatttggaatttttttttgggggggacccgggggtttttttttaattgaaaaaaaggcctcgcccccaaagcccaaaaaaaatgggggttgga

SEQ ID NO: 483829 - DNA, 288 bp, Homo sapiens
ttggtcactatgtgttaaaatgtgatggtaccttctcccattatacgtagagtttggcacgaggatatgaaaaacagttttctatctttgctttggactagtggtgttgttccttaagatacgaagtcacagactattagatattatctcacattacctcctcattttacatactgcaaaataaaggctcaagtgattttcttgccccaggtttcactggaaatgcaaactagactaagaaacaaattcaacactaggtcggccgtggtgactcacgcctgtaatccc

SEQ ID NO: 483830 - DNA, 1096 bp, Homo sapiens
taaacatagtattgagactctcgctacgatctgatagtaatttaacctaccagactcatcttggtcgcccatgtaggacagcaaagagactcctggtgtggcgcgcccgaaggtggtatacttcctaacaatgacacctcctaacatgcactgctaaggtgcgctgctatgagtgcaagtaatgtgtggcctcattgtggtgcatgctgacttgcgttgcgtcagcctgcctactgcatgccggggtgcctcagtcctcgttggtgacgtgctgcacagtgctcccgagagactaatactcgagtgcataaggactccaggtatcactagaccataaagctactgaccacctagtaaagactgatactcgtggcggggcagtcattattagggacacattggtactactctggtactcttggatgcacatgactaccttggctgccatagatgaaggccctggcctaacttgtacgtgacagtctccacgtactccactgcaagacggtttcattcctgagcccactctgagtctactttcgcttggctccatggctgatggatgcagaatcacatatggacttacaacggagcatacaagggtcgtctagacctctgtgaggaaacaaagggctctgctggcgaacagtagaaatggtggggtcagcacgaccattgggcagtgaatggggcaagagagtccatcaatgctgagttggagctacccagtaatccccctcagtcttgtgtgcctgtgtactggtgttcttcctggacctccactccgtgttcgaggggctggccggtaggctgtagtgagaaccgggctcgggccatggagctgtgctcgggttttgctgctcaccagggcattctggtgataggctgtctctgcggatgtggagaagcacttaggcacaagttggtggtgctgaggaatctacttttcatgcttaagcttaggattggtggtgccgtcggaaatggaggaccttagaccatgcgaagtggttaaagatgcatgaaccttagaaacaaggaactgccgagtcggttagaaagacgggagaaaccaaaacgacagagatataaaaga

SEQ ID NO: 483831 - DNA, 181 bp, Homo sapiens
agtcgacggaagcagacctgaggttattgagccaataatgacgtgaagtccgtggaagcctgtggctccaaagaatattagccgtagatgccgtcggagaatggtgaagggagactcgaagtactctgaggcttgtagttagggtaaaatacgagacccacgtaaaatttgtaataacgca

SEQ ID NO: 483832 - DNA, 474 bp, Homo sapiens
  misc_feature (144)..(144): n is a, c, g, or t
gggactttgggtgaggcggttcagccatgaggctgggtgtgcttttctcgggggccctgctggggctactggcatgcccagtgggcacagggaatgactgtcctcactaaagaaatcaggtacttggctgtcatccttcacggntgacacctcagcggttacagagcagcactggaacgaaccagtccacaggactagcaagagccacaaaatcatcacgtcacaggactgacacaccgacaggcaccaccagcgacggacccatgattgccactctacaagccgcaccatccacgagccatggaaacgtcacgagttcatccaactaagcaatagcactgacagcagccagggaccctcaatctgccattcatagtcctgcgcaccactagtcttggaaatgccacggttcatccaataagcatcatgcactgtcagcaggcgaggattcatcagtttctgcccagccagaac

SEQ ID NO: 483833 - DNA, 1151 bp, Homo sapiens
gacggacgtgcggacagcccgcggggaggatgtgcacagagggcccaggaggagcctcaggagccggactgacgttggtcaaccgagtcccagggagactcttaagggaaattaaactgcagagtgcaagagatgcctcagtcaagtcgagacaagaaacacggcgggttcatccccaagccccagagagtgactagagcccaccgatgacacggacaccgtcggctgtgtgtcacttcaccatgggttctgggcctcccgacgaggcgtctgagattgacaggcgatgtgcctcagacattagcatccattgttctgtctttcctgggcaagttattcatccatggtggccagccgcagcgacgaaactggatttaggatctactggagctgcatcccagaagttattgctgcaattgagcaaagccaaactgaacatcggtaaaggaggttcaacacagtttgtctggaccagacttgaagagactgaccaagctctcacagaacccgaggtctgagcacttgctgacagaccggccatccttacacttgcgggggaagcagcatacattacacagaatgcagctgaaccagacaagaaggggagcaggtaaccacacgcagacaacagcgactgagcctgggctagacccagggatagaatggacgcgattggatacagtggatagggcatgcacactggaaggcatcactgagcatgggcggagacgcaaactcggcagggaacgaccagatggagctgaagcatctacactgcatgagaaatcacgcggaacaagaggagggccatgacggtcgaagccaggcgaaaatctgctacggaggcaaggccatcccgaccaaggcacttacagcagctcagagcacaggaagcgaggtgacaatacagtacaaggacaactgatcaccagcaccaatggcacaggaactcacagacaggacgaagtgccacttacgcgggaccaaacagggcaggaagcgcaaagacaaaacaagagaaccacagagaaacaacgtaaagcacagggacagagggaaaaaatggacgagaaagacaaggtaaagagaaaacaaaacaagaagaacaaaaaaacaaaaacgaaactgcacaaaagaacagaacgaaacaa

SEQ ID NO: 483834 - DNA, 1962 bp, Homo sapiens
ttgcttgctgcttctccttctctccctctcgctgtcttgggtctgctcgactcagtgccggtcttcgatcgtctcctcccttctgctggcactgtcgtctgctgcatcgtcacgcgagtcctgtacattgctttgctctgcttccgtggctctgttcctctcggtgtcgtcgcgtgatcttatatcactatagcatatcttcaccgttttcatctcgtggcttcattcgtgttctgggtgcctcatggactggctcatgcttgagagtgagtggacgtccacgtgccctgctttcatcgctggtagctccctgtagtgctatcacgtctgtccctcccttgtgtgctttcaactgatgacgcactggcgagtgccgtgtacttgctcatatcatttgctgcttaggtgggtccccatactgggtgtgcgtcgctccgtgccttgctacttgtggtggcgcgagtcgtgtggacgctcgttgggtgtgactgtgtgtcgtgtggactaattgacgtgggtgttacatcgtggttcgttgcttagtaattgctcgtggcgtcttgtgcttatattctctcttgtgttgagctaggttggtcggggctcgcttgtgttgcctttcattgtcgttctctgatctgggtgcatggtttgtggtatcgcgtgtagtccttgttcgtatccgctcgtatacatactaggtcatgggattgcaattacggtataaatgggttgttgttactatatatcgtatgttaagttggaagtccttgctggccatgatagtgcgtggtatgcctcgcgtctgctacttgtggtttgtatcctctagactgtagaggcgtgtgtacatcgctcgtttccttagaggttcgaatgtgcatctaccatagtatagtattattgaattgggtcatccagagtccgctatggctgctgcagtggtggaaccaatctaggtgcgttgtctaaaatcctggggcctctggcgggtggtgtattcatatcgtaaattcccggttggcctcactatgggtgtattgcaatcatcaatgtcaagtctgtgctgtttggcccctggtgtaagagtgattggggtgaatacatctgtggttgaactggttcatttttggtctgtgcctcaatcacgacgtggtgtgttgttcatatgttgttgcggccttgcgtggtaatactggtagttgtatatgcacatgttggtgtagtattgtgagagcgcttgtgctccactgttggtagatggatggtgtcgggtggccatgtgtataccatcaatggacatatggatccgtatgtattatgatccctcttgttagttgtgatacgtcctgtttgtcataatttttttaagttataaatggtggacctatattaaccattggtaatcgtcgtgataatcctatgatagtccgcacaggcaatgtggttaccctgtatatagtcgtagctcaagatatctctggccaattgtattattatattttgcgtgtgtttggtggtctgtatctctgcaggagtcatagtatatctctctatatctctgctcggagtctaggtatctagtgccttgagatgacctgtctatcctaggtctagatagtctgatactgatcctatatcgtcatatgtgagtcgcaagtaatcttgaccaatctggatatcaatgttacctctagggataatcagcgcaatcctatttctagagtctcatatcaatcaatagggtttacgatcctcgatgttgtgatcatggatcatcccaattggtgcagtccgctattaaaggttcgtttgttcaacgattaaagtcctacgtgatctgagttcagaccggagtaatccaggtcggtttctatctacttcaaattccggcctgtacgaattggatcatagagaaataaggcctacttcacaaagcgcaagtcccccggtaaatgagta

SEQ ID NO: 483835 - DNA, 120 bp, Homo sapiens
  misc_feature (72)..(72): n is a, c, g, or t
gtgggcagtgggcacatttagtaaaccgaaggtgtcagccccccactctcccagcctgggctatgttcaggnctgacaccgtcccggggactaggagaggaaaggcttgtgttagagggg

SEQ ID NO: 483836 - DNA, 391 bp, Homo sapiens
cccaccccgatctccttgaccctttctgcggacaatcgccactgcgtggccactgtacccaatttaacctcttaatgcgttcgttaaccttagtttggacatctcagtttccctctgaagaaatggcaaaatgtgttatggtttagtgatggcccgcagcggtccccacaaacctctcagggtcgcgtcgctgctgtcgtgactgtcaccacccttccgctgagaattcgaggacgtggtgctgtgggtgctgcgagtccccggggcggcaggcgctgcaggaagggccgcctacaatttgtccaggaagttgtccagggcagggatgccttctttcaggcccttgcgcttgcgggtctccgccaccacctggctggggcggctgctgttg

SEQ ID NO: 483837 - DNA, 1073 bp, Homo sapiens
gagtcggcgggcggcaccaagggcagcagccaagaaggcgtcggcggcgcagctgcggatccagcaaggacataaacgacgctgaacctgcccaagcacgtgtgatatcagcttctcagatccagacgacctcctcaacattcaacgctggctcatcatgcatcctgactgcagcggcttcatacaagcagctgcggaagctttgctgcttcacgcttcttaacggctgggaccaagggcttacccacgcactgaatcccaccacacggctgacagctgctgacgagcaaatggctactatcacacccgaacgattgcaacctcgcagaggcacacgatctgacacatccaagcaatccatcatgagcaggcacctggcacagctcagcatcactctaccgacctaacacctcacagtaacgttatactaggaccatgcgaggtagtcgtcgattcattgcgcagcccacataccaccagagagacgccaactgcagcacaacggaacggccagcagcacggctccatgcatgacacaaccctggcaggcatgatcactgcagctagacacagtgccacgccgtcatcacaatgccagagaggcttgggcctaccactcaggcatccagccctaacttatgaagccagctagcactgacaactacgcgcaaggccgcactacaccacaccccatgccacaggcacaacaaagccccctgcgccatcccccgtgccaacactactgtctcatctggacagagagcacacctggacgatcaaggagagctaatcgagcgcacgtagctggatccagagatgaagagagggcacaataccccccttagacacctatggagcacccattatagccccatcaccccacctataacacttgggccccaagtgacttggccccgcccataacggataacaattcaaccagaagtctctctacagttagtacagcaaaacaccaaatagcacagaactactcacaaggcgatcaagaaggcaaacactagtccacttccacgacctcgcgagaaacccaacatcaacctaagagtcatcag

SEQ ID NO: 483838 - DNA, 107 bp, Homo sapiens
tcaatggaagatagatggtcgcgtggccaccgtgcggcctccgcatccgctcaccgtgtccaaacactcgacccaccacttacatttacaccgtgcggctgctcata

SEQ ID NO: 483839 - DNA, 161 bp, Homo sapiens
tgctgtatagagacttgtttaaatttcagaaaatagataaataatataaacatacagcatttttttttttggtcttttgggcctcttctagggacgctcctgcgcagactaatggagctccccaggctaggggtccactcagagcctacaccagagccaca

SEQ ID NO: 483840 - DNA, 143 bp, Homo sapiens
atcgagctcggtacctgtgtgctccatccaccgtgtgctcgggagacaaaaggttattttgaggagattgatttattatataagattaatgggctgggctaggtggctcatgcctgtattcccggcacttggggagcacacag

SEQ ID NO: 483841 - DNA, 227 bp, Homo sapiens
gaggtctgctctaccagacacgaaaccccagatagtacgttctcatcactcttgaacctctcaatcaatgagtaagcaacgtgtgtatcgagtaagaaattaaatttcttttataagacttagcataaaactggtgtgagaacctgggaatacttagtcacaatttggatataaaattatttttaatttgttggcactgaggtaatataatattttctcagtatgat

SEQ ID NO: 483842 - DNA, 1078 bp, Homo sapiens
ggcgcccaagggatggcgatggcgtaccttggctagatcactggcccgattgaagtccgagtcactagtttcccggatagtccagctgcacatgaatagcaacagcaatgagagccagtcagaaggacttgtgaaaattcaagtgaatcaagtgaaacttctgtgaacaaaggctccaggaaaccgaaggtgaagctaaaactctacgcgctattataagcaggccactgaaggaccttgttaacatgcccaaaccaggtgtattggacttgatcaacaaggccaaattgggacgcatggaatgcccttggcaagcctgcccaaaggaagctgccaggcaagaactatgtggactcgggtgtcagttgacgtccttcatgtggaatcctctagtcacggtgacagcctggaaacagaccaggaaattcaccgtgggtttgaaactctgggtgggtgaccttcggaagattggatctacaaagatcatgtcaaccggccacaacacgaaccatgccataaaccctgagatgttcatgacattattgcgtgcccttagaaggtgccaggaaggatgactcaatcatcacgtggtttcaccaggaattggtgtctcttacacgatggggactgatcttgacatcactcccctgatttcccccgggtgttgatctacgaacacgttacatatgcggaccggaagactggggccgcaaagatttcaacccagtgtggggacacgccccgggacttctacccattgaatacaacgagtaattgcaggaccaacaactcgccaccaaccaaggggacttacatcctcgccactgtatttgtttgtgttatcttcaatttattttcttgtttatgtctaagtccgacgatcccgcaccgcccgagttctagcgcacgcacactacccactaccgcaacactagccaccctgacgcccccacacccatccgctcacctccatacccctccctcatccaatccaccactgactccacacctcgatcctagcgctcaccgcacacaccaccgatccacaactcaccaccacaccaagcgatccgctgtt

SEQ ID NO: 483843 - DNA, 3926 bp, Homo sapiens
cccacccagaaggggtgcctctttggggctcattcctgtacctaccaacagcctgacccgcggctcctgttcagctgcccctgagggcagggcctggcaagaaggcatccgaaggcgtctccatgaggttcttcaccaagctggaccagctcatcgagttttacaagaaggaaaacatggggctggtgacccatctgcaataccctgtgccgctggaggaagaggacacaggcgacgaccctgaggaggacacagtagaaagtgtcgtgtctccacccgagctgcccccaagaaacatcccgctgactgccagctcctgtgaggccaaggaggttcctttttcaaacgagaatccccgagcgaccgagaccagccggccgagcctctccgagacattgttccagcgactgcaaagcatggacaccagtgggcttccagaagagcatcttaaggccatccaagattatttaagcactcagctcgcccaggactctgaatttgtgaagacagggtccagcagtcttcctcacctgaagaaactgaccacactgctctgcaaggagctctatggagaagtcatccggaccctcccatccctggagtctctgcagaggttatttgaccagcagctctccccgggcctccgtccacgtcctcaggttcctggtgaggccaatcccatcaacatggtgtccaagctcagccaactgacaagcctgttgtcgtccattgaagacaaggtcaaggccttgctgcacgagggtcctgagtctccgcaccggccctcccttatccctccagtcacctttgaggtgaaggcagagtctctggggattcctcagaaaatgcagctcaaagtcgacgttgagtctgggaaactgatcattaagaagtccaaggatggttctgaggacaagttctacagccacaagaaaatcctgcagctcattaagtcacagaaatttctgaataagttggtgatcttggtggaaacagagaaggagaagatcctgcggaaggaatatgtttttgctgactccaaaaagagagaaggcttctgccagctcctgcagcagatgaagaacaagcactcagagcagccggagcccgacatgatcaccatcttcatcggcacctggaacatgggtaacgccccccctcccaagaagatcacgtcctggtttctctccaaggggcagggaaagacgcgggacgactctgcggactacatcccccatgacatttacgtgatcggcacccaagaggaccccctgagtgagaaggagtggctggagatcctcaaacactccctgcaagaaatcaccagtgtgacttttaaaacagtcgccatccacacgctctggaacatccgcatcgtggtgctggccaagcctgagcacgagaaccggatcagccacatctgtactgacaacgtgaagacaggcattgcaaacacactggggaacaagggagccgtgggggtgtcgttcatgttcaatggaacctccttagggttcgtcaacagccacttgacttcaggaagtgaaaagaaactcaggcgaaaccaaaactatatgaacattctccggttcctggccctgggcgacaagaagctgagtccctttaacatcactcaccgcttcacgcacctcttctggtttggggatcttaactaccgtgtggatctgcctacctgggaggcagaaaccatcatccagaaaatcaagcagcagcagtacgcagacctcctgtcccacgaccagctgctcacagagaggagggagcagaaggtcttcctacacttcgaggaggaagaaatcacgtttgccccaacctaccgttttgagagactgactcgggacaaatacgcctacaccaagcagaaagcgacagggatgaagtacaacttgccttcctggtgtgaccgagtcctctggaagtcttatcccctggtgcacgtggtgtgtcagtcttatggcagtaccagcgacatcatgacgagtgaccacagccctgtctttgccacatttgaggcaggagtcacttcccagtttgtctccaagaacggtcccgggactgttgacagccaaggacagattgagtttctcaggtgctatgccacattgaagaccaagtcccagaccaaattctacctggagttccactcgagctgcttggagagttttgtcaagagtcaggaaggagaaaatgaagaaggaagtgagggggagctggtggtgaagtttggtgagactcttccaaagctgaagcccattatctctgaccctgagtacctgctagaccagcacatcctcatcagcatcaagtcctctgacagcgacgaatcctatggcgagggctgcattgcccttcggttagaggccacagaaacgcagctgcccatctacacgcctctcacccaccatggggagttgacaggccacttccagggggagatcaagctgcagacctctcagggcaagacgagggagaagctctatgactttgtgaagacggagcgtgatgaatccagtgggccaaagaccctgaagagcctcaccagccacgaccccatgaagcagtgggaagtcactagcagggcccctccgtgcagtggctccagcatcactgaaatcatcaaccccaactacatgggagtggggccctttgggccaccaatgcccctgcacgtgaagcagaccttgtcccctgaccagcagcccacagcctggagctacgaccagccgcccaaggactccccgctggggccctgcaggggagaaagtcctccgacacctcccggccagccgcccatatcacccaagaagtttttaccctcaacagcaaaccggggtctccctcccaggacacaggagtcaaggcccagtgacctggggaagaacgcaggggacacgctgcctcaggaggacctgccgctgacgaagcccgagatgtttgagaaccccctgtatgggtccctgagttccttccctaagcctgctcccaggaaggaccaggaatcccccaaaatgccgcggaaggaacccccgccctgcccggaacccggcatcttgtcgcccagcatcgtgctcaccaaagcccaggaggctgatcgcggcgaggggcccggcaagcaggtgcccgcgccccggctgcgctccttcacgtgctcatcctctgccgagggcagggcggccggcggggacaagagccaagggaagcccaagaccccggtcagctcccaggccccggtgccggccaagaggcccatcaagccttccagatcggaaatcaaccagcagaccccgcccaccccgacgccgcggccgccgctgccagtcaagagcccggcggtgctgcacctccagcactccaagggccgcgactaccgcgacaacaccgagctcccgcatcacggcaagcaccggccggaggaggggccaccagggcctctaggcaggactgccatgcaggtgcgctgcgccacacgtgggttcgtgtgcatttgtgtgtgtgtgtgcatgcgtgagtgcgtatgtgtgtacctatgcatatgtgtgtgcatgtgtgtgtgcacgcatgcatatgtgcgtgcatgtgtgaacgcatgcatgtgcacacatgcgagtgatggtcctgggaactgctccatgagaagggagagtcaggatttgaacccaggtctgcctgtcccacacatccctgaccctgcattgcctctgcagcagttgttaaaaggaagaaaggcggggctgtggataaacttagtctagtgtcagtcccagaggaagaagattccataaagaaaaggagcctaaatcatttatatctcattgttattataaatttgttttgcaactgagtttcgccaggtgatctgcctgcctgggcctcccaaagttctgggattacaggcatgagcactg

SEQ ID NO: 483844 - DNA, 156 bp, Homo sapiens
ctctagcggatcccctgcgtttcatatgcaagtctcaaggtggcagaattggtcagatttatccatatttcctgtattccattttagcactgacagtcaagttgcctacgagtgtgaacaaatactgacatgtaaaggggagttacactcatatgt

SEQ ID NO: 483845 - DNA, 3703 bp, Homo sapiens
  misc_feature (29)..(29): n is a, c, g, or t
  misc_feature (555)..(555): n is a, c, g, or t
cttcctgctctgccaatgcattggcaggnagtcaagttgggggagcaggttgtgtgtgtgaaagaaatttcaaccctcatcttccatagtggacagtcaaaaatgtaataggacataatgaaaactgaaacatcggaaagtattaatctaagcattttttttttaagaaacagagtagaattccaaaagaatccattaagagagttgaaattggttgcctatagggagctggacattgaagagaggttgggttgtggaggactattgtttgcaaaaaccttatagaacaacgactcttttaattgttgatgacagtaaaatgtaaaattaaatttagatataaattaaaaacaaagcaaaagaaggaaaggaggaagagtaaggaagaaaggagggagggagaagaggaggaagaagaggagaaggaagaagagagaggggaaggagggaggcagggagaaagatgaaaagacgatcacgctgtctctgctctggccaggccaactcttgcttgttccagacatcaccctccccaagcatgagcctctcttgggnagagcagctggaagcagagggagctgggagaccagacacaaactcggggctcagcttggggacgggagttgatagtcaggtgcctggaacataatggagaccgtccatattggttgaatgagtggatgaatgaattaatgaatttcttttctcttaagtcctgcagctcattaagtcacagaaatttctgaataagttggtgatcttggtggaaacagagaaggagaagatcctgcggaaggaatatgtttttgctgactccaaaaagagagaaggcttctgccagctcctgcagcagatgaagaacaagcactcagagcagccggagcccgacatgatcaccatcttcatcggcacctggaacatgggtaacgccccccctcccaagaagatcacgtcctggtttctctccaaggggcagggaaagacgcgggacgactctgcggactacatcccccatgacatttacgtgatcggcacccaagaggaccccctgagtgagaaggagtggctggagatcctcaaacactccctgcaagaaatcaccagtgtgacttttaaaacagtcgccatccacacgctctggaacatccgcatcgtggtgctggccaagcctgagcacgagaaccggatcagccacatctgtactgacaacgtgaagacaggcattgcaaacacactggggaacaagggagccgtgggggtgtcgttcatgttcaatggaacctccttagggttcgtcaacagccacttgacttcaggaagtgaaaagaaactcaggcgaaaccaaaactatatgaacattctccggttcctggccctgggcgacaagaagctgagtccctttaacatcactcaccgcttcacgcacctcttctggtttggggatcttaactaccgtgtggatctgcctacctgggaggcagaaaccatcatccagaaaatcaagcagcagcagtacgcagacctcctgtcccacgaccagctgctcacagagaggagggagcagaaggtcttcctacacttcgaggaggaagaaatcacgtttgccccaacctaccgttttgagagactgactcgggacaaatacgcctacaccaagcagaaagcgacagggatgaagtacaacttgccttcctggtgtgaccgagtcctctggaagtcttatcccctggtgcacgtggtgtgtcagtcttatggcagtaccagcgacatcatgacgagtgaccacagccctgtctttgccacatttgaggcaggagtcacttcccagtttgtctccaagaacggtcccgggactgttgacagccaaggacagattgagtttctcaggtgctatgccacattgaagaccaagtcccagaccaaattctacctggagttccactcgagctgcttggagagttttgtcaagagtcaggaaggagaaaatgaagaaggaagtgagggggagctggtggtgaagtttggtgagactcttccaaagctgaagcccattatctctgaccctgagtacctgctagaccagcacatcctcatcagcatcaagtcctctgacagcgacgaatcctatggcgagggctgcattgcccttcggttagaggccacagaaacgcagctgcccatctacacgcctctcacccaccatggggagttgacaggccacttccagggggagatcaagctgcagacctctcagggcaagacgagggagaagctctatgactttgtgaagacggagcgtgatgaatccagtgggccaaagaccctgaagagcctcaccagccacgaccccatgaagcagtgggaagtcactagcagggcccctccgtgcagtggctccagcatcactgaaatcatcaaccccaactacatgggagtggggccctttgggccaccaatgcccctgcacgtgaagcagaccttgtcccctgaccagcagcccacagcctggagctacgaccagccgcccaaggactccccgctggggccctgcaggggagaaagtcctccgacacctcccggccagccgcccatatcacccaagaagtttttaccctcaacagcaaaccggggtctccctcccaggacacaggagtcaaggcccagtgacctggggaagaacgcaggggacacgctgcctcaggaggacctgccgctgacgaagcccgagatgtttgagaaccccctgtatgggtccctgagttccttccctaagcctgctcccaggaaggaccaggaatcccccaaaatgccgcggaaggaacccccgccctgcccggaacccggcatcttgtcgcccagcatcgtgctcaccaaagcccaggaggctgatcgcggcgaggggcccggcaagcaggtgcccgcgccccggctgcgctccttcacgtgctcatcctctgccgagggcagggcggccggcggggacaagagccaagggaagcccaagaccccggtcagctcccaggccccggtgccggccaagaggcccatcaagccttccagatcggaaatcaaccagcagaccccgcccaccccgacgccgcggccgccgctgccagtcaagagcccggcggtgctgcacctccagcactccaagggccgcgactaccgcgacaacaccgagctcccgcatcacggcaagcaccggccggaggaggggccaccagggcctctaggcaggactgccatgcaggtgcgctgcgccacacgtgggttcgtgtgcatttgtgtgtgtgtgtgcatgcgtgagtgcgtatgtgtgtacctatgcatatgtgtgtgcatgtgtgtgtgcacgcatgcatatgtgcgtgcatgtgtgaacgcatgcatgtgcacacatgcgagtgatggtcctgggaactgctccatgagaagggagagtcaggatttgaacccaggtctgcctgtcccacacatccctgaccctgcattgcctctgcagcagttgttaaaaggaagaaaggcggggctgtggataaacttagtctagtgtcagtcccagaggaagaagattccataaagaaaaggagcctaaatcatttatatctcattgttattataaatttgttttgcaactgagtttcgccaggtgatctgcctgcctgggcctcccaaagttctgggattacaggcatgagcactg

SEQ ID NO: 483846 - DNA, 317 bp, Homo sapiens
cccctctgtccagatccataagcaccggtcagctcagggttcgtcggaggccagtacggaggcacaagtaccagcagcacagctcctctgaacagagacttgctaggatcatccttctccctccgggcctgtttgctgatggcataatccgggtggcaaccaaaatcttgagctcaagcccaggtgagcttaaaagccactggagccaggacgactttggggccttgcacgcctacaggtgtcaacgacttgtggcaaggtgcaatgtaaggaagtgacctaccccaaggcctctgcccagcaaactgggatctggc

SEQ ID NO: 483847 - DNA, 3308 bp, Homo sapiens
ctctgtgattctcgggtagacagcctgttggaaaatcatgcactgtgcgccgctggggcaagagaagcccagtggccccacgaaggacgcacaccagaggttgcccagccatgtagacaaggggttcgggcgggggaagccttgcaaaagcccaggcagaaaatcgatcagtgacacatctcttctcttctaaggtgaaggcagagtctctggggattcctcagaaaatgcagctcaaagtcgacgttgagtctgggaaactgatcattaagaagtccaaggatggttctgaggacaagttctacagccacaagaaaatcctgcagctcattaagtcacagaaatttctgaataagttggtgatcttggtggaaacagagaaggagaagatcctgcggaaggaatatgtttttgctgactccaaaaagagagaaggcttctgccagctcctgcagcagatgaagaacaagcactcagagcagccggagcccgacatgatcaccatcttcatcggcacctggaacatgggtaacgccccccctcccaagaagatcacgtcctggtttctctccaaggggcagggaaagacgcgggacgactctgcggactacatcccccatgacatttacgtgatcggcacccaagaggaccccctgagtgagaaggagtggctggagatcctcaaacactccctgcaagaaatcaccagtgtgacttttaaaacagtcgccatccacacgctctggaacatccgcatcgtggtgctggccaagcctgagcacgagaaccggatcagccacatctgtactgacaacgtgaagacaggcattgcaaacacactggggaacaagggagccgtgggggtgtcgttcatgttcaatggaacctccttagggttcgtcaacagccacttgacttcaggaagtgaaaagaaactcaggcgaaaccaaaactatatgaacattctccggttcctggccctgggcgacaagaagctgagtccctttaacatcactcaccgcttcacgcacctcttctggtttggggatcttaactaccgtgtggatctgcctacctgggaggcagaaaccatcatccagaaaatcaagcagcagcagtacgcagacctcctgtcccacgaccagctgctcacagagaggagggagcagaaggtcttcctacacttcgaggaggaagaaatcacgtttgccccaacctaccgttttgagagactgactcgggacaaatacgcctacaccaagcagaaagcgacagggatgaagtacaacttgccttcctggtgtgaccgagtcctctggaagtcttatcccctggtgcacgtggtgtgtcagtcttatggcagtaccagcgacatcatgacgagtgaccacagccctgtctttgccacatttgaggcaggagtcacttcccagtttgtctccaagaacggtcccgggactgttgacagccaaggacagattgagtttctcaggtgctatgccacattgaagaccaagtcccagaccaaattctacctggagttccactcgagctgcttggagagttttgtcaagagtcaggaaggagaaaatgaagaaggaagtgagggggagctggtggtgaagtttggtgagactcttccaaagctgaagcccattatctctgaccctgagtacctgctagaccagcacatcctcatcagcatcaagtcctctgacagcgacgaatcctatggcgagggctgcattgcccttcggttagaggccacagaaacgcagctgcccatctacacgcctctcacccaccatggggagttgacaggccacttccagggggagatcaagctgcagacctctcagggcaagacgagggagaagctctatgactttgtgaagacggagcgtgatgaatccagtgggccaaagaccctgaagagcctcaccagccacgaccccatgaagcagtgggaagtcactagcagggcccctccgtgcagtggctccagcatcactgaaatcatcaaccccaactacatgggagtggggccctttgggccaccaatgcccctgcacgtgaagcagaccttgtcccctgaccagcagcccacagcctggagctacgaccagccgcccaaggactccccgctggggccctgcaggggagaaagtcctccgacacctcccggccagccgcccatatcacccaagaagtttttaccctcaacagcaaaccggggtctccctcccaggacacaggagtcaaggcccagtgacctggggaagaacgcaggggacacgctgcctcaggaggacctgccgctgacgaagcccgagatgtttgagaaccccctgtatgggtccctgagttccttccctaagcctgctcccaggaaggaccaggaatcccccaaaatgccgcggaaggaacccccgccctgcccggaacccggcatcttgtcgcccagcatcgtgctcaccaaagcccaggaggctgatcgcggcgaggggcccggcaagcaggtgcccgcgccccggctgcgctccttcacgtgctcatcctctgccgagggcagggcggccggcggggacaagagccaagggaagcccaagaccccggtcagctcccaggccccggtgccggccaagaggcccatcaagccttccagatcggaaatcaaccagcagaccccgcccaccccgacgccgcggccgccgctgccagtcaagagcccggcggtgctgcacctccagcactccaagggccgcgactaccgcgacaacaccgagctcccgcatcacggcaagcaccggccggaggaggggccaccagggcctctaggcaggactgccatgcaggtgcgctgcgccacacgtgggttcgtgtgcatttgtgtgtgtgtgtgcatgcgtgagtgcgtatgtgtgtacctatgcatatgtgtgtgcatgtgtgtgtgcacgcatgcatatgtgcgtgcatgtgtgaacgcatgcatgtgcacacatgcgagtgatggtcctgggaactgctccatgagaagggagagtcaggatttgaacccaggtctgcctgtcccacacatccctgaccctgcattgcctctgcagcagttgttaaaaggaagaaaggcggggctgtggataaacttagtctagtgtcagtcccagaggaagaagattccataaagaaaaggagcctaaatcatttatatctcattgttattataaatttgttttgcaactgagtttcgccaggtgatctgcctgcctgggcctcccaaagttctgggattacaggcatgagcactg

SEQ ID NO: 483848 - DNA, 2362 bp, Homo sapiens
cacgaggcctggccaccctgccaccatcactctgcagcccgggtcatccagctgcccgcccccagccccgaagcttgtcaggcctggatcagcagggcttctcaccagaggcccgggcatgttcttgttccaggaggcagaaaccatcatccagaaaatcaagcagcagcagtacgcagacctcctgtcccacgaccagctgctcacagagaggagggagcagaaggtcttcctacacttcgaggaggaagaaatcacgtttgccccaacctaccgttttgagagactgactcgggacaaatacgcctacaccaagcagaaagcgacagggatgaagtacaacttgccttcctggtgtgaccgagtcctctggaagtcttatcccctggtgcacgtggtgtgtcagtcttatggcagtaccagcgacatcatgacgagtgaccacagccctgtctttgccacatttgaggcaggagtcacttcccagtttgtctccaagaacggtcccgggactgttgacagccaaggacagattgagtttctcaggtgctatgccacattgaagaccaagtcccagaccaaattctacctggagttccactcgagctgcttggagagttttgtcaagagtcaggaaggagaaaatgaagaaggaagtgagggggagctggtggtgaagtttggtgagactcttccaaagctgaagcccattatctctgaccctgagtacctgctagaccagcacatcctcatcagcatcaagtcctctgacagcgacgaatcctatggcgagggctgcattgcccttcggttagaggccacagaaacgcagctgcccatctacacgcctctcacccaccatggggagttgacaggccacttccagggggagatcaagctgcagacctctcagggcaagacgagggagaagctctatgactttgtgaagacggagcgtgatgaatccagtgggccaaagaccctgaagagcctcaccagccacgaccccatgaagcagtgggaagtcactagcagggcccctccgtgcagtggctccagcatcactgaaatcatcaaccccaactacatgggagtggggccctttgggccaccaatgcccctgcacgtgaagcagaccttgtcccctgaccagcagcccacagcctggagctacgaccagccgcccaaggactccccgctggggccctgcaggggagaaagtcctccgacacctcccggccagccgcccatatcacccaagaagtttttaccctcaacagcaaaccggggtctccctcccaggacacaggagtcaaggcccagtgacctggggaagaacgcaggggacacgctgcctcaggaggacctgccgctgacgaagcccgagatgtttgagaaccccctgtatgggtccctgagttccttccctaagcctgctcccaggaaggaccaggaatcccccaaaatgccgcggaaggaacccccgccctgcccggaacccggcatcttgtcgcccagcatcgtgctcaccaaagcccaggaggctgatcgcggcgaggggcccggcaagcaggtgcccgcgccccggctgcgctccttcacgtgctcatcctctgccgagggcagggcggccggcggggacaagagccaagggaagcccaagaccccggtcagctcccaggccccggtgccggccaagaggcccatcaagccttccagatcggaaatcaaccagcagaccccgcccaccccgacgccgcggccgccgctgccagtcaagagcccggcggtgctgcacctccagcactccaagggccgcgactaccgcgacaacaccgagctcccgcatcacggcaagcaccggccggaggaggggccaccagggcctctaggcaggactgccatgcaggtgcgctgcgccacacgtgggttcgtgtgcatttgtgtgtgtgtgtgcatgcgtgagtgcgtatgtgtgtacctatgcatatgtgtgtgcatgtgtgtgtgcacgcatgcatatgtgcgtgcatgtgtgaacgcatgcatgtgcacacatgcgagtgatggtcctgggaactgctccatgagaagggagagtcaggatttgaacccaggtctgcctgtcccacacatccctgaccctgcattgcctctgcagcagttgttaaaaggaagaaaggcggggctgtggataaacttagtctagtgtcagtcccagaggaagaagattccataaagaaaaggagcctaaatcatttatatctcattgttattataaatttgttttgcaactgagtttcgccaggtgatctgcctgcctgggcctcccaaagttctgggattacaggcatgagcactg

SEQ ID NO: 483849 - DNA, 225 bp, Homo sapiens
  misc_feature (8)..(8): n is a, c, g, or t
  misc_feature (186)..(186): n is a, c, g, or t
tcagacanccgttctgcactcacagggactcacacctctttttttttaaggtggagtctcactctgtcacccaggctggagtgcagtggcacaatcttggctcactgcaacctctgactcccaggttcaagtgattctcctgccttggcctcccaaagggctgggatgacaggcgtgagccaccanccctggcccctcatccatctctttattcttgagacctgg

SEQ ID NO: 483850 - DNA, 4181 bp, Homo sapiens
ggggcaggccgtggtcccagttgagaagctgtgctcccttgggtgttttggaggttcagggtgggtgctgaaaagccccgctgggtacagatggttcgggggcctgtctagggcatggcatcccacgtgggtgtcagcacggccgcagaagaaccacttctctggcccacccatgcctgctaggccatgcttcttcagaagtggccacaactctcctgacgtctccagagccggtcattccacccagggggacttcagctgccactggacacttcaattgtacgctgcgaccagttgccaggaaggagagggctggcaagagagccgcggcagccgtggcagggtgtaggggacggtggacggccagggcccccccctctctctctttctctctctctctcttgcttggtttctgtaatgaggaagttctccgcagctcagtttcctttccctcactgagcgcctgaaacaggaagtcagtcagttaagctggtggcagcagccgaggccaccaagaggcaacgggcggcaggttgcagtggaggggcctccgctcccctcggtggtgtgtgggtcctgggggtgcctgccggcccggccgaggaggcccacgcccaccatggtcccctgctggaaccatggcaacatcacccgctccaaggcggaggagctgctttccaggacaggcaaggacgggagcttcctcgtgcgtgccagcgagtccatctcccgggcatacgcgctctgcgtgctgtatcggaattgcgtttacacttacagaattctgcccaatgaagatgataaattcactgttcaggcatccgaaggcgtctccatgaggttcttcaccaagctggaccagctcatcgagttttacaagaaggaaaacatggggctggtgacccatctgcaataccctgtgccgctggaggaagaggacacaggcgacgaccctgaggaggacacagtagaaagtgtcgtgtctccacccgagctgcccccaagaaacatcccgctgactgccagctcctgtgaggccaaggaggttcctttttcaaacgagaatccccgagcgaccgagaccagccggccgagcctctccgagacattgttccagcgactgcaaagcatggacaccagtgggcttccagaagagcatcttaaggccatccaagattatttaagcactcagctcgcccaggactctgaatttgtgaagacagggtccagcagtcttcctcacctgaagaaactgaccacactgctctgcaaggagctctatggagaagtcatccggaccctcccatccctggagtctctgcagaggttatttgaccagcagctctccccgggcctccgtccacgtcctcaggttcctggtgaggccaatcccatcaacatggtgtccaagctcagccaactgacaagcctgttgtcgtccattgaagacaaggtcaaggccttgctgcacgagggtcctgagtctccgcaccggccctcccttatccctccagtcacctttgaggtgaaggcagagtctctggggattcctcagaaaatgcagctcaaagtcgacgttgagtctgggaaactgatcattaagaagtccaaggatggttctgaggacaagttctacagccacaagaaaatcctgcagctcattaagtcacagaaatttctgaataagttggtgatcttggtggaaacagagaaggagaagatcctgcggaaggaatatgtttttgctgactccaaaaagagagaaggcttctgccagctcctgcagcagatgaagaacaagcactcagagcagccggagcccgacatgatcaccatcttcatcggcacctggaacatgggtaacgccccccctcccaagaagatcacgtcctggtttctctccaaggggcagggaaagacgcgggacgactctgcggactacatcccccatgacatttacgtgatcggcacccaagaggaccccctgagtgagaaggagtggctggagatcctcaaacactccctgcaagaaatcaccagtgtgacttttaaaacagtcgccatccacacgctctggaacatccgcatcgtggtgctggccaagcctgagcacgagaaccggatcagccacatctgtactgacaacgtgaagacaggcattgcaaacacactggggaacaagggagccgtgggggtgtcgttcatgttcaatggaacctccttagggttcgtcaacagccacttgacttcaggaagtgaaaagaaactcaggcgaaaccaaaactatatgaacattctccggttcctggccctgggcgacaagaagctgagtccctttaacatcactcaccgcttcacgcacctcttctggtttggggatcttaactaccgtgtggatctgcctacctgggaggcagaaaccatcatccagaaaatcaagcagcagcagtacgcagacctcctgtcccacgaccagctgctcacagagaggagggagcagaaggtcttcctacacttcgaggaggaagaaatcacgtttgccccaacctaccgttttgagagactgactcgggacaaatacgcctacaccaagcagaaagcgacagggatgaagtacaacttgccttcctggtgtgaccgagtcctctggaagtcttatcccctggtgcacgtggtgtgtcagtcttatggcagtaccagcgacatcatgacgagtgaccacagccctgtctttgccacatttgaggcaggagtcacttcccagtttgtctccaagaacggtcccgggactgttgacagccaaggacagattgagtttctcaggtgctatgccacattgaagaccaagtcccagaccaaattctacctggagttccactcgagctgcttggagagttttgtcaagagtcaggaaggagaaaatgaagaaggaagtgagggggagctggtggtgaagtttggtgagactcttccaaagctgaagcccattatctctgaccctgagtacctgctagaccagcacatcctcatcagcatcaagtcctctgacacctcccggccagccgcccatatcacccaagaagtttttaccctcaacagcaaaccggggtctccctcccaggacacaggagtcaaggcccagtgacctggggaagaacgcaggggacacgctgcctcaggaggacctgccgctgacgaagcccgagatgtttgagaaccccctgtatgggtccctgagttccttccctaagcctgctcccaggaaggaccaggaatcccccaaaatgccgcggaaggaacccccgccctgcccggaacccggcatcttgtcgcccagcatcgtgctcaccaaagcccaggaggctgatcgcggcgaggggcccggcaagcaggtgcccgcgccccggctgcgctccttcacgtgctcatcctctgccgagggcagggcggccggcggggacaagagccaagggaagcccaagaccccggtcagctcccaggccccggtgccggccaagaggcccatcaagccttccagatcggaaatcaaccagcagaccccgcccaccccgacgccgcggccgccgctgccagtcaagagcccggcggtgctgcacctccagcactccaagggccgcgactaccgcgacaacaccgagctcccgcatcacggcaagcaccggccggaggaggggccaccagggcctctaggcaggactgccatgcaggtgcgctgcgccacacgtgggttcgtgtgcatttgtgtgtgtgtgtgcatgcgtgagtgcgtatgtgtgtacctatgcatatgtgtgtgcatgtgtgtgtgcacgcatgcatatgtgcgtgcatgtgtgaacgcatgcatgtgcacacatgcgagtgatggtcctgggaactgctccatgagaagggagagtcaggatttgaacccaggtctgcctgtcccacacatccctgaccctgcattgcctctgcagcagttgttaaaaggaagaaaggcggggctgtggataaacttagtctagtgtcagtcccagaggaagaagattccataaagaaaaggagcctaaatcatttatatctcattgttattataaatttgttttgcaactgagtttcgccaggtgatctgcctgcctgggcctcccaaagttctgggattacaggcatgagcactg

SEQ ID NO: 483851 - DNA, 318 bp, Homo sapiens
ctgctcgctctgaggatccccttccgtctcttacaacataattatactcggcgcagtggctcatgcctgtatcccagcactttgggaggccacggcaggcggatcacgaggtcgcggagcttcgcacacccgtctgcgccaatatggtgaaaccccatctctactaaaaatacaaaaattagctgggtgtggtggtgcacgcctgtagtcccagctacttgagaggctgaggcagaagaatctcttaaacctgggaggtggaggttgcagtgagccaagatggtgtcagcactccagcctgggtgacagagcgagaca

SEQ ID NO: 483852 - DNA, 4043 bp, Homo sapiens
ggggcaggccgtggtcccagttgagaagctgtgctcccttgggtgttttggaggttcagggtgggtgctgaaaagccccgctgggtacagatggttcgggggcctgtctagggcatggcatcccacgtgggtgtcagcacggccgcagaagaaccacttctctggcccacccatgcctgctaggccatgcttcttcagaagtggccacaactctcctgacgtctccagagccggtcattccacccagggggacttcagctgccactggacacttcaattgtacgctgcgaccagttgccaggaaggagagggctggcaagagagccgcggcagccgtggcagggtgtaggggacggtggacggccagggcccccccctctctctctttctctctctctctcttgcttggtttctgtaatgaggaagttctccgcagctcagtttcctttccctcactgagcgcctgaaacaggaagtcagtcagttaagctggtggcagcagccgaggccaccaagaggcaacgggcggcaggttgcagtggaggggcctccgctcccctcggtggtgtgtgggtcctgggggtgcctgccggcccggccgaggaggcccacgcccaccatggtcccctgctggaaccatggcaacatcacccgctccaaggcggaggagctgctttccaggacaggcaaggacgggagcttcctcgtgcgtgccagcgagtccatctcccgggcatacgcgctctgcgtgctgtatcggaattgcgtttacacttacagaattctgcccaatgaagatgataaattcactgttcaggcatccgaaggcgtctccatgaggttcttcaccaagctggaccagctcatcgagttttacaagaaggaaaacatggggctggtgacccatctgcaataccctgtgccgctggaggaagaggacacaggcgacgaccctgaggaggacacagtagaaagtgtcgtgtctccacccgagctgcccccaagaaacatcccgctgactgccagctcctgtgaggccaaggaggttcctttttcaaacgagaatccccgagcgaccgagaccagccggccgagcctctccgagacattgttccagcgactgcaaagcatggacaccagtgggcttccagaagagcatcttaaggccatccaagattatttaagcactcagctcgcccaggactctgaatttgtgaagacagggtccagcagtcttcctcacctgaagaaactgaccacactgctctgcaaggagctctatggagaagtcatccggaccctcccatccctggagtctctgcagaggttatttgaccagcagctctccccgggcctccgtccacgtcctcaggttcctggtgaggccaatcccatcaacatggtgtccaagctcagccaactgacaagcctgttgtcgtccattgaagacaaggtcaaggccttgctgcacgagggtcctgagtctccgcaccggccctcccttatccctccagtcacctttgaggtgaaggcagagtctctggggattcctcagaaaatgcagctcaaagtcgacgttgagtctgggaaactgatcattaagaagtccaaggatggttctgaggacaagttctacagccacaagaaaatcctgcagctcattaagtcacagaaatttctgaataagttggtgatcttggtggaaacagagaaggagaagatcctgcggaaggaatatgtttttgctgactccaaaaagagagaaggcttctgccagctcctgcagcagatgaagaacaagcactcagagcagccggagcccgacatgatcaccatcttcatcggcacctggaacatgggtaacgccccccctcccaagaagatcacgtcctggtttctctccaaggggcagggaaagacgcgggacgactctgcggactacatcccccatgacatttacgtgatcggcacccaagaggaccccctgagtgagaaggagtggctggagatcctcaaacactccctgcaagaaatcaccagtgtgacttttaaaacagtcgccatccacacgctctggaacatccgcatcgtggtgctggccaagcctgagcacgagaaccggatcagccacatctgtactgacaacgtgaagacaggcattgcaaacacactggggaacaagggagccgtgggggtgtcgttcatgttcaatggaacctccttagggttcgtcaacagccacttgacttcaggaagtgaaaagaaactcaggcgaaaccaaaactatatgaacattctccggttcctggccctgggcgacaagaagctgagtccctttaacatcactcaccgcttcacgcacctcttctggtttggggatcttaactaccgtgtggatctgcctacctgggaggcagaaaccatcatccagaaaatcaagcagcagcagtacgcagacctcctgtcccacgaccagctgctcacagagaggagggagcagaaggtcttcctacacttcggtaagagcagcaaccccggctgggagcggtggctcacacctgtaatcccagcactttaggaggccgaggcgggcggatcacgagatcaggagatggagaccatcctggctaacacagtgaaaccccgtctctacttaaaaaaatacaaaaaattagccgggtgtggtggcgggtgcctgtagtctcagctacttgggaggctgaggggaaggactgcttgagcccaagaggttgaggcagcagtgagccatgaccgcaccactgcactccagcctgggtgacagagcgagactctgtctctaaaacaaaacaagacaaaacaatttggtgccattcagtaaatttgcaatgttacacgtctctatctagttcagaaacatttgtatcaccccaaagaaagacccagagccattaagcagccatgctcccatgtcttctcccctggacatgtgtcttccctgctctgtccctggctctaggcccagtgacctggggaagaacgcaggggacacgctgcctcaggaggacctgccgctgacgaagcccgagatgtttgagaaccccctgtatgggtccctgagttccttccctaagcctgctcccaggaaggaccaggaatcccccaaaatgccgcggaaggaacccccgccctgcccggaacccggcatcttgtcgcccagcatcgtgctcaccaaagcccaggaggctgatcgcggcgaggggcccggcaagcaggtgcccgcgccccggctgcgctccttcacgtgctcatcctctgccgagggcagggcggccggcggggacaagagccaagggaagcccaagaccccggtcagctcccaggccccggtgccggccaagaggcccatcaagccttccagatcggaaatcaaccagcagaccccgcccaccccgacgccgcggccgccgctgccagtcaagagcccggcggtgctgcacctccagcactccaagggccgcgactaccgcgacaacaccgagctcccgcatcacggcaagcaccggccggaggaggggccaccagggcctctaggcaggactgccatgcaggtgcgctgcgccacacgtgggttcgtgtgcatttgtgtgtgtgtgtgcatgcgtgagtgcgtatgtgtgtacctatgcatatgtgtgtgcatgtgtgtgtgcacgcatgcatatgtgcgtgcatgtgtgaacgcatgcatgtgcacacatgcgagtgatggtcctgggaactgctccatgagaagggagagtcaggatttgaacccaggtctgcctgtcccacacatccctgaccctgcattgcctctgcagcagttgttaaaaggaagaaaggcggggctgtggataaacttagtctagtgtcagtcccagaggaagaagattccataaagaaaaggagcctaaatcatttatatctcattgttattataaatttgttttgcaactgagtttcgccaggtgatctgcctgcctgggcctcccaaagttctgggattacaggcatgagcactg

SEQ ID NO: 483853 - DNA, 181 bp, Homo sapiens
  misc_feature (9)..(9): n is a, c, g, or t
gagctcggnaccccagaacgagattgcgattgtgcgtggtcgagaaattgtgagatacccccgatgcgacgattgatccaccgccagcactaacctccatgacgatggcggtggatcgatccaagggagaccgccgactcaacacccgcgcccaagagcgaaggatgatgcctgattgtcg

SEQ ID NO: 483854 - DNA, 3243 bp, Homo sapiens
ggggcaggccgtggtcccagttgagaagctgtgctcccttgggtgttttggaggttcagggtgggtgctgaaaagccccgctgggtacagatggttcgggggcctgtctagggcatggcatcccacgtgggtgtcagcacggccgcagaagaaccacttctctggcccacccatgcctgctaggccatgcttcttcagaagtggccacaactctcctgacgtctccagagccggtcattccacccagggggacttcagctgccactggacacttcaattgtacgctgcgaccagttgccaggaaggagagggctggcaagagagccgcggcagccgtggcagggtgtaggggacggtggacggccagggcccccccctctctctctttctctctctctctcttgcttggtttctgtaatgaggaagttctccgcagctcagtttcctttccctcactgagcgcctgaaacaggaagtcagtcagttaagctggtggcagcagccgaggccaccaagaggcaacgggcggcaggttgcagtggaggggcctccgctcccctcggtggtgtgtgggtcctgggggtgcctgccggcccggccgaggaggcccacgcccaccatggtcccctgctggaaccatggcaacatcacccgctccaaggcggaggagctgctttccaggacaggcaaggacgggagcttcctcgtgcgtgccagcgagtccatctcccgggcatacgcgctctgcgtgctgtatcggaattgcgtttacacttacagaattctgcccaatgaagatgataaattcactgttcaggcatccgaaggcgtctccatgaggttcttcaccaagctggaccagctcatcgagttttacaagaaggaaaacatggggctggtgacccatctgcaataccctgtgccgctggaggaagaggacacaggcgacgaccctgaggaggacacagtagaaagtgtcgtgtctccacccgagctgcccccaagaaacatcccgctgactgccagctcctgtgaggccaaggaggttcctttttcaaacgagaatccccgagcgaccgagaccagccggccgagcctctccgagacattgttccagcgactgcaaagcatggacaccagtgggcttccagaagagcatcttaaggccatccaagattatttaagcactcagctcgcccaggactctgaatttgtgaagacagggtccagcagtcttcctcacctgaagaaactgaccacactgctctgcaaggagctctatggagaagtcatccggaccctcccatccctggagtctctgcagaggttatttgaccagcagctctccccgggcctccgtccacgtcctcaggttcctggtgaggccaatcccatcaacatggtgtccaagctcagccaactgacaagcctgttgtcgtccattgaagacaaggtcaaggccttgctgcacgagggtcctgagtctccgcaccggccctcccttatccctccagtcacctttgaggtgaaggcagagtctctggggattcctcagaaaatgcagctcaaagtcgacgttgagtctgggaaactgatcattaagaagtccaaggatggttctgaggacaagttctacagccacaagaaaatcctgcagctcattaagtcacagaaatttctgaataagttggtgatcttggtggaaacagagaaggagaagatcctgcggaaggaatatgtttttgctgactccaaaaagagagaaggcttctgccagctcctgcagcagatgaagaacaagcactcagagcagccggagcccgacatgatcaccatcttcatcggcacctggaacatgggtaacgccccccctcccaagaagatcacgtcctggtttctctccaaggggcagggaaagacgcgggacgactctgcggactacatcccccatgacatttacgtgatcggcacccaagaggaccccctgagtgagaaggagtggctggagatcctcaaacactccctgcaagaaatcaccagtgtgacttttaaaacagtcgccatccacacgctctggaacatccgcatcgtggtgctggccaagcctgagcacgagaaccggatcagccacatctgtactgacaacgtgaagacaggcattgcaaacacactggggaacaagggagccgtgggggtgtcgttcatgttcaatggaacctccttagggttcgtcaacagccacttgacttcaggaagtgaaaagaaactcaggcgaaaccaaaactatatgaacattctccggttcctggccctgggcgacaagaagctgagtccctttaacatcactcaccgcttcacgcacctcttctggtttggggatcttaactaccgtgtggatctgcctacctgggaggcagaaaccatcatccagaaaatcaagcagcagcagagcaggtgcccgcgccccggctgcgctccttcacgtgctcatcctctgccgagggcagggcggccggcggggacaagagccaagggaagcccaagaccccggtcagctcccaggccccggtgccggccaagaggcccatcaagccttccagatcggaaatcaaccagcagaccccgcccaccccgacgccgcggccgccgctgccagtcaagagcccggcggtgctgcacctccagcactccaagggccgcgactaccgcgacaacaccgagctcccgcatcacggcaagcaccggccggaggaggggccaccagggcctctaggcaggactgccatgcaggtgcgctgcgccacacgtgggttcgtgtgcatttgtgtgtgtgtgtgcatgcgtgagtgcgtatgtgtgtacctatgcatatgtgtgtgcatgtgtgtgtgcacgcatgcatatgtgcgtgcatgtgtgaacgcatgcatgtgcacacatgcgagtgatggtcctgggaactgctccatgagaagggagagtcaggatttgaacccaggtctgcctgtcccacacatccctgaccctgcattgcctctgcagcagttgttaaaaggaagaaaggcggggctgtggataaacttagtctagtgtcagtcccagaggaagaagattccataaagaaaaggagcctaaatcatttatatctcattgttattataaatttgttttgcaactgagtttcgccaggtgatctgcctgcctgggcctcccaaagttctgggattacaggcatgagcactg

SEQ ID NO: 483855 - DNA, 2705 bp, Homo sapiens
ggggcaggccgtggtcccagttgagaagctgtgctcccttgggtgttttggaggttcagggtgggtgctgaaaagccccgctgggtacagatggttcgggggcctgtctagggcatggcatcccacgtgggtgtcagcacggccgcagaagaaccacttctctggcccacccatgcctgctaggccatgcttcttcagaagtggccacaactctcctgacgtctccagagccggtcattccacccagggggacttcagctgccactggacacttcaattgtacgctgcgaccagttgccaggaaggagagggctggcaagagagccgcggcagccgtggcagggtgtaggggacggtggacggccagggcccccccctctctctctttctctctctctctcttgcttggtttctgtaatgaggaagttctccgcagctcagtttcctttccctcactgagcgcctgaaacaggaagtcagtcagttaagctggtggcagcagccgaggccaccaagaggcaacgggcggcaggttgcagtggaggggcctccgctcccctcggtggtgtgtgggtcctgggggtgcctgccggcccggccgaggaggcccacgcccaccatggtcccctgctggaaccatggcaacatcacccgctccaaggcggaggagctgctttccaggacaggcaaggacgggagcttcctcgtgcgtgccagcgagtccatctcccgggcatacgcgctctgcgtgctgtatcggaattgcgtttacacttacagaattctgcccaatgaagatgataaattcactgttcaggcatccgaaggcgtctccatgaggttcttcaccaagctggaccagctcatcgagttttacaagaaggaaaacatggggctggtgacccatctgcaataccctgtgccgctggaggaagaggacacaggcgacgaccctgaggaggacacagtagaaagtgtcgtgtctccacccgagctgcccccaagaaacatcccgctgactgccagctcctgtgaggccaaggaggttcctttttcaaacgagaatccccgagcgaccgagaccagccggccgagcctctccgagacattgttccagcgactgcaaagcatggacaccagtgggcttccagaagagcatcttaaggccatccaagattatttaagcactcagctcgcccaggactctgaatttgtgaagacagggtccagcagtcttcctcacctgaagaaactgaccacactgctctgcaaggagctctatggagaagtcatccggaccctcccatccctggagtctctgcagaggttatttgaccagcagctctccccgggcctccgtccacgtcctcaggttcctggtgaggccaatcccatcaacatggtgtccaagctcagccaactgacaagcctgttgtcgtccattgaagacaaggtcaaggccttgctgcacgagggtcctgagtctccgcaccggccctcccttatccctccagtcacctttgaggtgaaggcagagtctctggggattcctcagaaaatgcagctcaaagtcgacgttgagtctgggaaactgatcattaagaagtccaaggatggttctgaggacaagttctacagccacaagaaaatcctgcagctcattaagtcacagaaatttctgaataagttggtgatcttggtggaaacagagaaggagaagatcctgcggaaggaatatgtttttgctgactccaaaaagagagaaggcttctgccagctcctgcagcagatgaagaacaagcactcagagcagccggagcccgacatgatcaccatcttcatcggcacctggaacatgggtaacgccccccctcccaagaagatcacgtcctggtttctctccaaggggcagggaaagacgcgggacgactctgcggactacatcccccatgacatttacgtgatcggcacccaagaggaccccctgagtgagaaggagtggctggagatcctcaaacactccctgcaagaaatcaccagtgtgacttttaaaacagtcgccatccacacgctctggaacatccgcatcgtggtgctggccaagcctgagcacgagaaccggatcagccacatctgtactgacaacgtgaagacaggcattgcaaacacactggggaacaagggagccgtgggggtgtcgttcatgttcaatggaacctccttagggttcgtcaacagccacttgacttcaggaagtgaaaagaaactcaggcgaaaccaaaactatatgaacattctccggttcctggccctgggcgacaagaagctgagtccctttaacatcactcaccgcttcacgcacctcttctggtttggggatcttaactaccgtgtggatctgcctacctgggaggcagaaaccatcatccagaaaatcaagcagcagcagtacgcagacctcctgtcccacgaccagctgctcacagagaggagggagcagaaggtcttcctacacttcgaggaggaagaaatcacgtttgccccaacctaccgttttgagagactgactcgggacaaatacgcctacaccaagcagaaagcgacagggatgaatcctcttcatagacaccttccctgccctccatctcctccccgctggtgtctgttcccaaaaggtgaacagaaagtgtcttcatccattaggc

SEQ ID NO: 483856 - DNA, 162 bp, Homo sapiens
tcggtgtagaggatccccccttccccacagtgagtctacgtggtgacgcacgagagggatggcaagaagtacaagctcttctatggaatgagttctgaaatggccatgaaaaagtaagctgggggcgtgcgcgaagtacaggagcctcagacgggaaagaca

SEQ ID NO: 483857 - DNA, 2189 bp, Homo sapiens
ggggcaggccgtggtcccagttgagaagctgtgctcccttgggtgttttggaggttcagggtgggtgctgaaaagccccgctgggtacagatggttcgggggcctgtctagggcatggcatcccacgtgggtgtcagcacggccgcagaagaaccacttctctggcccacccatgcctgctaggccatgcttcttcagaagtggccacaactctcctgacgtctccagagccggtcattccacccagggggacttcagctgccactggacacttcaattgtacgctgcgaccagttgccaggaaggagagggctggcaagagagccgcggcagccgtggcagggtgtaggggacggtggacggccagggcccccccctctctctctttctctctctctctcttgcttggtttctgtaatgaggaagttctccgcagctcagtttcctttccctcactgagcgcctgaaacaggaagtcagtcagttaagctggtggcagcagccgaggccaccaagaggcaacgggcggcaggttgcagtggaggggcctccgctcccctcggtggtgtgtgggtcctgggggtgcctgccggcccggccgaggaggcccacgcccaccatggtcccctgctggaaccatggcaacatcacccgctccaaggcggaggagctgctttccaggacaggcaaggacgggagcttcctcgtgcgtgccagcgagtccatctcccgggcatacgcgctctgcgtgctgtatcggaattgcgtttacacttacagaattctgcccaatgaagatgataaattcactgttcaggcatccgaaggcgtctccatgaggttcttcaccaagctggaccagctcatcgagttttacaagaaggaaaacatggggctggtgacccatctgcaataccctgtgccgctggaggaagaggacacaggcgacgaccctgaggaggacacagtagaaagtgtcgtgtctccacccgagctgcccccaagaaacatcccgctgactgccagctcctgtgaggccaaggaggttcctttttcaaacgagaatccccgagcgaccgagaccagccggccgagcctctccgagacattgttccagcgactgcaaagcatggacaccagtgggcttccagaagagcatcttaaggccatccaagattatttaagcactcagctcgcccaggactctgaatttgtgaagacagggtccagcagtcttcctcacctgaagaaactgaccacactgctctgcaaggagctctatggagaagtcatccggaccctcccatccctggagtctctgcagaggttatttgaccagcaccagcatcgtgctcaccaaagcccaggaggctgatcgcggcgaggggcccggcaagcaggtgcccgcgccccggctgcgctccttcacgtgctcatcctctgccgagggcagggcggccggcggggacaagagccaagggaagcccaagaccccggtcagctcccaggccccggtgccggccaagaggcccatcaagccttccagatcggaaatcaaccagcagaccccgcccaccccgacgccgcggccgccgctgccagtcaagagcccggcggtgctgcacctccagcactccaagggccgcgactaccgcgacaacaccgagctcccgcatcacggcaagcaccggccggaggaggggccaccagggcctctaggcaggactgccatgcaggtgcgctgcgccacacgtgggttcgtgtgcatttgtgtgtgtgtgtgcatgcgtgagtgcgtatgtgtgtacctatgcatatgtgtgtgcatgtgtgtgtgcacgcatgcatatgtgcgtgcatgtgtgaacgcatgcatgtgcacacatgcgagtgatggtcctgggaactgctccatgagaagggagagtcaggatttgaacccaggtctgcctgtcccacacatccctgaccctgcattgcctctgcagcagttgttaaaaggaagaaaggcggggctgtggataaacttagtctagtgtcagtcccagaggaagaagattccataaagaaaaggagcctaaatcatttatatctcattgttattataaatttgttttgcaactgagtttcgccaggtgatctgcctgcctgggcctcccaaagttctgggattacaggcatgagcactg

SEQ ID NO: 483858 - DNA, 1766 bp, Homo sapiens
cacgaggcctggccaccctgccaccatcactctgcagcccgggtcatccagctgcccgcccccagccccgaagcttgtcaggcctggatcagcagggcttctcaccagaggcccgggcatgttcttgttccaggaggcagaaaccatcatccagaaaatcaagcagcagcagtacgcagacctcctgtcccacgaccagctgctcacagagaggagggagcagaaggtcttcctacacttcggtaagagcagcaaccccggctgggagcggtggctcacacctgtaatcccagcactttaggaggccgaggcgggcggatcacgagatcaggagatggagaccatcctggctaacacagtgaaaccccgtctctacttaaaaaaatacaaaaaattagccgggtgtggtggcgggtgcctgtagtctcagctacttgggaggctgaggggaaggactgcttgagcccaagaggttgaggcagcagtgagccatgaccgcaccactgcactccagcctgggtgacagagcgagactctgtctctaaaacaaaacaagacaaaacaatttggtgccattcagtaaatttgcaatgttacacgtctctatctagttcagaaacatttgtatcaccccaaagaaagacccagagccattaagcagccatgctcccatgtcttctcccctggacatgtgtcttccctgctctgtccctggctctaggcccagtgacctggggaagaacgcaggggacacgctgcctcaggaggacctgccgctgacgaagcccgagatgtttgagaaccccctgtatgggtccctgagttccttccctaagcctgctcccaggaaggaccaggaatcccccaaaatgccgcggaaggaacccccgccctgcccggaacccggcatcttgtcgcccagcatcgtgctcaccaaagcccaggaggctgatcgcggcgaggggcccggcaagcaggtgcccgcgccccggctgcgctccttcacgtgctcatcctctgccgagggcagggcggccggcggggacaagagccaagggaagcccaagaccccggtcagctcccaggccccggtgccggccaagaggcccatcaagccttccagatcggaaatcaaccagcagaccccgcccaccccgacgccgcggccgccgctgccagtcaagagcccggcggtgctgcacctccagcactccaagggccgcgactaccgcgacaacaccgagctcccgcatcacggcaagcaccggccggaggaggggccaccagggcctctaggcaggactgccatgcaggtgcgctgcgccacacgtgggttcgtgtgcatttgtgtgtgtgtgtgcatgcgtgagtgcgtatgtgtgtacctatgcatatgtgtgtgcatgtgtgtgtgcacgcatgcatatgtgcgtgcatgtgtgaacgcatgcatgtgcacacatgcgagtgatggtcctgggaactgctccatgagaagggagagtcaggatttgaacccaggtctgcctgtcccacacatccctgaccctgcattgcctctgcagcagttgttaaaaggaagaaaggcggggctgtggataaacttagtctagtgtcagtcccagaggaagaagattccataaagaaaaggagcctaaatcatttatatctcattgttattataaatttgttttgcaactgagtttcgccaggtgatctgcctgcctgggcctcccaaagttctgggattacaggcatgagcactg

SEQ ID NO: 483859 - DNA, 203 bp, Homo sapiens
  misc_feature (54)..(54): n is a, c, g, or t
tctctgtttcttacgcacatctctacaaatagggccgccctactgtcactgtanattcatacgattatctttctatacatgataaaattgaaactctgggagcctcggaaggaagcaaatgaagccataagggcaaggccctgatgcaatagaactggtgtccttgtgagaataggaagatgccaggagtgtgacgcacagga

SEQ ID NO: 483860 - DNA, 723 bp, Homo sapiens
  misc_feature (202)..(202): n is a, c, g, or t
gaaggcaccccggtcaacggatgctcgagtccggagcgcctagccctaccggactacgagtatctgggctcaggcgacatgtcctcacctacatggagcgatgcagtgtgcccgctggctaccagaaacaggtaaggatacttagccacactatggcaattcgccaggcttctctcactgcaagtatttttaactagctgtnatgacccagcggtcagacgacgaccagttctcctatgtgcgtagcgaattctagactatcgatcgcagaggccgaccgccccgacgagataggggtatcgattatgttaacgtggccgttgctgggagatgccttccggaacgtgtggggccagagaacactgtgccgatatttgctggacgcatgcacagagaatagtcagctgctattgtctcgcaagttactgtgtcctgatttcccgctggagctcactcataacagcacccaggatagtgctcatggcacgatgccactggagctgcttgatgtcgtttttcaggattgcctctttgccttccagtgtccagttttactactcgagacagttcctggcacagtgctggctgccatctatgaggacctgctgtcaggcatgaaccccgacacagtgattgtgccgacgtcgtccagtgggcagtggcgcgatagcgactgccttgggctggggcctgcgcgctggagggcgtggggcgtgctgtcta

SEQ ID NO: 483861 - DNA, 138 bp, Homo sapiens
agtgctgctgttaagatgtggtctccagaatgccacgagtgtaaacatgctaatgacatggcatgtgatcttctggcttactcagagaaccctgcccaggcagattagtctcagaccatgccaacaccccattgagaa

SEQ ID NO: 483862 - DNA, 101 bp, Homo sapiens
ggggtaggcctgtgcatctgggtgaggtgtgtcacgagctttgttactgccaaactcactcctttttaggaaaaacaaaaaaaaagggcagaaggtcattc

SEQ ID NO: 483863 - DNA, 265 bp, Homo sapiens
cgccccctgggttcgggcagttctcctgcctcagcctcccaagtagctgggattgcaggtatgcgccaccaaacccggctaattttagagatggggtttcaccggtgtgggccaggcgtggtctggaactcctgacctcaggtgatacacccgcctcggcctcccaaagtgctgggcatccaggcgtaagctgctatgctggtgaagtagctggacttctaccttcaacctaggccacgataatcacatactacttgctggcctt

SEQ ID NO: 483864 - DNA, 399 bp, Homo sapiens
ccccactgggtcctgtggtctaagtaccaatgttggctactctctgggtatgaggcaccgtgcgtggcacttgggtgaaggcctgcctcacactgctaatgtggcccggggggcgccaaggcacaattggtgcccggaccattgaggcacttgaagggtagccagcttgtggtgcagacaccacagagagagaaaagttgaatgaagtggtgggaatactcagggtggcacactgtgcctagaagcttccagggccaccaagagaatggaaagggaacctccaacattcacaacagaatataggagtcaattcacttagacccagatctacagaaagggggagtgtaggatatccacaatttcaaagacagctcgtgtctacctagagccacaatgtgc

SEQ ID NO: 483865 - DNA, 301 bp, Homo sapiens
ctaaattcgaggccgatcgactctagttctgtgaagaatgatagtagtatattaataaaaattgcattgaataagtagactgcttaatggcgtatacatattttcacaatattgattctacccatccatgagcatagggagtgtatccatttgtatgagtaatctaagatttctttcaggagagtttagtagtatacctcgtagagatctttcacctccaaatggtgttcacagacaacctggatggaattggaggccattattctaagtcaaccaactacaggaatggaaaattgaaata

SEQ ID NO: 483866 - DNA, 848 bp, Homo sapiens
caagagtccgtctcaaaaaaaaaaaaaaaaagtgttctgtaataaaagtgaactgataagttctgggcatccctgagaatttgttttcctttcagaaagtttcctacactactgaggtttaggggcactgtgaagcaaaagccacgcctcagaatcccaggcggagactccgacctcgtcccgggagggaagccagtagctgagcacctgcgggagattaaagagaggaataaggaggtgagtacatgacaaagagccacagtcgcaggcggtggggcctggctcagaacaggctgtgctgggaagcgggagcaggagctggcgccgccttgcgggctggcagaggaccatccactccctggcgctggggccgtcccatctcatgggcaagaaacgtgagacccctggctcgctccacacacaacctaagtgccagatggatgagacgcctacgcgtgagtaaatgccaggaacatgagactcgaacgtggcaggatatccttctgcccacgaatctaaaagcttactcggtaatgggagaatggttccaatttgataaactcgggtttttggaacgtctgtgctccagaaacactggaaggcaagtggctgctgactggaggagataattggatgctgcaagcggcaaagggctcgggatgcaaaacaccgcaagaaatgcaacaagtgaggagcattcccgcaaagaaaaaacgcacaggccgagagcagtggctcacgcctgtaatcccagcagtttgggaggccgaggcaggtgcatcgcttgaggacaggagttcgagactaggctggccaacatggtgaaaccccatctctactaaaaatac

SEQ ID NO: 483867 - DNA, 814 bp, Homo sapiens
  misc_feature (494)..(494): n is a, c, g, or t
  misc_feature (814)..(814): n is a, c, g, or t
cctcccaagcagctgggagtacaggtgtgcaccaccacacctggctaattaattagacataaaaaaaaaacaaaaacacaccaaaaaaaccaaacaaaacaaaactacgaagccacatataaccacccagcagaagccgcccaagaggaacgaagaggacgaatggaacagcaagaatcttccgctcgcgaatctatagcggatgaatgggggagaggaatagagtagaagaaagaggaacaaaaaaacagaaaaagtaccaggagggacacgtagtttacaattttttttgacgaaaaccttttagaatgccagactggggttgtactctagacgccttttacttgcacgttttgacaggcctacctacgttgttgacacgacctacctacgtgtcactacgttggactacgacgacacggcaacttctttttggacgatccctgactttttacgccaacggacttccgacactacactacttttgaccacancttttgggggggactctttgattggccctctagatatactttttacctcacacggactactctctcacacgacaaataattgggcattttgtcggtacgtatattttcctggtaagatatctaccaacgacatcatatatcataattaatataataaacaaaaggcataataatatcagataaagcatatttagcatagagaacaataggttattcggagatttacgcggggctatatattgggttggggtttttttcggtttgctgtcgttttccttccctggtaccacgcatggatggaggattctggcttttcggcn

SEQ ID NO: 483868 - DNA, 842 bp, Homo sapiens
gcattgatcctaagaagacacaggcgagatgtgtctaagaacttcgcattgggtcaagacgttatagatcttactggtcatgctcttgcacttgtacagaactgatgatgacttagatcaaccgtgattatagaacaccgattaatagaattcaaagctctttcaccagatgaatctatatggccacagcatcatggcaagagagccgcatacctattgatccactctccatggcgctctgtgcgcaacttgacgcgccaaggcatttgcgcaggctcaagtggctattctctggaggttacctatgatggctgcacataaaaggccagttgcaagcaacatcccattctgtagccaacgacactcgggactaacggttcacttcctgggtctgttaccaccactcctgtcgcgactggacgacgcattcaggctcggctcggtagaggacccaggtacgcattcttggtggagcccccaatggattaacgctacaccacaggcagtcccggaggtaaggacaccaacaggttgggagccccacgttggaatcccaggacaagtttaattatctggacagtgccccttcaaggagcacagccccactccaaagaaacaatccgactgggactggccaaagatcccctagcgccagaatcccagatcaatctcccaacgagaaacaccaacagatccaatccgacaacaagtcccggaattcatctaccggtctgatggtacttgaatgcctcccatgtatggcggcccaccgaagtggtaacgccagagctcgcgacgggaggcactggatccgatttgcgcagagaacgcacaagaagcga

SEQ ID NO: 483869 - DNA, 638 bp, Homo sapiens
caagagtccgtctcaaaaaaaaaaaaaaaaagtgttctgtaataaaagtgaactgataagttctgggcatccctgagaatttgttttcctttcagaaagtttcctacactactgaggtttaggggcactgtgaagcaaaagccacgcctcagaatcccaggcggagactccgacctcgtcccgggagggaagccagtagctgagcacctgcgggagattaaagagaggaataaggaggtgagtacatgacaaagagccacagtcgcaggcggtggggcctggctcagaacaggctgtgctgggaagcgggagcaggagctggcgccgccttgcgggctggcagaggaccatccactccctggcgctggggccgtcccatctcatgggcaagaaacgtgagacccctggctcgctccacacacaacctaagtgccagatggatgagacgcctacgcgtgagtaaatgccaggaacatgagactcgaacgtggcaggatatccttctgcccacgaatctaaaagcttactcgggaggctgaggcaggagaatcgcttgaacctgggagacggaggttgcagtgagccgagatcgtgtcactgcactccagcctgggcaacagagtgagactctgtcaaaa

SEQ ID NO: 483870 - DNA, 120 bp, Homo sapiens
gacttgtcgcagttgcatacatcaccttttttccgacagttgttgcgaaagtcaggtgattatcatcgcttttttgggtgattgaaaatagatccatcgataaagtagattgtttatgca

SEQ ID NO: 483871 - DNA, 165 bp, Homo sapiens
atccccttaaacccacgatcacctgcatcatggcccaggtctctatccctcctctgtggagcaacaggtggaaaacgacatgtgaggtgtgtgagctctgagatgtgagtgtatgtgcgtctgagaatgtgtgtgtgagaatgtgtgtcagattcaatgtgtgag

SEQ ID NO: 483872 - DNA, 116 bp, Homo sapiens
cggaaccgacaggactcccgtttgtaagtttgtgattttgctttggcatgtttcattgactagtagaactcattctgttttagtgtatatttcaatactaacttaacattttgctc

SEQ ID NO: 483873 - DNA, 956 bp, Homo sapiens
  misc_feature (747)..(747): n is a, c, g, or t
cgcggttcccacccgcggatattctttcccgccgtgtgtgtgacggcggaaaagcgtgccgcgcccaccaaaggggggcccgcccccacaaagggtgctcgccccgccgaattgacaccttttttctggcgaccttttttaaatcaccaggcgaccccccttgtgggccgacacttccccttgggccataagcgtcggagtattcttttggcgcttcccctcagagtctgtcaaagggcgacctgattctctctagaggcaaggacaacacatctgcttttgcgtaaccccacgagacacacctgttctctgtcccaccacgtcgtaccacccacagggtgtgagcagaggagacgctttttcccaagcaccctgggaaaaacatctgccccttgttgccccccggtggtttttagcgagagttgacattcgccacagaacagaggtgctctgtccccaataaccatgttgtctgcgcacccgcgccgtttcttattttcaaggaaatcttagagtgtcttcaatattttcgaagaatttctcctcaagagtatacttgatgcgaataataggagggacatatctttgtacgcacacttatatatatctagcgtgtgacactattacgtgctagcatctcccataacaagaaacaccccgttctctggcgattattcttataccccacacatataaacggtcttattgtctccttcgattatagcacaaatcttggcaccagtgtgngtattaacacaaccaaccaatgttcttgaatttcaccggatctatgcctatgcactttgttcatagtaccccgccctttatcatctggtgttcttatattttctgcaccatgcccaaatctacgaacgccgccttatgactgacgccttatcaaaccccacggtcaagattttgcccccttaaaaaatccagattctaaaaaaaaaaca

SEQ ID NO: 483874 - DNA, 230 bp, Homo sapiens
cttatttttgtattttgagtagagacggggtgtcgccatgttggccaggctggtcttgaactcctgacctcaggtgatccactggcctcagcctctcaaagtgctgggattataggcgtaagctaccacgcccgacactttgttttttggtttttagagatggggtctcactctgtcactcaggctacagtgcaggtgcatcataactcactgtagccttgaactccttt

SEQ ID NO: 483875 - DNA, 111 bp, Homo sapiens
gacacgcacctggatgtagcaaggaaagacaaacagcagcacgtgtgatactcgtgaccctcctcactcacaggctgactcacaccaaccctgccagggagagatgttatc

SEQ ID NO: 483876 - DNA, 105 bp, Homo sapiens
acaggttatcatgtggcaggatgtctcgatctctgactcatgatcgctgctcagctccaagtgtggatacaggcgtgagcacggccactatatgatttactaatg

SEQ ID NO: 483877 - DNA, 212 bp, Homo sapiens
agctttagaccagcctgagcaacatagtgagaccctgtctctccaaaaaaaaaaaaaaaaaaaaagttaaaaaaaaaattaggcaggcatagtggcacatgcctgcagtcccagcttctcagaaagctgaggtgggaggattgcttgaggttgagattgcagtaagccatgactatgccactgaactctaccctgggagcgagaccctacct

SEQ ID NO: 483878 - DNA, 319 bp, Homo sapiens
tagagcggtcgagttgagtatgtttcaagtgcttgttggccatctgtatatcttccttggagaaatgtctattcaggtccttgcccattatcaatgggttgtggcttttttgctgttgagttgtacaagttggtatattttagagattaggcccttgtcaattgcatcatttgaaactattttctcccattctgtaagttgtcttttgggtttcttttgggtttcctttgctgtgcaaaagcttgtcagtgtgattaggtcccatttgtttatttgtgtctttattatacaaggtaataaataaaattctaggaggtgg

SEQ ID NO: 483879 - DNA, 666 bp, Homo sapiens
cccccatggaagcatctggcttcactgctcaggtgattatcctgaaccatcccgccacataagcgccggctatgcccctgtattggagtcgccacacggctcaccattgcatgccagtttgctgagctgaaggaacaagattgatccccgttctggtaaaaagctggaagatgcgccctaaattcttgaagtctggtgatgcgtccccttgttgatatggttcctgcgccagcccatgtgtgttgagagcttttcccagactactccccctttgggctccctttgctgttcgtgatatgagcaccagcccagttcgcggtgggtgtcatcaaacccagtggaccagaaggctgctggagctggcaaggtcacccagtctgccccagaaagctcagaaggctaaatgaatattatccctaatacctgcccaccccactcttaacacagtggtggaagaccggtctccagaactgtttgtttccattgcccctttaagtttagtagtaaaagactggttaatgatacccagcatcgtaaaccttcagaaggaaaggagaatttttgtggccccctttggttttcttttttgcgtgtgcccgttttaagttattagtttttaaaacccagtactttttaatggaacccacttaaaactgccacacgcca

SEQ ID NO: 483880 - DNA, 151 bp, Homo sapiens
cccaggattatgctattgaagggtttggcagaggtgtattttcaaaatggcaaatttcgaaagccgctctggctgcgtctttacagggaatggacggggtgggagccaggtaaagaagttgctgcagtcttccacgccagagaggacggtg

SEQ ID NO: 483881 - DNA, 291 bp, Homo sapiens
agaggtgactgccttcagcaagagaaacatcgtgaagatcagttgtaacggatgaactgtgcccgcttctcttcagtcatagctttggtcgggaaaggaaagcagcagggaaggcgaatatggacgagaatcatctagaacaattaagccgagcaggaaacctcattcctacctacactggaaggagcgctctcactgtggaagagttctgctaacagaagctggtctgcatgtttgtggactccagcggagagtggcagactttcttctccttttccctctcacctataa

SEQ ID NO: 483882 - DNA, 1440 bp, Homo sapiens
  misc_feature (808)..(808): n is a, c, g, or t
  misc_feature (863)..(863): n is a, c, g, or t
  misc_feature (989)..(989): n is a, c, g, or t
  misc_feature (1286)..(1286): n is a, c, g, or t
  misc_feature (1326)..(1326): n is a, c, g, or t
ctggttggtcatgcttttctgttggggggcgtttgtttggctgtggtgctgcctggtttccgcgttttctgttgtgctcgcttgcggtttgcgtgtgtgctcgccgcttttgccgggtgtgttgctgtatatcagtttgtggtttgtggctgttctcgtgggggtgggttcgcctgtttgggtggttctgttgttggccaggtggtgcattgtttgtgtcggcccgggttttgggctccgggggcgcagtttttgtttgcggctctggtgttgacaagggttgcggtgggtgcctgcgcgtcggtgttgtcggtggttcgtgactgccgtgttttggtgtgggtgttctagtgatgttggtccaggatgtgttttgtttaaatggatgggttatctcatgttgttagtgcagtggtgttggtgtgtgggtgcgtggggggtgggtctgtgtttatattggtgtgttagtgtcccgccccccgctgttgtttttgtaacggcgctacacaacggttaaataaccagttgagccccctttaattggggatccagaacccaccaataacccgatttttagagtggaccacgttataggtagacttccggaaagggatccccaccaagtgtttggggacccacaaatatacaccaaggcttttgtgtaagaccgcaccgcgcccacgtttaacgtattacaccggtgcctcaaagggtataccgaaaggcccctctgggtgggcgcgagattttcggccacacgagaggctctcgaaagattatagagtttcgccgcactttcacttgtgancgagcacaccgcgcgataactatattccgccactctatgaaaagtgttgtcactngagcctcacactccgcagctatacttcacagagggagaacacacaaatgggtcacattgaatggtccgcgtcacccccggcggagaaggcgcaccacgcgtgtcctataagaccacgcagaaattntcgcggagaaaaatctatgccccacagaatgggtacccaagagaccaccacccgcgagtgtttacttctcttggtaatttggagattcacgaaactccactctttgtgtggtgggcccaagagcacacactcgggctcttggccactgagatttaatgagattctccctcggagatataatgccacaaagagaaataatgagacccccaacaatagaccttcgccaagaccatggccctgtaatgagaaagagaaaaagaccctccaagagaaagccaaccgagaaaggaaccgccnagacaccaagaaatgaagaaaagtccagggggacacgccnaaagcgccaaatgttggtgctggccaaaagaccgaaggagtaaaggtgctgccatgatgttagctgtggcccctgtggatttttccccagaacacttaataaacttaaaacctt

SEQ ID NO: 483883 - DNA, 229 bp, Homo sapiens
cagtttcactgggcctcatctccacctagtattatcatagtccagcagcataccgtgcttgcaagggtgccggaacacgctactctgtgtccccacttctagccttagctcatgctaacttaatgtgagttcagcttcaggagtccttccctacaggagcctttgctttctcagtgaggtgcgttgagaagctaaagcttatacaaaggacaaccctcagctaatgatc

SEQ ID NO: 483884 - DNA, 933 bp, Homo sapiens
  misc_feature (518)..(518): n is a, c, g, or t
atgttattgagcacatatgtttgggcgggctcccagataggcctacttgaatatgagatgcattcatctgtatcgctagagatacccgtgaatgcgatgacttggttgctctgtgactcacttgcatccatagttgatagacaaacgctcgggtgagatcaccggtcccggttctcgatacgcaatcccagcaattgcagatcgtggaggtcgttgaagttgggagtcatatcaaacttggagtcctgatctgaaggcatcgaatcatgcaagattactgctcggccgatccggtgttgtgttccccgtgtggttttttgccccggactcaatatcttttacagaggtgctgcccaaatccttgctataattttccctccatcactgcacactttcaatatacagcctgcgcaatggaggtatgtgcttcttacatactctctgagaattcacgtacgccagagaccttctctccagctctctgtgacaatgcagccaactcaaagccggttcatgtnagctgtagattcaggtggttacacagataccacgtgctggcataatgatttcacaaatatggcatgacttatcaaagcatgtgattctattttacagtttcattcctatcggtacacttgaatacactgtctctatcagttatttctgaggcctgttacaacgggaccttcaaatctgggaagattccccttctgaaggcaaacatgtgactgcttagtacgtggattcctgacttctgttttttcccctggccaacaaagaagtggtatttaaggtcattaagaacacatgatgatgcttgggaaattagagttcaatgccacggaatacatttacagtaatgagttgccaaatcattgagattccaggaatgggcggaaagagtggttagaaaaggaaacaagggccttagct

SEQ ID NO: 483885 - DNA, 194 bp, Homo sapiens
agtggcagccgaagtccacacagcctgcttaccttgccaccctgcacacgagcaaggggcagattggtgggcttcctccactcagagataggggggaatggaggaatttcattccagaagaaaacctagaggaacttgctctgccccagtgagccctccccatctcactgatgggttcgtgaggaaactctcag

SEQ ID NO: 483886 - DNA, 212 bp, Homo sapiens
aagtgtgctgcgtagatctagaggatcccagtccgggtcctaatgggtcgtcgggtccccactcccctcacattccacgggcccagggactcactttggtaacaaactcctaccaacacggaccaataaaaaaagagtgtgggttttttttttttttttttttttttttttttttttttttttttttttttttttttttttttttttccccc

SEQ ID NO: 483887 - DNA, 343 bp, Homo sapiens
agactaagacgagacgacgagagaatcgcgtccttgctgctgcaggcggtaatgcaaaagtgctggccagtaagcagtgtccccacattagagtgggcaccccagggcagggaccgaagagcatgccattgtgatcccagcagaggcgtgtcgttgcacttgcccagaggaaagggactgagacccgtgctaccaggtgtggtctagggcatcaaacacgggattggtctgaaaagccgaggcacggagacctcggctgatcctgtgcttgagggagaagagactgtgaaggagctggccattctagaggaagggagggagccgttccgaggtcatcctagaa

SEQ ID NO: 483888 - DNA, 897 bp, Homo sapiens
  misc_feature (14)..(14): n is a, c, g, or t
  misc_feature (145)..(145): n is a, c, g, or t
  misc_feature (235)..(235): n is a, c, g, or t
  misc_feature (237)..(237): n is a, c, g, or t
  misc_feature (245)..(246): n is a, c, g, or t
  misc_feature (254)..(254): n is a, c, g, or t
  misc_feature (261)..(261): n is a, c, g, or t
  misc_feature (269)..(269): n is a, c, g, or t
  misc_feature (281)..(281): n is a, c, g, or t
  misc_feature (284)..(285): n is a, c, g, or t
  misc_feature (287)..(287): n is a, c, g, or t
  misc_feature (309)..(309): n is a, c, g, or t
  misc_feature (312)..(312): n is a, c, g, or t
  misc_feature (325)..(325): n is a, c, g, or t
  misc_feature (327)..(327): n is a, c, g, or t
  misc_feature (329)..(330): n is a, c, g, or t
  misc_feature (332)..(333): n is a, c, g, or t
  misc_feature (343)..(343): n is a, c, g, or t
  misc_feature (345)..(345): n is a, c, g, or t
  misc_feature (347)..(348): n is a, c, g, or t
  misc_feature (350)..(353): n is a, c, g, or t
  misc_feature (359)..(359): n is a, c, g, or t
  misc_feature (362)..(362): n is a, c, g, or t
  misc_feature (373)..(373): n is a, c, g, or t
  misc_feature (382)..(382): n is a, c, g, or t
  misc_feature (386)..(386): n is a, c, g, or t
  misc_feature (408)..(408): n is a, c, g, or t
  misc_feature (414)..(414): n is a, c, g, or t
  misc_feature (425)..(425): n is a, c, g, or t
  misc_feature (445)..(445): n is a, c, g, or t
  misc_feature (464)..(464): n is a, c, g, or t
  misc_feature (576)..(576): n is a, c, g, or t
gctaatactgattntttcattactaccattttatttattacagctcagaggagagtcatttactagacattcggttgttattaaacacgggagagagagttaggcagagactggagggggtgaggataagagaacaggataaggngagcagaaagacgctcaggagagtagaaagacactcaggagagaacaagagatcctgcccattcttattatgaggatgaactggctacangncatgagtnncccaatcngatctancttaaatnccagcctctccnaanncnttttccaataaagatcccctancanttattttctggtnantnntnnttgttttttntngnngnnnnggtctngtngggacagaagngccaacttngggnccaacttaatacatagatagcnccatgncagagctgggntccattaagacatgactgtngacaataccatctctaggnacacactgtcactcacacatggatgtgttgttttatggcctaaagatgttgtagacggttctcacataaatttcatcaggggggggcttcttcttgctgccaggttcaaggnatctcttaattgtagggatattacttagtttcactgtgtattcctggaggaaaggaaatgcagacaggatattaggaattttctcttctagagctaaaatggtttggagtaaaatcacatctgcaaggctcagctgattaccaacaagaaagctttgtccgtgaccccttaaaatcttttcaaacacaggaaagtatctaattatagccttctgggccatgttaaccacttccttttgctgatcatctggttttaagaaaggatgcatgataagcagttccagcagatccagtgtcccctccacgtacatgtcaatcaggg

SEQ ID NO: 483889 - DNA, 1041 bp, Homo sapiens
gcagctaccacaaagacaggtcgacctcaccgaggagaagaaaggagaagcgagaaagatgtcggggcgcggcaagggaggcaaggggctcggcaagggcggcgccaagcgccaccggaaggtcctccgcgacaacatccaggcatcaccaagccggcgatccgtcgtctggcgcgtcggggcggcgtgaagcgcatctcggggctcatctacgaggagacccgcggcgtgctcaagatcttcctcgagaacgtcatccgcgacgccgtcacctacaccgagcacgcccgccgcaagaccgtcaccgccatggacgtcgtctacgccctcaagcgccaggacgcaccctctacggattcggaggctaggccaccatcaccgccagattagagtgtctagggttcgtggtcgttgatgtaatcgcagtatctcgctgctgtttgctatcttctgtagaatggaattgaatggaaatcgaactagtttatcgttgaaaaaaaaaaaaaaaaaaaaaaaaaaaaaaaaaaaaaaaagaaaaaaaaaaaaaaaaaaaagaaaaaaaaaaagggggggggggagcccaagaagaatacccgccggggggggccccgcaatatatgggcgaaaccccaaatatgttgagagaaaaagaggggtcgccacaaaaaggaggggcgcggctcaaaacgcaccgagaagacgagaggcagcatgatacacaaaacgcgagtctggatggaggaaaaaacatgtgaccacagggcgcacacaacctagcggagagcgaacaaccaccccaaaccgcggggggggggggggacaaacacatagagggcagacaaacacacaaaccaactgacagaagaagacaaagaacagccaccgggacggaggcgacatcacacaaccgcaccgccaggaagggacaagagggcgagggaaaaacaaaccgaggacgtcaaactgagcagcgtgccgcactcgaaaagacctgagtaggacaccgcagcaaactgataaaacaaagaacaaaagctgacc

SEQ ID NO: 483890 - DNA, 355 bp, Homo sapiens
attgcaagcatattttttttaatgactccagcaaaagtaagcatcaattaaacaagtggaaagtgacctacacttttaacttgtctcactagtgcctaaatgtaaaaaaggctgcttaagttttgagtgtagttggattttttggagtccgaaggtatccatctgcataaattgaggcccaaatcgaattaggattcaagtggatactaaatactttgcttatctggaagagagaaccttcttaaggaataaacgcgttgaatagagaaaacactggtggataataggcatttcaacggtctttgcaatgtttcctgctgagaaacattaaaagatttattgattattttttttc

SEQ ID NO: 483891 - DNA, 108 bp, Homo sapiens
  misc_feature (96)..(96): n is a, c, g, or t
acctcgcttagtgccccctgggcaccactcacggggccctcagtgccaccaccgtcttcagagcgcatcagcgaggagctgcagcagccccacctnctcgctgatgcg

SEQ ID NO: 483892 - DNA, 338 bp, Homo sapiens
acagtgacggcttgttgcgggccttctcacccctgagaactctgggacctcaacagtgggcacgctgatgacacacttggcagtgactttcccccagtggctgcggtgctggatgtcatgtatgagtcccctttcacactgctgtcctgtgtctctgacacctatgttcgctactgggacctccgcaccagcgtccggaaatgtgtcatggagtgggaggagccccacgatagcaccctgtactgcctgcagacaagatggcaaccaccctgctggccacaggttcctcctactacggtgttgtacgagttgtgggaaccggcgtcaaaagggcctgc

SEQ ID NO: 483893 - DNA, 265 bp, Homo sapiens
ccggacacggcgggagcagagaggaaccccagacacaccccacccccacagccctacccagcagccacaaagcgcacacacggggccacccgccaaaacgtagtcccacgcccaggcacgcaaaagaggagaaaagaatgcgacgtgctggcgacgggaccactaagacgcggagcacccaccggcaacgcacaccctagccaagtccgaagcccacagaaccggagagacacaggctccaacaagggtgcagcacccgccagcc

SEQ ID NO: 483894 - DNA, 1065 bp, Homo sapiens
agcggaagggactcgcggacatctcaggtctcttggtctggctcggtccctccggagacggctgagcgacgcgttgctgtcatccttatggggtagacctggcttgtgcctccggtgatagcccaaatcttccagacgtgcaagagagctagatttgactgccagagcctccgaagacatgagcggcgtgacctacgatcgcgtccgacgctggggcattatccgggcaaggagatctccgcgaagcgcgaaggtaggtacgcgactcgtaacctcctataacttcactcactgtggtcattccggaccctgaagttctcggaccctcacatccctcctggaagaacgtagtgacgataactacacattgttgcttcccaagccctatcattcgatgtcctttcgtaggtgagttcgcaggtaatgactctgagttgtcaccgtgtggtgcactcgcatagtaatagggttcaaccttgtggtgaaagggcaacttgagatgaattatgtttacaagtgctaccccatgacctttgtttcctgcggtgatctctgagaccctaggaaagggtgtgttggcgtacccttttaaggtgcgtccaatggattggtcaactctagacaatcgaagtgtgtccagcgtgttccatgatagttacgccgcattgtaacatttcataccggactaatggtgccgacatgcatcgtgggttaagctagtaagaacccttctgaagaatttgaggtgcctagtgcccacgtgggaattcaattgtgttgaagcttgttaggccagtaatgcctagaaccatacgtgccctggtgagggacattgtggtcctggcaacgcgtaggtaccagaacaaggtggaaacccgtctttgagagaggtggacgaatcctttgtcccatgtgtgtgttgagaattacactttttagttaatttccctgacataagaattcctacttttgaagggccgccagtagtacacaggatttaggtcgttcgaaacgacgcgatgttgataaatgcaatcgtatattatttgaactataacagtatcg

SEQ ID NO: 483895 - DNA, 172 bp, Homo sapiens
cggcagctacagaggacttcccagtgaagcagggactcagaagattggtgcagcacgctagcccgactggaaaaggcatctgagagaaggaagccggagaatgttcattcctcctccgaggaatcacatgcatgttcaagactgaaaaggcagctccaactttcatcagaat

SEQ ID NO: 483896 - DNA, 984 bp, Homo sapiens
aggagcccatggaatcatagtgtgtatgatgtgacagatcaggagtccttccaataatgttaaacagggctgcaggaaatagatcgttatgccagtgcatcatgtcaagcaaatgtaggtagggaacaaatgtgatcatgacccacacagaaagtagtagactacacaaaagcagaaggaattagcatgattccccttggaaattccgtattaggaaacacagatgcgtaagaagtgcaacgcaaatgtagaaccagatcttacatgcacgatggcaagcatgagattaaacacagcgaatgggtcccggtagcaaagctggtggtgctgcaaaagtacaaatgttaaaattcaaaagcaattcaaggtcaaagcagatcaagggtggacggttgctgcatacaattagacatccatccttatgctcaaaaagacaatggaatgtgaaatcctggaagaccaagtgaaacaaaaacaaacattgctgaacatgtactgtatgtaagatgaaatacaaagcagatatcattaaccggtataccacacaggtcaagagattggacacatggtccatacatgacttataaaaattagacaaattagggtataagaacacagatacagtacaattaataagaaaatgaagagaaaccatttggggatgcagggatactacaacacagggagtacaacacctgtgagataacatggaaccaagacggacccgggatgggaagacaaactctaagaaggcgacataggaagaaaagaagacaggaaaaaacaggaaaagagaaaaactagtcaacacaaagcggacagtaataagaacaaagaagaagaaaaacacaaagacaaaacgaaagacagagaagaaaacgcaagaacacagataagagacaagaagaaacagaacaagagaaagaaagaagacagacaaacagaacaaaaagcgacaccgagaaaacaaacgacaagtaagaa

SEQ ID NO: 483897 - DNA, 413 bp, Homo sapiens
  misc_feature (69)..(69): n is a, c, g, or t
  misc_feature (94)..(94): n is a, c, g, or t
  misc_feature (108)..(108): n is a, c, g, or t
  misc_feature (124)..(124): n is a, c, g, or t
  misc_feature (131)..(131): n is a, c, g, or t
  misc_feature (173)..(173): n is a, c, g, or t
  misc_feature (271)..(271): n is a, c, g, or t
  misc_feature (305)..(305): n is a, c, g, or t
  misc_feature (307)..(307): n is a, c, g, or t
  misc_feature (373)..(373): n is a, c, g, or t
  misc_feature (381)..(381): n is a, c, g, or t
cgacaaagcgagactttgtctcaaaaaaaaaaaaaagaaaaaagaaaaaccaaaaaataaaaataaaanttaattaattaattaatggggccgnggcgccccggctgngggccgtggtggatgncccttgnttcagtggtcctacaaaggtagatggtgggcggacaccgaantcaacttgactgtgtaccccataccgttgacgcgcttgtggcagacctgtgggtgcggtctcccctctcctccacctcttcctgctccctcctctttnggctcctactcagtagttccattgagggctgcantnaatataaggacctgttctggacacaagactgggcccgctgggggttttagtagggcaacccccttnccttgcangaagtgaggcatgggtgacagtagtcccctgg

SEQ ID NO: 483898 - DNA, 2145 bp, Homo sapiens
agaacagcgcagtttgccctccgctcacgcagagcctctccgtggcctccgcaccttgagcattaggccagttctcctcttctctctaatccatccgtcacctctcctgtcatccgtttccatgccgtgaggtccattcacagaacacatccatggctctcatgctcagtttggttctgagtctcctcaagctgggatcagggcagtggcaggtgtttgggccagacaagcctgtccaggccttggtgggggaggacgcagcattctcctgtttcctgtctcctaagaccaatgcagaggccatggaagtgcggttcttcaggggccagttctctagcgtggtccacctctacagggacgggaaggaccagccatttatgcagatgccacagtatcaaggcaggacaaaactggtgaaggattctattgcggaggggcgcatctctctgaggctggaaaacattactgtgttggatgctggcctctatgggtgcaggattagttcccagtcttactaccagaaggccatctgggagctacaggtgtcagcactgggctcagttcctctcatttccatcacgggatatgttgatagagacatccagctactctgtcagtcctcgggctggttcccccggcccacagcgaagtggaaaggtccacaaggacaggatttgtccacagactccaggacaaacagagacatgcatggcctgtttgatgtggagatctctctgaccgtccaagagaacgccgggagcatatcctgttccatgcggcatgctcatctgagccgagaggtggaatccagggtacagataggagatacctttttcgagcctatatcgtggcacctggctaccaaagtactgggaatactctgctgtggcctattttttggcattgttggactgaagattttcttctccaaattccagtgtaagcgagagagagaagcatgggccggtgccttattcatggttccagcagggacaggatcagagatgctcccacatccagctgcttctcttcttctagtcctagcctccaggggcccaggcccaaaaaaggaaaatccaggcggaactggactggagaagaaagcacggacaggcagaattgagagacgcccggaaacacgcagtggaggtgactctggatccagagacggctcacccgaagctctgcgtttctgatctgaaaactgtaacccatagaaaagctccccaggaggtgcctcactctgagaagagatttacaaggaagagtgtggtggcttctcagagtttccaagcagggaaacattactgggaggtggacggaggacacaataaaaggtggcgcgtgggagtgtgccgggatgatgtggacaggaggaaggagtacgtgactttgtctcccgatcatgggtactgggtcctcagactgaatggagaacatttgtatttcacattaaatccccgttttatcagcgtcttccccaggaccccacctacaaaaataggggtcttcctggactatgagtgtgggaccatctccttcttcaacataaatgaccagtcccttatttataccctgacatgtcggtttgaaggcttattgaggccctacattgagtatccgtcctataatgagcaaaatggaactcccatagtcatctgcccagtcacccaggaatcagagaaagaggcctcttggcaaagggcctctgcaatcccagagacaagcaacagtgagtcctcctcacaggcaaccacgcccttcctccccaggggtgaaatgtaggatgaatcacatcccacattcttctttagggatattaaggtctctctcccagatccaaagtcccgcagcagccggccaaggtggcttccagatgaagggggactggcctgtccacatgggagtcaggtgtcatggctgccctgagctgggagggaagaaggctgacattacatttagtttgctctcactccatctggctaagtgatcttgaaataccacctctcaggtgaagaaccgtcaggaattcccatctcacaggctgtggtgtagattaagtagacaaggaatgtgaataatgcttagatcttattgatgacagagtgtatcctaatggtttgttcattatattacactttcagt

SEQ ID NO: 483899 - DNA, 786 bp, Homo sapiens
  misc_feature (450)..(451): n is a, c, g, or t
  misc_feature (455)..(455): n is a, c, g, or t
aggttctaagggattctcctgcttcagcctcccgagtatttagggttacctgccaccacgcccggctgatttttttttattttcactggagacggggtctcaccacgttggccaggctggtctggaaatcctgacctcaggtgatccatcagcctcggccgcccaaaatgctgggattacaggtgtgagccatggtgctgggccaagagttatagattcaattcatttggaaacacagctcctatctttgagtgtgcatgtacttttatgaagaaatgatgtcagaaaaccgaaggatgataatatgaaaagtaacaggcatgtgaaaaggtcttccgattgagaactataaggttcgacgtcgttttcagataatggggtcctagctcttgtgtcgttcttttacatattctacatcaatggaagttgtagcacggtgtcagaataaannagantgtatttcacggcttcttaatttctttcaattacactgagatctttttcttcaagagagaaggacattgtcatggcattgtattttttctgaaaagagtaggctgtattttactgagattacggatttgttatatatgacgttttggtcttctaatattcttcagtggattttctctaaagtagtatgtacagaaagccttgtatagcaaaaaagtaaatcacgtaataattctgagatttttggaattgtcacaactgagaaacattgctggcggtgtatggaccgcaagtgtgaagatgttccttgtgaattgcttgcatccagcatta

SEQ ID NO: 483900 - DNA, 119 bp, Homo sapiens
tctacgaggatctcctgggcagggtgggaaatcaaaactattcctgttgaaatgacttaaaacccatactacctctaaagcctcatctcttgactctctccgcaccaaggcttcactgt

SEQ ID NO: 483901 - DNA, 103 bp, Homo sapiens
aaaaaatggttaaacgtgatcaatttaacaccttgctgattgaccgtaaagaaagatgcgctacatacaagtgtagcaccgtttattctctgtaaattcctta

SEQ ID NO: 483902 - DNA, 427 bp, Homo sapiens
  misc_feature (119)..(119): n is a, c, g, or t
  misc_feature (136)..(136): n is a, c, g, or t
  misc_feature (151)..(151): n is a, c, g, or t
  misc_feature (190)..(191): n is a, c, g, or t
  misc_feature (196)..(196): n is a, c, g, or t
  misc_feature (241)..(241): n is a, c, g, or t
  misc_feature (270)..(270): n is a, c, g, or t
  misc_feature (301)..(301): n is a, c, g, or t
  misc_feature (310)..(310): n is a, c, g, or t
  misc_feature (355)..(355): n is a, c, g, or t
  misc_feature (377)..(377): n is a, c, g, or t
  misc_feature (381)..(381): n is a, c, g, or t
aataagtagaaaaatggcagacctaaatccaaccttagcaatgattagttacaatgtaagtggacaaatactctacttaagacagagactgccagacctgagaggaaggcaagacccancaatatggcatccacanagacacaatttaaanacaaagacacaaagtatgagaaaaaatatgcttgcagannctaancataaaaatatgctatccagacactaatcataaaaagcttcaacngagatgttaacactagatgaaagaggctncagaacaaaatatatcaccagaaataaacanggtaatttnataaaaataaaagaatcagagaggatgatgttacaattataaatngtgcctcaaagtgcacacaaantacncacacacacagagcctcaaattatgtgaatcaaaaacaacagaaca

SEQ ID NO: 483903 - DNA, 991 bp, Homo sapiens
agcgggctgctctcccgataggacggatgaagggccgggggtcgtgggcatggggtcccctgcgggtccgagtgctgcccacggagaagcgctggggcagactggtcccgagatacccgtctaaattccccgatacgggccggtcgacgatgcagatagatcaaggtattcatgggtaagacttaatgggtaagctgcaggcgaccgagtcgccgtacgtgccggagtggatcgtggactagataccacacttgacacggtgctcggcacaggatacgccacgaatggttacctataccacgaggcacgacttcactggttggtgacggactgtggtgtctgactagggtctggtgatgataacgcaggggactagtggacttatgatcgtcgtggctaagcggaactctgccggggaccagaagagttggaggaagaaaagtagtgcttgcctagcagcgtatgtcccatagacacatctgtcatatgggcgagcaatccgactggtgacgaaacggatagacgcgttgtgttgcaatagagcgtcgagtcaagagggatatcgatttgcactgaggtggtcaaaagcgcgaggtagaggacggcagaactggttgcttgcagagatgtcctaagggttgagacaggtggaacggtgggcttgtatggacactttatataggggttgagcgacaaagtggataaggcactgtgctcagagtaccaaagagaatgggctctttctaacggtgggaattgatcaaagagggttatgatcagggcgcctatatagcagcgacaatgaactacaccagcaatcagggggagagtaccaaaagtcaatcgctcggcatggcctcagtagaccacagcagaggcctcggaggcactttcggacgagcgtatcgtaacataatcccaggcgtcgcccattgttcaaccggcaccccgcggaatcccactagagcttggtggaaatgttgggggaacg

SEQ ID NO: 483904 - DNA, 786 bp, Homo sapiens
cccagctactcgggaggctgaggcaggagaatggcttgaacctgggaggcagaggttgcagtgagccgagatcacaccattgcactccagcctggccaaccagagcgaaaccccgtctcaaaaaaaagaaaagatttaggtagtttgatgaaacacatttgtactttactttagccagctggggactctgggttaaaaacactgcttttctagatgtggtagcaagttttaatttccttcttttttttttccttttttggcagtgggagtgcctcaagcttatggcctctcaaaaatttacagacaaacgcatgggctattaaggggcaaggctgctgtagatgaaagacaagatgtccatcttctcatgaccaacggtatcaagaatgatcttaatcatagcacgcaattcgtacaggggtcagccctttgtaccctcggctgcatgggctcctcagagatgtgcagagatcttgccggagaggtagagaaggctcctgaaaaactcaaatcttacttaagacaaacggtacttttaagtgaaccaaatgtctgttggataaggggagtattatgggagatagcagaagggcgattactcactttgtggacgattctggtgggtactgttaaggcattttcggtgtggaaaatcggttcctggctatattattaacctaaattccttttgtaaggaaggttataacacaatgtccgggcttttcacgggggtacaattctaggtttggtcttcacgagtacgcaaggtgtttacacagttttaaa

SEQ ID NO: 483905 - DNA, 113 bp, Homo sapiens
agttgccacagaatggggagtcaaacctattcttaaaaaaaaaaagaaaacaatcaggccaggtgcggtggttcctacctataatcccagcacttcaggaggtcaaggtgggt

SEQ ID NO: 483906 - DNA, 1004 bp, Homo sapiens
gatacacccttaatagaattacgcttgacaatgcaatctttgtgaacatatggcacacgtcacactacctttatgccactactgatggcacttggctcaactgcccaagggattatcaaggatatctgctatagatggagtgttacctatatgctgaataaaagcccacatgaaagaatataccatttgtgacactagaatgttgacaaagtacacttgtgtgtacagattcatgagacccgagagaatttgtctcgctggtaagccagttcatctgtggaggctcgcaaggctaagtgttaccagatcattctggcttgagaacaaaggctggtgccaggctcgatcatgaggtgtattcgggattccctgcatgcacccccatcagaaacacccattgaatagccaaggaccatgccagaatcattattccacagaaccaagtcaagcgcaagtcagatatctacgtctgcatgatctcctttgcgcacaatgtaagcagcacaagggaagtacattgctatagttaggtacaactgtggaaaccaaggagcctgagaaggaaatcagacagctttggagctcttggaacccaattgaaccagaaatttgtagcatcagttgactcctggtaccaaacagacttgggaacagaaagccaggatctttattccccgcacatatgatgccaccatcattttggaggaccaactgtgtgatgacccttcacacaacattctatagagcgatgacaggaattcagaggttcgactttggagagcaaatggaagcgcaagcaagaactgaaatctatggggaagactacaacgcaagttataaagtactagggacatcaactggccacacagcaatcagacacacaccgtcacgcgtcattatacccgtacaagcatcccgcaaacatcccaactatacaacgacaaactcgacaacacgacatccaccacagctctcctacacacctagcagcaaaatatcagacg

SEQ ID NO: 483907 - DNA, 413 bp, Homo sapiens
cctctaattgtgcagcccggcaatcagaaaccaagaatctaagccccctttccggtacggataggacctgtgcgccacccacgtagaattggttcactaatagattctattgagcctagtgagatctaaatatctgtgttgcatagaactctctcaagtgctgtccatgtaggaccttctccataaggcacagtcggcgtgttccttgggccacgccccacccatcgggcaccgccaatgtagggtcgtatgaccggccaagccaaatccaaacattctcccggtactctcatcagcgccctttctataccacacggtctggtgggaatgcccactcctcttccacacctcccatatttctctaaagctggccgcaagaatcccctttaggtgcccctcccctaagacattcc

SEQ ID NO: 483908 - DNA, 521 bp, Homo sapiens
atagagttgtgataggcgcagagaaaatactcaataaatatttggttcttatatcccaccatgttttactgtaattaggagagagggtggtgctagaaattttcccccaaagaccctgtaactgaatcagttttcttctccttaatgctttttccatttaaaaaggcatcatttcacaatttttgaaatggaaactatgtttacagattaactagttccagctgaactcccttattttaaatacaaggtaactgaagtctagggctcttaagtgactttccccaaatctcatggtttggaggtactaaagctaatatcagaaatcagtcctcataataacttggctggggtcctcttttaactgtttttctctttatcacaatagtcaagcacacataaaaataattatattaaaaatattaatctcaggacaaatgctagtttttttctgtaaataactcttaagcaattaatttatgaacaatcattaaaaattaaataatgtcatttagatgatcaaa

SEQ ID NO: 483909 - DNA, 317 bp, Homo sapiens
acacaaggtgaggaaagaaataaaggtgtgaggaaaagaccttactatacgaagaaaagcatttccagtggtgtggcgtgaaaacaagaggagataacctaggctgctggaaagcacccttttgttgttttcattctgttccctcccattgtagattgaactttgttctctgctttctttttcttggaaagagcaggacttagctttaagtcagcactgattggggcactgttcctaaaggcatatccagtgcttcattgtcattgtgttttcaacactttttaaaattaaaaccagttcattttggggcatgcatc

SEQ ID NO: 483910 - DNA, 222 bp, Homo sapiens
tttttttggggcccccaaaaaaccgggttttaaaaaaaaaggggggggggccgggttttcattttcctgttttttccccccccccgggccccggaaccctttttttttttgggggggggggggcccgccccccttcctttttttgccagggggggggggttttttttttttttggcggccccaaattttttttttggggggggggggtttttttttttttta

SEQ ID NO: 483911 - DNA, 1726 bp, Homo sapiens
gtagtagttgttagtggtgtgcactagtatagttagatatgttatgattgatgttgtgtatggcgtgtatatatttggtagttatattgcgtgtagtactaagattgtttataattgtgtatatgttgtgtaatatatgttggttgttctcatataatagttgtctagttgtatatttatggatcttttgtatgtgagggtattagtggcttgtggtctgttggtgcaatattttgtgttgctgtttggtacttccgaatatctttatgtattagatatatggtgctttgaattatatagatatcaattttgtgtttgtagtctttttgtggtttgtctatagatgtatgggataatggaaactttagaagtattttattatatgtggtgtctttaatatggttgaatatcactatatattgatccagaatggtgattattggttataagatcaatgggttgttgggaatttttgggttattgttagatgtgtacataggtgtgatgattacatggggtgtgacttttgcccttttgatgaatatttatgtccactgtcgggggacgttcgtgggtcttgtattttgcagctaagtggggcctaagccatatgggtaagatgtatacttgggatatagttgcggtattaattatggtgctttagtggagatattctgtgtaattcatagtctgttagtgggtaagttggtatctgtatgatgttaaagtatgtgatatttatgtactttataatgaatgtggtgctggataaataggggtttgtctggtccgggggattgttacattccaagtttaaattttgcatatactcgtatagaaatagcaattccggtgttgtatggttttgataggtataaattgtgattaatgaatacaatgcatgaaatgcttgtgtatgtactcctgggtgtcgcctagttgtttggaatcagtccatattgcggagctctttcgtggctccgcgttgctgtgactagcgttggtgtacgcgacgtgtcatagtcttcctctattgtgaattctttctacataacgcccgccctgttatatgtacgagggatacgctttccatatcaaacatgtggatgggttcctaggctgtcgtccaatccctgcaatatctccagcgatcgagaccttaggttctagtatggatgtgcttcccacttggtgaaccatcgttgaatacgcgtgtctaatatatgtgtgactaatacgcggtccttatcgccttggatcgccgcagggatgcatctgcaggggctctgcgctttgagcgatgccatgaatgactgcgttgatgtcacccatgtggcctatgggccattggtgcacaatggtccctctggcatgcaactatgcgtatcatttggtgacggaagcacacctctcatccatgttgatagtctatgtctacgtacaaaagtagtataatgttggacatgggccacaggtggctcatcgccctgataatctccagcaacatatgtgggagttccgatggcaatgcggagtcaacttgacggatcaggagatctagagatgccagccctggcacaatattggtgaaactcacgcatctctacgtaagagaacacaacatatagttagccgggacgtggtggcaggcgtctgtaatcccagctgcttgggaggctagaggcaggagaatcatcttgattcctggagaatgtcggttgcagtg

SEQ ID NO: 483912 - DNA, 311 bp, Homo sapiens
atttggccccccgggcccaaaatttgggccgggggttaaaaccaaccccccttttccgtttgttttgggccgaaaaaaaccccagccttttggccccccctccccctaaagggaatctttttttatcccggggggggccccaaaaatttttttttttaaaaaacccccccccccaaaaaaggccccccggccaagggtttgggccccccccctcccctttgcccccccgggtttggtttccccaaaaaaccaaagggggccctttggttggttcccccataaaccctttttaaaaaaccctttttttttta

SEQ ID NO: 483913 - DNA, 952 bp, Homo sapiens
agaccttggaacccaaagtcattgatgaagtccgcactggtgacctaccggcagctcttccaccctgagtcagtctgcatcacaggcatggtatgatgctgccaataacttatgcccggtagggcgctacaccacttcggtatggcagatcatggctctggtgttggtccggaattcgcaaggtggtctgaagcggtgcaccggtgtcttccgtggacttctggggtttagccacagctttggatgggggaactggggactgggttcccccatcacctgctcgtggaacgtctctcggatcgtgttctgggccaagaaaatccgagctggtgttcgtccagttgtaaccgtggcgaccacccaggtttcccacgagtcatgttaggtgggagcccctaaagagggtcgggatcctctatgcacctcacgatcgatccctgggagtcgactcctgagttgtgccttccagtggatgggacacattcgaggcctgtcgtagtagacatctgtcgtgggaaaaccctcgataatcgagcgcccaaccgtaaatgtaacccttaaccggccttattagccagatgttgtcctccatcactgcttccctggagattgatgcgcgccctgaagtgttgaccttgacagagttcctagagcaacctgtgtggccgtaccccgtattccacttcgctctggctaattttgcccctgtgatcttttgctgagaaaggctaccatgaacaggtttctgtacagaagatcaccattggtggttgggccagccacctggtggtgaatgggcctcggcatggtcatggtggtttgtgccttgtgcccggttctcggtccccatgtgttcggtgtgcttggccctcaaacaggaatcattgggtgggcgccgcccggtgcgcacacctcccgggcggggtgcgcggccaagtgagtggaccagtgg

SEQ ID NO: 483914 - DNA, 186 bp, Homo sapiens
  misc_feature (65)..(65): n is a, c, g, or t
  misc_feature (115)..(115): n is a, c, g, or t
agaagggttgaatgccggccaaaggcttttccacactcaaggcattggtatggcgttttcctccnactatgtgatcacctgtatgtccgaataagggtttgaattctggactaanacgttttttcacatattgctacatttagtaaggtttttctttaggtgtgaatcctctctatgttcaatcaa

SEQ ID NO: 483915 - DNA, 162 bp, Homo sapiens
cacgctctcacaggattcatggtacaccccgtactcgtggcagcagttcctctttgccttatatttgtggtacgcccgggcagccttcaagatagggtttggcacatttccgggcacctccagccaacacaccaaccacagctctgttgtgagcagcgttgg

SEQ ID NO: 483916 - DNA, 620 bp, Homo sapiens
  misc_feature (416)..(416): n is a, c, g, or t
tttacactctgagtacatgatgggattgtatctagatggccctcatgatcatgaccttgagggtcgctttctgaagcacaattttacctatactgaatgttagcctggatcctccattttcaattataaccaattgtgtgccctttctccgactaacttccactactgccctctttaaacaccatttgccatggagttcatgcaagtgttcattgttaacgctgcatataatcgtgaatgcgctccccagtgtatagtgaacgtttaagtgtgatcgatagcttatgcatgctaggagctctccaatactcatttcattgagatttaatcatacgctaatggaaagcttaccacctgtgatatgacctctgtgtccacatctcagctcttaagagctgctgtacaatctttgattngcttttctggcctctctttagtcacctgtcacaagaggttcctgctcagtcatgatactcgagagtacgataatgactcgttttctaatgcgctgcagatttataagaaacgatcctgttgtcattcgaaagaactgctagcttttatcttttaacgcactgaacatttccccaattgagtctatggatgagcagttctttgaa

SEQ ID NO: 483917 - DNA, 167 bp, Homo sapiens
gggaaaagtccaaaatactataaagtctagaaatgagttgttactatacttttcaccaacccaaataatatgttactggaggataagtgcataccggtttataagatttatttcatattttgatagcacaactatttatagggcaaccttaggatacagtagggaga

SEQ ID NO: 483918 - DNA, 293 bp, Homo sapiens
gcaaagtcaaatttagctatacacccattcaataactacaacaaatgaaggtggttttacctttaaggtagacatttgtggcctaggtgcggtggctcacgtctgtaatcccagcactttgggaggccgaggtgggtggatcacctgaggtcaggagttcaagaccagcctggccaacatagcgaaaccctgtctctactaaaaatataaaaattagctgggcatggtggcaggcgcctgcaatcccagctactcgggaggctgaggcaggagaattgcttgaacccaggagg

SEQ ID NO: 483919 - DNA, 286 bp, Homo sapiens
acagggatatagctatgactagagaggatatatatgaactccgtgcaatctgacacataaccaggcttcggacagcgatcattgagacctcttggaacattcatttcctcttcgacggaattggtgttttacagtagtcagccatctatcaaatactttggcagctggcagggggttgacacataaaacagcctcagggctggtgatgcactcctagtcattcccatgctcgctctcctctctcctctctctcctctctctcctgtctctcctctctctcctctct

SEQ ID NO: 483920 - DNA, 678 bp, Homo sapiens
accgcagaggggagcattcgatcattgggctgggcctattcctcactcgtcgactgatgctatgcttcgggcagaggaagaggctcaaccaacaggcgaagtggcctaaaactacggctatggcagaacgaaaatggtgcttaccaaccaaactgtacagaagcccaccggggaagaagcacgaccgtacacagttgagcacgaaagccgtcaactgaagcgctccctataccctcagagggaacaagactaatagctacaggcccggatccggggagctacgacagattcatacttatcagaagtcaacccaactgctcatacgaaaactgcccttacagaggaaagtgacctagatggcgcaggatttcaaaaccgagctgatgataaacacatcatgacatcgacacgcttgaagacactccagtggctcacctgctacacatgactgcagattccaagctgtttgacatccacgctaagagcgatcgcatgatgcccaaagacgttaagctggctaggccgatactgctagagacatgtccatacaacacagttagtcagagggacagtgagccatactggtcctttggactggtccagcattgactttgggcgccaagattctaacgaggctgattagcacttgagcttcaacatgcttaactaggcctgtcg

SEQ ID NO: 483921 - DNA, 201 bp, Homo sapiens
gcactcacatatcagtagcactgagcatacctcagtgccagagcttggtcgtaggtatcactccccaataaaaggcatccatgctccttgagaaacgggatgcttctaggacaagaacaggaaatatacaaagtgagcctggaacattttgtcgtgctagaaaataaggggtgtaggggtgtgtgtgtgtgtgtgtgtgtg

SEQ ID NO: 483922 - DNA, 81 bp, Homo sapiens
tttttgcgtgatgtggaattcgcgcctgtattttaaaaaatggtgtggtttctcccttgtttgtattttaataaccccctg

SEQ ID NO: 483923 - DNA, 151 bp, Homo sapiens
tttcaagtgatatctatgaggctgtggaaataggagacagctattggatcagatgcaaagatggggttgtctttggggagaaaaataggccttctaaaccttatgaaggagggtccacaaaaggctttttaatgttgatcggcaagttgga

SEQ ID NO: 483924 - DNA, 141 bp, Homo sapiens
tcacttgagcccagatttttgagagcagcgtgatcatggctcactgcagcctcaacctcacaggctcaatgcgatcctcccacctcagcctttgagtagctcagactacaggccagcaccaccacactcagctaattgtag

SEQ ID NO: 483925 - DNA, 685 bp, Homo sapiens
cgccgccggggtggggttcaggcgcttcgtgaaggttgaccgtatggcctatgtctactttgaacctcatgccgtaaaataggtcgcgattgtagatgttattgatcagaacaggtaatttgatcgatggaccttgcactcaagtgaggagacaggccatgcctttcaggtgcatgcaggtcactgatttcatcctgaaggttccgaacagtgcccaccagaagtatgtcctacatgcctggcaaaaggcagacatcaatacataatgggcagccacacgataggccatgaggattgaagccagagctagtttaagccactatgacagatttttgtcgtttgaaagttatgatgacaaccgaaaggcggtccacaataagcaagaatgtagttaagaggcttcaatcggcacctatcctgtaagattctcccaaaaaagcacctggtactaagggtactgctgctgctggtgctgatgctgctaaagttacagcaaaaaagaccaccggcgtgagtacaaagtgctcagccccagaaggctcctgcccagaaagccacaggccaaaaagcagcgcctgctccaaatgctacaggggccataaggctccccccagatagcactgttacaaggtatttggcaggaagcttacgtggttgcatgctgctgggctgaattaggttgcag

SEQ ID NO: 483926 - DNA, 269 bp, Homo sapiens
ggggggggttttttttacccccgctttttttttggaccccccctttccctggtggcccccccccccctgtttttcccccccttcccgcccccggggccgttcccccccccgggcccttccctcggccccggggcgggttccctttttcccccggggcccgctttttccctttggccttttttggttgcccttttggcccggtttgttccccaaggcgggttggggccggtttgggttttccggggttttgtcgccccccggggccccca

SEQ ID NO: 483927 - DNA, 379 bp, Homo sapiens
  misc_feature (33)..(33): n is a, c, g, or t
  misc_feature (90)..(90): n is a, c, g, or t
cctagttttagaagtttcaatagcaggtacacnagcaggtaaatggcctcatgggcatcatcgacaactggaatgcttaaaggagtggcngggattctgttccagtcaactcaagctacgcagcaaggcaagctcagttgacagaatttcctgtaattcaaaagaaactaaaaattttctatggcttctattgatttatttatttagagacagggtatcgctctgttccccagactggagtgcaatggtgtgatgccatctcactgcaacctcagcctcctgggctcaagcgattccccccacctcagcctcgcaagtagctgagattacaggagtgagccatcatgccggcggtgctattgaaacttctaaaactagg

SEQ ID NO: 483928 - DNA, 373 bp, Homo sapiens
ttcgcgcccgaacacagtcatctgcttgaggcatactcttaagtcgccacacacaacctcctctcttatgctatctcgcagtaactgtaacccgcattccattaccacaccctgctctcgccaacatcgttcacataaccttcaatacacccatgtagccctctcattcgactgacaccattttagttatttttggccttcttaaagctgggcaatgtaatgatcagactccttgtttgtctgaacacgcatctttatacatgccttttgtaaaccaaaaactttctcaatctctccaggtctctcacatgcttaccactgggctactgtaaatgagacacagaataaaattatttcctgttctaaaaaaaaa

SEQ ID NO: 483929 - DNA, 740 bp, Homo sapiens
tggccgatggattccaagtccccaggagggcttaattttttcttttcaacatccggtcctgcggcttcctgggctcttttggcccgtatgccgaaaagccgagcgtgtggcacgggccatacggaaactagcgaaggcttggaaattcttctcttcctcagtgatgactcgagctttctccttcttatagacgtcccggaggggcatgaccggtccggtcagctgggtggccagtttcagttcttcagcaaaactgtctcccttctggggggccgagggctctccgggggaagaggatgagttgggagcggactccttcagccgtctgcacgtggcgcctgcagggactccggtggacgttgtcccgcctcctcggatccacagaaaatgccgagtggtccgggccacctctctgggtgaatgccggccaccctgagctcctccaggctgaagccgcggccggcgcgcaccttcggggggtaccgaaccgtggggcagcgcacgattgggccggagtgggacccgacgcggtggcgacggggacaatgctgggcgcctgggtttgccgggcctaacgtactgggggatctatacgcgccggctggttagaaccacgtggccacgcgccgttgccagtcctttgtgaaagtgggggcttcaagaaccatgccattcccggtgggcgccatggttgcctagggccctggggttccctgcgccaggaaagagagaggagagac

SEQ ID NO: 483930 - DNA, 963 bp, Homo sapiens
ccagggaggctctgggtggctcgtaaggattcccggggaagggtaaaagtcccaccgcgtaggtgaggtcgaacgtctagggtgcattgtgggcgagtcacggctgtagtgtttggcatcggggttgcgaccagttgcgctagcggatgtatcgataggttcgtagaggggcgctagagtcctttgtagagcccgtttcgctggcgttgcaattgcggaggggcgaaccgggtgcactcctgtgtatgcgcccgatgcgcgggggtgcacggccgcagctgcgagagcgaggatgccatcagtagccccagcgctgcgtggatgcgatcatagtggagaggtgctgggtcaggctgtatgatgaatgcatggtacctctagtcgctttctcgctgacgcagggtctttgcccctggagccgccactttctgggactgttgcctagcgtggcacatcaaaggctcctttgcaggacgcaagtgcaggagtcctggcaaggatggctgccagcattggacttgtgggagccgtgaataatagaggatgttgatagcccacagctaacgaccccgcaagggagctgtgggacctcttgttcctgcgctcgtgcagcatcgcagtctcctagggggtgtcagccatgatgacgtgaacctcaggcttgtcagtctagcagcctctgcctaccgagcccggcagctgctaggaggaggcagtcacgtgtgccggcaccatgacaagtgcctgacgacggtcaggcacttagagaatacctaaggccacaatccacttctgcactttgtttcccactcccattagccctgggccacctcctccagttcttcctcttttacaaatctagttggtcagctttggagagcttgagctggcaccataggagggtagcgcatggtgggggctgggtgggggactgcccacagatagcacgtagcatataggaaa

SEQ ID NO: 483931 - DNA, 107 bp, Homo sapiens
tcaaggattgtctgcgccctcactccggtcgacctgctcgaagattgcgccgatcaccaccgtgcgccgttctcggccgagtacctgtgtcttcacgtgcttggtgt

SEQ ID NO: 483932 - DNA, 518 bp, Homo sapiens
tggggaaatacaatggaatattattcagccataaaataaaatgatgtactgatacatgctgtaacatggatgaaccctgaaaacatgctatatcaaagaagccagttccaaaggatcatacattggatgaacttttatgaaatgtccaaaacagggaaacccatagagacagaaagtagactggtgattcccaaagactggaggagagaaatggattgactgctaatgggaggttcttttgggggtgatgaaaaatgctttaaaaaattgatttggtgatggttgtacaactttgtggattttttgaaaaccactaaactgtacacttttaaaaggtgaattttatgggatgggaataatatctcaatttttttaaaaaacgggaagcaaaaaaaaatgggaaacaaaaaggttggctgggttgggatggccatttcaattttaacatgttgtgcactttgtctcttggagggtaaaatgggaaaccccggccccttaaggtttaaaaaaaaggggcc

SEQ ID NO: 483933 - DNA, 658 bp, Homo sapiens
  misc_feature (23)..(23): n is a, c, g, or t
  misc_feature (105)..(105): n is a, c, g, or t
  misc_feature (109)..(109): n is a, c, g, or t
  misc_feature (160)..(160): n is a, c, g, or t
  misc_feature (162)..(162): n is a, c, g, or t
  misc_feature (200)..(200): n is a, c, g, or t
  misc_feature (207)..(207): n is a, c, g, or t
  misc_feature (268)..(268): n is a, c, g, or t
  misc_feature (285)..(285): n is a, c, g, or t
  misc_feature (295)..(295): n is a, c, g, or t
  misc_feature (378)..(378): n is a, c, g, or t
  misc_feature (380)..(380): n is a, c, g, or t
  misc_feature (417)..(417): n is a, c, g, or t
  misc_feature (420)..(420): n is a, c, g, or t
  misc_feature (422)..(422): n is a, c, g, or t
  misc_feature (428)..(434): n is a, c, g, or t
  misc_feature (497)..(497): n is a, c, g, or t
  misc_feature (657)..(657): n is a, c, g, or t
caactccggtacactgggcctgngggtcaacttcattcgccagctgtgtctttcctccctcactttgcttgcgcgaaagcactctgatagctttcatctccatcntccncatctcggaactgaatgggaccttctgaatcagagtcgcacacctacacancntcctcccgtagacacagaggtaatttaggaatgacggngggaggngtcatttcttcacccgaatgcggatggacagcgtttggcccctcttcttcttcatcgtcanggaacttttgagcattncaatagtgangggaagacgcacctggcccgacccagcgaacagcagaccacagaaaagctgtcactgttttcaaaaagcaacgaatgagctcngngagaaccctccagaataggagtcatgggaagtgggcnggngngggccnnnnnnnttcgaatatgcagtgggagtggagggagcctagagggtatatgggggtcccaaagttctggtncagtatcctcttggggacttcctttttctgatcttcctgctggggaatctcctggtgtatatctaaggatggtggaaactcaatttctggcacaacttgaaaagtcttagcagggaatggaggggtgcgtggaggctctggaggtatatgagtaggcagnc

SEQ ID NO: 483934 - DNA, 107 bp, Homo sapiens
tctccgttttcctggttacttacttgtctgccctcggggccttggtttgtgcaagcggttttagtttcttaaagggcgggttcccggttttccccaaatataggggc

SEQ ID NO: 483935 - DNA, 249 bp, Homo sapiens
tattgggctccagactcatggatcctaaccttccccgggctgtttctacttggatctgtttttttctcttgctcttagcagtgtctaaatgtgaatcttgtttttctatcttccttactcatcccccactctcctccaacttaaagcaccattaaacacccacgccctgtcctactcttgtcctcgtccactcttgcatgccatgctattcaagttaccccacctgccttgtggttactttacttggca

SEQ ID NO: 483936 - DNA, 738 bp, Homo sapiens
gcatacaatgcacttgcttttagtatattcacaatgttccaggcaatttcatcatgtcccttccaaaatcccattatgcataaagtggttacaccctattctgcttccctgagccctaatgaccactaatctaatttacatcccaatgatttgccaattcctgatgtttcatgtgaataaaatcaagcaatattgtcctttgtgcacttaacataatgctttcaaatttcaccaatattataccatatataagtacttcattctttgttatagctgaaaatttggtgtccagttatgagtcaacaagcatatggattgtttccactttttgactgtatgaatattactgctgtaaatattcatgcacatgtttattttttgagcacctatgtttgtaagattaacagctgacttaagagaaacaatggaaggcaagaggcagtagaataatatattcaaaagatgcaaaggaaaaaaaactctcagccacgaattccttatccagcaattattttgtcaaacaatgaagattaacacaaagactttacccagataaacagaaatattagctgaagttgttgctggcagacctaccacattaaaaaaaaaacttccttaaataaatccctaggggtaaaaggccggttacagaagaccgcccttgaacccacttttaacaaagccggtttgggaacttgggcttttaaacgacgcacaccgctttgccctatccaaacg

SEQ ID NO: 483937 - DNA, 490 bp, Homo sapiens
  misc_feature (314)..(314): n is a, c, g, or t
ccttgtgtgtggggtgagttttaaaaatcagagcgctctagccactactgggtagaaagtagcatttttttttacagttaataacatattggggggtggggtggggtgtaacttggtgttcttcctccttagcctattttctggtgcgtatggtcggtgtggggcccctttcacagctgcacaccacgaaaggtgatatatcttaaagtggtgttctgagacctcataaaaaggggaatcaagtctgggcaagcacagtcggaagatggccttttaacaaaggcggggaatttggctggtcatatccagatggnaggccgatggcccgggctttcagcgtagcatggggagttgcccctgcaagtctccttccagctctccctaatcgattccacggacaaggtccctaccccagagcttccagtgcaagggaattcttcaagtttaaatcgggacacaaaattcagatcatggtatggcatcatttagg

SEQ ID NO: 483938 - DNA, 827 bp, Homo sapiens
  misc_feature (665)..(665): n is a, c, g, or t
  misc_feature (678)..(678): n is a, c, g, or t
  misc_feature (745)..(745): n is a, c, g, or t
  misc_feature (748)..(748): n is a, c, g, or t
cccacgcgtccgcttattaatcttcattcttctactatccccaatcctaatttcaatatcaaacctaattaaacacatcaacttcccactgtacaccaccacatcaatcaaattctccttcattattagcctcttacccctattaatatttttccacaataatatagaatatataattacaacctggcactgagtcaccataaattcaatagaacttaaaataagcttcaaaactgactttttctctatcctgtttacatctgtagcccttttgtcacatgatcaattatacaattctcttcatgatatatacactcagacccaaacatcaatcgattcattaaatatcttacactattcctgattaccatgcttatcctcacctcagccaacaacatatttcaacttttcattggctgagaaggggtgggaattatatctttcctactaattggatgatggtacggacgaacagacgcaaatactgcagccctacaagcaatcctctataaccgcatcggagacatcggattcattttagctatagttgattttccctaaacataaactcatgagaacttcaacagattatattctccaacaacaacgacaatctaattccacttataggcctattaatcgcagctacaggaaaaatcagcacnaattggcctccanccatgactaccatcagcaatagaaggcctacacagttcagcactactacactcagtacatagtagtngcngaatttctacggtcgattccacccctcaagactaataatacttattttaacatattaattgctcggagctaacacatat

SEQ ID NO: 483939 - DNA, 319 bp, Homo sapiens
aagaaaaaggggagggagtagggaagaaaaagaaaccaagggaatcacaggaccacggcagctcgtgtctgtaatcccagcactctgagaggctgaggtgggaggatcacttgagcccaggagttcgagaccaacctgggcaacatcgtgagaccctggctctgctaaaaactaaagccagatgtgatggcttgtgactgtagtcctagctactggggaggctgaggcaggaggatccctcgagctcaggagggcaaggccaccatgattgtgccactacactccagcttagatgacagaatgagaccctgtctccaaa

SEQ ID NO: 483940 - DNA, 766 bp, Homo sapiens
gggacccggaagtggcgccctgggctcgcaggagggtgccgcggggatggcgggagccggagcatggagccggagctcgacggaggagacggcaggcgggggtcgaggctcgagctcgctgatccaccgaccgcgcaccagagcaacatcctcagaacaacacatcggacctgcggctcagaccctcggcccctgcaggatgcgcacttggcgggatcatggggggcctggggggtcctgggggaacaaacaggccacctgaaccaacctggagggcatcatatatatacagagggaaacaatgtggaagcagaggcagatagaacggccagctcaaggacagtaccccacttgacatctaacagtgaaatgctgcactcagtcccagtgatggcgtcacatgatgccggatgaacgcacacagaaaacactatggggaccccaattgatgtctggtgagcagggaaagggtcccatactatcatgccagaagacttcattacaccctaccggacacaagttaacagtcgtgccacacgtgggcatggtacaaggcatacggggggcctaggatcccggaaggagccctagagagttccaccccgggattgcagtgttcccaaaacaggccacatacatccgtagcttggtggaactcaggcgggggatagagccatggcaagaaaagggttgtaccacgatcccagccaattgagacattgaaggcaacgggtttaccaaacgcacaggcatgcatattgaaagg

SEQ ID NO: 483941 - DNA, 877 bp, Homo sapiens
  misc_feature (10)..(10): n is a, c, g, or t
  misc_feature (17)..(17): n is a, c, g, or t
  misc_feature (27)..(28): n is a, c, g, or t
  misc_feature (35)..(35): n is a, c, g, or t
  misc_feature (40)..(41): n is a, c, g, or t
  misc_feature (43)..(43): n is a, c, g, or t
  misc_feature (47)..(47): n is a, c, g, or t
  misc_feature (64)..(64): n is a, c, g, or t
  misc_feature (66)..(66): n is a, c, g, or t
  misc_feature (77)..(77): n is a, c, g, or t
  misc_feature (79)..(80): n is a, c, g, or t
  misc_feature (84)..(84): n is a, c, g, or t
  misc_feature (86)..(86): n is a, c, g, or t
  misc_feature (136)..(137): n is a, c, g, or t
  misc_feature (141)..(141): n is a, c, g, or t
  misc_feature (143)..(143): n is a, c, g, or t
  misc_feature (146)..(146): n is a, c, g, or t
  misc_feature (148)..(148): n is a, c, g, or t
  misc_feature (152)..(152): n is a, c, g, or t
  misc_feature (161)..(162): n is a, c, g, or t
  misc_feature (166)..(167): n is a, c, g, or t
  misc_feature (172)..(172): n is a, c, g, or t
  misc_feature (217)..(217): n is a, c, g, or t
  misc_feature (219)..(219): n is a, c, g, or t
  misc_feature (221)..(221): n is a, c, g, or t
  misc_feature (228)..(228): n is a, c, g, or t
  misc_feature (253)..(253): n is a, c, g, or t
  misc_feature (269)..(269): n is a, c, g, or t
  misc_feature (288)..(288): n is a, c, g, or t
  misc_feature (299)..(299): n is a, c, g, or t
  misc_feature (303)..(303): n is a, c, g, or t
  misc_feature (305)..(305): n is a, c, g, or t
  misc_feature (307)..(308): n is a, c, g, or t
  misc_feature (314)..(314): n is a, c, g, or t
  misc_feature (334)..(334): n is a, c, g, or t
  misc_feature (341)..(341): n is a, c, g, or t
  misc_feature (347)..(347): n is a, c, g, or t
  misc_feature (349)..(349): n is a, c, g, or t
  misc_feature (353)..(354): n is a, c, g, or t
  misc_feature (365)..(365): n is a, c, g, or t
  misc_feature (379)..(379): n is a, c, g, or t
  misc_feature (393)..(393): n is a, c, g, or t
  misc_feature (405)..(405): n is a, c, g, or t
  misc_feature (413)..(413): n is a, c, g, or t
  misc_feature (421)..(422): n is a, c, g, or t
  misc_feature (428)..(428): n is a, c, g, or t
  misc_feature (430)..(430): n is a, c, g, or t
  misc_feature (432)..(432): n is a, c, g, or t
  misc_feature (434)..(434): n is a, c, g, or t
  misc_feature (441)..(441): n is a, c, g, or t
  misc_feature (448)..(449): n is a, c, g, or t
  misc_feature (451)..(451): n is a, c, g, or t
  misc_feature (462)..(462): n is a, c, g, or t
  misc_feature (464)..(464): n is a, c, g, or t
  misc_feature (477)..(477): n is a, c, g, or t
  misc_feature (480)..(480): n is a, c, g, or t
  misc_feature (488)..(488): n is a, c, g, or t
  misc_feature (494)..(494): n is a, c, g, or t
  misc_feature (866)..(866): n is a, c, g, or t
taaaaaaccnggtttantgggaaaacnncaaaaanaaaannanaaanaactttttccacaactnanaaaaaaaaaancnnaaantnaaaaaaaaatggttttcattatgtaagtctaaaaggaaaaaaaacaaaannaccnanccnangcancaaaaaaannccanncaaanaaacccaaaacccccaattcccccgtggcatgttttaaaacaaanantnaaaaacngtttaccaaaaaaaaccaggatttnaacaaaaagtaggttnccgcctacaattgcaaacnaacaaaagccngtcnanannaaaaancccaaaaaaacccgaaaatnaaaaaancaagtnanttanncccccgaggcngttttagtggcacntttgtgacaaaaangacccccccaangccttacnacacaacnnaaccanancnancagtcangaaaaannanacccagtccancnttcaatccagtcnacnccggttcngaacanataaacacaaaacactacagatttattaatatagcattttcccacaccctaaccctataaagaactttaaaagagaaaatttcatctaaatatttcacacttaaaggaaagccttaccaactatggcaacaggtttggaccatgaaatagtactttcctagatgacatatcgagtcaacatgaagccttagctgaaatgaatgattcaggatattaatgagaaattctcacaaatgatatgcatttaggaaatgattttgctttccttaaatagttcgaaggcttgaaaataaactttttttttgcatttcttttagaatgtttggtcattaacaacttttaaccttatcttcctcttctccttagcccttnacagaccaagt

SEQ ID NO: 483942 - DNA, 323 bp, Homo sapiens
  misc_feature (30)..(30): n is a, c, g, or t
  misc_feature (47)..(47): n is a, c, g, or t
  misc_feature (64)..(64): n is a, c, g, or t
  misc_feature (114)..(114): n is a, c, g, or t
  misc_feature (169)..(169): n is a, c, g, or t
  misc_feature (299)..(299): n is a, c, g, or t
tccttattggtcagcctggacttgcacccntgacctccaggtgaccnaccaacgtcaggctccnaaagtactgagagtccagtcatgatcctctgtgccagagaccgacaaacnctccagcattctaatagcaatttgatgaccagccaactagccttgactaccctcntggtcaccctatccctaaatacctatctggtgagatgctactctgtactgagcaaataacgatctgtatgatacatgattatacactcttgctacaaagaggtgtacaacattgtgggttggatccctanactccctttacatgaaaaaaaaaa

SEQ ID NO: 483943 - DNA, 137 bp, Homo sapiens
taaagtatgctgtgagcaggataccttccatttgatgtgctctgtggccagggagcatgtgatggacaccttagttcgtatactgtctcgctgtgacatcatggtgctgcaggaggtgttcgaactcttcctggcag

SEQ ID NO: 483944 - DNA, 103 bp, Homo sapiens
ttccgtgagctctgagcaccaggcagggatgaccaccccatctggctgggtgctgagaggtcaggggaagaccttggggctggtcggggatgcagaggagacg

SEQ ID NO: 483945 - DNA, 859 bp, Homo sapiens
gtcatcactcccagaattatctagcacatgcagaagattcgtgggagtgatgacatagttcttaaagctgttcctggtacaacaaaatgagtgagccacaatacgcaaaggctggatgatagtcacattgctgctgccaacagacactagtccttagtccaacaatgtctcttacataaaacaaccagaggtggaacaatctaaatgtgggatagcctcgttctccattacacaaatgtacttgcaagcgatgtgctatgtcgtcgcatcttcctacatgtagtcttcacactatacagcacagatagtcttcatggcagtctaacatccaatcgacataaggaggaatgtcgaaaattctcaagataggaagacaggcgttacgtccagggagtgtctcagtgtatactatttcttctccaaatgcccttgttagttagatactcgtgcacaacaggcatactgcttggtggactgcatggtcatgtctcttatttgtccacgcagcttgaaggtaagtatagctatgtcgagtgtcttgcaaaggagcccctgtggatgagatgtcagaactctccaaggagctcgggaacatcttctactagggcgcgaacatctgtgattggcgtcgagcgaaccagacagaatcatggatgccgacagactctggtcagtgaacccaagccaagaccgaattgtcacatatgcagatatcttgacaatgtcagtgctgggtacagatccaagatgctccagagttagggacaaaagctctaagaatctggcctaaccagttgcagcgtggaacacgtgcgaggaggctgtaatgctagatactaaggttttacagcaagtacca

SEQ ID NO: 483946 - DNA, 718 bp, Homo sapiens
  misc_feature (387)..(387): n is a, c, g, or t
cacgagcatatttcacctccgctaccataatcatcgctatccccaccggctgtcaaagtatttagtctgactcgcgcacatttccacgggaagcaatatgaaatgatctgctgcagtgctctgagccctaggattcatcttactatttcaccgtaggtggcctgactggcatgtgtattagcaaagtcatcactagacatcgtactacacgacacgtcactacgttgtaggctcacttccacttatgtccatatcaagtaggagctgtatttgccgatcataggaggctgtcatatcacgtgatttgccccgtattctcaggctacagcccgtagatcaaagctaggccgaaaatcctatttacactaatacatattcagtcggcgntgaatctgaactttccttcccacaaacactgtttctcggcctaatccggtaatgccccagactgttacctcaggactaccccggatgcatactaccacagtgaaacatcctatcgatctgtaggctcattcagtttctctaaacagctgctgactattaagtaattttcatgatcttgaagaagccttcgacttcggaagcgaaatagtcctaaagtagtagaagaaccctccataaagctggagtgacgtatatggatgcgccccagcctaccacacattcgaaggaacccgtattcctgaaatctagaccaacaaaaggacggaatcga

SEQ ID NO: 483947 - DNA, 134 bp, Homo sapiens
ccctagaggatccccctctacagccatcctgcacttcagactattgtcggagcacggatctaccactcaaggaatacaggaggccaattccaagaaatggaataatattttcaaggtcattcaggtgggctctg

SEQ ID NO: 483948 - DNA, 368 bp, Homo sapiens
  misc_feature (266)..(266): n is a, c, g, or t
  misc_feature (328)..(328): n is a, c, g, or t
  misc_feature (351)..(351): n is a, c, g, or t
atcttgctctgtcgcccagactggagtgcagtggtgtgatcacggcttgctgcagcctcgacctccctggttcaggccatcctgccacctcagcctcctgagtagtagggactacaggtaggcaccaccacacccagctaatacttttaatttttttttgtagagatagggtctcattatgttgcctggggtagtctcgaactcctaggctcaagcgatcctcctgcctcggcctcccaaagtgttgagattataggcgtgacacncgtggcccagattcacagaagtttcatacacctttcacccgggttccctaatgtttaacagnttacattaaccttggtacatttntcaaactaaaggtgcat

SEQ ID NO: 483949 - DNA, 1515 bp, Homo sapiens
  misc_feature (3)..(3): n is a, c, g, or t
agnggagatctgtgagcccagcgctgactgcgccgcggagaaagccagtgggaacccagacccataggagacccgcgtccccgctcggcctggccaggccccgcgctatggagttcctctgggcccctctcttgggtctgtgctgcagtctggccgctgctgatcgccacaccgtcttctggaacagttcaaatcccaagttccggaatgaggactacaccatacatgtgcagctgaatgactacgtggacatcatctgtccgcactatgaagatcactctgtggcagacgctgccatggagcagtacatactgtacctggtggagcatgaggagtaccagctgtgccagccccagtccaaggaccaagtccgctggcagtgcaaccggcccagtgccaagcatggcccggagaagctgtctgagaagttccagcgcttcacacctttcaccctgggcaaggagttcaaagaaggacacagctactactacatctccaaacccatccaccagcatgaagaccgctgcttgaggttgaaggtgactgtcagtggcaaaatcactcacagtcctcaggcccatgacaatccacaggagaagagacttgcagcagatgacccagaggtgcgggttctacatagcatcggtcacagtgctgccccacgcctcttcccacttgcctggactgtgctgctccttccacttctgctgctgcaaaccccgtgaaggtgtgtgccacacctggccttaaagagggacaggctgaagagagggacaggcactccaaacctgtcttggggccactttcagagcccccagccctgggaaccactcccaccacaggcataagctatcacctagcagcctcaaaacgggtcaatattaaggttttcaaccggaaggaggccaaccagcccgacagtgccatccccaccttcacctcggagggatggagaaagaagtggagacagtcctttcccaccattcctgcctttaagccaaagaaacaagctgtgcaggcatggtcccttaaggcacagtgggagctgagctggaaggggccacgtggatgggcaaagcttgtcaaagatgccccctccaggagagagccaggatgcccagatgaactgactgaaggaaaagcaagaaacagtttcttgcttggaagccaggtacaggagaggcagcatgcttgggctgacccagcatctcccagcaagacctcatctgtggagctgccacagagaagtttgtagccaggtactgcattctctcccatcctggggcagcactccccagagctgtgccagcaggggggctgtgccaacctgttcttagagtgtagctgtaagggcagtgcccatgtgtacattctgcctagagtgtagcctaaagggcagggcccacgtgtatagtatctgtatataagttgctgtgtgtctgtcctgatttctacaactggagtttttttatacaatgttctttgtctcaaaataaagcaatgtgttttttcgga

SEQ ID NO: 483950 - DNA, 157 bp, Homo sapiens
tgtcagtgcactgaatgcctggtcgcctataactggacggtgtcacggtggagttgtcgggtgggggttgggttgccgtgccttgtttctctttcgtttctctagaagcctcgattttatccccgcttccttcctttcctcttgctgccatgccagc

SEQ ID NO: 483951 - DNA, 360 bp, Homo sapiens
tgtagccgaggcactgtacacctttcagaccagtctgcaacctcaggctgagtagcagtgaactcaggtagcgggagcagtccattcagccctgaatattcctccttggtcactgccttctcatgagtagacatgctcttctttttcaatcacttcaggatctctgtagaagtacagatcaggcatgacctcccatgggtgttcacgggaaatggtgccacgcatgcgcagaacttcccgagccagcatccaccacattaaacccactgagtgagctcccttgttgttgcatgggatggcaatgtccacatagcgcagaggagaatctgtgttacacagcgcaatggtaggtaggttaac

SEQ ID NO: 483952 - DNA, 1030 bp, Homo sapiens
  misc_feature (3)..(3): n is a, c, g, or t
  misc_feature (926)..(926): n is a, c, g, or t
  misc_feature (928)..(928): n is a, c, g, or t
  misc_feature (937)..(937): n is a, c, g, or t
  misc_feature (944)..(944): n is a, c, g, or t
  misc_feature (948)..(948): n is a, c, g, or t
  misc_feature (954)..(955): n is a, c, g, or t
  misc_feature (957)..(957): n is a, c, g, or t
  misc_feature (965)..(965): n is a, c, g, or t
  misc_feature (967)..(967): n is a, c, g, or t
  misc_feature (973)..(973): n is a, c, g, or t
agnggagatctgtgagcccagcgctgactgcgccgcggagaaagccagtgggaacccagacccataggagacccgcgtccccgctcggcctggccaggccccgcgctatggagttcctctgggcccctctcttgggtctgtgctgcagtctggccgctgctgatcgccacaccgtcttctggaacagttcaaatcccaagttccggaatgaggactacaccatacatgtgcagctgaatgactacgtggacatcatctgtccgcactatgaagatcactctgtggcagacgctgccatggagcagtacatactgtacctggtggagcatgaggagtaccagctgtgccagccccagtccaaggaccaagtccgctggcagtgcaaccggcccagtgccaagcatggcccggagaagctgtctgagaagttccagcgcttcacacctttcaccctgggcaaggagttcaaagaaggacacagctactactacatctccaaacccatccaccagcatgaagaccgctgcttgaggttgaaggtgactgtcagtggcaaaatcactcacagtcctcaggcccatgacaatccacaggagaagagacttgcagcagatgacccagaggtgcgggttctacatagcatcggtcacagtgctgccccacgcctcttcccacttgcctggactgtgctgctccttccacttctgctgctgcaaaccccgtgaaggtgtgtgccacacctggccttaaagagggacaggctgaagagagggacaggcactccaaacctgtcttggggccactttcagagcccccagccctgggaaccactcccaccacaggcataagctatcacctagcagcctcaaaacgggtcaatattaaggtttcaaccggaggaggcaaccaaccgaaagtccatcccncntcactcggnggatggngaanagtggnnantctttccncnattctncctttaacaaaaaaaaacggtcaggatggccttaaggaaatggggcggactggaggg

SEQ ID NO: 483953 - DNA, 1389 bp, Homo sapiens
  misc_feature (1388)..(1388): n is a, c, g, or t
aacccagcattggtatgtggagaaacggatgcccagtagacgttgtgacttatccgggtcacttctgcaggtctggagtgtcccaccctgagatccatgatcaggggctctcttctggcacaccaagtcaccacagtgcccatcctctgctgttgactgagctagtggatgaggagggagactacctagaggcttagagggtgcttggcgatcccattattccagatccagaagagtacattgatgcattagaaggagtcttgagaatggtagcaatggcactataaacccaggaaaggatccagcagggtactagttgcatgctcagtgaagacatccagggaaggccgagtatcaccggggaacatgttggaatgcccatgatgacggaacatctcagggaaggcttgcatgtggtgagaacagaccgctgaactaaagggaagtcctaggagagttccacgggaaacccccgagggaaatcccgggaattcgatcagtcctcatggactaactcgtacgtcacggagaccctaaggccccaggaggggaaaccgtataacgtaggtgaaaaaccctgtgaactggacggatgggcaggaacggcaagcacacgtgggggtgatgacaagtgagtacactgaggggcggggccttaccgaagtcagggaatcccgagggcttcggggttcgcgatatgcttacgaagaatttggggctttccagaaagacacagggacacacttgttgagcctccaccggttcgagatcctagtggacttcccagtacccctgtggaacctcacacgtgaaactcttgggggctagggaccacctccttgggtgctgcggcagcccgacgaagccgagactcccaaggcagatcgcaaggaccctgactggagacaagggcattggaacctctccagacaatcccgccccaggaacctaggaaggccatggaatcaaccccaaggaagcggcagcagtgacaaacacccaagacaaacggcgcagcacaacgaccccgcaaggcgactagcacaggatcgagaccaccctgaacaccttgccaacacaaaaggggagacctacaaatccaacggcgataggcatcgaacagatgtggagccacccgcggcccgagggtacacaaacgagccaaaacaagggcggaacatccaccagcgggtaccacaccgcgaacagggcgaagagggacagagaaggaccagcaacgagagacagagagaagaagacaccaaaagcgaagtaacaacaaagggcaacacgagaccagagaaacaccaacagaaggggacacaccaagaggaacaagacacgaaaaaaggaagaacacacagacggagaacgagcgccacagtcang

SEQ ID NO: 483954 - DNA, 466 bp, Homo sapiens
gaagcagtattggggaaagtttttttagactagggagaacggagggagcccggcatctttttttttttatcggcttctgtttaaaaagccaacattcctcggcttcataggggttcggcatttggggggaagggaaatttttgctgttccccaaatgaaatgttttagtcccttccaaccagggttgggggggggaagggggtgaaaaactaccattgaaattttgaaccagcaccaggggggggggattttatttttggttatggtggggggtttaaaaaatcccccccaggtaattattgggacccccttgctttggggtccctgtaccatttggggggggggccaggggggaaaagtaccaatagcccccaggccccgggcttttgttcaaaccagggggcaaaaggaaaggtttttttgtaagaaacgttttatgatttttaaaataaatttagggacccta

SEQ ID NO: 483955 - DNA, 723 bp, Homo sapiens
  misc_feature (5)..(5): n is a, c, g, or t
  misc_feature (49)..(49): n is a, c, g, or t
  misc_feature (52)..(53): n is a, c, g, or t
  misc_feature (56)..(56): n is a, c, g, or t
  misc_feature (58)..(58): n is a, c, g, or t
  misc_feature (61)..(61): n is a, c, g, or t
  misc_feature (64)..(64): n is a, c, g, or t
  misc_feature (81)..(81): n is a, c, g, or t
  misc_feature (83)..(83): n is a, c, g, or t
  misc_feature (92)..(92): n is a, c, g, or t
  misc_feature (95)..(95): n is a, c, g, or t
cgccnaattaaccctactaaagccccaattaaccctttctgggtcgccnaannaancntcnctnaagtgctgggattacangngtgagcacngcncctggcctaggagtagtattaagtggcccaggcaagaggaacatattcagactcggaggaatgaaggatgaaatgtggggaggggcagtgtctatgctgagggttatttccaaagaatgagaggctgggctgaacattgggcaggaagttagcaaaaactaaggagggtaggaatcaaggttagagggaagagaagaatgaaattgagtagggagctgagaaagcagggcgaggggcatttggacttacattttcttccagcaaaggtttcttatttaacccctgtgggcttatcttgcagccaaacccatccaccagcatgaagaccgctgcttgaggttgaaggtgactgtcagtggcaaaatcagtgagtgtcggagccctgtgggcctccttcctccatctctatgctgggtgcggtctagtgatctaggatggtatagaagtcttgcagcccagcccactcatacttacagccctctgcctctttgatacagtacctgatctactaccactcttgtctttcagctcacagtcctcaggcccatgtcaatccacaggagaagagacttgcagcagctgcagcaggtgggtagcaggagcggtgagcaattatgtgggacgagca

SEQ ID NO: 483956 - DNA, 248 bp, Homo sapiens
gttttgcggtgcctttctgtttgttagttttacttctaacagacaggacctcagctgcaggtctgttggagtatctgcagtgtgaggtgtcagtgtgccctgctgagggtgctcccagtataggctgctcgggggtcacgggtcagggacccacttgaggaggcagtctgtccgttctcagatctccagctgcgaactggggagaacacgtgctctcttcaaagcttgttagaaagggtaccatttaa

SEQ ID NO: 483957 - DNA, 1836 bp, Homo sapiens
tcggtaattttttccttgaaagaaaccaaagttatttttatcagcgtggttgtggaatagggttaagtccgctgggaattagctgttgccattaacattacttgtgtaacagaaaagtgcaggtgacttatactagagaacaagtattatgtgtttaaacaaaagaaacattgtggcaagaaacaacctatagtatgtgagtataaaaaatttctcacagtatatgtgagccagacacgcacatatataagcgtggtataatctagaaggtgatcaacagtgggaatatagtggggttgtataatagggtgtgaaccattaggtgtatacagcgtgttacagagttaaacgccgtgagacctctacagaataactaggatcataacggaggtatcaccacgacgaagtgtgacacgcgttgtcgaacatattataacacgcggcgggcaattatatctcacgagcaaacaggattataagacacagcgttgcaaaaactgtactcgcagccgttggtataacactctctgtccagaacattcttctatcacaagcccgctgccgatttatgaaagccttgagaagcaccatgttccataatcatgacaacgatactagaaggacatggaggacaaaaacggcgcggaactcctataaacccaaccatcatacgataggaaaattgacaccaccctagagcagaaacaacaagagcgcgccaagtcgaaccactctacacgcaaccacacacctagactacgcaagccaaacaagaccccacataatcgttagcaaccaccaagaaccgtataaaactacaagacgaaacagaggtaacaaagagctaaacagcgacagatgaaaggaatcaaaaaagaaggcaatacgccaaggaccaagaccactaaacaaccaactcacaacagcacaattcttgaccaaaaacgtaaacaaaagataacatacacgcacttcccactataacaccagaggaacaacaaacagagaggctgcgatacaaaacgattgtggaatgcaatcacacgacatctattaaccaagggggctcacgaacaacggtaagagaacggcgtcctataaccccgtgtgagacacatatacagcgggaggggcataatgcaatccgcagccacggaaatccaacgcaaacacagcaagcaattgtgcggcatactgagaaggaaacagacggacgatatcaccaccaagcgactttgatggcagcacacgcgaaacgagaacgggccacacaagaccagtaaatatgacagcgagcaagagagatgaaactacaacacgacgaacacagacaaaccacacgcagcgagcgccaacaccaaacaactccgacacaacggcacaaatcagatcgtcgcgaggaagccaacgccatgaccgaaacacaacgacagcagaacaacacagtacgcagcaccagctgagacgataacacacccaacacgaagcagagctcgcccacacgcagccacagagtcgaccacacacagacaacgcaaacgccacagaacagcagccaaatcagcaaaaaagacgaacagccagaaataacataagcgccataccaacagcgcaaacacacacaaatacacaacgcaaacgcaagataagactaagcagcacttaagacaaaccacacaaatgataacacaacgaagacaaacaaacatcccacaacagacaacagcgagcacacaatgtcaaccagcaaacaaggcaaaggaagaacacagaagaaacgcaaagggacaaaacgagaagaagaaaaagaaaaaaaacatcaaactactaggccaa

SEQ ID NO: 483958 - DNA, 569 bp, Homo sapiens
cctcacactcacagaagccagctaagtgctccatcagcgacttgcactctgcactcagctactttaggcggtgtgtgtcacggtcaaatcaaagctgtggaaatctggcagcaatgccggctgaggagcttgttgcaaaggcacagatgaatgacgtccgatggaacgcgaccattcgctgccctgcaggtcatggaagatcatttgtccctgaaagtgatcaggggccacctatcagctctctggaatacaaggacctcaggggcatatgcacaagactgagaagttacaaggatgctggccaaagatggtccgatgccgacaaacaagagctatacgctgggaactgttaggagaaggcatacgcaggcctgaggaacggtctatttacaggctttggaggagccataatccccagttttctactggctgctgatgttgcctgagaagcacacgaggctgagtgggatccagttacaccagagaatttacttttagaagatggttttctgcatgtagtagagcccctaaaatgtggcaaagaaaagaaaattacaatgctaaatgag

SEQ ID NO: 483959 - DNA, 239 bp, Homo sapiens
cacgagcaagcatgctgcctctcctgtacctggcttccaagcaagaccaacctgttcttagagtgtagctgtaagggcagtgcccatgtgtacattctgcctagagtgtagcctaaagggcagggcccacgtgtatagtatctgtatataagttgctgtgtgtctgtcctgatttctacaactggagtttttttatacaatgttctttgtctcaaaataaagcaatgtgttttttcgga

SEQ ID NO: 483960 - DNA, 291 bp, Homo sapiens
  misc_feature (242)..(243): n is a, c, g, or t
  misc_feature (286)..(286): n is a, c, g, or t
cacgagcaagcatgctgcctctcctgtacctggcttccaagcaagaccaacctgttcttagagtgtagctgtaagggcagtgcccatgtgtacattctgcctagagtgtagcctaaagggcagggcccacgtgtatagtatctgtatataagttgctgtgtgtctgtcctgatttctacaactggagtttttttatacaatgttctttgtctcaaaataaagcaatgtgttttttcggacanncttttctgccactccatattaaaacatatgaccattgagtccntgcta

SEQ ID NO: 483961 - DNA, 643 bp, Homo sapiens
  misc_feature (152)..(152): n is a, c, g, or t
cttcgggctggccttgtggggcggggggggttttcgcgcgccgcccccttggggtctccctgggtgtgttttcccggttgtcccctttttcgtcctggcgggtgattgccctcctggcttatggcccgtgggtggcttttttggtcttccgncttggccggtcctcccccctttatccttcggtggtttctgtttggccgttttgcccggcctccttggggtggtttccccgttgctccccgggatttcccaggtgcggcgccttgggggggtgggggttttttttggcccccaattttttggggcttttcaaaatgtggggcccccccccccccctttttgcccttggggggttggggggggggggggaggcctctttttctttgtttgttttgggggggggcggattttctttccccgccctccccgttgtttttgcctccctttggggcgcccgggcctcccccccctttggttttttgggggggggggggggggggttgcccttttgcccggggggcccctttggccctttgggcgcttttgggggcccttttttacccgtttggcccgctgggcggggggggggcgggccggggtttccggggttttgggggcccccggggccgcccccggggtcgga

SEQ ID NO: 483962 - DNA, 1567 bp, Homo sapiens
  misc_feature (3)..(3): n is a, c, g, or t
  misc_feature (1518)..(1519): n is a, c, g, or t
  misc_feature (1562)..(1562): n is a, c, g, or t
agnggagatctgtgagcccagcgctgactgcgccgcggagaaagccagtgggaacccagacccataggagacccgcgtccccgctcggcctggccaggccccgcgctatggagttcctctgggcccctctcttgggtctgtgctgcagtctggccgctgctgatcgccacaccgtcttctggaacagttcaaatcccaagttccggaatgaggactacaccatacatgtgcagctgaatgactacgtggacatcatctgtccgcactatgaagatcactctgtggcagacgctgccatggagcagtacatactgtacctggtggagcatgaggagtaccagctgtgccagccccagtccaaggaccaagtccgctggcagtgcaaccggcccagtgccaagcatggcccggagaagctgtctgagaagttccagcgcttcacacctttcaccctgggcaaggagttcaaagaaggacacagctactactacatctccaaacccatccaccagcatgaagaccgctgcttgaggttgaaggtgactgtcagtggcaaaatcactcacagtcctcaggcccatgacaatccacaggagaagagacttgcagcagatgacccagaggtgcgggttctacatagcatcggtcacagtgctgccccacgcctcttcccacttgcctggactgtgctgctccttccacttctgctgctgcaaaccccgtgaaggtgtgtgccacacctggccttaaagagggacaggctgaagagagggacaggcactccaaacctgtcttggggccactttcagagcccccagccctgggaaccactcccaccacaggcataagctatcacctagcagcctcaaaacgggtcaatattaaggttttcaaccggaaggaggccaaccagcccgacagtgccatccccaccttcacctcggagggatggagaaagaagtggagacagtcctttcccaccattcctgcctttaagccaaagaaacaagctgtgcaggcatggtcccttaaggcacagtgggagctgagctggaaggggccacgtggatgggcaaagcttgtcaaagatgccccctccaggagagagccaggatgcccagatgaactgactgaaggaaaagcaagaaacagtttcttgcttggaagccaggtacaggagaggcagcatgcttgggctgacccagcatctcccagcaagacctcatctgtggagctgccacagagaagtttgtagccaggtactgcattctctcccatcctggggcagcactccccagagctgtgccagcaggggggctgtgccaacctgttcttagagtgtagctgtaagggcagtgcccatgtgtacattctgcctagagtgtagcctaaagggcagggcccacgtgtatagtatctgtatataagttgctgtgtgtctgtcctgatttctacaactggagtttttttatacaatgttctttgtctcaaaataaagcaatgtgttttttcggacanncttttctgccactccatattaaaacatatgaccattgagtccntgcta

SEQ ID NO: 483963 - DNA, 335 bp, Homo sapiens
agaagatcactcaaccccctgtgtgtttatggtcagctatgcctttattttttttcttccaatattatctaaacagtggcagagatttttatattggtagaaagcatcaagaagggtatgccagtcaggtccgggaagtaaaagggaggcacaatatagcacggacggagtggtaaagcctccggccgggagacttcagttatagctgtaataattaatcttatttataaaagccactccactacccttttctctccaacggtaaacacagagacagcttggggactaagccaaaaacgaggggatcttcggcacgaggccgctagaggtgatct

SEQ ID NO: 483964 - DNA, 446 bp, Homo sapiens
gccggcgtgacgggtgaggcgggagatggcgtgctgtactgcagcgctgtcgaggcggctgtccaagtcgagtcggtgcgtgtgttgggctgtaacccgggtccgcatgaccctgccaaggcaccaatcatctacactatgtgtgggagccggccccgaggagaatcctctattgactactggatgaaccagtcaattccacgactacattcagctgtttaatagccagggctctaagctgtacatttatacacatgacaattcctaggcaaagtggctatgtgactcagctggtcgaccggagatctattctgggacggcactcgcgagactatttcgtaaagacgcatcagagtaatgagcactaccttattggctattaaatatgactcgccacgggaatcctcgagagacgcaagaaacttgtacggaaagtggacgaggaa

SEQ ID NO: 483965 - DNA, 1620 bp, Homo sapiens
gaagcccatctaaatatcaggtaagtatcaggggggttatggaaaatgctttggtacccgaaagatactgagtgaatgctatttgaaggaccaacaggagacagtgatggtgcaggggaatgtttagagatggcagagagaaatgtaagacatcaagatcagtacatattgggagttgaaacttcggaaaaatctcttggggtccagtgtgaaatgtgagaggtcatgtaaacattcagaggcccaaggatctggcctggcttctgaatgaccacctgcttcttccccctgtgtgtgtccccaggttccggaatgaggactacaccatacatgtgcagctgaatgactacgtggacatcatctgtccgcactatgaagatcactctgtggcagacgctgccatggagcagtacatactgtacctggtggagcatgaggagtaccagctgtgccagccccagtccaaggaccaagtccgctggcagtgcaaccggcccagtgccaagcatggcccggagaagctgtctgagaagttccagcgcttcacacctttcaccctgggcaaggagttcaaagaaggacacagctactactacatctccaaacccatccaccagcatgaagaccgctgcttgaggttgaaggtgactgtcagtggcaaaatcactcacagtcctcaggcccatgacaatccacaggagaagagacttgcagcagatgacccagaggtgcgggttctacatagcatcggtcacagtgctgccccacgcctcttcccacttgcctggactgtgctgctccttccacttctgctgctgcaaaccccgtgaaggtgtgtgccacacctggccttaaagagggacaggctgaagagagggacaggcactccaaacctgtcttggggccactttcagagcccccagccctgggaaccactcccaccacaggcataagctatcacctagcagcctcaaaacgggtcaatattaaggttttcaaccggaaggaggccaaccagcccgacagtgccatccccaccttcacctcggagggatggagaaagaagtggagacagtcctttcccaccattcctgcctttaagccaaagaaacaagctgtgcaggcatggtcccttaaggcacagtgggagctgagctggaaggggccacgtggatgggcaaagcttgtcaaagatgccccctccaggagagagccaggatgcccagatgaactgactgaaggaaaagcaagaaacagtttcttgcttggaagccaggtacaggagaggcagcatgcttgggctgacccagcatctcccagcaagacctcatctgtggagctgccacagagaagtttgtagccaggtactgcattctctcccatcctggggcagcactccccagagctgtgccagcaggggggctgtgccaacctgttcttagagtgtagctgtaagggcagtgcccatgtgtacattctgcctagagtgtagcctaaagggcagggcccacgtgtatagtatctgtatataagttgctgtgtgtctgtcctgatttctacaactggagtttttttatacaatgttctttgtctcaaaataaagcaatgtgttttttcgga

SEQ ID NO: 483966 - DNA, 1449 bp, Homo sapiens
  misc_feature (3)..(3): n is a, c, g, or t
agnggagatctgtgagcccagcgctgactgcgccgcggagaaagccagtgggaacccagacccataggagacccgcgtccccgctcggcctggccaggccccgcgctatggagttcctctgggcccctctcttgggtctgtgctgcagtctggccgctgctgatcgccacaccgtcttctggaacagttcaaatcccaagttccggaatgaggactacaccatacatgtgcagctgaatgactacgtggacatcatctgtccgcactatgaagatcactctgtggcagacgctgccatggagcagtacatactgtacctggtggagcatgaggagtaccagctgtgccagccccagtccaaggaccaagtccgctggcagtgcaaccggcccagtgccaagcatggcccggagaagctgtctgagaagttccagcgcttcacacctttcaccctgggcaaggagttcaaagaaggacacagctactactacatctctcacagtcctcaggcccatgacaatccacaggagaagagacttgcagcagatgacccagaggtgcgggttctacatagcatcggtcacagtgctgccccacgcctcttcccacttgcctggactgtgctgctccttccacttctgctgctgcaaaccccgtgaaggtgtgtgccacacctggccttaaagagggacaggctgaagagagggacaggcactccaaacctgtcttggggccactttcagagcccccagccctgggaaccactcccaccacaggcataagctatcacctagcagcctcaaaacgggtcaatattaaggttttcaaccggaaggaggccaaccagcccgacagtgccatccccaccttcacctcggagggatggagaaagaagtggagacagtcctttcccaccattcctgcctttaagccaaagaaacaagctgtgcaggcatggtcccttaaggcacagtgggagctgagctggaaggggccacgtggatgggcaaagcttgtcaaagatgccccctccaggagagagccaggatgcccagatgaactgactgaaggaaaagcaagaaacagtttcttgcttggaagccaggtacaggagaggcagcatgcttgggctgacccagcatctcccagcaagacctcatctgtggagctgccacagagaagtttgtagccaggtactgcattctctcccatcctggggcagcactccccagagctgtgccagcaggggggctgtgccaacctgttcttagagtgtagctgtaagggcagtgcccatgtgtacattctgcctagagtgtagcctaaagggcagggcccacgtgtatagtatctgtatataagttgctgtgtgtctgtcctgatttctacaactggagtttttttatacaatgttctttgtctcaaaataaagcaatgtgttttttcgga

SEQ ID NO: 483967 - DNA, 374 bp, Homo sapiens
gaggatcatacatcaggccgaagttgagtaccctacaaagcctcaaagcagttcaatgagaaaggaggagtcgcatgtctctcctttagaccaaaagctagataggatctaggcatagggagtgacggcgtgccgtaagccgcgatacagccgagagccaggcctctcgtgccaaacagcatcgccaagttgtgaatgcgaagggcccgtcttggaggaaattaaaagtgctgctccactgaacacaccaacgataagaaagtgaaactgtcttattgctgatacggagaagtctgagtggtctggatagatcaaaccagccccaacattcccttaagtcatagcaagttccacgaggcggagagaggtgggaa

SEQ ID NO: 483968 - DNA, 1416 bp, Homo sapiens
  misc_feature (5)..(5): n is a, c, g, or t
  misc_feature (49)..(49): n is a, c, g, or t
  misc_feature (52)..(53): n is a, c, g, or t
  misc_feature (56)..(56): n is a, c, g, or t
  misc_feature (58)..(58): n is a, c, g, or t
  misc_feature (61)..(61): n is a, c, g, or t
  misc_feature (64)..(64): n is a, c, g, or t
  misc_feature (81)..(81): n is a, c, g, or t
  misc_feature (83)..(83): n is a, c, g, or t
  misc_feature (92)..(92): n is a, c, g, or t
  misc_feature (95)..(95): n is a, c, g, or t
cgccnaattaaccctactaaagccccaattaaccctttctgggtcgccnaannaancntcnctnaagtgctgggattacangngtgagcacngcncctggcctaggagtagtattaagtggcccaggcaagaggaacatattcagactcggaggaatgaaggatgaaatgtggggaggggcagtgtctatgctgagggttatttccaaagaatgagaggctgggctgaacattgggcaggaagttagcaaaaactaaggagggtaggaatcaaggttagagggaagagaagaatgaaattgagtagggagctgagaaagcagggcgaggggcatttggacttacattttcttccagcaaaggtttcttatttaacccctgtgggcttatcttgcagccaaacccatccaccagcatgaagaccgctgcttgaggttgaaggtgactgtcagtggcaaaatcactcacagtcctcaggcccatgacaatccacaggagaagagacttgcagcagatgacccagaggtgcgggttctacatagcatcggtcacagtgctgccccacgcctcttcccacttgcctggactgtgctgctccttccacttctgctgctgcaaaccccgtgaaggtgtgtgccacacctggccttaaagagggacaggctgaagagagggacaggcactccaaacctgtcttggggccactttcagagcccccagccctgggaaccactcccaccacaggcataagctatcacctagcagcctcaaaacgggtcaatattaaggttttcaaccggaaggaggccaaccagcccgacagtgccatccccaccttcacctcggagggatggagaaagaagtggagacagtcctttcccaccattcctgcctttaagccaaagaaacaagctgtgcaggcatggtcccttaaggcacagtgggagctgagctggaaggggccacgtggatgggcaaagcttgtcaaagatgccccctccaggagagagccaggatgcccagatgaactgactgaaggaaaagcaagaaacagtttcttgcttggaagccaggtacaggagaggcagcatgcttgggctgacccagcatctcccagcaagacctcatctgtggagctgccacagagaagtttgtagccaggtactgcattctctcccatcctggggcagcactccccagagctgtgccagcaggggggctgtgccaacctgttcttagagtgtagctgtaagggcagtgcccatgtgtacattctgcctagagtgtagcctaaagggcagggcccacgtgtatagtatctgtatataagttgctgtgtgtctgtcctgatttctacaactggagtttttttatacaatgttctttgtctcaaaataaagcaatgtgttttttcgga

SEQ ID NO: 483969 - DNA, 303 bp, Homo sapiens
ttagccagaactgctagaatagtactagcagacaatcagagggtttgcaccatgtctatttgactttcttatggcatatggacataccctgtctgaaatttaaaaaaaaaaaaaatacagaaaaaaagggaaagatcaggtctattccctaaaaacaggaagagaaataatttcaacacattataaaatatataaaagggaaattcaataatctaatgggaataaactaaccataagggcaaaggcaatgggcaacctttctaaaagggttggaacattaggtaactggggttacctaggaaa

SEQ ID NO: 483970 - DNA, 272 bp, Homo sapiens
  misc_feature (44)..(44): n is a, c, g, or t
  misc_feature (241)..(241): n is a, c, g, or t
gttgaactaaatgatgtggcaggttctataagtaactaaagaancatgttggccggacgcggtggctcacacctgtaatcccagcactttcggaggccgaggtgggggatcacctgagatcaggagttcgagacctgcttggccaacgtggtgaaaccccgtctctactaaaagtacaaaagttagccgggcgtcgtggcaggcgcctgtaatcccagccacttgggaggctgaggcgggnggatcacttgagcccggaaggtggagtttgc

SEQ ID NO: 483971 - DNA, 1514 bp, Homo sapiens
  misc_feature (3)..(3): n is a, c, g, or t
  misc_feature (582)..(582): n is a, c, g, or t
agnggagatctgtgagcccagcgctgactgcgccgcggagaaagccagtgggaacccagacccataggagacccgcgtccccgctcggcctggccaggccccgcgctatggagttcctctgggcccctctcttgggtctgtgctgcagtctggccgctgctgatcgccacaccgtcttctggaacagttcaaatcccaagttccggaatgaggactacaccatacatgtgcagctgaatgactacgtggacatcatctgtccgcactatgaagatcactctgtggcagacgctgccatggagcagtacatactgtacctggtggagcatgaggagtaccagctgtgccagccccagtccaaggaccaagtccgctggcagtgcaaccggcccagtgccaagcatggcccggagaagctgtctgagaagttccagcgcttcacacctttcaccctgggcaaggagttcaaagaaggacacagctactactacatctccaaacccatccaccagcatgaagaccgctgcttgaggttgaaggtgactgtcagtggcaaaatcatcacagtcctcaggcccatgncaatccacaggagaagagacttgcagcagatgacccagaggtgcgggttctacatagcatcggtcacagtgctgccccacgcctcttcccacttgcctggactgtgctgctccttccacttctgctgctgcaaaccccgtgaaggtgtgtgccacacctggccttaaagagggacaggctgaagagagggacaggcactccaaacctgtcttggggccactttcagagcccccagccctgggaaccactcccaccacaggcataagctatcacctagcagcctcaaaacgggtcaatattaaggttttcaaccggaaggaggccaaccagcccgacagtgccatccccaccttcacctcggagggatggagaaagaagtggagacagtcctttcccaccattcctgcctttaagccaaagaaacaagctgtgcaggcatggtcccttaaggcacagtgggagctgagctggaaggggccacgtggatgggcaaagcttgtcaaagatgccccctccaggagagagccaggatgcccagatgaactgactgaaggaaaagcaagaaacagtttcttgcttggaagccaggtacaggagaggcagcatgcttgggctgacccagcatctcccagcaagacctcatctgtggagctgccacagagaagtttgtagccaggtactgcattctctcccatcctggggcagcactccccagagctgtgccagcaggggggctgtgccaacctgttcttagagtgtagctgtaagggcagtgcccatgtgtacattctgcctagagtgtagcctaaagggcagggcccacgtgtatagtatctgtatataagttgctgtgtgtctgtcctgatttctacaactggagtttttttatacaatgttctttgtctcaaaataaagcaatgtgttttttcgga

SEQ ID NO: 483972 - DNA, 363 bp, Homo sapiens
cgggtacctgagaccgaagcatctacagtactgtgtgtctgtctaaatttagcactgtctgatacaataagcttctttctctccaacgtggtcaacttcagcataggcaggatgtccagagcctcttctaaattcatcgcaggcatctgcttgggcgtctctcaataaagaagatgctggctgctgatgttgggtggtgatacatatagactgtcacaagaatggctgtggctacaatgaggaccaggatgaagattccaacgatgaggccagcgtggagggttccccctttcttctcagctgcactgtcatctgtagaagctccattatcttttagatgtagtgctatcttggtatcatctt

SEQ ID NO: 483973 - DNA, 502 bp, Homo sapiens
tcctggagcgggtgcggtggtaatgctgggtaatcccagcactttgggaggctgagacgggcagatcacctgaggtcaggagtttgagagcagcctggccaacatggcaaaacccgtctctactaaaaatacaaaaattagccaggtgtggtggtgggagcctgtagtcccagcttactggggaggctgagtcaggggaatggtgtgaatctgggaggcggaggttgcagtgagctgagattgcgccactgcattccaacctgggcgacagagcgagactccgtctcaaaaaaaacaaaagaagtaaaatcacagtatggcgccctcccctcgtgctcctccttcctgctctgatgatgcggcgctggtgttgcggaggcctccccttttgccatagctggcatctggaggattacgggcggactcccaactttcaaacaagcttcccttcacagtcctttccgaacgggtccacctcccaggtcactcggcaacgaccggg

SEQ ID NO: 483974 - DNA, 990 bp, Homo sapiens
tcgtctcagcccaaaatctccttaaactgataggcaacttaagcgaagtctcagggtacaaaaatcaatgtgcaaaaatcacaggcattcctaaacaccaataatagacaaacagagccaaatcatgagtgaactcccattcacaattgcttcaaagataataaaatacctaggaatccaacttatattgggatgtgaaggacccttataagggtgtgaaggacccttataagttcacccttatgtgaactacgaaccactgctcaatgaaataaaagaggacacaaacaaatggaagaacattccatgttcatggataggaagaatccatatcgtgaacatggccatactgcccaaggtgtaatttatagattcagtgccatccccatcaagctaccaatgactttcttcacaaaattggaaaaaactactttaaagttcatatggaaccaaaacagagcccacattgccaagtcaatcctaagccaaaagaacaaagctggagacatcatgctgcctgacttcaaactatactacaaggctacagtaaccaaaacagcatggtactggtaccaaaacagagatatagaccaatggaacagaacagagcctcggaaataataccacacatctacaacatctgatctttgacaaacctgacagaaacaagcaatgggggaaaggatccctatttaataatggtgctgggaaaactggtagccatatgtagaaagctgaaactggatcctttcttaacttatacaaaattattcagatgggtttaagacttaacattgactaaacataaaacttgagaaactaggcatacatcggactagcggggcagcttctgtttaaccaagcagggccaggccaatgcgaggtcttttaggatttgcgaaaaacccaggagcgcacaggaattgcacctcaaggtcctcgaataaaaacctctggggggcgtgcctgtatcttctgtcttaacgtcat

SEQ ID NO: 483975 - DNA, 944 bp, Homo sapiens
actacaggtgcacgccaccacacctggcaaattttgtatttttagtagagacagggtttcaccatgtggccaggatggtctcgatctcctgacctcatgatccacctgcctcagcctcccaaagtgctgggattacaggcatgagccaccgcgcccagcctcaaacacatctttattaatcaaaataggaaccattgcaatgaagacatttttgccaatgaaaaataagttgtttattcctgtagcatacacattcatgcttcaagattcgatgaactcttggaaagcattttctgcatcctgctggttgtggaaggattttccctgcaaaaagttgttaagatgattgaagaagtggtagtcggttgatgagaggtcaggtgaatatggcagatgaggcaaaagttcgtagcccaatttattccaacttttgaagcattggttgtgtgacatgtggttaggtgctgtcatggacaattgggctttttctgttgattaatgccagctgcaggtgttgtactattcggtgcaactcattgatttgctgagcatacttctcagatacaatggtttcaccgggattcagaaagatgtagtggatcagaccagcagagaccacaaacagctgaccatgacctttttttcgggtgcaggtttggctttgggcaagtgctttggagcttcttctcagaccagccactgagctggtcatggccagttatcatataaaatcccacttttcatggtacatcacaacttcaattgcgaaaattcttcctggtgtcgtgtcgaatagattcgaccccttgcaaaaagcccgctttaaatttcactccagcatgagcaacactaatgagctttcacctttcccttgttcaatgtgacaccgtgatgccccgtgatctctcgcctccggtcgaacggccccaatgtcacggcggccc

SEQ ID NO: 483976 - DNA, 1174 bp, Homo sapiens
  misc_feature (643)..(643): n is a, c, g, or t
  misc_feature (1125)..(1125): n is a, c, g, or t
gctgttgggaaaatattcagcaatgtccgcatcaacttgcagaaagaaatataaatgacatttcaaggatagaagtatacctgattttttttccttttaattttcctggtgccaatttcaagttccaagttgctaatacagcaacaatttatgaattgaattatcttggttgaaaataaaaagatcactttctcagttttcataagtattatgtctcttctgagctatttcatctatttttggcagtctgaatttttaaaacccatttaaatttttttccttacctttttatttgcatgtggatcaaccatcgctttattggctgagatatgaacatattgttgaaaggtaatttgagagaaatatgaagaactgaggaggaaaaaaaaaaaaaagaaaagaaccaaaaaccttcaacttgcctactccaaaatgtgggtcattttagtgttaaggggaagaatttccagggttatggccagtggagtgtacaagttattgtgggcagatttctcagcacactcttttcccactggtttaaggagtaagtgggattactggccattcactttcataatccagtaggatccagtgatccttacaagttagaaaacataatcttctggccttctcatgatccaantaaatggccttactcttcttgaaaatttaaccctatgatattttctggtgcctggaatattggtcatggtagataacaagacctcagtggccttccggttttccacattttcccttttcaaataggggtctaactcagcaactcgcttaaggtcagcagcctcccttgaagaccaaatttagaatacccattgacctagtttcccatgcgtgtttctggactctgagctacagagtcgtggtgaagctcacttctggggcttcatctggcaacatctttatccgaaggggtatggttgacactagcccaatgaattgcacttacagtggaccaatagggctgagctctctgagggctggcagtcctggaaccagttttccctgcctctcatcacctgaatgaggtcagcatgtctattcagcttcgttatttcaacgataatcacgctttcctgaatccaaactaatccatcaccggggggnaagggggctcaccattgtgttcccatttcaggctgatcagtgggcctcc

SEQ ID NO: 483977 - DNA, 897 bp, Homo sapiens
gaagagcttaaacagcgctgactgccttccagaagcaagggggccgagcaaagaggcagctgtcaaacaaggctgtctgtgcattttcctagggctttggatgggggctcagggcaggggcagcagttaaccctgctggcctgtcgagctccacttgctgcgcaatcatcaacgggcggtcagtgcggcaaaacgctggtactaacgccacgcacttcatgcagcccatgcagtatcgccctgcgaccactctgactgctacacactgaccactgcctctggcgcatgtctcatcacgcctggctcctgcggcgactaccgctggagccaccttacatcagcgctggccctgcgtgaacactgaccaccctccacgcacaggcccctgacgcttgctactacgacgacggcacgacgcacggacgctgctcacctgccccagcgctctcttcgccacgactgctacactccctcactctccacacctacaccaggtctcccaggctggtccaccggcgtctacaacaacacacaccaacaccaacacacacacaaacacacaacacacacacaacccacacaacacaacacacacgcacacacaaaaacaacacacaaccacaaccaaagaaaaagcagcgagcggacggcacacaccacagacgagaggaagataaagtcgagcaggcgagagaggcggcgccgcacagcacaagacgtacgctggtagtcgcgagaggccgacacattgatagacggaccagagaacgcgtgggccgggacacaaaagagtgagcgaagggagccgcgtacacacaactaaggcgacccacgagcgggcacacgcgccgcgggcagggagacaatcagcccaccacgatgcgcgacgaacggcag

SEQ ID NO: 483978 - DNA, 194 bp, Homo sapiens
ctccgaggattacacggtagatttataaaacttacccaagtacattataaaagaatgcatattaaactacttcaattgtcattcaggcaattacaatacagaaaaaaaagaataggtcaggcacagtagtggttcacatctgtaatcccagcactttgggaggctgagagaggagaatggaatgaacccaggag

SEQ ID NO: 483979 - DNA, 818 bp, Homo sapiens
  misc_feature (455)..(456): n is a, c, g, or t
  misc_feature (796)..(796): n is a, c, g, or t
gggggccaaggattttcgaaagggcactcgtcggtctcacagaccttactcggaacgagcccaaatcgttgggagttctgaaccaatcggcccttgtgaatgtgtcctaaggcttctactcacacatatagagagtgctctgcgtggagctgacacacattgtcccagacgagcaagacggggtgcacactggcacagcggtcctcgaaggactatacacacgtgaaaagacatgaccacagttccacgaagacaagaggcacggacgcgcagagttgcaaggatgcgtgcgcttactagccgtgcgtgacccttgattctagtgcaaatgcccgtcatagtgaagccaccccaagtagagcaggaaaggaaaacgagaacgaaaccagttaagagcaccaaggggagatatattcaatcttcttgcatgcacgactgtgctacacaacacttgnnctcagagcaagactcgacggcagcacgattcgcttaggcctaggagaatctcgtctgtgaaacgcaattgaaatgagtatttcgcgtcgggcgagcatgcacacacgttcacgtgaggctagtaactgtatcgataggccgtccactcactgcgatgagcatcagatcgatggagcatcggagcagtggctgctcgtggaatcgacccatgccgtaagtgacatactcattgttacagtaggggtgaaagggcggccacccagtgtattcacagagataagctgggaagtctttggaaatggttaactggtggggtgggataatccttttaaacttgtantaaccccctgtttcccacagag

SEQ ID NO: 483980 - DNA, 851 bp, Homo sapiens
ctccgagccactagtggacccgtttgcaccgtcccgggttgtgggtgtcctgggcttattgctgccacccacaacctctactcaatgaacgactgtgcccagagaagatcctgtcctgtgctctgcggtctcactgatatatcctggagtaacataccgctgcgagaccgaggccttcacggcccttcggcacgcttcctgtccattcttggcagtctgtgtttcggcatggacccgatccagtcgtgcgacgtgacgtgtgcggacgtgcatgtcctgtgcagcctcctagccctgtggcatgtggaggatgcctggcagctagtctgggcaggttggcgccgtgacgcggggtctcttctactcacctccaagctgatccgttcgcacccatgccattgccccagagaagaaaccaactattcctccaaagcacccacgcctgaaggccactgggtaggacgcgtggatggatggaccgacggatcaacatgccagcaaggacatgcaggtcactgactgacagatgggacgtacgaaagtatctgccgcggcagtcgctggtagcagagaggccgcatttctgtgtctgagcctcagcttgaactattgggagctaccggaaggcctaagtgagccgcgctagtcaggtcagcaatccgactcaaattcctcctcattcccagaagtccgtctgtagcacctgggcaagctgagggctcctgtggaatagggctggcaggagccatgctccaggaatcctgctcctgaacggtacaactgatggcagcgtagtatgtctggggttgggaccaagttccacgaaaagggggacccttcgtacctgtttc

SEQ ID NO: 483981 - DNA, 117 bp, Homo sapiens
ggtagacttagaggatcccgaccctcgtctcgtgttcggcgcgatggcgtcgcctcgattccggtcggctgcgccacggcgtccgcgccgcctgcgccttcggtgtcgggggcctcc

SEQ ID NO: 483982 - DNA, 725 bp, Homo sapiens
cgtctcggttgtatggagaagaaaaatgtattttgtgtcggcgtgttcagaataaggagaggagggatatgggtcgtaggcagtagaagtaggcgaagcgaagatgttattcatcatctcgtcttcagcaacaaaggagtccgatgggctggtgcgacatcctcatgtggtagaacacggcagttggactcaccgctacttctgctagcaccaaaaagggagcaagataatgtcatcgtaggagatccctcgcgcagcggctcgtagcatacagagatgagaatggggggcatgtgatttacaacatagatgatgtagagtgagatgcacacataacctgtctcctagtagtagaagtccgcctcgtgtatgacactacgcagcgtttcgtgtagcaattagggtagcgagaaaatggtttttctccccgcacactctctctcgtgtgcataatggagagcatatacactcgctaggtggcttatacgctttggatgtagatgcattatttctggcgagacatggcagatcatcttagagaatcaccacatgtgttgataaagaccgcacagtttgcaggatgctctgctgttaagatggataggtcgctccgcactatggttagagagagtattatatcatcaactgtgcctctgtccacagaagggggtccacctctacataaaagagagagtttggcacccgcgatgcgtaacataataaca

SEQ ID NO: 483983 - DNA, 217 bp, Homo sapiens
tccagtacccgagcatgcatgcctgcctgcaggacgacgtgtattcaccactgcgcagcatgcctccctgtacaagatccgtagacacgtgagcacagtgctgacctccaaatatcgttaagctggagcctggtcgacgtgtattcaccactgcggagcatgcctccctgtacaagttccgtcgacacgtgagcaccgtgctgacctccaaatatcg

SEQ ID NO: 483984 - DNA, 923 bp, Homo sapiens
catttgtcatttttcttccccaccgcccccagaattacttcacttcggagctcttaagaacattgtttaacccaccttccattggtacgagtttttaacaaaatcaccccctatttcgtatctatgtaggttgaattctcccaaatttgctcctgttcgtattcgctcctactaatctaatgactaatatctctttcttacgccccttcccaccactcttttttgccaccccacacaccgtaggcggttaatagccatacatcgtttgcccacaccgaccccacgtgttttctctcgtcttataacatttttctctcctattggcagcacgctcgtttgtctcaccctctctgtgacagattgcctttgacgccaacgagtggcgctctccacccggggcatacgtctattaacgaagatgcgctggccccgccactttagagggtgggggagtgccacactcgtgaagtatcgtctcttagactcacgcacacatggacgcacacgtcctttggcgctcgcacaaatactgacgtctgtgcccaatacttctctacgcgcacactctccaaatgcgtcgttttacacgagcatcatgtctagcgcgcagcgctcactacatatctaacactttccgcgcatgaacctcataacccccatcatcatcagaatcgtggggcaagaaattttatagatcataataacatttctccgcgactacattgagcaatgattctttaataatggagtatataccaccttttgtctacaaataacaatctcatgtatatcatgacttggtgattacacacgtctgacgaaacacataacgacacgctgcctcgtgaggctgactatctgtcttcttaattttggtgtcccccacaggctaacatgaaatcaccaaaaccgcccacaaaaca

SEQ ID NO: 483985 - DNA, 1338 bp, Homo sapiens
gccaccttctcctcctccgcgtgtcctctcccgtcctcgcctcatgtcgactatcaggtgaactattgaaccaggatggctgagccccgccaggagttcgacacgtgactggacagactcacgctgggacgtacgggttgggggaccaggacacagactcacggggggctaacccatgcaccaagacccacgagggtgacaccggaccgctggcctgacaccgctgaacgacagcaggcacttggcagcccacccccgagcctggacacacgcaagctcgcataggtccacgtagaccccaagctcagccatggtccagccacacagcaaagacagggactaggacagcgcatgacacaacaccagccacagggggctcgatggataacaaccgcaagactcgacaaaacacgcggcggacgcagcacacctccacggacacgcaggcgacgacgcccacacgaccaccaaggcattcgcagaccagaacaccaccggcccggcgatccagaagaccagacacacccagactcatggatggaaccgtcgccaaaaagtcaaggagggcatcaacagacggcaatacaagcgcggcaccccggactcacgaacggacaaaatacccagggcaagcacgacatccccgaaaacaacgaaacacgatgaccgacggacacaacacgcaaagccgaagaagccaccgaaagaaggaggagagacagatgcggaccagagaccgtcccgaaagcaccaggctacgaaccgagcagtacgcggccacacgagcaccggtacgggcacgatcagagcaccacacgttgggcgaagtggagcgacaccgggacgaaaatggacaacgacgaaccgaaagcagggagacacctgaagcacacccgacaaaacacacacaggaaagacaacagagccaagacccgaccaccgacccaagcgacacgacaaacaggcgactcacacggtgcgtcaagaggcaacaataccacacaaacaatatgacagaacggagacagcacagccgcaccacgcgcggcaaggcaagaaacaagaagcaagtacaccgacaaaacacccacaccctgcgcccccaacaccacggcgacagccagcgaggggcgcagcccgcgaccgcggggcggacacagggagagtgaggcggagacgcagactcgcggacaggccacgagcgcaggacacgcgcgggggggcgacggaggacacagccgccagggacgagtagcaaagcggacgggggaccacggcagcgagaacacggggagaggagaagagcgagagccagcggcgcgggcgaggacgggagaa

SEQ ID NO: 483986 - DNA, 823 bp, Homo sapiens
taggaatcatccatttaatttaatttggtacaggtgctcaagcagattctctctctctctcccctctcctgggcaggtcacagagataaataaaaaataaaatctacaaggaaaataattatataaaagcactcccgaggttcacactttactatccctagcgtgctcgagttaggcaccccctatgggggaatcagtgtaataccccccacccccatttcactcccactggtcgggggcagacggtactccagaagccgggacaggggtgagggcagcagtggcaaacagttaaaaataaagaccatggtacgtccgggaaccatcgggccacctgggcattacccatgtctgcctccccacaggagccctaccaggagccggtgtgcgaagcgggggctgtggaaaagctgccgtggtggcatgaaagcttgtgtgtgggggagggtgatctaagcacggtcatatgccacttctcaatcttctagaaagaaacccaaaaaagaaagcagagacgacctcgggaagaggagaaaaatcccaagtgttcccacgtgtttaccagggagtttttagggcaacagagaccatttagcagttagaaataatggggcatatcacttttaattcaacaaaagcttttgtagaccctataggttgaaacgggcaagggccttaaaaaattcaagggcaagaaattctaagaggacagtactacggagaagagagggtggtgaagatatgtgttgccagtgaaaagccaattgttgtaagagaaggccaaggaagggaaccccagtttgggaactgacgaaagcgaaca

SEQ ID NO: 483987 - DNA, 203 bp, Homo sapiens
tgaggtaacctggtacagcactcatgctgtgagacccgctgggctgagctccatggccccacagagctgactgagcactgtcttgtttttcataaatgtgttttttttttgagacagagttttgctcttgttgcccaggtggagtgcaatggtgcaactcgtggctcactgctacctccacctcccgggtttcaagcaatttc

SEQ ID NO: 483988 - DNA, 424 bp, Homo sapiens
ccctctatataaatgcgtaggggttttaggttaaatgtccttagaaagtatacttgaggacggtgacgggcggggtgtacggcgcttcagggccctgtgcaagctaaggcactgctactctacagatttactggctaaatccaccttcgaccgttaagtttcataagggctatcgtagttttctggggtatgaaaatgtagcccatttctgtgccatcctcatggtgctgccccttgacctaagcggtctttacgtggggttgcttgcgcttactttgtatccttcatcacgggtttgctgaagatggcggtatataggctgagcaagaggtggtgaggttgatcggggttgatcgattacagaacaggctcctctagagggatatgacgcaccgccgggtgctttgggtttcaagctgtggct

SEQ ID NO: 483989 - DNA, 84 bp, Homo sapiens
atgtcatgtttagatcttctagagctgttgtcatcctcacaatcacagatttttttctccaatcctcacagagacccaatgacc

SEQ ID NO: 483990 - DNA, 342 bp, Homo sapiens
acacaggtgtggttaaatacattctagagatagatgaggcagagtgcgagatcagtttgctgaatgttagatcgactcacattggtggagtctcagccttccgatgggctctgtggcttcactgcacgcatctaaaatgtcaccgtctccagtttctcgagttgctcaagacacgagatactctcatggatgcgacgtgtcgaactcgtcgaacgaccttgttttctccaggattcattctccacttttctctcgtccgtttgcaatatctgagaatacatagcaaggaggtaaagctgtcaccacagagcaaccttgggcgagccttggcccttatccgag

SEQ ID NO: 483991 - DNA, 692 bp, Homo sapiens
gttatcaagaatctgaaagtctaagataggaaaaaaaaaagtgggggggcattataaatctataaaatgtacttctatggcatgcctaatacgtcttatatgtatgtatgtgttgtgtacacgatgttttagtggctaaacaatatgtaaaatgagctctactgggcttaacagaagaacataaaaggtggcttagatcatgatactaaaaaagaaaaggctagtcaaaggctttttcaaatttatgtaagcttaagtaaaatctttaatgaaataaacgtaggcttgaaaattatgggtaaacgtagtattagaaatgtcttaagaatggccagcagtacattttgtttgcattatagttaatcaaacagttttatacttatccctgccaagataccagaaggtgtcaaaattcggcataggggttataaaactataaacccagcccaaaacagaatgatcttgcttgtgtaatttttacataaagtaagacatggatatgggtttaatgaaaacagctgcatcttgaatttagtaagattaccataagttctaagtcctgtggctttaggcagtttagtccacagacaataaggaggttggctcgggaaaggactgtcatggtcatgtgtgtcgaagctgaacttaaactaggttcctcccaaagttcattcgcgctatgcccaggatga

SEQ ID NO: 483992 - DNA, 1193 bp, Homo sapiens
  misc_feature (1154)..(1154): n is a, c, g, or t
taaaaatattcagaaccaagtttaatttggtagtcgttacacaggagggggcagtcagaagagtacagctcacccccagcaggtggaggggttaaatctcagggacaacggtggggcaggggggacagcacctccgaccctagtgggggtgtaccttcaagtagcaaggctgacagtgatgtctagaagggtctccacattctgccgtgagtttggccaaacccaggggctctatagggatggtggcaaaagaagtgacctaccgcaggggtgattatcaggggttttctaaaaataaagagcacggtattggcctttaaaataattcacatcaacaggaatataggggagaacatggagctgggcataacattgggcgtaaaaagcagggccaggcccacccaagggggccctcgtgtggggacgggtgcctgagcccgagcccctcggagcctctgggccacaggatgggctagcctgtagtgctggtagactacgtactggtacccaccccgagaaagggagtttgaacaattgtagagtagtctggtggcattggacatgtgcaggggtaaacatgggtgtgtagcaaagtgggtacagcagtgcctaacaggacgagagcgaacaaagcaggggctgatggggggccaggcatagaaccagggcaactaggggcgcagggactaaccctacccagggaacccccgaaggtgctttgcaccccgactcggcaagaacagatcggctggacagggtccaaaagtgatagcatgctgggatgcaaattacactaggagaacaacgtatacacataaaaacaaaagaatagagcccattcaggggttggacctgaagcagacaaggacaacaatagcaccccaagagcggccataactgtggaaaacgccggacaccaggggtaacagagccaccctaggcgcaggacaaaagtagtacctgcgaaaataaagaacgcagttacgagatatacgagagggagaacctcaaaaacctcgtcgcaacagtgtccccaaagacattgtcaggcacaaacagcgcaccccctactataacaggtgcgaaccaaaacgacggaacagtaaagcgccccgggagagaagaaaacacaacgataggtgggatgaccagtnaaagagttgtctgctgtgttgtatgctgtgaacacagca

SEQ ID NO: 483993 - DNA, 716 bp, Homo sapiens
cttggtggctcacgcatgtaatcccccagcactttgggaggccgagatgggcagatcacccgaggttagggattccagaccagcctggccaacatggtgaaaccccatctctacaaaaaatacaaaaattagccaggcatggtggctcatgcctgtaatcccagctacttgggaggctgagacaagagaatcacttgaacccaggaggcagaggttgcagtgagcagagatcgtgccattgcactccagcctgggcgacaagagtgaaactatgtctcaaaaaaaaaaaaaaaggaaaaaaaaggtccttatctttaagagatattttcggaaatattccctatggaaatatgctatctgaaattggctccagcggttatgtaccgaggactgtcccgacgtctggttgaaccactggttgaccatgagctgctattggcggacacatgaattgaggacgcacattgggatccttaatacgtctccatctccggtcggcaggttttaccattctccttgacgaaaatgttcaaacacacggcggggcgcaaaggtcacaggcctggaaaatcccagcactgtgggggagggcggaggcaagcgaaaaccaccttggacgggggggaccgttagaagcccgtcgtgggccaacatgggaaaacgctggtctgcccactaaaatctcaaaagacaacaacaaaacaaaacacacaatc

SEQ ID NO: 483994 - DNA, 194 bp, Homo sapiens
atcgtgctcggaccatccctgatattttggaataactcccagaagtggaaatataaggctgaaggcctggtgtggtggctgaagcctgtaatcccagcactttgggagaccgaggtgagcagatggcttgagcccaggagtttgggacaacatggtgaaacctcatctctacaaacagtacaacctgccggtgg

SEQ ID NO: 483995 - DNA, 247 bp, Homo sapiens
caagactgctacttcccatattatataagagctatatctaccctgtgcatgatcacgccctcctaattacatttttccttatctgcatcctagatcctgtatgccgtttaccgaacactcactacgaatataacgtcatactgagctctcacacgctcgggaaatagatacccgctcttcgtaactatcctgcccgccactcatccataattcactcatcgccctcccatccctacacatcactttc

SEQ ID NO: 483996 - DNA, 344 bp, Homo sapiens
  misc_feature (82)..(82): n is a, c, g, or t
gtgctcgcagtgcgccgatcagggcgtagtttgagtttgatgctcacctgtgatcagagtattgagtaagcgtataggctanaggtggctagaatatataggagccttaggttgaggttgaccagggggttgggtatgggaaggggggttcatagtagaagagcaatggtgaggggctctttggtgaagagttttatggcgtcagcgaagggttgtagtagccgtgtaggggcttacaaggttggggcctttgggtagttgtatatagcctagaatttttcgttcggtagcgcattaggtatgccattgcgattagtatgggtactatgaggagtaagaggtcg

SEQ ID NO: 483997 - DNA, 262 bp, Homo sapiens
gtatagtggagacgaatagtccatggtcggtttactatctactacaaagttcctccctgatacgaaaggacaagagaaataaggcctacttcacacacgcgccttcccccgtaaatgatatcatctcaagctatagtattatacccacacccacccaagaacagggtttgttaacatggcagagcccggtaatcgcataaaacttacaactttacagtcagaggttcaattcctcttcttatcaacatatcgcatggtcaac

SEQ ID NO: 483998 - DNA, 441 bp, Homo sapiens
agccaccatgggaagcacagtggtacagataaattatcactcggctgtaacacatcaaaaaaaggattttttactgtctagggataaatataagagtatagtagaaatatggctccagaatgtagaacgcaccgttaaggggatagctaagagaagaaggtatcggtgccggagtacggccagctaccagcgaatctttaaagcgcagtcgccgaacgaacgtgccctgggacccccttttcggaccctatccggcgggcatccctaccaaaaaaagagaagcccctgttccatggctggcgttatgccgtttccttattgttttttcagaatgagagcgattgactctgcagctgcgggatgtcacactcctttcccagaaattgaatatcccttctattatagtgacgacccaggctgtccaattccgtcatggtggct

SEQ ID NO: 483999 - DNA, 348 bp, Homo sapiens
tctaattcaccatgaataaaatttggaggaggcatgtccgcaacccttatatctctctctttttcactctcttcctcgcacccccatgactgaatgttggggggcaaggtggagagagctgggcaactactgtgagcaagtcccctagcccctggacagcctcctcccatgactgggtgaactgtttaatgagcttgtgcattccccacaaaaacatgagtgcccctctgtgtggcctctaaccctctgcacagcccttcttgatggtcctcaccaggtctctgagctggtgtgggaggccatcctggcgaccactgcccattccattcacccctcactgtacctgcc

SEQ ID NO: 484000 - DNA, 1000 bp, Homo sapiens
  misc_feature (57)..(57): n is a, c, g, or t
  misc_feature (99)..(99): n is a, c, g, or t
  misc_feature (115)..(115): n is a, c, g, or t
  misc_feature (118)..(118): n is a, c, g, or t
  misc_feature (866)..(866): n is a, c, g, or t
gcattgctgtctgcaaggagcccctagcccctggcagacatagctcttcagtccccntttctctctgctagatggatgttgatgcactggaggtctttnagcctgcccttgcatngcncctgctggaggaggagagagctctgctggcatgagccacagtttcttgactggaggccatcaaccctcttggttgaggccttgttctgagccctgacatgtgcttgggcactggtgggcctgggcttctgaggtggcctcctgccctgatcagggaccctccccgctttcctgggcctctcagttgaacaaagcagccaaacaaaggcagttttatatgaaagattagaagcctggaataatcaggctttttaaatgatgtaattccccctgtaatagcatagggattttggaagcagctgctggtggcttgggacatcagtggggccaagggttctctgtccctggttcaactgtgatttggctttcccgtgtctttcctggtgatgccttgtttggggttctgtgggtttgggtgggaagagggccatctgcctgaatgtaacctgctagctctccgaaggccctgcgggcctggcttgtgtgagcgtgtggacagtggtggcccgcgctgtgcctgctcgtgttgcctacatgtccctggctgttgaggcgctgcttcagcctgcacccctcccttgtctcatagatgctccttttgaccttttcaaataaatatggatggcgagctcctaggcctctggcttcctggtagagggcggcatgccgaagggtctgctgggtgtggattggatgctggggtgtgggggttggaagctgtctgtggcccacttgggcacccacgcttntgtccacttctggttgccaggagacagcaagcaaagccagcaggacatgaagttgctattaaatggacttcgtgatttttgttttgcactaaagtttttgtgatttaacaataaaatttctgtatacgccaaga

SEQ ID NO: 484001 - DNA, 872 bp, Homo sapiens
  misc_feature (1)..(1): n is a, c, g, or t
  misc_feature (66)..(66): n is a, c, g, or t
  misc_feature (70)..(70): n is a, c, g, or t
  misc_feature (72)..(72): n is a, c, g, or t
  misc_feature (78)..(79): n is a, c, g, or t
  misc_feature (130)..(130): n is a, c, g, or t
  misc_feature (156)..(156): n is a, c, g, or t
  misc_feature (170)..(170): n is a, c, g, or t
  misc_feature (172)..(172): n is a, c, g, or t
  misc_feature (181)..(181): n is a, c, g, or t
  misc_feature (183)..(183): n is a, c, g, or t
  misc_feature (195)..(195): n is a, c, g, or t
  misc_feature (198)..(198): n is a, c, g, or t
  misc_feature (205)..(205): n is a, c, g, or t
  misc_feature (212)..(212): n is a, c, g, or t
  misc_feature (226)..(226): n is a, c, g, or t
  misc_feature (238)..(238): n is a, c, g, or t
  misc_feature (246)..(246): n is a, c, g, or t
  misc_feature (249)..(249): n is a, c, g, or t
  misc_feature (251)..(254): n is a, c, g, or t
  misc_feature (258)..(258): n is a, c, g, or t
  misc_feature (266)..(266): n is a, c, g, or t
  misc_feature (293)..(293): n is a, c, g, or t
  misc_feature (307)..(307): n is a, c, g, or t
  misc_feature (313)..(314): n is a, c, g, or t
  misc_feature (320)..(320): n is a, c, g, or t
  misc_feature (333)..(333): n is a, c, g, or t
  misc_feature (335)..(336): n is a, c, g, or t
  misc_feature (342)..(345): n is a, c, g, or t
  misc_feature (347)..(351): n is a, c, g, or t
  misc_feature (353)..(353): n is a, c, g, or t
  misc_feature (355)..(355): n is a, c, g, or t
  misc_feature (358)..(358): n is a, c, g, or t
  misc_feature (360)..(360): n is a, c, g, or t
  misc_feature (362)..(364): n is a, c, g, or t
  misc_feature (366)..(368): n is a, c, g, or t
  misc_feature (371)..(375): n is a, c, g, or t
  misc_feature (379)..(380): n is a, c, g, or t
  misc_feature (382)..(383): n is a, c, g, or t
  misc_feature (399)..(399): n is a, c, g, or t
  misc_feature (404)..(405): n is a, c, g, or t
  misc_feature (408)..(409): n is a, c, g, or t
  misc_feature (738)..(738): n is a, c, g, or t
ntttttcaggccaagcacaaataacgtggatggcaagccaccataataaaaaagaggccgtcaccncgtngnttcacnnagcaaagcgcaggcccaaagccgcccaagcccaggatcaccgccaagaagnaaatcagaacccaaaagaaaacaggnaagcccaagatcantncaaaaaacnanaaaaaaaaaccnacntttagancaaacantacaacccgccaanaatcacccgggngaaatcanctnannnnaacnctaatacntatacccattttccaacaacttcctcntcccttcccaaatnactccnnccaacncttctctctcccncnntaaacnnnnannnnntntnatncngnnntnnnacnnnnnatcnntnntttccccttctctccntttcnntcnnaagagggccatctgcctgaatgtaacctgctagctctccgaaggccctgcgggcctggcttgtgtgagcgtgtggacagtggtggcccgcgctgtgcctgctcgtgttgcctacatgtccctggctgttgaggcgctgcttcagcctgcacccctcccttgtctcatagatgctccttttgaccttttcaaataaatatggatggcgagctcctaggcctctggcttcctggtagagggcggcatgccgaagggtctgctgggtgtggattggatgctggggtgtgggggttggaagctgtctgtggcccacttgggcacccacgcttntgtccacttctggttgccaggagacagcaagcaaagccagcaggacatgaagttgctattaaatggacttcgtgatttttgttttgcactaaagtttttgtgatttaacaataaaatttctgtatacgccaaga

SEQ ID NO: 484002 - DNA, 397 bp, Homo sapiens
ccgcttcatcctgcccattaggaactacaaggacgcgccaccattcccgctaattttttagagagacaggtttcaccatgtcgctcaggctggtctcgaactcctgcgttcaagcgatcggaccgtctcagcctcccaaagcgctgggattgcaggcgtgagccaccgcacccggcccctgagggaatgcttgaaattgctttcatgtaaaagcacctacacccaggccccccccacccacgaacagcttcgtggacagtttactcagactgagtcgaaggtaattttaaggtagtttcgggatattacccaagtatggcccagctggaaggtggacatcggggggagggctcataaacaccaaagttcaaccttctgcacctcacagatggagaaa

SEQ ID NO: 484003 - DNA, 80 bp, Homo sapiens
gtcacatgacatctgccacctctctccccgtacaccccccagcatgaattcttgggaactcaggtaaaatgctttcttgg

SEQ ID NO: 484004 - DNA, 203 bp, Homo sapiens
cccctttttcccctttttttcttttccgcggccggggcccggggggcccccttttttttgttttaaaaccccccccctttttttttttggccgccccccccccggggggttttttttccccgggcttttttttttgggggggcgcgaaaaaaacaccaaatacccccttttagtttttttagaccaagacaacatttgaaata

SEQ ID NO: 484005 - DNA, 772 bp, Homo sapiens
  misc_feature (183)..(184): n is a, c, g, or t
  misc_feature (188)..(189): n is a, c, g, or t
  misc_feature (191)..(192): n is a, c, g, or t
  misc_feature (196)..(196): n is a, c, g, or t
  misc_feature (198)..(198): n is a, c, g, or t
  misc_feature (205)..(205): n is a, c, g, or t
  misc_feature (352)..(352): n is a, c, g, or t
ggggactactcggacgagactatgagaaggtgccactgccctactcggtcttcgtcaacaccacggagtcctgacgaagtggaaaggcagttacaaggctacaagccctccggggagagccgccaggatgaatttctgactagcatccgggcaactccttcttaccaagtcagtgggcatagnntccnngnnttgntngtgtggnacgaaacctctaacaaagtgaggaactatcgcatttttgagaaggactctaagttctacctggagggcgaggtcctgtttgtgagtgtgggcagcatggtggagcactaccacacccacgtgctgcccagccaccagagcctgctgntgcggcacccctacggctacactgggcctaggtgatggcagtccatgtggctgccaggccaaggcagtcacaggggccctgaccaggccacacagacggacatgggcccacatgggagggtgagcaggagcaaggctgtgcttgcctagggcctctgtgatggacatctcgtaggacccagccagtctcatccagcaggttgggttctagggctgaaccaggcgccaggatccagaggaagaagggactctgttgccacacacgtgaacttgccctgtcccaatcccagaaacccaggaccaagctgtgcctgggctctcaaggacagtgaaccctggtccccccatcacactcacccttaagtgggtatgggagccaggcagggccagggcagctgggtggggccggggctggccttta

SEQ ID NO: 484006 - DNA, 150 bp, Homo sapiens
aaaagtagaatttttctagagatgattagaatattttatgtggcgacaaagtgagttacacctgtatttctagcttgatactggagcaaaagttaaaatggtctcaactctcgacacacgctatctctttggtttatttgtctgtttgtt

SEQ ID NO: 484007 - DNA, 294 bp, Homo sapiens
tctcctcaaaataatacagtaaaaccctaatcctcagtacctcaggatgtgatcttacttggaaataaggtacttccaagggtaatcaggttaaaatgaggtcattaggatgggccttaatccaatgactgatgtccttaaaacagaggacctttagacgcagacacacacacacacagggagaagatgtctactatggtttgtcctcaccaaaacccatgttgaaattgtattcccaatgtggcagtgtcgggaggtgaagtctcgtgggaggtgcttgggtcatgagggcat

SEQ ID NO: 484008 - DNA, 253 bp, Homo sapiens
  misc_feature (230)..(230): n is a, c, g, or t
tctagaggatcccacgcgggcaggatcgccagcatgcctgttggatactcgttgatcctgcgctgcaccgaaaacgtggcaatgcgcgagttcaggccgagcatgaaggcagtgatgctggtcggggtcagatccagatgacgcgcctgctcggcgctgacgcgctggctgcgtagctgaacgcccgaacgccagtccacatggatcgcctcgatggccggcagcgagancagcagcgacgagtccaccggcg

SEQ ID NO: 484009 - DNA, 808 bp, Homo sapiens
  misc_feature (183)..(184): n is a, c, g, or t
  misc_feature (188)..(189): n is a, c, g, or t
  misc_feature (191)..(192): n is a, c, g, or t
  misc_feature (196)..(196): n is a, c, g, or t
  misc_feature (198)..(198): n is a, c, g, or t
  misc_feature (205)..(205): n is a, c, g, or t
  misc_feature (352)..(352): n is a, c, g, or t
ggggactactcggacgagactatgagaaggtgccactgccctactcggtcttcgtcaacaccacggagtcctgacgaagtggaaaggcagttacaaggctacaagccctccggggagagccgccaggatgaatttctgactagcatccgggcaactccttcttaccaagtcagtgggcatagnntccnngnnttgntngtgtggnacgaaacctctaacaaagtgaggaactatcgcatttttgagaaggactctaagttctacctggagggcgaggtcctgtttgtgagtgtgggcagcatggtggagcactaccacacccacgtgctgcccagccaccagagcctgctgntgcggcacccctacggctacactgggcctaggtgatggcagtccatgtggctgccaggccaaggcagtcacaggggccctgaccccaggccacacaggcagtcacaggggccctgaccccaggccacacagacggacatgggcccacatgggagggtgagcaggagcaaggctgtgcttgcctagggcctctgtgatggacatctcgtaggacccagccagtctcatccagcaggttgggttctagggctgaaccaggcgccaggatccagaggaagaagggactctgttgccacacacgtgaacttgccctgtcccaatcccagaaacccaggaccaagctgtgcctgggctctcaaggacagtgaaccctggtccccccatcacactcacccttaagtgggtatgggagccaggcagggccagggcagctgggtggggccggggctggccttta

SEQ ID NO: 484010 - DNA, 119 bp, Homo sapiens
gctactcctgtccagcatctcatctctccttccaacatctcattgctctttccaacatctcatctctccttccaacatctcatcgctccttccaaacatctcatccctctcttccaaca

SEQ ID NO: 484011 - DNA, 643 bp, Homo sapiens
ctgatatgcgtcaaactgctacatgagaaacctgagcatgttcttcccaggcactgactgccagagactcattgaagtggaccatgaacgcatacttcgcactttctatgagaagcgtatggccacagtagttgatgctgacgctctgggtgaacaatggaagggttatgtggtccgaatcagagatggtaactacacacacggacttcacgagacgctgggtgtcgtgacctgtctccgtgttcgtctgctactgagcaggggacttcactgaacacacctagacaactgcggacagatagagaaaatcagttcgcgggagcatcgcggatgcacatctgagcgttcacaacttgaccattgtgataaaggatagtacgatcatcactgactgactgatactaccgtgtctagctgcctgagctcgactcgagctagcagaatgcgcagactattcaatcacctatatgaagacgatgtcctgcagtatgctgaacgatagcccttaaagtctgtaggatataaaccgatgacccaaagtcccaatagttcacgacttcatgcttttcaaaagactgcatgacacaccggcggggtattagacctatcatagaccattgcagatgtcgactgggtgcttgct

SEQ ID NO: 484012 - DNA, 627 bp, Homo sapiens
attcattccaatcccgcgcctacacaagactttcaagaggacactgacagggagagcctactctattacatatctcttatgcttggatgcttaagcagctttataaatgacgtgtacggtacaatgaggaccattcatttgatatatataattgaggatttcatccagatcaactcatttgatatacgatataacatcacttttgaatggactatgcagagacatggagagtgcttgcggcatatattctacgagtatatggttagactattgcaggtatagttatacaagctaagatacaaccaatccgacattgaatggtgcaacatcatcttaggatgcatttatatgtgaggatactgggaccatggactcactcgcgtgagtgagactgcatgatgcattcgatgcagcagaccgtattatgaaactagtaaggacctagggaagtagacatatggaggtcttcaacacattagcgtatgccatcagggtaagacttgagctagcgattgaagatacgtgtgtacgtctcatatagtgatatgcagctgtgcacaaggataatgccgctccacttggacatgagaccttcatgtgcgaatggcatggtgactacaacttatg

SEQ ID NO: 484013 - DNA, 244 bp, Homo sapiens
  misc_feature (24)..(24): n is a, c, g, or t
  misc_feature (33)..(33): n is a, c, g, or t
  misc_feature (42)..(42): n is a, c, g, or t
  misc_feature (95)..(95): n is a, c, g, or t
  misc_feature (187)..(187): n is a, c, g, or t
  misc_feature (210)..(210): n is a, c, g, or t
  misc_feature (229)..(229): n is a, c, g, or t
gcccaggagcgcacgcaaatcgcnagtgatctnggacctganttgcgggccacgagggcaattcggggcggctgctgctcaggctcttcacggtntaccccagcaccaaggtctacttcccgcacctgagcgcctgccaggacgcgacgcagctgctgagccacgggcagcgcatgctggcggtctntgggcgcggcggtgcagcacgtngacaacctgcgcgccgctngagcccgctggcgta

SEQ ID NO: 484014 - DNA, 119 bp, Homo sapiens
attctgtggtctcacttgacacctggtcattattccatcgtccatgtcaccaacgtggtgaatggctgccgcacattgctccagaatgtgcacgaataaaagcagaattgttgcctgta

SEQ ID NO: 484015 - DNA, 693 bp, Homo sapiens
  misc_feature (255)..(255): n is a, c, g, or t
  misc_feature (290)..(290): n is a, c, g, or t
  misc_feature (305)..(305): n is a, c, g, or t
  misc_feature (351)..(351): n is a, c, g, or t
ggtgagggcgggcggagatgtagacccggtagtgttgtgccttgtggtgacaactggcggcagcgcgccggggcccgagacttagtctcggccgccatgggccagcgtccacgagagcctctacttcaatcccatgatgaccaatggggttgtgcacgccaatgtgttcggcatcaaggactgggtgacgccgtacaagatcgcggtgctgggtgctgctgaacgagatgagccgcacaggcgaggggcgccgtncagcctcatggaagcggcggaggctcaaccagctngctcctgcccctgcntgcaggggcccagatattacacctgtcaaaactttacaagttaatntgaagagtcttgtccacagctggcaaattcagtgcagatcagaatcaaacttgatggctgaaggcgagttgaaggatattggaacagtttctctgatgacctttcagattctttctctggaactgaaaccagaggttccacaaaacaagtgtagtagggtaggtaactgcgtcacatgatcttggcctacagataaggctttctgttcagcccaagtgtttaaaactgtacacgggccttcagcagtacttccagaaatggtgagaacaaagacagttggaggatgctgatatgggaactgacaggtagagatgaagggtgaaagacaagtggaaaaaggag

SEQ ID NO: 484016 - DNA, 1011 bp, Homo sapiens
cgcgtccgggcttaatgtgtactcggcgctaacatctcgtctatctggccgtggaggctattcagcgtactccaaagatacaggtttactcacgtcatccagcagagaatggaaggtcaaatttcctgaatgctatgtgtctgggtttcatccatccgactgttgaagattgacttactgaagaatggagagagaattgaaaaagtggagcattcagacttgtcattccagcaaggacgggtctttctatctctgtgtactacagtgaattcacccccactgaagaaagatgagatatgcctgccggggtgaaccagtgtgacttggtcacagcccaagatagttaacgtgggatcgagacatgtaagcgagcatcgaatggagatgccgcatatggattggatgaattccaaattctgcttgcgttgctctggaatattgatatgcttatacacgtatacgacttttatgcacaaaatgtagggttataatagggttaagcatgggcatgatcttctgttataattctatctttgagtgctgttctccatgtttgatgtatctgaggcaggtgctccaggggtagctctaggaggggctggaagttagaggtggggagcagagaagtctttattcaaataaagatgtggtcagaattgaactcttgaatctctgcgaatcatagcttgtgagatagctaagcggtgatagcttaactgccgattgacatagtcgcttaaattggggggactttagaaattattgaccggattttgggacattggtcacggctggaaccttggccctatggaccacattggttttactggtacacagcggggggggttacgggattttgtgtccacggagtatatttattctggaaaaacaaagaggggggtaaaacaggggcgaagacacacatgattagagacaagagttaaaaaaggcgaagatagaaagcaaattgagacctgtgttgcacaacacatgtgatagtgatttagatct

SEQ ID NO: 484017 - DNA, 213 bp, Homo sapiens
  misc_feature (34)..(34): n is a, c, g, or t
  misc_feature (87)..(87): n is a, c, g, or t
acacttcagcttcgttatgatgtaggatgtaatnttacccatcatctagttgacttatcacgagtagacacttatattatcgtaatngtactatgcctggttaaattaccatctttatttttaaattgtcccatgtgatcttagttcccttttttcttattgcctatgattaaatttggcattttaatgattccattctatcatataagcatt

SEQ ID NO: 484018 - DNA, 826 bp, Homo sapiens
  misc_feature (282)..(282): n is a, c, g, or t
tggctggctcacactttattaaaatgccccaggagccccaggggcccactatggaatgtaggtagaggggttccagggccccgccgtggagcaccgggaccatggggggccaccttccgggattgccaagaccgcggtctccttcagaggcgccaaccgtgttttctccaggaggtgtgggggccacgaggctgtggcttccgcgttgttgacccctgtgctttgtggaaaaaattacgttaaattattaacaaggtgtgctgtgggaggccgcctgtccgnaacccgctgttgcccgtgggtatccgggcgacgccgagccacgtgtcgcacaaccccttcccagcgggggtgttccaggaagcgcccagtgaaaagccccagcctgtgagagccataaggcgtccctattcagagaaaaacagcgaggggtaatctcgcgggagcggatctcccaagaggacacgcattgtcatccactctcaccaatcgaccttcaaactcacccaagaacatgatggggagacaagacagcaccacagagaaggcagtcgggagagaagcgggggagaaacaaaacgggggcaccacaccgtgacggggaagcaacgacgagacgaccaacaacacacccacaccacaaaggagagcgaagcgaaaccacaaagtatacgcgaaccaacaaaaagaacaagaaaagagcgaaaagaggaggaaagcaagagaacaaaaataacaagacgccacacgacagacgcgacaagaaaaaaacgcaaccaagaagaacaaaaaacagaacaaacaaagacgaaaacaaagaagaggg

SEQ ID NO: 484019 - DNA, 368 bp, Homo sapiens
ggcccgtcagagttgagaccctgttctcacacagtatagtactaaatccccagattggactcacgttggggatgataaaattacagtagttgagatagtctatggcatattttctaacatcccgattttcattctctccaactgccatgactagtcctaagtctgcactggcctctcaatgcattccgattaacttttatcagcaggcgtgctattttattaccgtattttggcccagtcgggctaaaaccacctggtatttccctttgggccccccagggggcccaattcaagcccgatataacctggccgggtccaccccgcaagggccaccggggattttatcgggggttccccgcaattcctcc

SEQ ID NO: 484020 - DNA, 810 bp, Homo sapiens
gggtgtgaactcatggtttccaacatataggtacatgtagaaatacggacttgaagaaaacaagggcagcagaaatagtctctataggaaaaatgtaaaggagtgatgacaggaagagtgagaacacttatatgatacaacgaaaggtcatatgataagaaaggcatgacatatgtaagcttgttcaggcatgagtgatgtgccatgtggccatgagtccagtgttcatgaatcaacaatatatatcagataacaggtgtgtcaaccagaaacacacataaaacaaggttatgtattaaacagtcgaacaaaaactatgtgacccagggcctcacgggaacctaaaccttgtattttccctaagagcaattactcagtatacagtgtcacgtgtgtgggtgcacactcggtgtagaaatgttaactattatggctgtaaagaatagaacaatacgatgtacatagttgcagagtatctcccccacatatttagcaatggcagagtgaaagagaatacctaatagtgggaaaacctggcagctgatcaaagtgaccatcatcagtaataggcacatcacccttctaggctgccagaataaggggtatgagaccgtagcatcacttctctgttattcagccggaaattcagatctgaatcaatatcggagagttgcacacaaactggaactttaaaatagggccgatttaaggttcgggagacacaggctcgtgggacccgcctccaacagtgagggcgggaagaaggcgggcccaggtgaacacagaccgacccgagggtgaaccaaacgg

SEQ ID NO: 484021 - DNA, 1312 bp, Homo sapiens
agtctttttcttttttggtctacatccctcttgttttcaacttctatgacgggaggaaagctacacgtttggtcagcctcttgtcttccaccctccttctgtgtcttacgttcttttctactttttgttgtgatcctgttctctcctcttatcttggggtcttgcctactttttcccgtcccttttctcacgttttgcgtggtactttcaatcccctcatttactcttgtggttctccctctggtgtcttgccctgcttttatccgtccgtggtctctgctctgtgtcccgtctggccttcttcattcctcttgttgggttttccctgctctgtcactctttgatgcgtctctctggggttgtttcttctgggtatatctcctgtttgcgattgctttcgccgtctttcaccttccatctctgctctgtggagccctttgtcatctcccctcagtgggttccccccttgtgatctgtcatgccccttctcgttgtgtgcctccttgcctcggtctgctctttttttcttgttaccaatcttgtgtcgcgtctctgctcccttttatcacggatgggtcctcatgctggcatcttttcgtcttgggcccctctattcattgaatcgttttgtatgtgtggctacactgcctagtgtgcacgcctccttttctctgtcttgtcctggtgtatgcctacgctgccttttgggagtttatctggttttttgctctaccatcgagctgtgatcgtgggtactacgttgtccccaatgtccacaagttctttttcatgggctatgagtctctgagcttatgcgtccttggtgtgacagccgtgtccgtcgtccatgctctctcttaaggcctctgcgtcccgtgtcctcgtcatcacttttacagccttgtgttgtcttcctggatgtcagctgtctctcgtaagaccacgacatggtttaacttagtagttcgcgggcctggcgcccatcgcgtcagcgttccgtcgtgttgtgtagtttcggcggcttgctaaaacgttgtggtttgttacctactactttggtggttgtcctcttttcggcaatagttggagcgagtgcacaagctctccatcggtggtccttgtgctgccaagagcgactcatagtaaccaggtatgggagatgcagctgccttattctgaatcccagaaattacttgggggtgattgtcacagagggagggacagaaagggtatctgctgaccaccagccatgctctacccagtgcccagtgtctccagtccatgctcaagaaacgtgccgctggtcacgggg

SEQ ID NO: 484022 - DNA, 295 bp, Homo sapiens
cagctgttcttcaagatcacgttactgcactccagcctgggctacagagcgagactccgtctcacgaaaaaataaataataaaagataaaaaaattaattcagagaatttgcctataagtttgtaaactttatgtaaaaattttctgtgtttacaagtaacatcaagtcgtagtaaagcctgtctcacaactagttactgtactatgtatttactgagtagtatgtaaaaaacagaatctgtcaatttaagtatatctttttttaatctatggtacatcaccttcttgaagaaca

SEQ ID NO: 484023 - DNA, 547 bp, Homo sapiens
gcggtccgaattgacgcgtctccttggtttgaatactagacattctctcaagacaacgcaggattgttgggtgtggtggctcacgcctgtaatcccagcactttgggaggccgaggcgggcggatcacaaggtcaggagattgagaccatcctggctaacacggtgaaaccccgtctctactaaaaatacaaaaagttagctgggtgtggtggcaggcgcctgtagtcccagctacttgggaggctgaggcaggagaatggcgtgaacccgggaggtcaaggctgcagtaagcagtgatggtgccactgccctcagcctgggcaacagaacaacatgcaatcttaaaaaaaaaaaatcctggccaggcacaggggcttatgactgtaatcccagcactttaggagacggaggcgggcagatcacgaggtcaggagattgagaccatcctggctaacacggtgaaaccccgtctctactaaaaatacaaaaaattagctgggtgtggtggcaggcgcctgtagtcccagctacttgggagggtgaggc

SEQ ID NO: 484024 - DNA, 161 bp, Homo sapiens
atgacgagcgagacgtcatcctgagacagtacatcagcacctcctgtgctcagcccagcctgcccctgcagctgtcagagtgtgaacatacctgctgtcgctgggtgtcttgtccacatggtgccctgatgccccatcacaatggaggctcacatgtgcta

SEQ ID NO: 484025 - DNA, 226 bp, Homo sapiens
ccgccgccgggctgataggtgcactgccgctgcgcgcactctgctgctcgctcacgccataaaacgtcttcatgtaacggcgatcgccaaacagcgcggcggattcaaacgccaggttatcgctctcatcctgccaaggcagtactgtcacggaggttagatattgcacgccttgtccgtcagttaggggcagtgtcgccttgccctctagcgaaagccatgaggt

SEQ ID NO: 484026 - DNA, 314 bp, Homo sapiens
taaactggggaccaccaagtggtaaagatgtatgtttttacctgacagttataccacaggtagactgtcaagttgaaaagagtgaatcaataactgtgtattggttttaaaaattaaataaatccttgataagagtggcttttttttttaaggagttagtccttgaccactagtttggatgccatctccatttgggggtgaccgtgttttcaccagcaggccgtgtaactctccagtgactaacgtggttgtaagtgcttaaaagggaataaaagtgggctttctcatacattaaaaaaaaaacaaaaacaagg

SEQ ID NO: 484027 - DNA, 338 bp, Homo sapiens
tagaggatcccgaaaacgacatagaggcaggacgttaagcccaggagttcaagaccaactggggcaacatggcgaaaccccgtctctactaaaaatacaaaaattagcggggtgtggggcacatgcctgtgtcccagctactcagaaggctgaggcaggagaatagcttgaacccgggaggcggaggttgcagcgagccgagatcgtgccactgcactccagtctggtgacagagcgagactccgtctcaaaaaacaaacaaaaacaaatggcaactgctattttattattcttctattctaagacaactattattattattctcctcctctatgtca

SEQ ID NO: 484028 - DNA, 100 bp, Homo sapiens
tttctcccttggccctcaacagcgagtacagtgccatgctcttgccaaaaggcccttgttgggcaagtacacgttggaaacacgtgtaagtgtagagtgt

SEQ ID NO: 484029 - DNA, 196 bp, Homo sapiens
ctagcaggatcctatcgccaacactgaaaacaggatgaaagcctgtttactgcaattccttttacccagtgtatcatgtctacctatcaacagaaaattacaaagcatacttaaaaggcagaaaatgcagtttgaagagactgaacaagcattagaaccagagtcagtcgtggcaggagtgttggggataacatca

SEQ ID NO: 484030 - DNA, 735 bp, Homo sapiens
  misc_feature (47)..(47): n is a, c, g, or t
  misc_feature (78)..(78): n is a, c, g, or t
  misc_feature (504)..(504): n is a, c, g, or t
  misc_feature (580)..(580): n is a, c, g, or t
  misc_feature (635)..(635): n is a, c, g, or t
  misc_feature (681)..(681): n is a, c, g, or t
  misc_feature (697)..(697): n is a, c, g, or t
  misc_feature (735)..(735): n is a, c, g, or t
gtaacacccacacattacttattaattacaaacgaatgaagtacttntacgatggagaaatatggcagatgccacctnaatcaagtgaccacacttagaattaccaataatggggcaaactgacattatgtggcttttgatggagtgcagtgggatgagcacaacatcacttatgtagtatttgccaaacatctttgacctgaatctaataaagagatattaatcagacacattcacattataagatctcctacctcaaatagcgtatcctctaaaaatgtcaatgatttaaaaaacaaaaaagggtatatgtgtgtagagggaatgttccagaccaaaggagaccaaaaagatatataacaagcaaatgcaatgcttgagctcagattggattatgaatcagaaaatgaacaaagagctataaaggacatgattggataattgggaaagtttaaacatggaatgtatattagataataggtctatcaatgttaaatttcttgngtatcatatggtattatggtaatatacaataatgccgtcatacctcggagttcaatgttcaagggcaggaagcatncagcatgggagaaagatgtaggctgggagactaagccagtgtagtcttttcaggntcttctgctggctttattctgacacactggcagcttgatagatggnggccacccggattganggtgggtctacctttccagtccactgactcaaatgtan

SEQ ID NO: 484031 - DNA, 681 bp, Homo sapiens
  misc_feature (47)..(47): n is a, c, g, or t
  misc_feature (78)..(78): n is a, c, g, or t
  misc_feature (450)..(450): n is a, c, g, or t
  misc_feature (526)..(526): n is a, c, g, or t
  misc_feature (581)..(581): n is a, c, g, or t
  misc_feature (627)..(627): n is a, c, g, or t
  misc_feature (643)..(643): n is a, c, g, or t
  misc_feature (681)..(681): n is a, c, g, or t
gtaacacccacacattacttattaattacaaacgaatgaagtacttntacgatggagaaatatggcagatgccacctnaatcaagtgaccacacttagaattaccaataatggggcaaactgacattatgtggcttttgatggagtgcagtgggatgagcacaacatcacttatgtagtatttgccaaacatctttgacctgaatctaataaagagatattaatcagacacattcacattataagatctcctacctcaaatagcgtatcctctaaaaatgtcaatgatttaaaaaacaaaaaagggtatatgtgtgtagagggaatgttccagaccaaaggagaccaaaaagatatataacaagcaaatgcaatgcttgagctcagattggattatgaatcagatggaatgtatattagataataggtctatcaatgttaaatttcttgngtatcatatggtattatggtaatatacaataatgccgtcatacctcggagttcaatgttcaagggcaggaagcatncagcatgggagaaagatgtaggctgggagactaagccagtgtagtcttttcaggntcttctgctggctttattctgacacactggcagcttgatagatggnggccacccggattganggtgggtctacctttccagtccactgactcaaatgtan

SEQ ID NO: 484032 - DNA, 159 bp, Homo sapiens
tactctatctctctaagtgaatcattcaatttatgcaagacctttcatcttcaaaatcccaagagagcttacaggtactttttttatataagtgttattatttattgaaaaagggttcaatttttgacaccaggggggaagaggaagggacaaaacaaa

SEQ ID NO: 484033 - DNA, 195 bp, Homo sapiens
gtaagtccaagagtccaaaagcttaagaacttggactcttggacttacaccagtggtttgccaggggctctcgggcctttggccacagactgaaggctgcactgtccggcttccctacttttgaggttttgggactcggactgatccaccactaccttccttgcccctcagcattaacaccaccgatcgtggaca

SEQ ID NO: 484034 - DNA, 190 bp, Homo sapiens
ttttgaagccccttggggcaagggggggggaaacttttttttttaacccccccttcttttttttttggccacgcggggtttttaaggggttttttaaaatttgtttttttttatttgccccttccgggtaacccccttttgaacggggaaagggggtttttttttttttttaaaaatggtttggggccca

SEQ ID NO: 484035 - DNA, 386 bp, Homo sapiens
taaagacagagtctcattctgtcacccaggctggagcccagtggcaggatctcagctcagtgcaatctccacctcctgggttcaagcgattctcatgtctcagcctcctgagtagctgggattacaggtgcccaccatcacgcctggctaatttttgtatttttagtagactgggttttgtcacgttggccaggctggtctcaaactcctgacctcaggtgatccatctgccttggcctcccaaagtgctgggactgcaggtgtgagccaccgcgcccggcctattgtgacatattgggatatttctttcttttttgggtgacagggtttcactctgttggaggctggagtacagtggcacaatttcgggttaccttcactttcac

SEQ ID NO: 484036 - DNA, 281 bp, Homo sapiens
cggtaacctaaaccgatgcaatggttgcataattcacttattccttaattagggacctgtatgaataggtccagcgaagagttcagctagtacgtcttacttttaaccagtgataattgacctgtcctgtcaagaggcgggcattgacacatcaagacgagaagaccctattgagcttctaatttattactgctaacagtatctatcaaagccacaggttctagactaccacatctgcattaaaaatttcggttggggcgacctcggagcatgaacctaag

SEQ ID NO: 484037 - DNA, 176 bp, Homo sapiens
  misc_feature (125)..(125): n is a, c, g, or t
ctccaggtgtgtgtatgttcagatgtatatgtattctatatttatcattacggagagagaggagaactcatggggaatggaagtactattctgctgaatgtcagaaccgctgtgcaagccagacncataatttgcccaagttttcagctggtttggacagattcaactcaaccgct

SEQ ID NO: 484038 - DNA, 347 bp, Homo sapiens
cagtcgagtctcactctgttgcccaggctggagtgcagtggcgtgatcttggctcgttgcaacctaagccccccggttccaagtgattctcctgcctcagcctcccgagtagctgggattacaagcgcgccaccacatccggctaatttttgcatttttagtaaagatgggatcttgccatgttggccaggctggtctcgaactcctgaccttaagtgatcacctgcctcggcctctcaaagtgctgggatcacaggcatgagccactgcacctggcctgcagggctgttttcaagataaggcagggaaacatgtcttggggttaatattttttaggttctcccctg

SEQ ID NO: 484039 - DNA, 104 bp, Homo sapiens
tctggatgcagtgtcctctctggatgcaagtgtcagaatttcaagcacaaccccaaaattacaccatcttcatatccaaggtaggtgacactttgcatccagag

SEQ ID NO: 484040 - DNA, 390 bp, Homo sapiens
  misc_feature (144)..(144): n is a, c, g, or t
cctccttttcccaggaatattccctgggcttttgaggccataaagccagccagtggatgggtaagaagaactaagggcaggcccctttatttgcccccggcttgaactggggaacgactgggactctgccaccaagcagtttgntgggactccagcccataagccctgtgtcccctcttcatagagtcctccattccagtcaagggtaagtcaaatgaactgaattttaactttttgcatgcttctatgtagaaaataatccaatgataatagatccttataatgaaacttcattaaggtttcattcaggggagcaattcctgtctttaaaaattaagtggaagaagaattcctttaatccactaccaagcaataataaaatggacctta

SEQ ID NO: 484041 - DNA, 183 bp, Homo sapiens
  misc_feature (79)..(79): n is a, c, g, or t
  misc_feature (173)..(173): n is a, c, g, or t
ttatgcttcccgtagccgtggcttttcattctgcacaagtcccaggtcccagctcccctcttatggtttctgtcataantgtgctttatctgatttgactccaaacaatcccgaaatgtcacctgcagatttctcgttgggaaccaatatgtacatgtttgcaattatgctantgagaattta

SEQ ID NO: 484042 - DNA, 458 bp, Homo sapiens
gtgatttatccccaacactcggagggctgaggacaactaatctcttgaacctaggaggtggaggttgcagtgagctgagattgtgccattgcattccagcctgggtgacagagggagactctgtctcaaaaaaaaaaaaagggaaaggaaaggaaaggaagaggaaattattcttcacggcaatttggggaggcagatacatattcattcctcatttagggagatggggaatgggttgctcagagagggcaaggagagctgcctgtgaggctcacacagcacctatagggggcaaaagagggatccccccccaggttttacaggcccccaggggttggagattggaagacctttcttatttcaattctataccccaagagttctgataggcacatttcctttcagagggggtggagagagatttggaaagagaccttaagacacgggtgagagccagg

SEQ ID NO: 484043 - DNA, 254 bp, Homo sapiens
aagctagggacatagaagagatgacatgtacaagagaagacacgagatgctggtggcaggcttgaggacagcaagtggttgtactcaactatgaagcgtttgtgatgcatatcctgtcggggatgacgggcccactgggagcgagacctcggtccgcatgggtgctgacctggctgcaggactcttcccaggtctccccagtattccgtgcctgtgcccctgtgtgatattattgtatctaggcctacctgttg

SEQ ID NO: 484044 - DNA, 201 bp, Homo sapiens
acgcaaagatccagtctgacaatatatcccaacatgcctcgggactttatagaaacagttctggcccaccataaacccatatatccatacaataaatacatatatgaaactctgcccggcttgctagaagacatcaaaaagctattagggggagtagagcctgaagtccttgaaagaggatcatgacgcgactgagagtgc

SEQ ID NO: 484045 - DNA, 1008 bp, Homo sapiens
aacagcggaatcccctgtctacctctctccttggtcctggaatagtgctaccgatcactaagtagccctaagacataataaaccttcaactgctcagtagtttttcttatgaaagtcaagtaaaaggacgtaagcaaaaaaaaaattattttttttttgcgtgaaggattccaaaaataaaattctctggggactgagaagaaaaagaataaaataaaaacgcaaaaatgcgccagctggattattaatgggagaaaaattcctcctccccgcgtgggctgggctaccccagccagttgtcaaccacggacaccgggacaaaccaaagacggcctctggagcacagaaaatgtctatcaaagcgcctaatcatgggagaaagaggcgaagggcaagattaattggaaagtctaacgccacctggaaaacactggtttttgggatttgcccttaagaaaagatacgctcccgcgatttcccaagctagaaaaagcgcagactttctgggaattgactggtgaagcacctccggaacctgcagggggcgcagatgaccgccgcgctcagaaagacccgagcgtgtgggggaaataccggccggttcagcaattgcttgaccgaggtgacccgtttcctgtccacgtgtgagggcgttaccaccgaggtgcgcatcggctgttgggccacctcggccattgttgaccagattcaacgccattgacctaccccggggggccacccccgctttgaagggcccgccgccgacgcgccgttagagattgcgttccgcaagagcccattgccagcgccggctctgtgttgccatccccgggggcggggccctcccggagcgcccctaatttgggcccagttgtatagtctccaggtttggcggcacaatgggcgggcctgagacatgctttcacccaaaggctgaccaagccggttccgatacaaaggacctgcgttaggatccatgctcccactatgcatggaatatccgcctac

SEQ ID NO: 484046 - DNA, 154 bp, Homo sapiens
gcaagtaaaacaactaggctgggcacggtggctcacacctgtaatcccagcactttgggaggcaggcaggtatatctcttgagccaggagacagacgttgcagtgggctgtgatcacaccccttcagcctggtgacatagcgagaccctgtctc

SEQ ID NO: 484047 - DNA, 171 bp, Homo sapiens
tattcgatcttagagcataccttacaagctttctcatgtgcaggctgatcggatctgactcagtgactgccgctctgctcgcaagtgctggatacggcatagcacaacttggcatagatgagcttatctgtcaagtctctctgtgtcagctgggctgggccgtggtcagtt

SEQ ID NO: 484048 - DNA, 426 bp, Homo sapiens
  misc_feature (60)..(60): n is a, c, g, or t
  misc_feature (163)..(163): n is a, c, g, or t
  misc_feature (210)..(210): n is a, c, g, or t
  misc_feature (288)..(288): n is a, c, g, or t
ttgactttaacatctgtacatggcattagaagtgtcatgcaaaagaaaccacagctggcntgcacagcaacacaagaccagaaaatggtagatgaatgaagaataaaggtgggtttattccttattataaagaaaaaaaatatttcttcagcagtcttaacanagacatcaagatacaaaattacaagtgttttgactcagccctggtcnccatctcctccaagagcagaggtaggagacagttgaagcaaacaaagcaattctggtaaaaaattacctagaaacccntacaaattttgattaaaattcttaaactttctataatttttgcttttttaaaaaattttaatatcaaaaaggcctgcttttagtgacatgctattcctacagaaaaataaccccaatacccccttctgtcgtcttctc

SEQ ID NO: 484049 - DNA, 1636 bp, Homo sapiens
  misc_feature (41)..(41): n is a, c, g, or t
taggggccaggaaaatggtttgaaccgggggagggcaagangtgttggcagtggagcgccgagaaatcggccgccattggcgactccagcccagtggacagagacgcaagggactccgtctcagaaaaaaaaaaaaaaaaaactccgaggggcaccaagtgcgcgggggcggcgagagagaaagagaggagtagaagagaaacggggcacacagtggtcctcatgaagcgtggtgccccgcgcgcaccccagagtctgttctctgtgtgagccacaaagggggggtgacaacatgcggcggggagctccccctaattaagggagaggcgccatctacactgttcgcagaaaagaagcacccggggggtgtacacccccgcggaacatttgaaagagggcaatcctcgggccaacacgcctccaacacaaccaacattcaccatggggcccacagacggaggagacgaacgacacgggcattctacaaagcgcgccccagcgggacgcgttaggcacgctaaccacaagggcacatactgcacacaaccgccgacggaacaaaccaccgggcgcacgcgaacaacaaacgcgaaaccacacactaacccccaacacgcccacccccgccccccaacccccgccaggccacagcacccccccagacccgttacaccccaggcaagcccccaaacacgaacagccacaagagagccacccagctagccaacacaaccccccaacaccgcaccaaccccgctagacacacacaagagcagaccagcaccacaacaaacggccgccagcatgactcctctacaccaagacacgcgctacactcccccagccccacacgcaaccccaccgcaccacccacacgcacgcacacgacaggacgcagcacccccactctcgcacccgccaccgcaccaacgcaacccccaaccaaccacacccacatcacacccaacacagggcaaacgcgacaagagcacagagcggccagagcagcgcaagcgcacaacacacccaccgaccccgcccagaccacaacaaacgacgcaacaacaatccacaagacacaacgagcaaccgacgacgagagaagcacacacttagctcgcaccgaggccgcaccccgccccgagggcccacacgcaccccccgcagcagacgcaccgcgactccgctacacaggacccgccacacccacatgcaacacacaagagcacgcccggagactcgacggcatacaacggatcggcggaactcgacacgacaagacgtaccaagcagggacgcacgacagagaaggagcgagaacgaagcgagaagaaagcacgcagaccgccacctcccgctgaatcgcccgcgacaccgcgttctccgatccatctccctcacgcccgcctagcatccgcgagtacccgagcactgcaagagcgacgacagcgtggacggagccgcgacgaccggacagcaacggatacgaacagcaaaccagcagcacagactggcactgactacctagcaaccgtagctgcgtcacgccgtacacgccaggacgccaagagcagcatggcgaagcgcacacgcagcgcagaccagacagcaaacaacaggcaaagcgaacggacac

SEQ ID NO: 484050 - DNA, 672 bp, Homo sapiens
atgtcagtagttgttttttgtgtgtgtccattttaagtgggatataattatgtattttgaactatgaatggagactatccgccccagcagttagtttcacactgatataccctttaaacccgaatcattgtctttattatcctggattacacaggtgttgaatggggaaatggggctatgtatattcagtaggatatactatgggaatgtatatatagtcattgctgttagagaaatgaaataaaatggggctgggctcgtgatccgcccgccttggcctacccaaggtggctgggattgacaacgcgtgagccaccgcacccggcctgaaaatattttctaaaaagattaaaaatatacataacgatgaaaaataatacaaatttaaaaaccaatacagtataacaactatttacatagtgcttacattgtattaggtgttataagcaatctagagactgatttagcaagtatacaggaggatgtgcctaggttatatgcaaatattgtgccattttatgatgcaggaacatgagcatctgcagatattggtatcggagggcgagtcctaggaaccaagcactccacgaatactgaggggtgacatcttcatgaactgtagatcattgtagtcacagactgtaaactgaaacgaatatagaaactaattag

SEQ ID NO: 484051 - DNA, 125 bp, Homo sapiens
cgctagcggctagtgaacgcttccctgtggcaccaatcaccacctaacttctcgtctcttctctcccttggcctctctcgccccaccccctccccataagctccgttcacttaatgccgctagcg

SEQ ID NO: 484052 - DNA, 229 bp, Homo sapiens
  misc_feature (103)..(103): n is a, c, g, or t
  misc_feature (117)..(117): n is a, c, g, or t
  misc_feature (167)..(167): n is a, c, g, or t
  misc_feature (223)..(223): n is a, c, g, or t
tactgtaaccagcaggatcactttctccccatatcctttatttcatggccatatttttctttgtaaatggcacctttttaagatgctatataaagaggcccanttcaaagttttaanttcagattatttgggctatttgagaacattctaagcagctgaactatggnttgaaataccctttttacatgcttgaataagtccaaacagcttggatttccttcgntttcag

SEQ ID NO: 484053 - DNA, 226 bp, Homo sapiens
aatgcccggtgtttttttttaaaatgatttcccggggggggggccccctttttcctggtggacctttaaggatttaaatgttttaaatttcccttggcccttttttgttttttttgtagggccccccgccctgttttaggggggttttcccggggttttggcttggacccaaggggtttttttttttttgttttttttgagaattttaaatttaagccctttttta

SEQ ID NO: 484054 - DNA, 316 bp, Homo sapiens
  misc_feature (110)..(110): n is a, c, g, or t
tcttcctcctcccctcgcccggcccctgcgccgcgctgtgcccgcggtcccgcccggcccacgggacacgcattccgcacattccgttcgcacacgattacccggcgcantccagcagcgcgctcctggacgctgcggattctactgggggcccctgagctgcacggggcgcacgagcgtgcgcgccgcacccgtggcaccttcctggtgcgcgacagcgccagcggaactgctttttcgcccttagcgtgaagatggcctcgggacccacgagcatccgcgtgcactttcaggccggccgctttcacctggatgg

SEQ ID NO: 484055 - DNA, 210 bp, Homo sapiens
atgggcacgagaagtttgttctgtgacattgtattgatagtacacccagtatcagaccgtatgtatgggctggagatgattcctttgagtcctaaagtggactactctctggtgtatacatgcactcctcaattagttctcagataattctgcctctaatagcagcagaaactacaggtaatcatctccgggcttacttgaatttctgtg

SEQ ID NO: 484056 - DNA, 525 bp, Homo sapiens
  misc_feature (26)..(26): n is a, c, g, or t
  misc_feature (38)..(38): n is a, c, g, or t
  misc_feature (381)..(382): n is a, c, g, or t
aagaaaaactcgggtgggcggagggngcttcataccancttaaaaaccaacaaagccctttgcaaaccccgggaattttacccccccctcaaaggggtttttttaaaaacttcccccccctaaaaaaagggggccaaaatttttccctgtatatatatattagggggggccccccccctgttttttttttgaaaacccggttaaaaacaccccaccccccaaaaaaaatttttcccctttttataagagcccccgggggaaaaatttttttttttaaaaaagggatccccccccccccaaaaaaaaaaaaaaaaaaaggtttcctcctcccccccccccccccctggttggggggtgtggtggaaaaaaaatattttaaanngggggggggggtgtttttttttttccccccccccaccccaccccccctttaatataggggggggggggcgaaaaaaaacttttttttttataaaaaaaaagagaggggggggggggggagcgcccctttcctttttttttttt

SEQ ID NO: 484057 - DNA, 978 bp, Homo sapiens
gtaggctgagctggggggatcaacttggaaccacaggacgcagagagtagcagtgagagtcatgatcacgaccactgcacttcagcctgggatgcacagaacaaagaaccctgtctcttttgctcaaaatttcttttcaacatcttcaacgatcttctacacatttcgtgtgcatgtcttcattgtgccgaaacgcgcgagacccatgtcgtcgaaaaacgagaaccaatcgaagaaaacacaccagaaggcgtcacagtgtcatcgttctgccctcgaggccatcgttgactccgagggtttgtcccacgcaaaagaaatgaggaaaccagatggtcaatcatatactatcatactatatgctgtgctgctgctgctgctcggcgctgctatactatataatgctgctgctgctgctgatactatactatcatagctgactactgctgctgctcctatacatactacctccgataaatcatgatccccccaccactacaataagcggacaaggagagaaaccatcaccaacactcaacacgcgcacccgggacaatacaacatgcaggcaacaacgatagggaacagcacatacagcgaacgctacgcacaacacacaatccctgccatgcgaccagacagaagacccggggaacgaatgcacccagaagaagaaaggacgcacacaagtacctaggataccaccaagggatcccatcgagacggcaaccacccaccacaaacagacgggacagcacaaccaaagcacacgagcacagcactcacggaacgcagcacagccccagcgcgcaacacaatggaaacacaagagacgaggtacgggagagcaccgactccagtcgaaccagcacccccacaacgggagaagacagcaacaaacgacggacgagaatagcgcacacccgtcaaacgccgacaacacgacgcgcccagacacagcaacggaatcgcgcacag

SEQ ID NO: 484058 - DNA, 149 bp, Homo sapiens
tgggagggggccttccagcatgtgggcaaagccttcaatcagggcaagattttcaagtgaaaattttttgccataacctaggtgcctgcacctgccctttagggagatgggggtccttaaagggaaattaacattggaaaaaaaaaaaa

SEQ ID NO: 484059 - DNA, 715 bp, Homo sapiens
  misc_feature (3)..(3): n is a, c, g, or t
  misc_feature (84)..(84): n is a, c, g, or t
  misc_feature (87)..(87): n is a, c, g, or t
  misc_feature (109)..(109): n is a, c, g, or t
  misc_feature (149)..(149): n is a, c, g, or t
  misc_feature (155)..(155): n is a, c, g, or t
  misc_feature (162)..(162): n is a, c, g, or t
  misc_feature (165)..(165): n is a, c, g, or t
  misc_feature (247)..(247): n is a, c, g, or t
  misc_feature (277)..(278): n is a, c, g, or t
  misc_feature (293)..(293): n is a, c, g, or t
  misc_feature (312)..(312): n is a, c, g, or t
  misc_feature (316)..(316): n is a, c, g, or t
  misc_feature (328)..(328): n is a, c, g, or t
  misc_feature (348)..(348): n is a, c, g, or t
  misc_feature (355)..(355): n is a, c, g, or t
  misc_feature (398)..(398): n is a, c, g, or t
  misc_feature (401)..(402): n is a, c, g, or t
  misc_feature (406)..(410): n is a, c, g, or t
  misc_feature (435)..(438): n is a, c, g, or t
  misc_feature (442)..(442): n is a, c, g, or t
  misc_feature (483)..(483): n is a, c, g, or t
  misc_feature (532)..(532): n is a, c, g, or t
  misc_feature (558)..(558): n is a, c, g, or t
  misc_feature (578)..(578): n is a, c, g, or t
  misc_feature (622)..(622): n is a, c, g, or t
  misc_feature (655)..(655): n is a, c, g, or t
  misc_feature (690)..(690): n is a, c, g, or t
acnttcagaaagaatgcattccctgtaaaaaaaaaaaaaaaatactagagagagggagaaagagagagaagaagagagagaganggngggagagcgagacagagcgagnaacgcaatctgaccgagcaggtcgtacgccgccgcctccncctccnctctgcnctncgctacccaggtgacccgaggagggactccgcctccgagcggctgaggaccccggtgcagaggagcctggctcgcagaattncagagtcgtcgcccctttttacaacctggnnccgttttattctgcnatacccagtttttggattnttgncttccccttctnctctttgctaaacgaccccnccaaganaatttttaaaaaaccttctcctttgctcacctttgcttcccanccnncccnnnnncccaccgaaagcaaatcattcaacnnnncccnaccctccgacggcaggagccccccgacctcccaggcggacngccctccctccccgcgcgcggcttccgggcccggcgagagggcgcgacncagccgaggccatagaggtgacagcngaccagccgcgctgggtganccaccaccaccccgccgtgctcaacgggcagcacccggacacgnaccacacgggcctcagccactcctacatggacncggcgcagtacccgctgccggagaggtggatgtgncttttacatcgacggtcaaggcaac

SEQ ID NO: 484060 - DNA, 333 bp, Homo sapiens
tcgcatcacattatagtctgttcgtgatgagtggagcggggtgggaggacaggctttggtgccggcgtgcaggatgggctagcccagcgccacttcctggagactgtctggtggaagacaccgcggagcagggcctggtagctggggacacggaacaggtggctctcgccgtagcccacgtcgtactcggccgtcttgccggtgaccaggacgcgaatgtggggctcattcacctggcggcccacgagcaccacgaagatctcgatgcctgcccgctgagttacctgcacggccttctcgatggcagcgggcgtggcgcactgcgagttgaca

SEQ ID NO: 484061 - DNA, 762 bp, Homo sapiens
ttttttattttttttggaaaaagtcatggaggccagggggtgggcttgaaaccagcttgggggggtctcaggatccctatccttttttggtctaaatttaatgtatacgggttcttcgaatgtgtgtgtagggggggggggcaatccataatcagtcactccaggttaatgaggagggtctcttctacactaattaagtgacttttcgcttcgaagcgaaggcttctcaaatcatgaaacatttattaattattaacgggctgtcagaagacaatgaatggagcctcacagatgaatcagggatgagttccatggtgggggtcatggctatcgggggtaatgtccgagataacggtcgggggcaatcccgggataaggccggaacaaatgtggttggtgggagaagaaaatgtttcagtatttcaccgccggatcgcaattatggatcagtgcaaaaggggataatgatggcagtaaggtcagggccttaaggtgtggtaccctggagaatcagggggaaactcatgggatatggaagcctccctaatagatgggcgaaaatacaggctcccttaatggatcagggcacatagtgggacatgtgagacgcacacaaccggtaaagaacagttgtcagggagtcagacacgacggcacacacgttgcatcgagtctcggctcaatacacaaagggccaagtccagggccccccaacggggtggaacaagcaaagaatgaatcccaagggggtccaaagccctg

SEQ ID NO: 484062 - DNA, 141 bp, Homo sapiens
tctgtttcacgacgtggtcgcttcgattccagtgactcatgatcactggggatgggcctggatgatacggttcattactagctctcctttcttgagcgcctgtcattaccctgtgtgtgtgttttctgaaagcgaggaagg

SEQ ID NO: 484063 - DNA, 165 bp, Homo sapiens
ctggaggagtcccaggagtgcgtagatatagaactttgatttagatggaatcatggaaattacatagaagctagcagcctaagccaaagccatgaggttcatgtgaagttacagttacacaaataagaaacaaatggtacatccaaaagcataaggaaatattct

SEQ ID NO: 484064 - DNA, 150 bp, Homo sapiens
acgaatgactaaaatgagacagaacaagaccacatgagcatcatgagaaccctgatgactgagacctccatcatgaccggggacttgaagagaggtactctgattcccgctgccacatttggaacagtatgacggctgcagcagaggcca

SEQ ID NO: 484065 - DNA, 303 bp, Homo sapiens
ggtgagtcttgagaggaaatcgtgagtcactgcacacagcttcttcgtcagtatcgtggtggtgcagtgggccgattggtcatctgtaagacaggagggattccggtcttccagcaggggatgaagaacaagatcttgatatttggcctctttgaagagacaggcctggctgctttcctttcctaatggcctgggggctgggtggagaaggaaaactactattaggcccccgtcctgcacgccgtggagcatcagggcacacaatctggaaggaaaccacgcaggcagggcgccgaactcgag

SEQ ID NO: 484066 - DNA, 314 bp, Homo sapiens
tgatgcccccttgatgcccatcacctacatcaggaggatccccatcagcctctggagcgagcccccacaccatgtatgtccagcgtcttcctgccatctccaggcctcacacggagatgatgaccatccctcatgacacgggtttgccttttacaccatcactacctttttaagggatccaccggcaccctgaggagcccatgccacatgtgtccattggtttccctgccatctccagggatctcccaagatgaagtttatcccttgtagcctctgtctatctttgcatgccccttccacattctcgacggatc

SEQ ID NO: 484067 - DNA, 757 bp, Homo sapiens
cgggagctgccgacggacggagcgcccccgcccccgcccggacgcccgaccgaacgcgaggatgcaccttctccaaaagccacaacgcactgaagctggctacaacggcgagcgacgagtgccccgagcctgagacgcccacaagcaaccacaacactggaccaaggatgctgaccccacgaaacatgtacgcggacgctgcgacgccaagacgcacgccagagacggctcccaacgacgtggaccgaccgtcatccagaacaggcgtgcacaacccccgggacacccgacacatcaatgaaccgacgcggctgcaggtggccgcgccgacgcaggacgtcctaccgaacgctcgtcaacgcctcgtcaaacgaaccccaatcatcgaacgaaccgcgcaccggacgcgcatacaaagcccaagccgagcgagcacccaagcacccgacacctccaagccccgaacaaccgtggaagcgcgcagcgagaaacgcaccatgggaacaccacccaaccagatacagctgcactcgagccactacggacgagcatgtacgccaaccgggcgccacgagagcacaaagcaagcatgagaccaaagcactggaccatccgcacgcccacgaggaaagtgaccaaagccaccagagcggaaaaacaccgagacccgaccacccactccgaaagcacccgcagccgacacgcaccgcaaaagccccaaggcaaccacaccaacgccaaacagtgacaaccacct

SEQ ID NO: 484068 - DNA, 685 bp, Homo sapiens
tggttggtgtgtgggtttcggctgaagtactagatggggagggggactagtctagatgagactgtatccccgtgacaatggccgccggagatattcaaagcaccaacccactgtatgctaacacagcatgtctggatgaacagctgagaggatggcgagaagtgatattgcttagtgatagagtcctactatgcgaacgaggctggtttgaactggcatgatgacagataactgttggctcgaacttgtgatctaaaatctacatgcataatcactctcccacataactggtactacaacccagaccagcacagccagctagatttttgcagagacagcagctaaatatgttgtgcacaatgaattgacaattgaacatcatgagaaatgtcatcaaatattttcataacttactttaactatgcttacagcaatcattatgttcgaaacttttcttctcagttaatgaatactattcttatcagaacttcatgaccatctaagactcaattgctcaacattgattatctttccatctaatcaaaatcttgtcttcaatcattctattatgacttttttaaagatttttctggacctcatctccaaattttattgagacaatcgcattttccaaacgattttctccagctcttcatcatacgattcatcctctctctttccctct

SEQ ID NO: 484069 - DNA, 162 bp, Homo sapiens
cgggcacattgtttacctggacagtaccggggcgtcggggcttcgtgtgctcgtaagctggctcccactgaggcaagaccggaagtaatacttactaacttccaagcttcgtctactgacgcccgatacgctgagtgtggtttgcggatcctgggccttccc

SEQ ID NO: 484070 - DNA, 260 bp, Homo sapiens
gagaccggggtttcagcctgtcggctcggccggtctctcctgacctcagggtgatcagcccacctcggcctcacaaagtgctgggattacaggcgtgcgccaccttgcccagcccacatcatacagtatgaactgaacacttgccaccaccagcctctgctgtacgcacacacatatatcactgaacccgtctgacaactacaagttcatctttcttttttacacacacaccaaaacaacaacaaaaaaccacaaaaaaa

SEQ ID NO: 484071 - DNA, 159 bp, Homo sapiens
tgtgatcctcactttacgtatgtatcatccctaatgagacaaagtctccagtgtgatgatggacaaccccctggttcatgcaccagctgcgctgcaattgtgtgtgctggatgtggcatcctgcatctgcatgtgaaatggcttcccctaacctggatc

SEQ ID NO: 484072 - DNA, 126 bp, Homo sapiens
gagctcggtaccccttcgcgccatatcggcggctatttcaaaaaaagaagttctttaccagttgttgtagaaagtatgatattaccaacagcgtctagcttttattcgatattccgatgtgggcgg

SEQ ID NO: 484073 - DNA, 244 bp, Homo sapiens
cctgtgctgcggtcgctctcgacggtttcctatggacaatgcgctacgcgcacagctcatcatgccgcggctacgtggggaagccagccaggctctcatcgagggcttagtgtgaccattgacggacagactgggcagttagcctggggacagtggtttctgcattccccttcgaccaggctagacgtcacttacattccgcgttagccgcattgtgtccattagggatacccgacgcttcgaa

SEQ ID NO: 484074 - DNA, 138 bp, Homo sapiens
  misc_feature (13)..(13): n is a, c, g, or t
gtggcgcatctgntgagtcccatctactcggaagaatgaggcagcagaaccgcttgagcctaggaggtggaggttgcagtaagatgagatcatgctgctgtactctagcctgggaatgagagtgaaactcttatctca

SEQ ID NO: 484075 - DNA, 165 bp, Homo sapiens
  misc_feature (139)..(139): n is a, c, g, or t
cttatcaacgttgctgctgctgcgatacataagctgtttcactgacccgtctcccatactctgaccatctcggagccccaggcttcagctctctccttcactcctgcccttgcctctctcttcttagccgtgtgtttcnccttctccctaggcgctcgtaggcag

SEQ ID NO: 484076 - DNA, 141 bp, Homo sapiens
gcctcggaccacgtatatgtacattcatatactaaatattgtcatgactgtgtagggctgctattgggatcagttaagtaaattcttttgtatatacccgatcaagacctttctgttctggaaaaaaaaatgatcatgtag

SEQ ID NO: 484077 - DNA, 127 bp, Homo sapiens
tgctcgagaggtacgcttatgcactttcagtcacgcgcgcggggaagcaagcaaggcggctcgggttcaccgtgaagcagtcagttgtggctttggttaagtatcaacatttcagagaggcaggact

SEQ ID NO: 484078 - DNA, 647 bp, Homo sapiens
acggcagagtcgacgtggggcggacgcggcggacgtgggtgagggcgcggcgtaaaagacgggacgcggggtgcccggcgcgtgtgggggtcccggcgccgccccacggcaccaagaaggcctggccagggtacctccgcggacccgggggtggggggcgcgggccgggccgatgggcccgggaccccagcggccggagcggcgccgtcccgcgtgcgtgtcactggtggcgcggctgagctacgccgtgggccacttcctcaacgactgtgcgcgtcatgtggttcacctacctgctgctctacctgcactcggtgctgcgcctacagctcccgcgggcggggctgctgctgctgctgggcaggtggcgacgggctgtgcacaccgctcgtgggctacgaggcgaccgcgccgccagctgctgcgcccgctacggcccgcgcaaggccctggcacctggtcggcaccgtctgcgtctgctgtccttccccttcatcttcagcccctgcctgggctgtggggcggcacgcccgagtgggctgcctcctctataacggcccgtcatcgtgatcttccagtatgggtgggcctccacacagatttcccacctcagcctcatccggagctcgtcacaactgaccatgagc

SEQ ID NO: 484079 - DNA, 487 bp, Homo sapiens
ccagctatagtttgtataatttacatctattcgcagacagaggttcctagtcagcattacctggtttggcttcagcattatcatttgaactttagaaggaattattacttcaatagaagattgttttacagtgctactatgtcgtattgtgactgtctgctgcatgcacaaatctgtccagtatacttaacttattttcatgtagatcacataatcgtcgttgatatagatcctgagaggcagataattcagcatttcataaaaagataatggtatcacagcaacatttggatactacagtgctatggagaataccaccattatagtggctggtgaactctaccattatgtagggctgcacttttcccccgcgtgtacaaggctaccgcgtagagcaggtgaagctatgtgggtccacaacaatgtagtttttagtagatgtcaagaggtatctaagctcaaatcacagtgtagtaactatattata

SEQ ID NO: 484080 - DNA, 133 bp, Homo sapiens
atcatcttccttatgctcatcctccttatgctcatccctccttatgctcatccctcctttcgtgcagccaccgggtcacacgattaacccaagtcaatagaagccggcgtaaagagtgttggggatcctctag

SEQ ID NO: 484081 - DNA, 1408 bp, Homo sapiens
  misc_feature (142)..(142): n is a, c, g, or t
  misc_feature (217)..(217): n is a, c, g, or t
  misc_feature (334)..(334): n is a, c, g, or t
  misc_feature (521)..(521): n is a, c, g, or t
tcgtctaggtcgaggctgggtttgaattcggccgaggccaattttgcaactgacgggcgcggaggaggaggttcccggaatgccacgcgcagctgtgagcagctggcgacctgcagctggatgtgcccggagctgcctgcgngggctggcagaggcgagggaggttgcgggtaggaagggcggactgcgcgcgccccctgcgtcccgcgcacctcgngggccggtccatgctccctgactggctgcgggcttcagcatctggggccagtgtttggggctgtgctggggtccatgggctgcagtgtggtgctggcctgatgcgccgggccggagngctgaggccgcgctgcgggggctgggacagcactggcatctccagagcagggcccggggcagcaaggggaggcgccgcgatgccatgacgaaaatatcttcctgttcgtgcccaacctcatcggttatgcccggattgtcttcgccatcatttctttctacttcatgccctgctgccccctcacggnctcctccttctacctgctcagcggcctgctggacgctttcgatggacacgctgctcgcgctcttaatcaaggaacccggtttggggccatgctggacatgctgacggaccgctgctccaccatgtgcctgttggtcaacctggccctgctgtaccctggagccacgctgttcttccaaatcagcatgagtttggatgtggccagtcactggctgcacctccacagttctgtggtccgaggcagtgagagtcacaagatgatcgacttgtccgggaatccggtgcttcggatctactacacctcgaggcctgctctgttcaccttgtgtgctgggaatgagctcttctactgcctcctctaccttgttccatttctctgaggggacctttagattggctctgtgggactgtccgggatgggcctctgggtcactgcccccatcgcctttgctgaaagtcgctcatcagcgtcatccacctgatcacggccgccccgaaactatggctagccctggacgcaggaagaccgcgccaagaagaagtgacagctggagcccccgggtcctgggccagcccaaactgaacctgagaagtatatgactgatgccaaaacagaatccaccaaacccacatgacaaggagggtccacagatctcaacaacactaccctcaatgtgtagaatctaccatgctgggatgcggggtatagactactcattagcgtgacggtcaagttactcatgggaatcctgcaggacccgggaactcaaagtcaagtaggaatctgcgtggaagacaccatcatcaaaggaaggagatcatgaattagcaaggaacagagaaggcacaacacagacagaagaacatggaaacaaatgaaaggaatct

SEQ ID NO: 484082 - DNA, 1274 bp, Homo sapiens
  misc_feature (142)..(142): n is a, c, g, or t
  misc_feature (217)..(217): n is a, c, g, or t
  misc_feature (334)..(334): n is a, c, g, or t
tcgtctaggtcgaggctgggtttgaattcggccgaggccaattttgcaactgacgggcgcggaggaggaggttcccggaatgccacgcgcagctgtgagcagctggcgacctgcagctggatgtgcccggagctgcctgcgngggctggcagaggcgagggaggttgcgggtaggaagggcggactgcgcgcgccccctgcgtcccgcgcacctcgngggccggtccatgctccctgactggctgcgggcttcagcatctggggccagtgtttggggctgtgctggggtccatgggctgcagtgtggtgctggcctgatgcgccgggccggagngctgaggccgcgctgcgggggctgggacagcactggcatctccagagcagggcccggggcagcaaggggaggcgccgcgatgccatgacgaaaatatcttcctgttcgtgcccaacctcatcgggaacccggtttggggccatgctggacatgctgacggaccgctgctccaccatgtgcctgttggtcaacctggccctgctgtaccctggagccacgctgttcttccaaatcagcatgagtttggatgtggccagtcactggctgcacctccacagttctgtggtccgaggcagtgagagtcacaagatgatcgacttgtccgggaatccggtgcttcggatctactacacctcgaggcctgctctgttcaccttgtgtgctgggaatgagctcttctactgcctcctctaccttgttccatttctctgaggggacctttagattggctctgtgggactgtccgggatgggcctctgggtcactgcccccatcgcctttgctgaaagtcgctcatcagcgtcatccacctgatcacggccgccccgaaactatggctagccctggacgcaggaagaccgcgccaagaagaagtgacagctggagcccccgggtcctgggccagcccaaactgaacctgagaagtatatgactgatgccaaaacagaatccaccaaacccacatgacaaggagggtccacagatctcaacaacactaccctcaatgtgtagaatctaccatgctgggatgcggggtatagactactcattagcgtgacggtcaagttactcatgggaatcctgcaggacccgggaactcaaagtcaagtaggaatctgcgtggaagacaccatcatcaaaggaaggagatcatgaattagcaaggaacagagaaggcacaacacagacagaagaacatggaaacaaatgaaaggaatct

SEQ ID NO: 484083 - DNA, 186 bp, Homo sapiens
ttccgaattctctaatggatggattttcattgaggacgttcatgggtttaagttaattagtctcacttaatcaccgaatctgaatgaatgtgaatagatgattcactggataaatatttgggatctggatattaatcatcgattctcttaaccacttgagtatttactacttggataggagcttta

SEQ ID NO: 484084 - DNA, 1324 bp, Homo sapiens
  misc_feature (142)..(142): n is a, c, g, or t
  misc_feature (217)..(217): n is a, c, g, or t
  misc_feature (334)..(334): n is a, c, g, or t
tcgtctaggtcgaggctgggtttgaattcggccgaggccaattttgcaactgacgggcgcggaggaggaggttcccggaatgccacgcgcagctgtgagcagctggcgacctgcagctggatgtgcccggagctgcctgcgngggctggcagaggcgagggaggttgcgggtaggaagggcggactgcgcgcgccccctgcgtcccgcgcacctcgngggccggtccatgctccctgactggctgcgggcttcagcatctggggccagtgtttggggctgtgctggggtccatgggctgcagtgtggtgctggcctgatgcgccgggccggagngctgaggccgcgctgcgggggctgggacagcactggcatctccagagcagggcccggggcagcaaggggaggcgccgcgatgccatgacgaaaatatcttcctgttcgtgcccaacctcatcggcggcctgctggacgctttcgatggacacgctgctcgcgctcttaatcaaggaacccggtttggggccatgctggacatgctgacggaccgctgctccaccatgtgcctgttggtcaacctggccctgctgtaccctggagccacgctgttcttccaaatcagcatgagtttggatgtggccagtcactggctgcacctccacagttctgtggtccgaggcagtgagagtcacaagatgatcgacttgtccgggaatccggtgcttcggatctactacacctcgaggcctgctctgttcaccttgtgtgctgggaatgagctcttctactgcctcctctaccttgttccatttctctgaggggacctttagattggctctgtgggactgtccgggatgggcctctgggtcactgcccccatcgcctttgctgaaagtcgctcatcagcgtcatccacctgatcacggccgccccgaaactatggctagccctggacgcaggaagaccgcgccaagaagaagtgacagctggagcccccgggtcctgggccagcccaaactgaacctgagaagtatatgactgatgccaaaacagaatccaccaaacccacatgacaaggagggtccacagatctcaacaacactaccctcaatgtgtagaatctaccatgctgggatgcggggtatagactactcattagcgtgacggtcaagttactcatgggaatcctgcaggacccgggaactcaaagtcaagtaggaatctgcgtggaagacaccatcatcaaaggaaggagatcatgaattagcaaggaacagagaaggcacaacacagacagaagaacatggaaacaaatgaaaggaatct

SEQ ID NO: 484085 - DNA, 787 bp, Homo sapiens
gaagtgtgtcattgctctccaagagaaggatgtggatggcctggaccgcacagcgtggtgcaattcgaggccgggcagcccgggtcgttcacgtagtcacctcagagatggacaactatgagccaggagtctacacagagcagggttctgggtagaggctcactacagctgcatctcgcaagcatcaagtctatgctccgggcgttttactgagcaagtagaagcagccgtggatagaccctcagctcggagcctgcccagtcccatggatgagaatgagtttatcgagtgtgttcccggctggtatatgatggctatcgcgggacatcagggaaagcagtgctgatgataaaggacgcctgaggagttggatgactctgagtttgagacagaagatgtgatgtcagacgcaggacgagcgtccagacgagaagacgatcagctgatagactgggcatgagtgcccgggcgatcatggctcagcttccccaggatgcaatagaagcgagagatctgcgggacaggtggccagtttccaggaagaaaagagcaggcggtggatgctgaagtgtctcaaatgggacggacagtggcaaggactgtcattgtgtctgggcaggcagatgtgcatgattatgagggagatgacagactttacccggaggtaaaggtgcattgaaggatacatcggatgtgatcagagatgcaagaaaatgatggggcaggggtcaggatggtggaagttgggcggaccatggtgacattggccgatgggttggcagaagga

SEQ ID NO: 484086 - DNA, 102 bp, Homo sapiens
tggctggcagcagtacagcccaggtaatttgcttgagcctaaagggtgtcagtgtcagtccgagtgaaagtgaagagaggctgggacgaggggtgcagggga

SEQ ID NO: 484087 - DNA, 575 bp, Homo sapiens
ggcccggggcgcgtgctcacgcctgtaatcccagctctcagggaggctaagaggcgggaggatagcttggagcccaggagctcgagacctgcctgggaatatagcgagacccgttcctccagaaagaggaaacaaacgcgacaagataaatccacatgacacaccaagggcgcgataataagaccgggaacactaaagcaagaacagaacagatgtgggcgggcgcgcttgcggcgctgaaaagaaaagttttatgaaacaccaccattgggggggggacgggcgggcccccaggcgtgttagatttatcgtggcaccatgggcggcgacaaaaactgctgctgctcgcaagaagagaacagatcctggtcgcaacaacacacgtgtgcggggggggattcttcccacacaaaattaaaaaaaggcggccggggggaaacgcgcgggacggtggtggaaacacaacgaccccagaaagaggactgccgggaaggcaacaaaaggcgggaactacacgaaggggggtgccccaaggaccgcgccgaatgaaaaattaagcccgcgcggggaggccg

SEQ ID NO: 484088 - DNA, 106 bp, Homo sapiens
gatagacgcttgttggtgaattggcaaggccttcagtttatttccactattttcaagacaatagattagatttgcggtgcatctagctctagattcaaggctgctt

SEQ ID NO: 484089 - DNA, 369 bp, Homo sapiens
  misc_feature (365)..(365): n is a, c, g, or t
  misc_feature (369)..(369): n is a, c, g, or t
gaatgacacgtgacgggtggataggcagtgccaatgagacccgccgtggtcactactcagaggagcccggggcatctggtgcgaccagtgtggcttccactcgggtgggctgaggctacagcggggcctgggcagggctgagtgtcccccgttgaacacagggcccccgcggcagcggctggacctgcgcaagccccattgtctcaacatgtccaaaaacccagggctcccagaagggaaagaccacagagtggaaagcagaatggctcaggacctgcccagagcctcgccaacaccggacaacagcagagaaaagcctcaggacctgcccagagcctcgccaatgctggacaacagcagagaanagcn

SEQ ID NO: 484090 - DNA, 231 bp, Homo sapiens
ctgagtggcatataactcctaagatccttggaatctacaaaatgacaccactttggaaaggccaaagattttaggagttatatgccactccagcgctggagtggcatataactcactgcagccttgaacttctgggctcaagcaaacctcccacctaagtcccccaagtagcgaggactacaggcacatgccaccatgccatgcctgctaattttttaaattatgtttaat

SEQ ID NO: 484091 - DNA, 433 bp, Homo sapiens
gtgttagagacctgtgtagtgagtgagtgaagaagtatgagctaactctgggtaggtgatcctcactagctctgagtagtgggataaaggagtcatccattcaggtttttgtagagatggggtcttgtctgtgttcaggttggtctcgaatcagggctgaagtgatcactaagtctccaaagcctgggattataaatgggagctcggaattcagcgtccttattgtgttcatggggatagcgtctgataggcagtgagagatagggattctctgtgtatgcctaataaggttcctctgtaagtcaattacttgtagcctttctccattgtttctctgaacagtttttagaagttgctggtatcttccagagtcaaaactggcaaactacggcctgtgggccagatacagcctgaaacctgtttttctacaacc

SEQ ID NO: 484092 - DNA, 431 bp, Homo sapiens
  misc_feature (126)..(126): n is a, c, g, or t
  misc_feature (128)..(128): n is a, c, g, or t
  misc_feature (148)..(148): n is a, c, g, or t
  misc_feature (156)..(156): n is a, c, g, or t
  misc_feature (181)..(181): n is a, c, g, or t
  misc_feature (222)..(223): n is a, c, g, or t
  misc_feature (225)..(225): n is a, c, g, or t
  misc_feature (329)..(329): n is a, c, g, or t
gttgactcagttgacttttgagtatctactacataaaaagcccattactattaagaaactcaagacaaacatgatttttacctttaatagcctaagatttcttgtgggccaaggaattaattattncnatcagaaatggaggccttanctcatttnggcaaagattagtgctagttattgnaggtttactaataaatgatctgttaagggatttagtttttnntngatatgttgttttggtgttgaaactaaggtataattataatagtatttcacgagctctgttcggctagccatcaattagaagttagagagtttgtcctaacagntaagctataccctcacattttaaacatgcatagtgacaatgacaaaacaaattcaaattttactaatgtaaagctgtatatgtgattgtcaaacactttttt

SEQ ID NO: 484093 - DNA, 107 bp, Homo sapiens
tttggagatcctgagtcaccctcaagtgaggattactggggcagtgaatcatagaccgggctgtacgataaagcaacgtgttgcagagaccatgtgctatgcctaca

SEQ ID NO: 484094 - DNA, 261 bp, Homo sapiens
agaggactcccgggagccttaaccctgacaacaaagtggtattggagtgttatagggttacagagaataccttcaattatcaattataggtttaaatttaccctggcttttaaaggaatagggcacacttttttttaactacttgtatatttctctgtctttgacattgtctctctctccggtttgcctctggctctcactctttctcttttttttttttctgtctctcgctcttctagcgtcaagggctcccgggtccag

SEQ ID NO: 484095 - DNA, 154 bp, Homo sapiens
gatggccggtccgctacacttcgtccacttatgatcttaagaagtgtttggtcgctcggcgtgtgcagcaacaacttcgtccactgggacatgcaacaacttcgtcactctgatctaatccagaagcagaccgtctgggtcctcggcgtgtgca

SEQ ID NO: 484096 - DNA, 154 bp, Homo sapiens
gttggtaaaatgctattaaatggtattgcatactacagaaaaatctttcttaacagcaagattgatcggttggtaaatgttattttattattaatcattctggagacttaacatagctccccagccttcagcaactactaccttatcagacagc

SEQ ID NO: 484097 - DNA, 599 bp, Homo sapiens
gcatgtgacggctgaaaaaaaaagaagagacctggcaagacgacgcaccatgaatgcgcaatcaccggcgcgcgccgcaggcacgacactgcagcactacacacacaaaaatggcaaacaagcacaaggagaacacacagaacaacaaggaacaaaatcaaaacaacacatgacagataccaactgaacaagagacacctaagaaagcaagaaccaaccggacaaataccagaaccagatcacacactcgacacggcacacaagaataacaagcaaagcaaaaaaccgaataagcgaaaaacagagtaacaacaaaactagaacacaaacagacgaaaaagacctagacgacaactcacacccacacagcgagccccacacagatatataaacacatacactcgaatatatgaagataaatgaatcaggagatgaaaaaactataaaataacagtagacaacaaatgtatctacaccaatgaaagcacatgagactaagaacggcacaatacgctaacaacaacaatcaaattaacctaccccagcgcgtgaagcacgtaccctccgaacaaaagggccctcatatcaacagtagacaa

SEQ ID NO: 484098 - DNA, 153 bp, Homo sapiens
ggataatgcccgcggggccactgtcgccactgccaccacgtctactgccacctccacaaacagcggctccaacatcgcagggcgcatatcagctggttgcagcctgcaggtgctagtgctcccatgcaccaacacctaacgcaggtcttcagc

SEQ ID NO: 484099 - DNA, 319 bp, Homo sapiens
  misc_feature (183)..(183): n is a, c, g, or t
tgtgggatgtggtctcagtggtggcatcgaagaagtgaagctgggagtactgtgtgaggtgctctctgtggtggtgatcacagaagtgaagctcagaggactgtgtgaggtggactccgtggtggtgatcaaagaagtgaagctgggaggactgtgtgagggggtttcggtggtagcgattgnagaagtgaagctgggaggactgtgtgagttggtctcggtggtggagatcgaaaaagtgaaggctggaggactgagtgaggtggtctcggtggtggtcatcaacgaagtgaagctgggagtactactgaggtgtaag

SEQ ID NO: 484100 - DNA, 654 bp, Homo sapiens
taaaagtacgttcggcatttaatttctggcgggcaacactttggcccaccagcaaaaacacagcccgaggaagggacccaataacctttacaaaacgcaaacggctgccggcggtgagggcccagggtcttccagggagaggacaggcatcttcctttcccaccaggaaggattgagcccggagcctctgctatgtgcaaggcggtgtgcaagcaccggttgcagcttttggctctctctctttctcttgggggctgggctgggtgtgcgtccgggtgctacatgcttgggcctgtgaggctgagctagagaaatgtagatgtcagatgtgccagtaccatccgtgcgcctcccaagcatgcccccattcactcacgtcggcatctcgacccgttcaatttacagcacaacgaagaagccaccgctaagcggtggtctggggggaagcccggtaggcagtggctcggaacccgggaacgtgtctcaggcctcgggggggctgggccaggcaggggggtgagctagcctgaaggctgcccgggttctggctgcagcgcactctggtccaaggtcttcattctcctccgggcagagggagcccttggtcgtaagacgagccgctgctggcatgggacgtgatgcgcgtggccaggc

SEQ ID NO: 484101 - DNA, 240 bp, Homo sapiens
agtttagaaggatcccggcagagagacatgcttgttcctctggactggaaagatgaattactctcgggaatcttctctgtcagcctgtacatctaaaggcatgaagcactcaattgggcaattaacattagaggtcgctctctgatggcatctctgagaatactggatagaggactggccagaagtcccttcgcgactaggatcacccccaggtctgcggcagttgttacagcgccagcc

SEQ ID NO: 484102 - DNA, 487 bp, Homo sapiens
  misc_feature (16)..(18): n is a, c, g, or t
  misc_feature (24)..(24): n is a, c, g, or t
  misc_feature (138)..(138): n is a, c, g, or t
  misc_feature (142)..(143): n is a, c, g, or t
  misc_feature (461)..(461): n is a, c, g, or t
  misc_feature (486)..(486): n is a, c, g, or t
gcttcatttacctttnnnctcgcnctcacctctctgttcttacatatcccaaataaaataccagtgcttacatgtgccgtgttggtgtgctgcacccatttactcgtcatttacattaggtatttctcctaatgctancccnnccccatccccccacctcatgacaggccccggtgaatgatgttccccgccgtgtgtccaagtgttctcattgttcaattcccacctatgagtgagaacatgcagtgtttggttttctgtccttgtgatagtttgcttagaatgatggtttccagcttcatccatgtccctacaaaggacatgaactcatcaatttttatggctgcatagtattccgtggtgtatatgtgccacattttcttaatccagtctatccattggatgggacatttggggttggtacatatggtaacaaaccctgcacattgtgcacggtgtancccaggaacttaaagtataataaant

SEQ ID NO: 484103 - DNA, 464 bp, Homo sapiens
agcaggcttcagggacttgagcatctgcagattttggtatctatatgggtaactggaaccaatcccccacagacgctgagggatgactgtaattattttattaaaaagggagaaaaaaactgtattaatataaactagtaattatgagatcagatgccattcttccattgagaataactttttgcaatgaagacagaatctgctttatcttactctgaaatctgttactgctggctggttagggtaatgtgttgaggaatcacaacaaagctcagagatgaagtatgctgtgtggattcaccatgtctataatgggaaaaagaaagtggtggtatctgtgttgagaatatgctaaccttgtttttatagattttcccttaatctcataactatttcctaaaatttactttctgtcatggtgggttcaaatacacaacgtacacaatgacaaaaactcctctgtg

SEQ ID NO: 484104 - DNA, 138 bp, Homo sapiens
ggtacccaagacctgaaactgaagaagaagaaggtctgagaatcactgaggttcttcccacctggcagaagcaggaagcaggaagcggcagaagcaggaagcagaagaagaggtggagacagaggcagaagcaggaag

SEQ ID NO: 484105 - DNA, 237 bp, Homo sapiens
tgctctagaggatccttgaacacaaaagcggacagagcacagcaatgccgggatccgagccgcgccttgaaactacaccacaggtcacggccacgcctggatccttaacccactgagcaaggccagggatcgaacccaccacctcatggttcctaagtcggattcgttaaagcacttgtgccactgacagtgaaccctgtatacacttgtattttaaacacatcctatttccagtta

SEQ ID NO: 484106 - DNA, 111 bp, Homo sapiens
  misc_feature (61)..(61): n is a, c, g, or t
gaggatttggtgtccctttgttaaagaacaaatcttgcttatgtaagtgtgatttgttagnttctaacgtaatttcataatataagagtcacagccagacaaagggaaaca

SEQ ID NO: 484107 - DNA, 1122 bp, Homo sapiens
tgttgctaaagcaagggcaagtgatgtgggtcacactagcgttcctcccagtacagcagccacagagcttcctctgtttagtcagagaacctggtggcagaagcgtattactgtgactgagtctgaggccttggttatgctgtattccttggtctgacactcagagatagtctgtcctctcaaaaaaattccagctcaagaggtggagccagagttcaaaatcgccagccctcttacgctgtcatagctgactgccatgttcaaaacgtggttcctggaaactgacttctttacatcaaccacacctatatgaacagaatcccttcttagctctaagccaagaatcagtaaactgtggcccatgggccaaatctggcctgccacctatgcctgtactgcctgccgatgaagaatggtttttacatttttccatggctgggaagaaaagatgacaaagatagtaagtacactgtatatggcccacgacacctaaaatatttactgtgtcccattacaggacaagtttgcctgctcttataaatcactgaacctggagctgttcacactgaaccgaatctacttagggattggcccctggggacattgtgttgggtgaggcctcccttttcactaatggtgggtctttgatcttacaggacaaatccttcagaaagatcaggaaatcaaggacctaaaacagaagatagccgaagtcatggccgtcatgcccagcataacatacagtgccgccaccagccccctgagccctgtttccccccactactcttccaaatttgtggagaccagcccctctggacttgaccccaatgcctctgtttaccagcccctgaagaaatgaaggccagctgtgtgttgtgcccaaaaatttggttaccggaaggcattgcaaaggagcgtctctggcagtcaagataaaaaaacagtttctattgtattttgtggaactgtatctgttgtcatttttaaaaaggggggaaaagataacatccaagtctgattagaactgcccatcagtttttcttgtaaatttttagaagacctcacagaactttacagtttatttttctcggccaacacattaaaaccattcttggatttcaa

SEQ ID NO: 484108 - DNA, 386 bp, Homo sapiens
  misc_feature (386)..(386): n is a, c, g, or t
gttgttgagaaatctgaggcgcgaagcacagacaggcaagcctgtgaccttgaaagacgtgtttggggcctacagcatggatgtgatcactatcacataatttggagtgagacattgactctctcaacaattcacaagacaccctttgtggaaaacaccaagaagcttttaagaattgattttttggatccattctttctctcaataacaggctttccattcctcataccaattcttgagagtattaaatatctgtgtgtttccaagagaagttaccaattttttaagaaaatctgtaaaaaggatgaaaggtcgccttgaagatacacgcaccgagtggatttccttcagctgatgaatgactcttagaattcttatcttttttn

SEQ ID NO: 484109 - DNA, 1951 bp, Homo sapiens
  misc_feature (458)..(458): n is a, c, g, or t
ctgctagcactaatgtatgggttcagtacgtatggcacacagaatggggagtgtgtttgcctacagtgtctctctggatcctctttgtttatattgaagcagccattagatttaaagatctcaaaaactttcatgtagacctttgtcgtccatttgctgctcactgtattgggtaccctgtggtaactttggggtttggcttcaaaagttacgtaagctacaaaatgcggttaaggaagcaaaaagaagtacaaaaagagaacgagttttacatgcaacttcttcaacaagctctccctccagagcaacagatgctacagaagcaagaaaaagaggccgaggaagcagccaaaggattacctgatatggattcttcgatccttatacaccacaatggaggtatcccagccaacaaaaaactctccacaactttgccagagatagaataccgagaaaangggaaagaaaaggacaaggatgccaaaaaacacaaccttggaataaataacaacaatattctacaacctgtagactctaaaatacaagagattgagtatatggaaaaccatatcaatagtaaaagattaaataatgatcttgtgggaagtacagaaaatctcttgaaagaggactcatgcactgcttcctcaaaaaattacaaaaatgccagtggagttgtgaactcttcacctcgaagtcatagcgccacaaatgggagcattccttcctcatctagtaaaaatgagaagaagcagaaatgcactagcaagagcccaagtacacacaaggacttaatggaaaactgtattcctaataaccagctaagcaaaccagacgcactggtcaggctggaacaagacattaaaaagttaaaggctgacctgcaagccagcagacaagtggaacaagagctccgcagtcagatcagctccctttcgagcaccgagcgagggatccgctcagaaatgggccagcttcggcaggagaacgagctgctgcagaacaagttacataatgctgtgcaaatgaagcaaaaagacaagcagaatatcagccagttggagaaaaagctaaaagctgagcaggaagcccgaagttttgtagagaaacagttaatggaagagaaaaagaggaagaagttagaagaagccactgctgcccgggctgttgcgtttgctgctgcatctaggggagaatgcaccgaaaccttacggaatcggatcagagaactagaagcagagggcaagaagctcacgatggacatgaaggtgaaagaagaccaaatcagagaactagaactaaaagtccaggagcttcggaaatataaggaaaatgagaaggacactgaggtgttaatgtcagccctctcagccatgcaagacaaaacacagcacctggagaacagcttaagtgcagagacgagaatcaagctggacctgttctccgcactgggcgatgcaaagcggcagctcgagattgcccaaggacaaatccttcagaaagatcaggaaatcaaggacctaaaacagaagatagccgaagtcatggccgtcatgcccagcataacatacagtgccgccaccagccccctgagccctgtttccccccactactcttccaaatttgtggagaccagcccctctggacttgaccccaatgcctctgtttaccagcccctgaagaaatgaaggccagctgtgtgttgtgcccaaaaatttggttaccggaaggcattgcaaaggagcgtctctggcagtcaagataaaaaaacagtttctattgtattttgtggaactgtatctgttgtcatttttaaaaaggggggaaaagataacatccaagtctgattagaactgcccatcagtttttcttgtaaatttttagaagacctcacagaactttacagtttatttttctcggccaacacattaaaaccattcttggatttcaa

SEQ ID NO: 484110 - DNA, 245 bp, Homo sapiens
ggtcttagggagaacacagctcaaaggtggcatgggggcccaggggcacaggcatgtggaccttgtgaaagagacgacccggaagatgcttccagctgtggaagtgatttcacttttcccacttgaccagttgtccgctaaagcttcagtgctttactaggcattagatcactaaaatgcctattcgttcttgaacaggggtactttactgtttcccagattccttaattttacagcctttatta

SEQ ID NO: 484111 - DNA, 1772 bp, Homo sapiens
  misc_feature (279)..(279): n is a, c, g, or t
ctgctagcactaatgtatgggttcagtacgtatggcacacagaatggggagtgtgtttgcctacagtgtctctctggatcctctttgtttatattgaagcagccattagatttaaagatctcaaaaactttcatgtagacctttgtcgtccatttgctgctcactgcagccaaaggattacctgatatggattcttcgatccttatacaccacaatggaggtatcccagccaacaaaaaactctccacaactttgccagagatagaataccgagaaaangggaaagaaaaggacaaggatgccaaaaaacacaaccttggaataaataacaacaatattctacaacctgtagactctaaaatacaagagattgagtatatggaaaaccatatcaatagtaaaagattaaataatgatcttgtgggaagtacagaaaatctcttgaaagaggactcatgcactgcttcctcaaaaaattacaaaaatgccagtggagttgtgaactcttcacctcgaagtcatagcgccacaaatgggagcattccttcctcatctagtaaaaatgagaagaagcagaaatgcactagcaagagcccaagtacacacaaggacttaatggaaaactgtattcctaataaccagctaagcaaaccagacgcactggtcaggctggaacaagacattaaaaagttaaaggctgacctgcaagccagcagacaagtggaacaagagctccgcagtcagatcagctccctttcgagcaccgagcgagggatccgctcagaaatgggccagcttcggcaggagaacgagctgctgcagaacaagttacataatgctgtgcaaatgaagcaaaaagacaagcagaatatcagccagttggagaaaaagctaaaagctgagcaggaagcccgaagttttgtagagaaacagttaatggaagagaaaaagaggaagaagttagaagaagccactgctgcccgggctgttgcgtttgctgctgcatctaggggagaatgcaccgaaaccttacggaatcggatcagagaactagaagcagagggcaagaagctcacgatggacatgaaggtgaaagaagaccaaatcagagaactagaactaaaagtccaggagcttcggaaatataaggaaaatgagaaggacactgaggtgttaatgtcagccctctcagccatgcaagacaaaacacagcacctggagaacagcttaagtgcagagacgagaatcaagctggacctgttctccgcactgggcgatgcaaagcggcagctcgagattgcccaaggacaaatccttcagaaagatcaggaaatcaaggacctaaaacagaagatagccgaagtcatggccgtcatgcccagcataacatacagtgccgccaccagccccctgagccctgtttccccccactactcttccaaatttgtggagaccagcccctctggacttgaccccaatgcctctgtttaccagcccctgaagaaatgaaggccagctgtgtgttgtgcccaaaaatttggttaccggaaggcattgcaaaggagcgtctctggcagtcaagataaaaaaacagtttctattgtattttgtggaactgtatctgttgtcatttttaaaaaggggggaaaagataacatccaagtctgattagaactgcccatcagtttttcttgtaaatttttagaagacctcacagaactttacagtttatttttctcggccaacacattaaaaccattcttggatttcaa

SEQ ID NO: 484112 - DNA, 483 bp, Homo sapiens
  misc_feature (41)..(41): n is a, c, g, or t
  misc_feature (43)..(43): n is a, c, g, or t
  misc_feature (330)..(330): n is a, c, g, or t
  misc_feature (394)..(394): n is a, c, g, or t
  misc_feature (412)..(412): n is a, c, g, or t
  misc_feature (466)..(466): n is a, c, g, or t
  misc_feature (471)..(471): n is a, c, g, or t
ggatgggggagggatggtttcggcacgaagctattcaaccnangatcatgaggcattagattcatcaggcattagattctcataaggagtgcacaacctagatccctcgcatgtgcagttcacaacagggttcgcactcccatgagactctaatgctgctgctgacctgacgggaggcagagctcaggcagtaatgcaagctctggggagcagctgtaaatacagatgaagctgtgctcacttcacccaccgcttcaccccctggctgtgtggcctggttcctaaccagtgccatggactggtactggtctgtggcctgggggtgggganccctgttttaagcagttttaagaattattcttttttagaatatctacctctactgggataagancatgtttctttactgtgnaggcacacagtaggtgctcagtaaatgcttgttgcaaggaatgaattgaccggncgggngccggttggttt

SEQ ID NO: 484113 - DNA, 1864 bp, Homo sapiens
  misc_feature (75)..(75): n is a, c, g, or t
  misc_feature (371)..(371): n is a, c, g, or t
ttccataaatggatggatgattttcctaaatgtagagtttccccaaatgtatttggattttccttcctatttttnccctacatccttcctagtaaacctatgaggatttgccttccttgattagccgtataatgagtgtgcaaactaatgtgaatttcttaagtgtagataatagtttgttgaattaatctgtgttgttaaacaactaaatattccggtgggggctttttgtttgttggtttgtttttggtattgtagcagccaaaggattacctgatatggattcttcgatccttatacaccacaatggaggtatcccagccaacaaaaaactctccacaactttgccagagatagaataccgagaaaangggaaagaaaaggacaaggatgccaaaaaacacaaccttggaataaataacaacaatattctacaacctgtagactctaaaatacaagagattgagtatatggaaaaccatatcaatagtaaaagattaaataatgatcttgtgggaagtacagaaaatctcttgaaagaggactcatgcactgcttcctcaaaaaattacaaaaatgccagtggagttgtgaactcttcacctcgaagtcatagcgccacaaatgggagcattccttcctcatctagtaaaaatgagaagaagcagaaatgcactagcaagagcccaagtacacacaaggacttaatggaaaactgtattcctaataaccagctaagcaaaccagacgcactggtcaggctggaacaagacattaaaaagttaaaggctgacctgcaagccagcagacaagtggaacaagagctccgcagtcagatcagctccctttcgagcaccgagcgagggatccgctcagaaatgggccagcttcggcaggagaacgagctgctgcagaacaagttacataatgctgtgcaaatgaagcaaaaagacaagcagaatatcagccagttggagaaaaagctaaaagctgagcaggaagcccgaagttttgtagagaaacagttaatggaagagaaaaagaggaagaagttagaagaagccactgctgcccgggctgttgcgtttgctgctgcatctaggggagaatgcaccgaaaccttacggaatcggatcagagaactagaagcagagggcaagaagctcacgatggacatgaaggtgaaagaagaccaaatcagagaactagaactaaaagtccaggagcttcggaaatataaggaaaatgagaaggacactgaggtgttaatgtcagccctctcagccatgcaagacaaaacacagcacctggagaacagcttaagtgcagagacgagaatcaagctggacctgttctccgcactgggcgatgcaaagcggcagctcgagattgcccaaggacaaatccttcagaaagatcaggaaatcaaggacctaaaacagaagatagccgaagtcatggccgtcatgcccagcataacatacagtgccgccaccagccccctgagccctgtttccccccactactcttccaaatttgtggagaccagcccctctggacttgaccccaatgcctctgtttaccagcccctgaagaaatgaaggccagctgtgtgttgtgcccaaaaatttggttaccggaaggcattgcaaaggagcgtctctggcagtcaagataaaaaaacagtttctattgtattttgtggaactgtatctgttgtcatttttaaaaaggggggaaaagataacatccaagtctgattagaactgcccatcagtttttcttgtaaatttttagaagacctcacagaactttacagtttatttttctcggccaacacattaaaaccattcttggatttcaa

SEQ ID NO: 484114 - DNA, 341 bp, Homo sapiens
ggtatatgaaggtgaacgactcttggtgactaggggagcttcttatgtttgcgaggttagaatgggagacccgccgctttggtggtggagatggtgatgctctatcgtctaggagagtttaggaggtgaagccgttcttctctttggaggtggagaaggagagtatctcctctgtattggaggagagtatcttctaggagaaggtgagcgccgacgtgggggaggagaaggagtccttcgtcgtttttttggtgtgggagtcctgcgccgtcgagaagagaggggcgggagaaggagaccgtcgccttctggctgggtggtgaggatggacttctcctccg

SEQ ID NO: 484115 - DNA, 1268 bp, Homo sapiens
ctgctagcactaatgtatgggttcagtacgtatggcacacagaatggggagtgtgtttgcctacagtgtctctctggatcctctttgtttatattgaagcagccattagatttaaagatctcaaaaactttcatgtagacctttgtcgtccatttgctgctcactctggaacaagacattaaaaagttaaaggctgacctgcaagccagcagacaagtggaacaagagctccgcagtcagatcagctccctttcgagcaccgagcgagggatccgctcagaaatgggccagcttcggcaggagaacgagctgctgcagaacaagttacataatgctgtgcaaatgaagcaaaaagacaagcagaatatcagccagttggagaaaaagctaaaagctgagcaggaagcccgaagttttgtagagaaacagttaatggaagagaaaaagaggaagaagttagaagaagccactgctgcccgggctgttgcgtttgctgctgcatctaggggagaatgcaccgaaaccttacggaatcggatcagagaactagaagcagagggcaagaagctcacgatggacatgaaggtgaaagaagaccaaatcagagaactagaactaaaagtccaggagcttcggaaatataaggaaaatgagaaggacactgaggtgttaatgtcagccctctcagccatgcaagacaaaacacagcacctggagaacagcttaagtgcagagacgagaatcaagctggacctgttctccgcactgggcgatgcaaagcggcagctcgagattgcccaaggacaaatccttcagaaagatcaggaaatcaaggacctaaaacagaagatagccgaagtcatggccgtcatgcccagcataacatacagtgccgccaccagccccctgagccctgtttccccccactactcttccaaatttgtggagaccagcccctctggacttgaccccaatgcctctgtttaccagcccctgaagaaatgaaggccagctgtgtgttgtgcccaaaaatttggttaccggaaggcattgcaaaggagcgtctctggcagtcaagataaaaaaacagtttctattgtattttgtggaactgtatctgttgtcatttttaaaaaggggggaaaagataacatccaagtctgattagaactgcccatcagtttttcttgtaaatttttagaagacctcacagaactttacagtttatttttctcggccaacacattaaaaccattcttggatttcaa

SEQ ID NO: 484116 - DNA, 377 bp, Homo sapiens
ggtccttcatcatggcagccctcaggaatggatacaggcccttccctgcctgcctggtggagcagcctccaaggggagcctttgctagcaggaaaaggcattgcatggagctcagacccgcctcagaggaacttttttcagcctcctctttccgcccacccggccaaaatacaagcaagggaacgtgtggcattcgggcttccatgagctgaagacaaagcctacatggggaaaagtgcaaaacccggagaatgggagaaaaatggagccccgccctgatgctgttgtgaaacatttcaatcaaactgcccctgaaggccgccctatccctgcatttttcatttacatgagccaataaactttttccttttagtcca

SEQ ID NO: 484117 - DNA, 2029 bp, Homo sapiens
  misc_feature (458)..(458): n is a, c, g, or t
  misc_feature (1993)..(1993): n is a, c, g, or t
ctgctagcactaatgtatgggttcagtacgtatggcacacagaatggggagtgtgtttgcctacagtgtctctctggatcctctttgtttatattgaagcagccattagatttaaagatctcaaaaactttcatgtagacctttgtcgtccatttgctgctcactgtattgggtaccctgtggtaactttggggtttggcttcaaaagttacgtaagctacaaaatgcggttaaggaagcaaaaagaagtacaaaaagagaacgagttttacatgcaacttcttcaacaagctctccctccagagcaacagatgctacagaagcaagaaaaagaggccgaggaagcagccaaaggattacctgatatggattcttcgatccttatacaccacaatggaggtatcccagccaacaaaaaactctccacaactttgccagagatagaataccgagaaaangggaaagaaaaggacaaggatgccaaaaaacacaaccttggaataaataacaacaatattctacaacctgtagactctaaaatacaagagattgagtatatggaaaaccatatcaatagtaaaagattaaataatgatcttgtgggaagtacagaaaatctcttgaaagaggactcatgcactgcttcctcaaaaaattacaaaaatgccagtggagttgtgaactcttcacctcgaagtcatagcgccacaaatgggagcattccttcctcatctagtaaaaatgagaagaagcagaaatgcactagcaagagcccaagtacacacaaggacttaatggaaaactgtattcctaataaccagctaagcaaaccagacgcactggtcaggctggaacaagacattaaaaagttaaaggctgacctgcaagccagcagacaagtggaacaagagctccgcagtcagatcagctccctttcgagcaccgagcgagggatccgctcagaaatgggccagcttcggcaggagaacgagctgctgcagaacaagttacataatgctgtgcaaatgaagcaaaaagacaagcagaatatcagccagttggagaaaaagctaaaagctgagcaggaagcccgaagttttgtagagaaacagttaatggaagagaaaaagaggaagaagttagaagaagccactgctgcccgggctgttgcgtttgctgctgcatctaggggagaatgcaccgaaaccttacggaatcggatcagagaactagaagcagagggcaagaagctcacgatggacatgaaggtgaaagaagaccaaatcagagaactagaactaaaagtccaggagcttcggaaatataaggaaaatgagaaggacactgaggtgttaatgtcagccctctcagccatgcaagacaaaacacagcacctggagaacagcttaagtgcagagacgagaatcaagctggacctgttctccgcactgggcgatgcaaagcggcagctcgagattgcccaaggacaaatccttcagaaagatcaggaaatcaaggacctaaaacagaagatagccgaagtcatggccgtcatgcccagcataacatacagtgccgccaccagccccctgagccctgtttccccccactactcttccaaatttgtggagaccagcccctctggacttgaccccaatgcctctgtttaccagcccctgaagaaatgaaggccagctgtgtgttgtgcccaaaaatttggttaccggaaggcattgcaaaggagcgtctctggcagtcaagataaaaaaacagtttctattgtattttgtggaactgtatctgttgtcatttttaaaaaggggggaaaagataacatccaagtctgattagaactgcccatcagtttttcttgtaaatttttagaagacctcacagaactttacagtttatttttctcggccaacacattaaaaccattcttggatttcaagtagccaactttgccttttatgtattcttacatagtttcctnttgaagaaaaaaaaagcagagtttttgtttttcaaa

SEQ ID NO: 484118 - DNA, 491 bp, Homo sapiens
  misc_feature (412)..(412): n is a, c, g, or t
gcacgagtaccagtcctttacaaactctttggaaaagtaggagggcatacttaactcattctataaggccagtattatgctgataccaaaactagacaaagacatgacaagaaaggaaaattacaggccattatcatgaatatagaaacaagaatcttcaaccaaatgctagccagttgaatccagcaacaacgtataaaaaggattatacaggccgggagtggtggctcacacctgtaatcccagcactttcggaggccgaggcgggtggatcacgaagtcaggagatggagaccagcctggccaacatggtgaaaccccatctctactagagatgcaaaaattggctgggtgtggtggcatgcgcctatggtcccagctgctcgggaggctgaggcaggggaagtgctanaacccaggaggcggtgttggcagtgagccgagatcacgccactgcactccagcctgggtgacagagagagactgtctca

SEQ ID NO: 484119 - DNA, 2014 bp, Homo sapiens
  misc_feature (458)..(458): n is a, c, g, or t
  misc_feature (1317)..(1317): n is a, c, g, or t
ctgctagcactaatgtatgggttcagtacgtatggcacacagaatggggagtgtgtttgcctacagtgtctctctggatcctctttgtttatattgaagcagccattagatttaaagatctcaaaaactttcatgtagacctttgtcgtccatttgctgctcactgtattgggtaccctgtggtaactttggggtttggcttcaaaagttacgtaagctacaaaatgcggttaaggaagcaaaaagaagtacaaaaagagaacgagttttacatgcaacttcttcaacaagctctccctccagagcaacagatgctacagaagcaagaaaaagaggccgaggaagcagccaaaggattacctgatatggattcttcgatccttatacaccacaatggaggtatcccagccaacaaaaaactctccacaactttgccagagatagaataccgagaaaangggaaagaaaaggacaaggatgccaaaaaacacaaccttggaataaataacaacaatattctacaacctgtagactctaaaatacaagagattgagtatatggaaaaccatatcaatagtaaaagattaaataatgatcttgtgggaagtacagaaaatctcttgaaagaggactcatgcactgcttcctcaaaaaattacaaaaatgccagtggagttgtgaactcttcacctcgaagtcatagcgccacaaatgggagcattccttcctcatctagtaaaaatgagaagaagcagaaatgcactagcaagagcccaagtacacacaaggacttaatggaaaactgtattcctaataaccagctaagcaaaccagacgcactggtcaggctggaacaagacattaaaaagttaaaggctgacctgcaagccagcagacaagtggaacaagagctccgcagtcagatcagctccctttcgagcaccgagcgagggatccgctcagaaatgggccagcttcggcaggagaacgagctgctgcagaacaagttacataatgctgtgcaaatgaagcaaaaagacaagcagaatatcagccagttggagaaaaagctaaaagctgagcaggaagcccgaagttttgtagagaaacagttaatggaagagaaaaagaggaagaagttagaagaagccactgctgcccgggctgttgcgtttgctgctgcatctaggggagaatgcaccgaaaccttacggaatcggatcagagaactagaagcagagggcaagaagctcacgatggacatgaaggtgaaagaagaccaaatcagagaactagaactaaaagtccaggctaatntatagacatcgatgccaaaactaccttgtagcattggctgttgatgatatggataggagcttcggaaatataaggaaaatgagaaggacactgaggtgttaatgtcagccctctcagccatgcaagacaaaacacagcacctggagaacagcttaagtgcagagacgagaatcaagctggacctgttctccgcactgggcgatgcaaagcggcagctcgagattgcccaaggacaaatccttcagaaagatcaggaaatcaaggacctaaaacagaagatagccgaagtcatggccgtcatgcccagcataacatacagtgccgccaccagccccctgagccctgtttccccccactactcttccaaatttgtggagaccagcccctctggacttgaccccaatgcctctgtttaccagcccctgaagaaatgaaggccagctgtgtgttgtgcccaaaaatttggttaccggaaggcattgcaaaggagcgtctctggcagtcaagataaaaaaacagtttctattgtattttgtggaactgtatctgttgtcatttttaaaaaggggggaaaagataacatccaagtctgattagaactgcccatcagtttttcttgtaaatttttagaagacctcacagaactttacagtttatttttctcggccaacacattaaaaccattcttggatttcaa

SEQ ID NO: 484120 - DNA, 2355 bp, Homo sapiens
  misc_feature (458)..(458): n is a, c, g, or t
ctgctagcactaatgtatgggttcagtacgtatggcacacagaatggggagtgtgtttgcctacagtgtctctctggatcctctttgtttatattgaagcagccattagatttaaagatctcaaaaactttcatgtagacctttgtcgtccatttgctgctcactgtattgggtaccctgtggtaactttggggtttggcttcaaaagttacgtaagctacaaaatgcggttaaggaagcaaaaagaagtacaaaaagagaacgagttttacatgcaacttcttcaacaagctctccctccagagcaacagatgctacagaagcaagaaaaagaggccgaggaagcagccaaaggattacctgatatggattcttcgatccttatacaccacaatggaggtatcccagccaacaaaaaactctccacaactttgccagagatagaataccgagaaaangggaaagaaaaggacaaggatgccaaaaaacacaaccttggaataaataacaacaatattctacaacctgtagactctaaaatacaagagattgagtatatggaaaaccatatcaatagtaaaagattaaataatgatcttgtgggaagtacagaaaatctcttgaaagaggactcatgcactgcttcctcaaaaaattacaaaaatgccagtggagttgtgaactcttcacctcgaagtcatagcgccacaaatgggagcattccttcctcatctagtaaaaatgagaagaagcagaaatgcactagcaagagcccaagtacacacaaggacttaatggaaaactgtattcctaataaccagctaagcaaaccagacgcactggtcaggctggaacaagacattaaaaagttaaaggctgacctgcaagccagcagacaagtggaacaagagctccgcagtcagatcagctccctttcgagcaccgagcgagggatccgctcagaaatgggccagcttcggcaggagaacgagctgctgcagaacaagttacataatgctgtgcaaatgaagcaaaaagacaagcagaatatcagccagttggagaaaaagctaaaagctgagcaggaagcccgaagttttgtagagaaacagttaatggaagagaaaaagaggaagaagttagaagaagccactgctgcccgggctgttgcgtttgctgctgcatctaggggagaatgcaccgaaaccttacggaatcggatcagagaactagaagcagagggcaagaagctcacgatggacatgaaggtgaaagaagaccaaatcagagaactagaactaaaagtcccagccctctcagccatgcaagacaaaacacagcacctggagaacagcttaagtgcagagacgagaatcaagctggacctgttctccgcactgggcgatgcaaagcggcagctcgagattgcccaaggacaaatccttcagaaagatcaggaaatcaaggacctaaaacagaagatagccgaagtcatggccgtcatgcccagcataacatacagtgccgccaccagccccctgagccctgtttccccccactactcttccaaatttgtggagaccagcccctctggacttgaccccaatgcctctgtttaccagcccctgaagaaatgaaggccagctgtgtgttgtgcccaaaaatttggttaccggaaggcattgcaaaggagcgtctctggcagtcaagataaaaaaacagtttctattgtattttgtggaactgtatctgttgtcatttttaaaaaggggggaaaagataacatccaagtctgattagaactgcccatcagtttttcttgtaaatttttagaagacctcacagaactttacagtttatttttctcggccaacacattaaaaccattcttggatttcaagaaaaaaaaaaaaaaactctatctattatcaccactatctaataaatacccactcctatcaaacagaacctctaattatcctcgggggatttacacaaaaaaactatatggcgatatgtgcaaatcgccataagggggcttataaaattcgggcggggttacaacaggggttggtaaaccctgggcacactaatatagggtggaaacaacccctttcgcggggggaatataagaaagctcccatgtgtctttcaaaaatggccccttagtgggaggaatatgcgggatatttttgaaatatcgcaaattgtgtaaaaacttttttcaacaagggggaggtgcaacctttataaaatactaccgtaggggggcgttctctttacacaggcctcttggggctctcccaggggaacctctttgggggccctgtgaccccacactttggggtggagtac

SEQ ID NO: 484121 - DNA, 375 bp, Homo sapiens
gggacatacacacccatgggaaatgagatgaaaaaaagcagtaatatgaggaagtagatagagtatttagaaaaagaaatacacagggccaagcacagtggctcacgtctgtaatccccagcactttgagaggcccaaggtgaggggattgcttgggctcaggagtttgaggccagcctaggcaatgtagtgagaccccacctctacaaaagattaaaaacttagttgggcttggtagtatgtacctgtagtttaagaaacttgggaggctgagctgaggcaggaggattgtttgagcccgggtggtcagggctgcagtgggccatgattgtgccagagtactccagcctgggtgatagagtgagactctgtctc

SEQ ID NO: 484122 - DNA, 401 bp, Homo sapiens
  misc_feature (219)..(219): n is a, c, g, or t
tgctcctgctggcactttgcttttgtggccttggcatttagggcacaggctggacacaggaatgggggggcctccaaagggtctttccgtcctcatgctcctcagtgtccacacttcaaggccaaggatagttttttcctttgacatgggggccataacaggtgatcccttatacctggcaaagaatgggggcctctccctttttaggtcctcaatccngcctgacttttggtccttttggcagggacctgggtggggaacgttttggtgctgatggtgctgggacctatatgtatatttatataaatttggggttttgtttaccccctcccctggtcaaagcctgagtgggtgctgggtgctgtgttttgtctgtaaataaactcctttcatgcctttta

SEQ ID NO: 484123 - DNA, 361 bp, Homo sapiens
  misc_feature (135)..(135): n is a, c, g, or t
  misc_feature (360)..(361): n is a, c, g, or t
attaaattccaagccaattttccttgttccgagttccaaaaacgggtccataaagccagccagagataaccttgccaaccatccaacaatgccatttggcccccggaactgcctaatgaacatacagtgcagtgncttgttcaagaagttttgcaaaggagaagaggaagatgaggagtgtagtgaccagccattagaagttgacaacaaccaagtgggagcaatcatcaaagctcatccttttacaactacacgagaaggtgccgaagagctcaccattgaccattctatggtcatttggcatttgaagcaaactggaaaggtgaaaaagctcgataagtggatgcctcatgagctgann

SEQ ID NO: 484124 - DNA, 938 bp, Homo sapiens
tatcttgtgggtgtgagagagtaggagcgtgtggacgagagagcgggagaaagggtctaccggtgtctgccgcggaggggttcgtgttttagagcgcccgctggtgttgggccctttgagttgctatcgctgggaccttgtagtgtccagaactgtcccatggcaggggttcggatctttccttgggctgcagccctctgagaagggttttaccagccccagggtcccgtccagtggttcagcatcggagacagcccgattagggtcacacgctagattcgccgggagtgccactggggcttgaaggattctacattctctggccgaagattccggatccccgcagagttaccgagaatcgaccttgaccggtctggtaccctgaattcctatgcaatgcggaaggccttagaagaagccggtttccagatgccctgtccactccccccagtcatcgttgctcggtttgcacgatgacccgctcatcactcgattttgataagtttgttcggtgtttggttcggctggaaacgctattccagatatttaagcacgctggatcccgagaatactgggacacatagagctcgacccttatgctgctcttgttttcccacccaccctattctccagtcccaaatgcacgcctggctccctctttctcatgagctttgacttgagtgtagctcacaggttaaaactaaggagtggctgcacggatcactgcttagtaaaatgaactcctgattagccaaagcaccagggagaacctgtttatataaaggaaatccttcagctgtaaattccagattgggttttgggaagatccctcattcttagaatggatctaccttcaaatactttaacccaattaattttctctactccctcccccttttaaattaaacccatactagtaaacaaaaattaaaaaaaaa

SEQ ID NO: 484125 - DNA, 157 bp, Homo sapiens
actctgaggatcccccacattactagtacgccatacatgtgaaccactatcacgaaaaaaactctacctctctatctaatctccctacaatctccttattatacattcacagctacatacctgtcatattttatatcttcttcgaaaccacacttat

SEQ ID NO: 484126 - DNA, 290 bp, Homo sapiens
cctatctgcaccacaggtctgcccgtgtcacggcgcgtgccggctctcagcgtgcctttgctcctcttctgactcctgccaggcaccctaagtgctcagttttgctactcaccccttcggcctggctgagctctgctgctggcctggcgactactggttcatctgaactgcttcctcttgccctgtctactgctgtctgccaggtctgtgctgccttgggatggaataaacattctcaggcctgtttgttctgcctgtcttctatctttgtggacctggtttgcattcgg

SEQ ID NO: 484127 - DNA, 792 bp, Homo sapiens
agacagcactgctggagtgaaggagtagctcgaggtgaagctggatgggggatccagtggagcaggagttgacggacagtccgttcacatcgctgtgtttccttgtaaacatttttctttctgcagagaggaagatatgtttgtgctcgcggtttatataaagacactggtttttatttaagtgtattttaaagaatctagtcatttacccttgtgtggagtatacagattgccatcttgctctttaggcaagaactataggaaccaattaagcaaagcaaccacaagaaagggagaagaggtgcctgtgggagattttgcacgacctattgtgggtataggtattttcgttcctgggggaagaaattcagtctaccctgtctcagctgtactttagttgggcctgtcatcttgatgaccagaatgaaagcttgctctgcctcctgccagccagaattggtggcgggacttggggatacgagcgtgaaggtggggaagttgcacagcagaaaacagaattgaagttgggaaactctagagtctgggcaaaatgttaggttaggtctcttagcaagaaattaacatcccattaccgacaagaaaaggtgaaggtggcacctttattggaatagttggagatgatgataatcctaattatttaagagtatatatataaacggcatatatatagcggagttctaaagattggcgactccggggtgttgtgactgtacttaggaccttgtcgttctcctgcatccaggtggcctgcttcaatctcctaattaaagg

SEQ ID NO: 484128 - DNA, 597 bp, Homo sapiens
tgcgagaaccctcactatgattagtacagtataggaaaactggcacaatgatccaatcacctcccaccaggtccctccctccacatgtggggattacaattagggatgagatttgggtggggacacagagccaaaccatataattccaccccgatgcctcctaaatctcatatccttttcacatttcaaaaccaatcatgactcctcaacagtcccccaaagtcttaactcattccagcattaactcaaaagaccacagtctaaagtcttttctgagacaaagtcccttccacctatgagcttgtaaaataaaaaacaagttagttacttccaagatacaatggtggtacaggcattgggtaaacgttcctgttccaaacgggtgaaatggggcgaaacaaaatggccacaggccctatgcaagtctgaaactcagccaagcaatcattaagtcttaaagctccaaaatctcctttgacttcatgtctcacatcacattcagagcatgctgatgcaaggggtgtgctcccacagaccttggcagctgcattcccgaggctatgcagggtacagccctcgcagctgcttcatgcgctg

SEQ ID NO: 484129 - DNA, 466 bp, Homo sapiens
gggacccatgtttgaaggcagtgagaacaaagtcataatgttgagaatctctgggacacagctaaagcagtgtttagagaaaaatttatagcactaaatgcccacaggaggaagcgggaaagatctaaaattgacaccctaacattacaattacaggacctagagaagtaagagcaaacaacttcgaaagcgggaaatatctaaaattgacacctaacgttacaattacaagacctagagaagtaagagcaaacaacttcaaaagctagcagatgacaaaaaataactaagatcagagcagaactgtgaaggagatagagacatcaaaaacccttcaaaaaatcaatgaatccaggagctggttttttggaaagattaacaaaatagactgctatccagactaataaagaagaaaagagagaagaatcaaatagacacaataaaaaaatgataaaggtgatatcac

SEQ ID NO: 484130 - DNA, 1394 bp, Homo sapiens
  misc_feature (911)..(911): n is a, c, g, or t
tctttaaaaaaccccccattttagggggtccaaattttttcacaactggaaattagtggtccccaaagatctggtgtcttaatgtgtgtccacaatctataccaaaatgtatgattacaaaatctccccaggcaggcacaggcaggggacaagggcccaccgttctcccaacgtctctgggtggtgcgtcggtgtgtcctctgccgaacccccgagttcacccacgcggtgcccacctgtgtgtgctcccccttcaacaccctgtgggggttgagaggaggcgccatgtgccccccaagcgagagggaacaaatataacaaaacagatatttttaaaacagagtaagagagctcttacacgagggcgagagagctgtgttcccatatacacatattgaggacagagtgtgtgtcatacacttttgtgtgcgtgggggtactcaactctatcccactctcactctaactattctccacagaaagtgtgttcacagcgtgtgtgagagtcctcccccaaaaagagtgtgtctctttctacactcctcctcacgccataaaaaaagaagagacaccccccgtttttgtctcacacacctttttttattagcagaacacatttatgagcgcccccccccaagaatattatcatcccgcccgaagagaagaagaagctgtggcttttcttctcggagaaaagaaccttcttataacaacagagacgtgcggcgtggggggtcttcctacgcacacgcacacggagtgtggctggcgtgacgagcgacccgcgggggggagagacacaccccctctccgggggggggggcccccccgaaggggtgtgttcctcccccgggctcccactcctcccggggggtgtcatcaacttctacttatacagcgcttgtggtggnccaagagacgaccgctgattttgtgtcctcccccccggtggttggtgtggaccccccccccgcagaaaggaggatgttcgttgttgggctcggcgtcccccctcaacgtcgctgttgttgttgaacgacgacggtgccggacggggtgttggtgcgtcttctctctcttgagggcggccacccccctcctttgttgtggcggcctccccttggatgggggggcactgttgttgttactcacacccctccttcttctggttggagaagaaggcggccggccggtgttcccccccgttgttggtgggcccccccccggcgtggggccaccactatttatggtggttcttccacttgttctgctaccacgaaacccccccgtcgttgggtgttgtgtcttccccccacccccgccgagcgatccgctgttggtgtcttgtttggtgtatgcgccataaccccccgctgtgtggtggccccgcgtct

SEQ ID NO: 484131 - DNA, 332 bp, Homo sapiens
cttttggtgtctttgctgatgagggtttcgccacgttggccaggctggtctcaaactcctgacctcaggtgatccacctgcctcggcttcccaagtagctgagattacaggcatgagccactgcgcctggctaactttttttttttttttttgaaaaaaaagttttcttttgcccccaagcttggagggggggggagaaattttgtttaattgaaacctcggcttccagggttggggggattttccggctttaccctccaaagaagcgggaataaaggggccccaccaccacacccggttatggttggttttttaagcaaaaacccaaaagg

SEQ ID NO: 484132 - DNA, 693 bp, Homo sapiens
  misc_feature (161)..(161): n is a, c, g, or t
  misc_feature (291)..(292): n is a, c, g, or t
  misc_feature (571)..(571): n is a, c, g, or t
cgcaaacggggggcggttggggacggccaacaccacccaggacatgtaccttgccatcaactgataacacctgatgcccggtgttcattaagactgccgaaaacagagtctcagagactgcacaaaattctcgatctatgatcactgtgcagaatgggctnggcttaacggagcctgcatgcacatgttcattaccaggatcacgaccgaaggggatgacttgacacgcaataagggcacaatctgtgccgtccatatactgcgacacatatgagagaacaacttcatgcnntgatctgccattacgatcagtatgctctaccgactactgagtgcctgaatcggcaccatcgtcgatgacggcaaacctcatgatggcatgactcataatgtagtcaaactctgtgagctctttgatcggcatagcagatacactaaactcatgtcaatgcctcaagagatcaagggagcgccggcagaacatagttgctacatgcataatagaatataacgtcctgtgcaagagactacttatgcttgcaactgaaacttatttgcttccctgcctagnattgcggaaggtgacttatgacttaagagctaacactatctttccgtgggcaggcaccatcccatttagctctagagatactcgtaggggccggccccaacccaattatgccttctggtctt

SEQ ID NO: 484133 - DNA, 231 bp, Homo sapiens
gaataggaacagctccggtctacagctcccagcgtgagcaccgcagaagacgggtgatttctgcatttccatctgcagaggcagaatgtctttgcccaaatctttccttcactcttcactgaagtcttctccaactatttcctgtaaatcctcttcggaggctcaaggagaaggttgtaaccatccgtaggtggttaaaaagcctggcctcagggtctccacctctcctat

SEQ ID NO: 484134 - DNA, 329 bp, Homo sapiens
ccatatctctttcatatattttttttttttaagagggagttttactctgtcgccaaggctagactccaggggctcaatccgggctcactgcaaattccacctcccggcttcaagcgattttaaggcctcagcctcttgagtggctggttttccgggctcacaccaccaagcccgctatttttttttttttaatgagaacaaggcttaccccatttgggccagaagggccccttcccccggccctgggaaactgccccctttggcttcccagggggcggggatttcggggttggacccccaattcgggccccaagttaacttttttaaca

SEQ ID NO: 484135 - DNA, 167 bp, Homo sapiens
agcggggcgtcagctccgcagcccgcgcccagcacatccccctttcgcaacgcgtgcgccgcccggagcaaagtgcggcttaactttgaggctggccttgacgcgctgtcccttgccaataaatgcagatcatcaggaggaacgcaggaggaaggagacagttaaac

SEQ ID NO: 484136 - DNA, 714 bp, Homo sapiens
  misc_feature (120)..(120): n is a, c, g, or t
tgagcccaccacgtctattataaaggagaaaattttgctatgcaactctttgggggacgaacaaacctcctgataacacaagagtagggagagagaaggtggtttccccccccctccggngtgcactttatcccaccgcgctgttattttttggtcggagggcgacgacaatttaatgggttctcccccccattggccccggcacacttgttggcgagaagtcctatggattgtttaattgctgtggacccccgctgtggcgcgccccccctttggaaaaggtttttgtccgtgtgagaagtagcgcgaccctgctgtattggtacgcccaccccagggagatatagagagggttagaagagagtgtctctctcggtataaaacagagaagagggcgccccttacaagagggtctcccctgagacacattgctaattaatcttgtgcgagatacacgcgagatgataggcgcgttaatacattctctcgaaacccactgtctgtacaggtctatatattcaggccccttcatctaaaacgggcgccaatcaatgcgtgccgcagaccggtttgcaaaaaaagaggtaggtggggcgacttccatcaccagcggccaaaaacgctgctcaccgcggagaaaaaaagcggcaccaccgccaaggcttgcacccaacagacaccaggagcacaggcggtccccgccctgtcgaagaa

SEQ ID NO: 484137 - DNA, 128 bp, Homo sapiens
gcttcgcacattgttttgcacagcgttcatcaggcagctgtttccttggcagggccagccgtggcaggcacagcccacagccatgtggtttgcgcacgcagctgcttgcgccacagcaggtgggcatc

SEQ ID NO: 484138 - DNA, 485 bp, Homo sapiens
  misc_feature (403)..(403): n is a, c, g, or t
tgtgatctggctcagctattcacaccgagtgtgacacctgttcctcctcctctcggtgtagaatagctgagccaggactcagagtgaccgagtgtgacgccctgtcctcctcctctcggtgtgaatagctgagccaggactcagagtgaccgagtgtgacgccctgtcctcctcctctcggtgtgaatagctgagccaggactcagagtgaccgagtgtgacgccctgtcctcctcctctcggtgtgaatagctgagccaggactcagagtgcccgagtgtgataccgtttctgtcttcctcctctcagtgccatggcttggggtggatactgcttcacactccttcagggtggcccagacacagtaggtttcatttacctttttttttttcttttctctggnggctgctgctgttgctcttcaacatgtggttcctcctggcccacttgcatcttctcttcctccttagcattctgatctgttt

SEQ ID NO: 484139 - DNA, 190 bp, Homo sapiens
gccttaataggttccaccgcgttgcggccgccgttgctgggtctcctaggatcggcagtcgagtccagtgactcccaccgcacccccagtaagtcacacggccggccggcgaccgcgggccaggcgagggggtctggcgagggcccctggagaacggtggcatttcctcgcagggcggtggaaacgctct

SEQ ID NO: 484140 - DNA, 121 bp, Homo sapiens
gggcatactgcaccagacttcagataggctctcaaatggttggcaagagtgatgctgatgtgaaggtatggaacatttatggtgtattggcaacagggcaggcacggtcataaatacttaa

SEQ ID NO: 484141 - DNA, 934 bp, Homo sapiens
gtactctcgatgttgaatgggagccagctgattaggagagttaatgagagctacaatagacttgttttaaaagaataggacaaggcaaacactaactcgacaagtattcaacaagaatgtccttagataaccttagaatatatcactttatacagcattgtattttaagatacaaaaattggagatagttctcaagcatctttccagtcctgcttgtgaatcttagcccaagataggttcaataatggattttaagtcctcctaggcgttggagtgcaacttaacaaaccagcccaatccaggacttggtatcagctagagaagaaaactagggaaagctgctggttttataaccattaatggtctgctacttttaactttgatttttcgatggattgtttaagaagtaatttcaagtgtagtgagacaatttaggcaaatcataacatattttgatcagagactgtgcacaaagggcactttataggtagcttcattctccacaggttctatacataagatcatgaggtgttacgagaatatggtccaggaatccgcacagtgtggaatttacgatcacctaaagcaatatgactttaagaaaatctgttacctcccatcatcttcctttcccattctgttaacattggtggtgatcagatcacatgagtgccttgatagatactttctatcatagagctgcttggtagaatctcctagtcgggtaccagaaatacttatggccctaaggaattgctttggcaatttcgacacccaatacctttgagcttcatcgccaagaggacctcaacgaacttcaggcttactcgcgctgccacggcaacaacttgcccaagctaacctaaccctgtgccgacgacgccaagacactcggagcacaccttcgaaccacagcccgccccactttctcctg

SEQ ID NO: 484142 - DNA, 518 bp, Homo sapiens
  misc_feature (102)..(102): n is a, c, g, or t
cgttatctgattgtgtctacaatggtgctggttccctatgcccctcccctcttcaactgtggtctacattgcatgtgtgaggaggggagattcagtgtggtngggggacttgagtgtggctagtgactccccatgcagtgaggtgtctctctcttcctcttgtgctcttgcttgtggctggttgtgtccagtggtcttactccttggagggcatgtgggccatgaggtccagcaccctgttgctgtagccgaaattcgttgtcatagcaggaaatgagcttgaacaaagtggtcgtttgagggcaattgcagccccagcatcaaaggtggaggagtgggttgtcgtgttgaggtcgagaggagagcacctggtgctcagtgtagcccgggatgcccttgcggtggccctccgatgcctgcttcagccaccttcttgatgccatcatatcgtggcaggttaggctaagacggcaggtcaggtccaccactgacaccgtcgggatgtggggcacggaagg

SEQ ID NO: 484143 - DNA, 249 bp, Homo sapiens
ccctcctgtagtcgctttgcctattaatgttcctttgggtctgtgaggttctgtaaactgtgctagggctgacaatgttttggacaacttaactccctggcgaaaaaacagggtggggcccttcagcccctccaacaaaattttttaaattgccagttgcaaaattgtggagggtttttacattgatcttttgctaaagcaattagcattatgttttgcatgtatgacttaataaatccctgaatcata

SEQ ID NO: 484144 - DNA, 344 bp, Homo sapiens
agactggctggtgagccctcaacactccccgtagtacttatttcccctcacagtaattgtcaccatttgacacatatattttattgcaggaaaagatggacactaaaatatatgtgtcaaggccgggcgtggtggctcatgcctgtaaccctagcactttgggaggccgaggtcaggagttcgagaccagcctgggtaacatggcgaaaccccgtctctactaacaatacaaaaattagccagaaatagcttgaacctgggaggctaaggttgcagtgagccgagattgtgccactgtactccatcctgggcaacagagcaagacactgtctcaaaaagtaaca

SEQ ID NO: 484145 - DNA, 408 bp, Homo sapiens
gtacgaggccatgcaggagaggcgggaggctgagaacatggctcagagggtcaggctgctggaggcatgggggaggctcatctccactgggacccccacagctgcttctaacacaggattttgtggctgcttcaggctgtcgcttttttttggtatctcctaatcgcaaaagagcatccagcaacaaccaggattccaagcgccgtggccacaccgacttcaaccttggacttttccacctgtttacaggcgggacttgccatatctcagctgggtgacaaagtgctcacagttcctgctcacaatactgtacttcatcttctgaccaaccatctccttcgcagaactgatgatcacctccacgggccgtggttggtactcatggtccaagctgttgttgacccgata

SEQ ID NO: 484146 - DNA, 554 bp, Homo sapiens
  misc_feature (306)..(306): n is a, c, g, or t
  misc_feature (435)..(436): n is a, c, g, or t
cggctatccacggcgcttggagcaccaagcccagcctcttaggaaactgaggtccaagggacaaaaagaatctgcagtctcttgccggcctgtgtccccgtggccagagtccagcaccctcttcctcgaagcaaccagaagtggaaatgaaagtgctccgttaactgtagactacatgccaccgaagggtcattcctgacagtggcttctccccattatctctttattgccggaggcttcatctcgcccccctgaagctacagtccaccctgaggtcataaacttctgctcagcacccatggcaantaatgcagaggtcaccatcagaggattataactgcagatgggaaaccgggatgagaggggagttctttaaaatcctgtcttgttttcctgcaaataatgcctcttacataaaatctgcgaagaaagatnnatgcagcaaagagacttgccttagaatctcagactagattgctttttccatatagactccacttagtgatttttgttctttattttttttttaaacaaaaacctatttctgaaaatac

SEQ ID NO: 484147 - DNA, 1006 bp, Homo sapiens
  misc_feature (567)..(567): n is a, c, g, or t
gcccaaagaggccatgtccgtggagccagtgcggagctcaccgtgctggctgctcaagcgccatgcttgcctaaccggctgcagagtgagtgccggaatgatcagtgcccccagagccctggctgccccagtggacttccagcttgctgactcagcaggtgatccaggtgctgcctatgacatctgccaatggctgccaagcagctgtgtcaccatcaccacccggagagaagaaggcagtgaccgtctctcccacatacgccgtcacctgcatccctaggacctcactggccataggagctgggccactactcagagcattaagtctcccagccccgaacaagagccatcttggcaccaaagttgcccttacgttgcttgccaacatgttcccctggacaagccatggttgcaccatggggattgccacgaaacactcgttgtctgaagcacacacttaaacggaattgtggcgcagagttcgcgcgagaggtggccagagcaagttgacagtgtaggcctcgcaaacagattgatacccattgaccacgccgttcgccaaccgtnccctcgataagtaaagtacggccagttcctgtcccgcacggccgaatctcacgtaaaggtaggccccacaacagcggtgctacccctgggcacaaaaggggtcactacaaagagttttccaaccaagggagccccaggtcgagccacgacgccttaagagaggagcatcgccccatttcgagtgcaacagcagtcaggggcgcagcccatatatacgagttcacgacgaagtaaccataactagtcacgctaggcattggtaggtgagcggaggctatgtcctgacaatcacgcacggaagttagcggattttggctgatttcgcacacaaagcaccacccgcgcgacatgtaggactgcccaccagagagaatcttaagagggcacccgacattaaccttggaccacacgaacacttagacagttacaggagccagtg

SEQ ID NO: 484148 - DNA, 130 bp, Homo sapiens
aagggggcgttttccggggggggattttaaattatgttgaaacaaggcccccccaaaaaaaatgtgtatactcataataggtcaaaaagtgtatccgctacaataaagttatgattaaaaataaaaaaaa

SEQ ID NO: 484149 - DNA, 304 bp, Homo sapiens
gacattgaaagcgccaccatcgcgcaacggcttccgcttccgcgtgccttacggcacgctcctgtgcgtgtccgacaaaccgctgcacggcgagatcaagctgcccggcatggccaaccacttctaccgcgagcgggtggaccagcacctgcgcatcggcatccgcgccgtggagatcctgcgccagcagcgcatggaccggctgcacagtcgcaagctgcgcagcttcgcggaagtggcgttccagtagtcagtcgggcgtgaccttggcgcggcggatcacctcgccccacttcctcgtctc

SEQ ID NO: 484150 - DNA, 589 bp, Homo sapiens
gttctgtgcttggtttattttacttaacataatgacctccaattccatccatgttgctgccaatgacaggatttcattcattcttatggctgaataatacattttctttagcctttcatctattgatgggcacttaggttgattccatgttttggctatcgtgaatactgctgcaataaacatgggagtgcaggtatctttttgatacattgatttctttccttttggagatatatatatacccagtagtggaactgctggagcatagttctgtttttagttttttgaggaacctctgtagtcttccacagtggctgtaccaatttacattcccaacagtgtaccaggcagggctctcctttttccacatccttactagcattcattctttcttcttgataaaagtaatgaattggggggagatgttatctcattgattttgatttccaattttctgattagggatgttgaacattttttgatggtatctgtccggccatttggggattttcttttgaaaactaccctattaagaacttttgggccttttttaagttgggaacggccctttttgctaattggttgggca

SEQ ID NO: 484151 - DNA, 411 bp, Homo sapiens
tccaagattgcggaccagccattgtcatcaccatggagccgtctttgttgaggggtccacctcccatcagagtgaggagatgaggcactgatctgttcattagcaatccggccagactccatgcccagaggaacattgcactgaaagttctctagtggctcttggtggaccaggtagtaacgcgcagagaagccatccttggccaccgccatgtccgtgtgaaaggtcagggagaggatccccgtcgatgaacgaagttcagagggtgttttggtcccacagtacttgccaatcagggggccaacatgtggaatgccatcccagatgtccagccaatcgtacttgcagtccccctctcccacctgcaaagggtcatgctccaggtcaaagatcaggaactgcaggatgatc

SEQ ID NO: 484152 - DNA, 870 bp, Homo sapiens
tggatggcggcccgaacaatttggccgcgggagggaggtaacacctgggagaggtgccccgcgccgagcccggtgtccccaataagttgtcgctcgaagatcacaaagggcccacgtcagggaggacgcaacccggggaacaatagaaccggcgaccaggattcgccaaaacgcgcggggtcatcaccccctccgagcgtcaacttttgggcgacaacaaaatcccggtgcgtgacgacgtcgtgaaaacacgcatgggccatggcgggccacccccgtgggcgaggccgccgtctttctcgtagggcgctcatggcaagactctctggggcaatatagtgcgttcatgtctgacccactataatgaaggcgaagggcgctcacacacacactactagaaatcagtcggcagcgacacacagctgggccacagcccagtacacaatacggggaaacccccccgcgcgtctcacaaattctaggagtttctttgaaagcaacaaggtattttatatggcccacctccctccccccgtcatgagcatccgtggaagacccaggaaataaccgcacgccactcctgttcttgttacccaacaaagctgtccatcgctggtatatgatcctaaaggtgtctctccccggcgggttgaggtacactctgaagatctttcacacaatctctacttaagcataacgtggagaagggagtatgagaccccgatgtgctcgagtcatcctacgtggtgtctcgccctccacgtctgttaaggagaagccccgacgtggctggccaaggtatggtccgacccccgcggtgcaacaaagcagatcaaatcccctctcccgtggggaaaccgccccacaaac

SEQ ID NO: 484153 - DNA, 125 bp, Homo sapiens
  misc_feature (2)..(2): n is a, c, g, or t
  misc_feature (122)..(122): n is a, c, g, or t
tngctgtgttactttattatattcctagtgtcactgacactagtttaaaaacagcctgcacaagaagcacagaactactccctcttcatctccatattttcatacatttcttgtggtttcanaat

SEQ ID NO: 484154 - DNA, 198 bp, Homo sapiens
acccatgagctggaagcccctccccacttcgagttgtcctgcctttgctttgagttgccctgcctctccagaccaagccaatgttcattttttacatatgctgattgacgtctcatgtcttctaaaatgcataagatcaaactgtgccctgaccaccttggccacttctcaggaccttcctgagggctgtatcacggg

SEQ ID NO: 484155 - DNA, 702 bp, Homo sapiens
ggctacacagtgaaccggagtctctactaaaactacaaaaaatagagccgggtatggtggcgggcacctgtagtcccagctactcgggaggctaaggcaggagaatggcgcgaacccgggagacggagcctgcagtgagctgagatcacaccactgcactccagcctggacaacaagagtgaaactgtctcaaaaaaaaaaaaagaaacagaaaaagtcaatttacccacgcttaaccactagtttcactaaatgtctgtttggctatccctaattatagaatattccctgcacttagtatatctgtcccatagtaacaaagatgtctaacacatttgattatacccaaccagcaccctatgactctatgttaagtatacctacatttaataatttccaaggccttcttaacaaggtgtccttacacaaactgtatgacatgacagttcatgccaagataacttggagtcgccttttttacttggggttggttccccttactcttataagggtatgggaatcagttcctttatcaaaaggggtggtaatgtcccagaagcctgccgaaccgtcagcaagcatactctaaggtttggacagatctccaaatgacgtgtccaaaagctctctgtcttgcattcccagaagttcagtctctaatttgcccaaaatatcaggggacctctaaatcaccgcagctga

SEQ ID NO: 484156 - DNA, 409 bp, Homo sapiens
  misc_feature (80)..(80): n is a, c, g, or t
cccggtgtttatcgattgccacagaaaggatgccctctctcacaactcctattcaacacagtataggaagttctggccanggagatcaggcaagagaaagaaataaaggtattcaaataggaagagaggaagtcaaatagtctctgtttgcagatgtcatgattgtacatttagaaaaccccatcgtttcagccccgaatccccttaagctgataagcaacttcagcaaagtctcaggatacaagatcaatgtgcaaaaatcacaagcattcctatacaccaataatagacaaacaaagagccaaaccatgagtgaattcccattcacaattgcaactaagagaataaaatacctaggaatacaactgacaagagatgtgaaggtggcatcgataaacaccgggtaccg

SEQ ID NO: 484157 - DNA, 317 bp, Homo sapiens
cgtgagtacaagtgaaactccatctcaaaaaaaaaaagaaaaaagaaaaacattttctttttccccttttgcagataagaaactgaggctcaaagaggtttagagacttactgaacccatttcagctagttagacttaatcagattttaacccaggttctgtttgacaaaggctaattttctgcctctgggtttccttcgctttggtctggagggcagcccccaaagggcggggattgaccatgatctcttcccaaaggtgtgggctctcccagcaggtacgaggttcgtcccgacccaccatccctaccttccatg

SEQ ID NO: 484158 - DNA, 314 bp, Homo sapiens
  misc_feature (191)..(191): n is a, c, g, or t
tacagagtgaatggttgaagaaatagttaaataaagtacagactccaagctcagcttgtactggctctaagctggggctcacagaggccactgctacatcagctccaggctgcagggccaccacctggccatactggcttcctccctgacgcagcacagctgtgcctgggacacagagtcgctctcaagtnactgggcagctagccaagctgcactccccactctcctcacttgatctctgtgacaatgtctatcgaggctctgggccgtggtatgccagcgatctggcctcatgcaccacggtgcctcgccct

SEQ ID NO: 484159 - DNA, 127 bp, Homo sapiens
cccccccctgggtttcccaaaagggggggttaaaaccccttttgcccccaattggttttttggccaattttattttggggggggggaaaaatttttttttaaaaccgggggttttttcccggtccca

SEQ ID NO: 484160 - DNA, 336 bp, Homo sapiens
ggatggacagggtctggtgaggggcatagtgggttgtgcctatagtcctagctactcagaaggcaggaggattgcttgtgcccaggagtttgaaaccagcctgggcaacacagtgagactcgcatcccctctaccaacaacacaaacaaaaaaaaacaaaatgaaatccccacaaaaacttatcaggtttggtggtgcccacctgtggtcccagctacttgggaggctgaggcaggagtaccgtttgggtccaggggttcaaggctacagtgacctgtgagctgtgatggcgccactgcattccagcctgggcaacagagtgagactctgcctctg

SEQ ID NO: 484161 - DNA, 134 bp, Homo sapiens
aatagttggaacgacggttgttgagcggttatcgacggacttacttactacctgacttaatgaactacgtacgtacggtactttaccacgacactctggttgactgacacggggtctgacatgtactgtactca

SEQ ID NO: 484162 - DNA, 1033 bp, Homo sapiens
  misc_feature (179)..(179): n is a, c, g, or t
  misc_feature (873)..(873): n is a, c, g, or t
taagacaacagaattcttaataaatttgaatagcgacgtattcccggtggtagtcattttaaggctcgaccacatcatcaggtcttggccaccgaggcatagtgtaaaaacagtcccggtcagtgggccaacctccctgcagccaagtaggtacatcctgtgtccctgtacattctcantagaagtggcccgtggttttccccgaggggtgacatcgatagccaaagtgtttatacgtggtttctcatgtgccctttatagtggccttggacagatttccccttcccaccagtttgaaaagtgtattggaggctcactcgggggcccctcgagactctcggagagagcagtgtgaacttgtgagggcccagagggaaccctcgagagaacgcttttcctttccccaacccccccgagagggtcatcttctcccgagaccgtggtgtgtgtccccggatttcccaattattaggcttttgggccagagaaacgcattgcgaaataagacttttgcttcgagaagccccaggcaactctccgtggggctcctcggggagctcaggaggaagcggagaccggggggacacacaactttccttgtgatcagtgtaaccaggcggtgtgtttgtgtatccccccgactctctgtgggcgatgttggggcaaacaaagagcccccgatacgaggaaagtcccttgacaagtgggaaaagtttccaacgttggccatgtgtttgtctgtgcacccccctatttggggaatgagaccctgatggcccaacaggtggtttatttaaaatagagcccatataccccctattagaggcatcccctgggggcccaaaaattcccagagggaaccctccttctggnaagcggaacttttggcccggaaactaaaaatcgggggcgcccacccaacgaaaggtctgggacagagtctctgggtgaagacacctttggacaaccaaacaccaaaaaagaacagaaaaacggggcttcaaaacgccctttaaagagaacccagggagaa

SEQ ID NO: 484163 - DNA, 833 bp, Homo sapiens
  misc_feature (572)..(572): n is a, c, g, or t
  misc_feature (597)..(597): n is a, c, g, or t
  misc_feature (631)..(631): n is a, c, g, or t
  misc_feature (683)..(683): n is a, c, g, or t
gagggtgagagcgcgcgcttgcggacgcggggattaaacggttgcaggcgtagcagagtggtcgttgtcttctaggtctcagccggtcgtcgcgagttcgcccgctcgctctgaggctcctgaagccgaaaccagctagactttcctccttcccgcctgccttgtagcggcgttgttgccactccgccaccatgttcgaggcgcgcctggtccagggctccatcctcaagaaggtgtgggaggcacctcaaggacctcatcaacgaggcctgctgggatataagctccagcggtgtaaaccttgcagagcatggactcgtcccacgtctcttgtggtgcagctcaccctgcgggtctgagggcttcgaacctaccggtggaccgaaacctgccatgggtgtgaacctcaccagtatggtccaaaatactaaaatgcgccggcaatgacagatatcattacactaagggcgaaagataacgcggatacctgtgggggcaagtatttgaagcaccaaaccaggagaaaggttccagactatgcaatgacgttgactggattagatgttggaccnactttggaattccagaacaggagtncaggtgtgtagtaaagatggctctggtgaattgnccgttatatgccgaaatctccagccacttttggagatggctgtcgtatattncctcggtgcacacgcggcgcgcgactctccgggcacgtggaactctcgactgcgaccttactggtccccgacattttgtgctcaaacgggaacggtccataagatgaggaccgtacacaattgctcgggccgcacttttgaagcccactt

SEQ ID NO: 484164 - DNA, 930 bp, Homo sapiens
gagctctgggagaggagcccagacactgggattccgaggtgtctctccatatcactgatctgcactgagacatcagatggactcgccatggaattctgggctgaggactggagttgttgcctcgtctgcatcttctctaaacagtgtgtccagtgctgaaaatgcaactatgtgcacgtctgggaggaggcttggtccatgccttggtggtggtcccctgatgacttcatccatgatgctagccctctgaactccccgcgtcgaggtaaccgacgttatattaatgactggggtccggctcaggcaccaggggaaaggggctgcaagtgagatcgctacgtttgttgaaaacggtggccgaatatcggtagcatacgcatgactccgtgaaggggcccggtctcagcatctccacagacatttccaagaacacggtgtagtcgttcagatgaggcaggacttgagacctgatgacacggctgttgatgtgctgtgcgagagactcctagaaacctatggccagtgactactacggtctcgacgctctgggtgccaggggaccacggtcatcgtctcctcagcatccccgaccatgccccaaggtctgtcccgctgagcctcgaggactgctcttaggtcagaagcgagctcacgtgccacttgacggcctgggagatgcctctggtgccaacttcacctggacgccctcagtggggaagaccgctgtccacgcccgcctgaagcgtgacctctggtggtgtacagcgtggtccctgtcctgcctggtgtgccggctgagcctgtggggactctcctgcctgtgcccccgattggaaaccccttcgccctcaaatcgagtcggcggggcactggccggcgggggctacacgggatccgcgttcccattgtcctgggcccaattcccccggc

SEQ ID NO: 484165 - DNA, 154 bp, Homo sapiens
aggttgtactctcggagtggccgcctccaataaagcaatgtagcttggagccttggaggtctgaatctcaaatttgccctgtttcacgaatgaaggaattgtggcctcaggaaccacgagcgcatggtgtagcaccagtacaacctgccggtgg

SEQ ID NO: 484166 - DNA, 135 bp, Homo sapiens
tctgatgaagagtgcttgatagagagtgggcctaagtggcgctctagctgatgcctgttctactgcccagaaggctgggggatacatttgcaaatgtaatggtggccgcggtgccatccgagaatttgcagagca

SEQ ID NO: 484167 - DNA, 293 bp, Homo sapiens
tgagtgtagatattgtgtaagaaacaaacaggaggggtggcaggccagtggtcatgctgtaatccagcatatagggaggccgagacaggtggataacctgaggtcaggagtacgagaccagtctggtcgacatggtgaaactctgtctctactacaaaatgcaaaattagccaggcctggtggcacatgcctgtgatcccagttactcgggaggctgaggtaggagaatcgcttgaacttgggatgtggaggttataggtgggctgagattgtgctgttgtactccagccagg

SEQ ID NO: 484168 - DNA, 355 bp, Homo sapiens
gacgatgagtctcgacaccatgacagagttcatgctcggcgcgatcgagccacacaaagcatgatactcaaagtaatagagagctcgacacgaagacccagacgcctagctcttcacgcagacgacgagaggaggcatccaagaatagtctctccaggtgccggatgactgcagcaggcatacgaccagaaacctgcccagagcattttatccgccgcccgactctgaagcagatgacgcccacggctgtcactcaagtgcactgaaaaagcgcgatgaagctgcccagctcccaggtgagcctcgcgtttatcgcacacgccaatctgtacatcctgtgcgtcgactaacacta

SEQ ID NO: 484169 - DNA, 201 bp, Homo sapiens
cctagcacaacccctgcttctatacccagcacaacctctgccccaacaaccagcacaacctctgctcccacaacgagcacaacttctgcccctacaaccagcacaacctccactccacagaccaccacatcctctgcccctacaagcagcacaacctcggctcctaccaccagcacaactctctgcccctacaaccaggtg

SEQ ID NO: 484170 - DNA, 181 bp, Homo sapiens
  misc_feature (93)..(93): n is a, c, g, or t
aggatccctggctcatgtgatctcaagctgtgggacgaggtctgaggcacagaagcagattcaccacccaccaagtgcagagacaccgtgcanaacccatcaagagagatgacatgatgcctgcaagcatcatgagagacgaaagcccgactgtcatcagcctggcaggctgtccctcaaa

SEQ ID NO: 484171 - DNA, 218 bp, Homo sapiens
cgcacagccatgtggtttgtctccccattctcaacatttacaatttaatggtgaagtaattccagcttaatctgagataacaggatgccctaaatttttctatttctctaaagctcagttctttctgatatcgtccattttatgccatgctaccagtatatactaatagtttatatagcctattgaaaccttttctgttgacccatttgtgtgtgtgt

SEQ ID NO: 484172 - DNA, 294 bp, Homo sapiens
ctgctagaggatccccgaaccgggtcctttctccaactcaacaactattctataatttggataactccctggagcctcaaagacaccgggcgggagggtctggttctatccccttccaccctcagggggatgataatctcacagacacctccggagggtctggctcactctcctttccacccttcagctccaccctcgaggggatgataatctcaaagacacctcccagggggtgtctgctcactcccctttccacccgtcaggggagtgataatctgaagaaactaaggaggg

SEQ ID NO: 484173 - DNA, 159 bp, Homo sapiens
cttttaaaaaattttttctgtggtccaataaaaaagccgctggccaaaatgcctaaaatagtttgtgggttcataggggggattttttggttttttttcaaaatcaaagattgggttttgaaactaggggtttttaatcaaagttggctttataggggg

SEQ ID NO: 484174 - DNA, 163 bp, Homo sapiens
  misc_feature (6)..(6): n is a, c, g, or t
  misc_feature (13)..(13): n is a, c, g, or t
  misc_feature (53)..(53): n is a, c, g, or t
  misc_feature (114)..(114): n is a, c, g, or t
tagttncttcttngtaaatatcctattggtggggtaagatttactatatcttnagtttaaattctgctgtgtagactctggcagcagcctctatggtgacgaaacaagcttttntttttttttttttttttttttttccttaaaaccgggaaaatgggggttt

SEQ ID NO: 484175 - DNA, 1581 bp, Homo sapiens
  misc_feature (165)..(165): n is a, c, g, or t
  misc_feature (171)..(171): n is a, c, g, or t
  misc_feature (202)..(202): n is a, c, g, or t
  misc_feature (205)..(205): n is a, c, g, or t
  misc_feature (334)..(334): n is a, c, g, or t
  misc_feature (536)..(536): n is a, c, g, or t
  misc_feature (1166)..(1166): n is a, c, g, or t
  misc_feature (1316)..(1316): n is a, c, g, or t
  misc_feature (1581)..(1581): n is a, c, g, or t
gacaggatgtcggtgatccatgtatcgccttgaataggctcagaagagtgcgagtacatacgcgtagagagagcagtcattgagtcgagagcattcgatcggtctaatatagcgagcgatcagcatgcattgtcggcgcggcgacaaggtgctcgagccgagccntcagcntagcggccctagtcgtagagtgcctattcanaanactgtctgtgctggggccaatctgtatcataaccagaacaccaatatgtaagaaaaagttatcgcatgagacgtgtatgcgccttcgcgtcgaggactgggagtagaacgcgagcctacacctctccantacgctcagtggcgcctcgcgcgttacctctagcgtattcacagagcgtcgcacacacgactcgcaaggcccagttcgtatacctgggtggcggtgaatccagccgactgtaggagttaattcgtcctcgttcgctcgggaaaaatatccccgaagaccgcagggcacaagggtaccgtaatcgcgttggagcactcatgcntatatctggagtgggctcgctcataatgggggcacgcgagcccaagttatcgcaaaatctctgtaaccttccaattataaagaaaccaaatgtgaattataccagaagggcggaggaaccttgggtcttgtcggcatgtccgcccttgggaacttgttgcgtcgctcctagattccgcgttgggaaattgtcggtttcaggcgggtaagaccggtcgccgatttggcgttctgggggcaattgcacagccattttttgtcgcaaaatgggacttcttgttggggtgaaattctcgtcccccatggaggccacaacttggcggggggccagcaggacaaactcggcggggtatggacgaagacccagatttgaccgccccaagtttgtcccaatggggttgccgctttctttaagcacaccgaaacccttgggttggaggtggagtgtggcaagacaacaagacaacgggtcaaaaaatttgagcgtaccgaggggttgcgctaaaggaaaccatcaccacgcactgatggcaccgtcgtccccaagtccattggtgaagaacacccaaggaccgcttctaagctggaggagcgcgacaggtacacggcgacagcaatttacattgggacngcgcgcgacaaggacatagtggtattctaccgacggtgggcgaaaacaggattccgaagagacccaacccccttttgaaccaccattctaaaatgcagcaaagccaaaatatatgggagtggcctacatacccaaaagggcacccacagnaaagcgagcgaagctttaacgctctagttgttttctgtaggaggagccccaacaactaatattcctaacgggggtatcctggggacacatacggtggttcggcatcaacaatccgattcgggtcctaggggcatttggggccccaacattgtctcaggccttcaccaacataaatgggtgcgcctgtatcgagacgttgtcgcccaacattgggtgcactctggggggaacacaccttacaaaggcgcacggttcaacacgggcn

SEQ ID NO: 484176 - DNA, 331 bp, Homo sapiens
  misc_feature (73)..(73): n is a, c, g, or t
  misc_feature (199)..(199): n is a, c, g, or t
atctagaggatccggggtcttgcgaatagcgattcgccgattttacagagagctgatggtccatttgacaggntgctgattggtgcgtttacaatccctgagctagacacagagtgctgattgggtatttacaatcctctagctagacgtaaaagttctccaagtccccactagattaactagacacagagcagcgatnggtgcatttacaaaccttaagctagacacagggtgctgattggtgcatttacaaaccttgagctagacacagaggggatcggtgtatttacaatcctttagctagacataaaagttctgcaaggaacccagg

SEQ ID NO: 484177 - DNA, 383 bp, Homo sapiens
tactacaccggaggatcacaagatatgaaaatgtgtaatctagccctagatctgaagtacagaagtcaggatggatagagaggtagacatgccaagatgtaggttctgcttctctgagattgtctgtcagcttttcccacagtatcaccccacctttctccattatacaggatggatttagcacttccagacattataaccagatagcctattgctagagaacaaagcaccttctcttcctatatgtacctcttgggaacaagggaacctttccccaaagcccctcaacacacttaggctgacatctccttgaccagaactgtctcaaatttacatagcctcacatgaagcatctgggaccaccaggatagggtgtataggcc

SEQ ID NO: 484178 - DNA, 669 bp, Homo sapiens
  misc_feature (42)..(43): n is a, c, g, or t
  misc_feature (603)..(603): n is a, c, g, or t
  misc_feature (629)..(629): n is a, c, g, or t
  misc_feature (631)..(631): n is a, c, g, or t
  misc_feature (654)..(654): n is a, c, g, or t
  misc_feature (665)..(665): n is a, c, g, or t
tttggggccccagaagatttttcccgggcgcggacttttttnnccccccccaaagggccgctcaccaagtttttttataaaggggggggggccgcccaaaaaaatttttttaaaaaaaaaaaaaagggaaaaaaaagggtttgggggggggggaaaaaccccccccctgtgtgagagacccccccccccccctagagaaaaagagccccctttttaaaaaaaatgctccccaaaaaaaaaaaaaaaaagttttttttttttggggggagatcttctttttggaggggggccccccaaaaaaaaagggcccccccccccccttttttttttttgggggaaccccccccccttttgttttttctcttaaaaaaaaaaccccccctttaaaaataatttttccccggcgccccccccaaagggggggtaccccccccacagccgggcgcaaaaaggggggccccccctcccctggtcgggggggggggggtaatctcccccccccccccctttctctctttaaaaaaacaccctttgggggaagagaaaaacccaaaaattctttatatttagggccacgggtaaacttgttaagcccctttaccnctggagaaaagccccgccctatcagnantgtcaaaccttcatgtaaatagnccagaattcancaga

SEQ ID NO: 484179 - DNA, 154 bp, Homo sapiens
aacagactaagagagatgccacagtatttccgttactctagtttcactagccctgtgtaacctctcatctgccgaatccttggttatttccttactccaaggatgacatactattctatgtggacagatcctttacctgggactcattctcacc

SEQ ID NO: 484180 - DNA, 246 bp, Homo sapiens
atgctcccgtactctggacggttgtgtcgcctctggccgtggcaggcgatcctatgtgtctcgcggacctcccggtgacgctgcctgcctcccctgactgcaccatagtgcccgggacgtacggcgtccccacagctatggaccgcgcaggggctcgtgaacatgtttgtcaagattgactaatcatccatcgcacggtgtaccgacgctcgaacttcgattaatcatggctcactagctattttc

SEQ ID NO: 484181 - DNA, 294 bp, Homo sapiens
ggcttgatctcggctcactgcagcgtccgcctcctgggttcaagcggttctcccacctcagcctcccgagaagctggtactataggtgtgcaccaccacacacggctaatttttgcgtttttaatagagatggagtttcaccatgttgaccaggcgggtctcagaactgctgacttcaagtgatccgcccaccttggcctcccaaagtgctgggattccaggcatgagccacctcatccagccaagaaaatttgttctctaatagtaacagggcatatgtatatcttggtgatt

SEQ ID NO: 484182 - DNA, 144 bp, Homo sapiens
ggaaagtggtggaccttaaaaaatgaagtaggtataggtctttaattcggatctttttaggtctcaagactgctggctttcagactgtgtgtgtgtgtcctgtggttctgtttttctgaacaatatggatattaatatagtatc

SEQ ID NO: 484183 - DNA, 333 bp, Homo sapiens
tctaagggcctttaaaaaggacactggctgggtgtgcgtgcacgcctgtaatcccaacactttgggagccgaggcggcggatcacctgaggtcaggagttcgagaccagcctggccaacatggagaaaccccgtctctactgaaaatacaaaattagccagttgtggtgcacatgcctgtaattcctgctactggggaggctgagacagaagaatcacttgaaccagggaggcggaggttgcagtgagccaagatcgcatcattgcatttcagcctggacaacaagagcgaaactccatcaaataaataaacactaatagccagaaaaaaaaa

SEQ ID NO: 484184 - DNA, 313 bp, Homo sapiens
cctagttcttcactcttgtttatcacaggctggctgtgcagtggtgcaatgtgggcttactgcagccttgacctccaggacaagtgatctcccacctcagcctccggacatacgctgggactacagctcaacaagcgcccctcatgaaagtacgactcttggaaatgaaccttgttgggagtaaagctgaaccttcacctctcctttccatgattctactccattcatacggcctcagcactgacatgatgtgccttgcagccatcgtcgtggatcctctacgatgtctgacctgcagtgcctgccatgcttg

SEQ ID NO: 484185 - DNA, 518 bp, Homo sapiens
  misc_feature (24)..(24): n is a, c, g, or t
  misc_feature (93)..(93): n is a, c, g, or t
ctgggcccccaagggggtttgggntttttttggggaaaaaaaaggccctggggcgggcccttttcaaaaaattggggcgggcttttttttaangggcccccggtttttttttccttttccccacaccagggaaaatttttaagggggggggggggccaaatgggggggggggggcccccccctgggaaaactttcaagggtccccaaagggaaaaagggtgcccctttccgggggatccccttttttttaagcccaaggggggttcccccccctgggtttgggggggttttccccccccccccccaggggccccgtttttttttttggcccaaaaaaaaagggggcgggggccccccctgggtttggggttcaaccaacgtttttttaaaccccccccggggttgggttggcctaaaggggggttttttcgggggtccccacctttaaaaaaaaggtttttttttggggtgggggggtttttttaacccttttcctgccccttaaattttttaaggga

SEQ ID NO: 484186 - DNA, 150 bp, Homo sapiens
gatcgaagaatcacaaagaaatcgatagcctcatcatccgccaccatcatagccagcatcaccctccttaacctctacttctacctacgcctaatctactccagcctccaatcacacatactctcccgatatcataacaagcgtaaaaga

SEQ ID NO: 484187 - DNA, 252 bp, Homo sapiens
ggcacgagagcaaactgtgatgtgttttttcagatctatgagtgaaagcaattgtcgacactgttgtaaggttgtgtgctgcataactttatgaggtgctgattacacccatagtcattgtaggttgatttattaaaataattgacaggctgaggcaggagaatcgcttgagcccaggaggtggaggttgcagtgtactgagatccaccaccgcactccagcctgggcatctgagtgagactacatctcaaa

SEQ ID NO: 484188 - DNA, 185 bp, Homo sapiens
gagtgttgtgtggtcgcgtctcggaacccggtagcgcttcagcatggctgaccacctgaccttaagagcagattgcagattcaaagaagctttttcactatttgcaaagatggtgatggacctataaccaacaaaggattgggaacctgtaatgagagctcttgggacagaatcccaacagagca

SEQ ID NO: 484189 - DNA, 378 bp, Homo sapiens
gatacagggtgcaagcctttcattcatgccaaggggtttccatggagaacgagaggcttccaaaaatggcaaccagtgattttgacttttcctctccttggtctatttctctgtccccttcagcacactaaggcagaggctcacagagatcaagctcagtatctcaccagtagctgctacctccggtgcacaagctagcagagttggtgtccattcgacaaacacagagggtttctgtgttatgtatatcctacaccttaggcagccagtactaagacaaacacgatccggcccctcaaattacagagcggagacccaacccagatatatcagaacgataagcctacatgaaagacatacgaaggtgatctgactact

SEQ ID NO: 484190 - DNA, 1114 bp, Homo sapiens
  misc_feature (281)..(281): n is a, c, g, or t
taagcgctgacgcatgcgcatagctaaccgcacccggttcagactcgcctttcttggccagaggcgccggttggactcacggtcggggcatgatggtggtagggtacgggcgaccatcgcctgtgcgcgtcgtccgtcccatccttgttcccgtgacgtgcatcgtttgcgtggcgatgcacgatgtacatgccgttcagcttgtgccctccacctgagctggctcaccatcctagggcggcctgcgttggtatcgggtactctctacggtgattcatcgncgtcacatgtcgctgtcgaataaggtcgtggcagaattctttgctcatctctgggcgaaacgggacttccaaggccaacaggactctgtgccctgtaggacttacgtcctggtgcacgtaccatgatttggccatctcctctttgcaactccgttgggccttcacttccagccccgaacgtcttggtgatcaccacagctcttgacttatcagtccctgcgtcacactggggtttggggtcctggttagcttacatttcaaacgaacgaattcttcgcttcgcaacacacgtggtaacccatgggccagccaggctgtcacgaggtccgttcgacgagccgagtcccaaagggtccaccagggccacaggaggcaaaggaaagcagcacaagctggacccctgcaagtgtttcaacttcagagagggctttgaaaagtttccttctgtgggttacaacgcactatcactcagactcgacccacgcacgtctatagcacatatcaacacaaaacacgcgggcgtgcgcggccgcgcactcttctgagacaggtgtatccacccctctctcggatgcgcgcgcccccaacacggccatctacgccggtctcttaccccccggagccgcctatgctctgggctcaccactcacaagtcgggttggtacccctcccctcaatcttgcgtctaccacgcggcgcacatcgcattagactagctggcccacagcggaccttcatggaccctactaccgaccgactgtgtcaacaaagtgctcaccacttcatacactgtggtgtctaccacatcctgggctcctacctttgttgggaga

SEQ ID NO: 484191 - DNA, 891 bp, Homo sapiens
tggaaacttaaaaacccctcaaaaacggtttattatacaagtgagtttggattcacaaggggcttatcggtaggatttcggggtagcgagcgcgggccccggggcccccaaatcttttgggactcgcagctgacagagggtcacgctcacccagcggggtccgggtcatacttgggattggagggatggtctttggatctccttcttgggaagcctcatccaaatattcctgggtaataaggcccaccagggcttgggagatggtgactggacgggatacgcataaatctgggcgccactgtgaccaccacccttaacagggacagggatgtctacaccaagaaaatctgacctcttgccgaaaagcaagaatctgggctccaagcagtctggtacctggtagctgggcgcggatacaatacatctcccagggggccgccctgttacaccttgatggagaccattggccgcgtttggcagtggccgccacagttggtcgctgtctatctagtgcgtaccgaaaacctgcaccgacggcagcggcacccctgggacgggacagggccaccagagcggggacatagacaacctcacccgacgggtgtcacaggcggagagggaccgacgagtggaggagcaaaaccccagggatacgacacgcccgaagaaaggcgcgggagtaccccacaatagaaggtccgggaaagggaactaccagagggccttggggacacgggtgggacccccccgaagaggtcggcactcgaaagcaagcacccaatggccggcgcgaagggggcccaccgatagcgaaccccagggggggggcgcgcggctgtcgaaggcagcgcatcgagaagtacaaagctaaaaccagagaacgcagagcga

SEQ ID NO: 484192 - DNA, 314 bp, Homo sapiens
ccagcagtgtaggtcgactcagtgagaacggaaagacagtagctgggtcttagtttcttgatggggggtaattataggagggcatacaagtcgatataagatgtggaacagggaggtaaactagttgggataagaacttggaactgttccttgtggatccccatgtctggtcatcacgatgtggatgtacattacttaaaattattacatgctgcatcttgtcagccgggagactgtgcatacaacatgagaggtgatgacacactaataatgggaagcacaatgacgggctgatggcccctgaggctgtgtgt

SEQ ID NO: 484193 - DNA, 254 bp, Homo sapiens
cggggggggaaaccttttttttgggttttgggggggggggcccccccccccccggggggcccttttttttttttggggggggggtttttttttttaagggccccaaaatgggtaaaccctgggggggggggggtttttcccctttttttttttggggggtttcccctcccgggggggggggtttcttccttttttttggcccccctttgccccctgggttttggggggggtttggcttttttttttttccccca

SEQ ID NO: 484194 - DNA, 912 bp, Homo sapiens
gccccggcatgcttggtgccccctgggaccccagggtcctcagtgtgcaacctggagaggcctgggcctgtgggagaaaggggccctgttggccctcgagggttcccagtgcctcaaagtgctcaaagtggcagctttggaactggacgggccgacgaaggacatgccatgtgcccataaagggtgacatagtggccccctagggccatgaacgtggccccctggggtctccatgtggcccctcagtggcctcatgggaaaacctgggaacttggcagggacagacacgggttcaccagtgccatgcggtgggtgccatgtggtgcctacagggtgaaccatgtggatccagggtccccctgtgtctcccgtgtggcctccagtgtccaccatggaaggccaagaagcttctacttgacggacgggcttgtgcgcagaagccaactggtcacgacagtgaatggccggagtgggccgccaagagccaagattcgcaggccccccagcaaaagtccttcaccttacaatgacaagcttgtgagtccatctgaattccatattgaggcggggcattcccacaagggacttgagcccatgcaggccttctgaggcatccccgcaatagtgaacttgatgcccatagtgacaagcgaggcctccttccctcacgaccacgacaatggtcgcaaccatttgcaacagcacgagtgcaattgcacgacaacaattgcacagcattagcactgccacaattgcacgacattacaccattgcattgcaacacaataccacaggccataccatgcattgcacacaacatcattgcaacggcacactacattgcacaagattacaccgtgcacgacatacacagcgcaacacattgcagtgcaccaccatacacattgcaca

SEQ ID NO: 484195 - DNA, 102 bp, Homo sapiens
aagggtcggggcggcaggtgccggcggcggcccggcagctggggaccgcggagggggggggcacgggtcgccacgcggagggagggtgccggggcgaccgcg

SEQ ID NO: 484196 - DNA, 403 bp, Homo sapiens
ttctgcgtgtaagattggcactaatccagtttgtgaagactgcactagagtttcagtcacaggcttcattcttctggtcatcgctgcttcccgcgcttatagaattctgatcatcatcttctatatcagaagaagatgaggatgtaatgtcagcttgcttccttttagtgcttgttcttagggagtttctctttttctccttgacaatgactgccttctttttagatgaagttctttgcttcttctttttattatcttcagaactttcctcagcatcagatgatgatgagccactttgtatttccttagtatttctctttgaacttaaatttcttctttccctcaattctattctattcagtctcttatcagaagagttacaaccatcttctttcatggaata

SEQ ID NO: 484197 - DNA, 966 bp, Homo sapiens
  misc_feature (21)..(21): n is a, c, g, or t
  misc_feature (78)..(78): n is a, c, g, or t
  misc_feature (84)..(85): n is a, c, g, or t
  misc_feature (102)..(103): n is a, c, g, or t
  misc_feature (121)..(121): n is a, c, g, or t
  misc_feature (153)..(153): n is a, c, g, or t
  misc_feature (217)..(217): n is a, c, g, or t
  misc_feature (225)..(225): n is a, c, g, or t
  misc_feature (227)..(227): n is a, c, g, or t
  misc_feature (283)..(284): n is a, c, g, or t
  misc_feature (297)..(297): n is a, c, g, or t
  misc_feature (307)..(307): n is a, c, g, or t
  misc_feature (364)..(364): n is a, c, g, or t
  misc_feature (382)..(382): n is a, c, g, or t
  misc_feature (391)..(391): n is a, c, g, or t
  misc_feature (402)..(402): n is a, c, g, or t
  misc_feature (405)..(405): n is a, c, g, or t
  misc_feature (408)..(408): n is a, c, g, or t
  misc_feature (415)..(415): n is a, c, g, or t
  misc_feature (465)..(465): n is a, c, g, or t
  misc_feature (467)..(467): n is a, c, g, or t
  misc_feature (489)..(490): n is a, c, g, or t
  misc_feature (494)..(494): n is a, c, g, or t
  misc_feature (498)..(498): n is a, c, g, or t
  misc_feature (537)..(537): n is a, c, g, or t
  misc_feature (783)..(783): n is a, c, g, or t
  misc_feature (833)..(833): n is a, c, g, or t
  misc_feature (873)..(873): n is a, c, g, or t
  misc_feature (924)..(924): n is a, c, g, or t
cgaattccgggatggggaagnaatggggggaagggagcggcggggagaacaaaatcgccgccgccgcccttcagcgantggggnnggctggaggcgcgaatnnctaagcggctggaagaanttctggcagtaagtgagcaaggagagggtggngcgtacgaactcacgggaggaggtggatgagggggccagcaccctgacgcggctgccgattgangtacagcnanatattttgtcctttctttcacctcatgatctgtgtaagttgggaagtacaaataannattggaatgaaantgtaagagancaaattatgtggagataatttttgttgagggatcttccttcttggtcttctgttgantggaagtctcttccaganctagaaatnttaaaaaagcntanatntgaggtnactgatggggcattttttgactaaatggcagtatatagaatgtgctgtcnanaaaaaagaagagcttaaaaatnnagcngtcntatgtatggagctgtaacttcttttttacactccctgancattcagaatgaaccacgatttgctatgtttggaccaggtttggagagaattgaatacctctttggtgttgagcttgatgtcttcagaggaactttgcccaacagctggtttgcctcagaggcagattgatggtattggatcaggagtcaattttcagttgaacaaccaacataaattcaacattctaatcttatattcaactaccagaaaggaaagagatagagcaagggaagagcatacaagtncagttaacaagatgttcagtcgacacaatgaaggtgatgatcaacaaggnagccggtacagtgtgatttcacagattcaaaaagtgtgtnaagttgtagatgggttcatctatgttgcaaatgctgcagctcataaaagtncaggatacagaggctgaaactctgactgggtttttgaatggc

SEQ ID NO: 484198 - DNA, 260 bp, Homo sapiens
  misc_feature (119)..(119): n is a, c, g, or t
caggaacctattttcccaaatcaaatttccctggtaagttaaaaaaaacttcccttggaaaccccctgttgacatctggttgaaagaaatgtgggccagaggacacacctagagatgcntggaatcgggtgtccagaaaggacacaaaactgccctgtggcaatgacataatttttgccaactttggtttcatatctatcgccaaagtattatagagaggactcccggcgagactaccaaaacagctatgaccatgatta

SEQ ID NO: 484199 - DNA, 110 bp, Homo sapiens
tgcactattactgtcatttaccgaattgttatttccatcttgatttaatttttaacttaaacattaatcaagagaagattgcttaatttccatttatttttatatgtttt

SEQ ID NO: 484200 - DNA, 215 bp, Homo sapiens
ttatagagaccgtatcattataaagaaactgtaggctcattctactgtatccacactccctcacaatcttcagggacatacaataaatccactttcttctcctacaaatgatatatagcacatctggcaaggagtagtccctttactccttcttcttatctttttttctttatcttttacttttataattctatgggagaaggcggcacaagctg

SEQ ID NO: 484201 - DNA, 158 bp, Homo sapiens
  misc_feature (128)..(128): n is a, c, g, or t
attttggtttctaatacaatttttcaatcaaacggacaaggactccttggagaaatggttgattttacaactagggcagacataagccagttgaccatgattcattatatagtaccaaaaagtaaggnaggttttaattaattaattaaggagttaaa

SEQ ID NO: 484202 - DNA, 506 bp, Homo sapiens
cattggagcaccactcatggctctcagccttgcaagggcagccattaaagggtcggcgtcttgtgtaaaataactaatctgagaagcagacacccagtaggcgcgaggctactgcgtcccatagaagaggcttgtatgtatgagctctttgctccctccctcccactaacttaaaagaattgctctccatctcgtttggcaaagttccttcgcccttagtcttatttgggtgaccccctccaaggtatttctagtccatttgcatccaatctgacatctagacggagagcggtctcatatgctatggtggtaaacgtggactagtatttatgtgtagagaacagtggctgtatgtcaggaaaagtgtgccaaaacaaagagtacggccggccctggaaatgcatcagaaaaacccattcccccggtgcactcattctgagcttccttccttcatttctgtcattactgctgagaactggactgtgcccagatgacctttcccttcc

SEQ ID NO: 484203 - DNA, 175 bp, Homo sapiens
  misc_feature (149)..(149): n is a, c, g, or t
  misc_feature (164)..(164): n is a, c, g, or t
ctttttttgaagaaaaaaaaaaaaaaaccactttgagggcataggggatgtcagtttcctatggaaaagacccctttgacccgttatttttataatcaaaatttgaagggaaaaaaatgttttagttctttcccccctcgttgggttcnactagattaaaaggntgattttcaga

SEQ ID NO: 484204 - DNA, 183 bp, Homo sapiens
actgtgtctgtatctgtgtgtgtgtgtgcctgtgtgtgtctgcagtagtgtgcactagtgtgtagtctgtgccatagtatgtatgtgtgtatctagtgtgtgtggcgtgtctagtgtgtctagtgtgtgtgtcactgtctatgaatgagtagtactgtatatgtgtgcctagtgtgtgtgtct

SEQ ID NO: 484205 - DNA, 861 bp, Homo sapiens
  misc_feature (263)..(263): n is a, c, g, or t
  misc_feature (368)..(368): n is a, c, g, or t
gtaattacagtggaatgagtactggacaaggagtcaaaaaacttgatttcaggtcctagctctagcacttacagctgtgtgatcttgggcaagtcacttaacctctctttgcctcaatttcctcatcttgaaatgaggataataatacctgctgtacctacctcacagggctgttgtgaggattaaatgagatggcatgtgaaagcactttgaaaattgtaaaagcgctattgttaaatgttacgggttattaattagaaaanaattcttttaaccattattagtttctattacacatctcatcttttataccaagagaagagggaaagagtcgtgctgtgtagagcgtggtgtgaaaaatgttaatncttgtatataacattgtgtgtttgcataacatatcctcttcagtggttttactcttccaaatgtttcaacagactaattgaacatatgacaatgcctgttttgaactcttaaaggcttcactgagcacgctgcttggagttcacggaagttcacctgttcagaaataggctttggttagctgactagggtcagggcaaactttttctctctcaacatttcgaaacgctgtttcctgttttcattttacattattattcagaaatggtagctattctatacctatggtttaagtcaatatttctgaataaggttcaccatactgtaagcatctcaggtagattgcctttaaaggttattgggagggcattgagggaacacttcttatgcagaaaccctttcataaacaacagaaacttttactaaattaagaacacatcacagtatgacggaacaatcaatctaagaaccttgctcacattatactcccaatct

SEQ ID NO: 484206 - DNA, 208 bp, Homo sapiens
cacccggctttcgcagaacccagatgatgctcctgtctccccctaagtataacgcgttatgtagtcagagagtttgagatcttcctggccagcatggcaaaaccccgtctctactaaaaatacaaaaattagcccagcgtggtggcacatgcctgtaatcccagctacttgggaggctgaagcaggagaatcacttgaactcgggagg

SEQ ID NO: 484207 - DNA, 398 bp, Homo sapiens
  misc_feature (26)..(26): n is a, c, g, or t
accatagttttccatctaatggatanattcattatacataaagaaaaaaccctccaatgcattaaatgacttatttttaataaagaccttctgataaaattagacccttcttcatagataccattcttcagacaaaagccagaaaggctgtctcatactcagactacaaagctgcaaagaccgtgtaatgtgtagattagctcgcctctaatttacccagcaattattaggtctgaataataaggaaatgtgttccaaggcgtgcataattatatactctctaagtagaaccaaatgaaaccattttctgtgtttaaaaaaataaaaataaaacacgccgggcatggtggcctcacatctgtaatcacagctctttgagaggacaagacaggcgtatc

SEQ ID NO: 484208 - DNA, 128 bp, Homo sapiens
gggtacagatcaaggggtgcctgggagcactcgaatgactgggaagtctctgtccctctgctcttggtgtgtagtctatttcagcagtgtgtgtcgttcatgaatgggaggtagtcagggtgtggtgt

SEQ ID NO: 484209 - DNA, 663 bp, Homo sapiens
  misc_feature (97)..(97): n is a, c, g, or t
  misc_feature (188)..(188): n is a, c, g, or t
tcccagtttaaccaaggggatttaatttggtcccctaaaaggtaaattctaaaaaatagcaccccatggcaaaaagagtccttagtacataagaacncattttctcaatctcattctcctcttcatctcatctttcaacatgtgggtgatcacctctttcacagtgttcgcacattcgatctcggaanacacagacgtgattaaaatgtgcaaaccccgtgtgtgttgaagaggccacatgtgggcccataaattatgtggctctaccacacccgtgctataaccactctctccctgtgtgtgagaacgcacaaggggagacagcgcctttttctgtgtgcaatctctctccccacattttgtgtgatatagagaaaccttttatctacaaacacagattgttttatataataggcacaaatatatgttcaaagaggggctcctcctgttctcgcctgtggtctctcttctgcacaccttactatccctacaacatagagagacagagtggctcaccgagacatatttcacaccacaacagcctcttttttttatattttctcccccgcgcagaggcgtgttgtgacactcaagaagagtagtgtctctattcacacagacgacaatatttgtgacaaagaaagaccctatgcgggggttcta

SEQ ID NO: 484210 - DNA, 341 bp, Homo sapiens
ggagctgagataggcaaaggcggcggcagggtcgggggagcatgcggattcatcgcggtgtgactgcctttgatcttggcgaagttcaggatgcccagatcgcacacgatcagcgcgccgcccttgaagaccatcttcggcagcgaattcaggccacctttgcagatcgcgcgggcgctgtagctgacccgcttgccgccttccaggtactgggccagcaccgggtggtgcttgaggcgctggaattcatcgaacggcgacaggaaggtgttgctgtaggacaggtcgacgatcagcccgaccaccacctggttgttttccaggtgatgcgtccgtagcgg

SEQ ID NO: 484211 - DNA, 978 bp, Homo sapiens
tggctggtaccagctgttaattgatgatgactccaggcccctgctgaacgccttggtggtgggaggggcacaaagcgaaatggggcgtaagggaatgcttgaaggctgccccgtgatgtcggtcggagcttccaaactaggcgagggcagggtgaggcctcgggcacacagccggcgcccagtcacccggcccaaatggagggcggccggccctgcggcaggcacttgcccaggggggctcacactcacgcacactcgcaccgagactcaggggcgtctccacaattccaaccagtgcaaaatgacttagggcacaattaatttcagaagggaggggcggaaacagagtcgtggaggcttggaatctctcaggaaaaaacggcaaagacaggaaagctcagaacacaagagagacagacaggcttgacacacacgaccacacgagggacgtgtgtgtggcgagacggcgttcactccccgcgtggaggagcccagctctgggcatcgatgtgcgtggcgcggtgggctccacccgtccgccgcaggggtggttgcccctgtgaacgatgggagctcgccgagtgcgggggtggtgtcgcttgccgggcgccgcctgcttgtccccgatggtcgtcctcggatgatcggcgctgatgaggttcctggtcctctcgctccaccttcgagaagccggatcctgagctccggctagtgccgtggttctgtaaccgtgcccgcttacttccccttccccaagccaaacagggttctgcgcccggctccaaggcccccggcttgatcctgggtaggcccccatccctcccagttgcgggtccgggagcccggagggccgctattgggccccccgggggcaggcccacaccgcccggtctttcgccccccccactcaggtgtcggaggcggcgcccccgtgtcgcgcacagaccgtcgtgcggtgcccccgcacgggttcctccg

SEQ ID NO: 484212 - DNA, 400 bp, Homo sapiens
tttgccctccccagaatttttctttccttctttggaggaactttttaataaacagaatttgtcccttttttagattgggacaatactattctttgagtggttaccaaaaattacaacataaatccttgaattgccaacccctaatacaaattaccacttttacccctttttgaaaaaatctttaaacccatttccctacccccacccagacacagattttattgttgatttcattgttgccatttaaattaattttaaacatatttaaacccccccagggttggcctggtgtgggggttcatgcctgtaaccccagccctttggaaggccaaggcaggaagatcacttgaagccaggagttcaagaccagggtgggcaacaaatagaccctttttttcca

SEQ ID NO: 484213 - DNA, 386 bp, Homo sapiens
taccctagtccgactgcgccagtgatcaccttaatacttagacactctcctgaactgtgctcagatctctcccgtctcatgatttgtcccacaacactacctaaatgaaagatatatatagaagcatgaatgtgactgggcggggtggctcatgcctgtaaccctggcactttgggaggccgaggcgggtgggtcacctggggtcgggagttcgagaccagcctggccaacatggcaatatcccgtctctactaaaaatacaaaaattagccacatgtggtggcaggagcctatagtcccagctactcaggagcctgagacgggagaatcacttggacctggggagggtgcaggttgcagtgggccaggatcgcaccacctcactc

SEQ ID NO: 484214 - DNA, 112 bp, Homo sapiens
acaaggagcaggaggtgaactcccaggagtatgtcaccttcctgggggccttggatttgatctacaatgaagccctcaagggttgaaaataaatagcggcgttggatgcagt

SEQ ID NO: 484215 - DNA, 182 bp, Homo sapiens
tgtggatgactctacaggatccccaatgcagcggactcggcatcatatttatttgaaaaggtcaaaaggagtcatcttatcagacaagggaggggtgctaggctgaatgcagcgcctcaacagccagggaacatgtaggcctacacgagtcaggcacatgcgcggccaccacgtgtccacac

SEQ ID NO: 484216 - DNA, 382 bp, Homo sapiens
  misc_feature (30)..(30): n is a, c, g, or t
atgtaatagactcaaatggaatggacccanaatagaatgtactcgataggaatggactcgaatggaatttgttcgaaaagaatggaatcgaatggaatgacatagtatggaatggaatcaaatggaatggaatcgaatggaatttaatcaaatggaatggaatggaatgcaatggaatggaatagaatggaatgcaatggaatggagcagagtcgaattgagtggaatggaatatgatcaaatggaatggaattaaatggaatggactggaatcgaatggaattgaatggaatggacaagagcataatggaatcgaacaggacggaatggaatggaatggaatgtcgacgcggccgcgaatttagtagtagtaggcggccgc

SEQ ID NO: 484217 - DNA, 665 bp, Homo sapiens
cgtttccttgttagaagaactggtagcaagttcaatgctgtggttcttaagaggctttttatgagcaagattaacaaggctccactttctctctctaggcttgttaagtacatggagggcaaggatggaaggattgctgttttggtgggaactattacagatgatattagggtttatgaagtgcctacgatgaaggtttgtgctttgaggtttactgaaaccgccagggctcgtatcgagaaggccggtggcgagtgtatcacttttgatcagttggctttgagagctcctcttggacagaacacggttcttcttaggggtcctaagaatgctagagaggctgtcaagcactttggcaaggctcctggtgttcctcacagtcacaccaagccttatgtccgagctaatggcagaaaattcgaaagagccagaggtagacgtaacagccgtggttacagagtttaagcttgaattgcggatagaagagtttcagtgtttattgctcaagacttttgtcaatcaatgtgttaccatttggttttgtgtttcaaatatctttcttatatgttgggttagcaaacagaatgttagttatagcaagattgtcccgactactatttttgtcatcacttatggaggtaaattttgttgaagagattgttatc

SEQ ID NO: 484218 - DNA, 168 bp, Homo sapiens
gttcctcctttaaggaaccggaaactttaaaacggaaatcggtcccggccgttttaccggagcttttggtagctcaccagtagacaaacagagtttggaagaacgtttaaacgtggtgggcctcaccttggtgcccggccgggtttaagtgatcggaaacccagcagc

SEQ ID NO: 484219 - DNA, 386 bp, Homo sapiens
gggatgaagctggccaggattcctgcttctgaatttcttttctttgttttgagatggggtttgctcttgtccccaggctgagcgcagtggtgtgagctcgtgtcgttgcaacctccgcctccctggctcaagtgattctcctgcctcagcctcccaagtcgcgagattagagatgcccgtcaccatgcctggctaatttttgtatttttagtagcgatagggtttccccatgttggccaggctggtgttgaactgctgacctcgtgatctgcctgcctcgggctcccaaagtgcggggatgaccaggtgtgagccaacgtgcccggctctccttttcactttcttgatgccatcctttgaagcacagaggttataaatattgctga

SEQ ID NO: 484220 - DNA, 500 bp, Homo sapiens
cgggcatggacgaagaatgccgaggaagatagcggactcactgacggcaaagcggagccgtggcggacggtggtcccatgttcagcctccagagtgtaggtcaggatgatgtactcgccatgctagttgggtgttcccggcactctggttgtaacgacaagctacagctccacttgcacacaagaggtggacgtgcaaagtgcagggtacagaacagctggcctgggcatcaaggtcttgtgtacgatgttgcatcacgggccgggcccgcaggcgcacaatgtggtctgacaggatatcccactagaaggtctgggtaagacgttctcataccatatccatctgcccacgtgaggagacatagccaaaggtggccaacccagagcagtccccagcttctctccatggataaactgctgcggctgtctaaggagccccttagatctactgtgatacatgtacactttgcccaagccttctctctccactccgggtcacga

SEQ ID NO: 484221 - DNA, 665 bp, Homo sapiens
cttcgtattcatcaggagatacggatgtatctttacctctgatgacttcaggtgccacatatgccaaagtgccacagaaggttttcataaaagacccatttccttgtacttttgccagaccaaagtcggttatctttaccaatacaggatcgtcttgttcaataagaatattatcgggctttaggtcacgatggctgatgcccatagagtggatgtattttattgctgtgagtatctgcctggatatctccctcccagcatcttctccaaccgcaccatgagcagcaacaaaatccattaagtcaccaccagaaacgaactccatcaccatataataactctcagtatcttcataaaatcctttcaatcgtactatccttggatgattgagcttttgcaatacttctaactctcttgtcacaccatccatattgcctattactttgcgtttacttataatcttcaccgcgaatgttttcccagtagttctttcaatggctttctttactgtggcaaatgcaccctggcccaccacttcgtcaataatcgaaaaatccttaaaaataccagtcttgttggccaccattgatgatgcagtagatgatgtaagaccaggagaagctattttagaggtatttttcaggttagatcttatgcgatcaact

SEQ ID NO: 484222 - DNA, 303 bp, Homo sapiens
cgtcgacggttatgagaaccgtatgtggcagctagggaatactataacaaaatgccacaggctgaagcatctgaagtacctgaagcaagagaaatcttacaggtcttgaagctggaagtgcaagttaaaggcctctgagacctccttcctggctttgcagttggccatcctctctgtcaattgccatcaaatacctttaatataagaaaaatacagttgttactaacttggcagaaagatatgataaagaaaatcacagatgaagccagtcgacgcggccgcgaatttagtagtagtaggcgg

SEQ ID NO: 484223 - DNA, 381 bp, Homo sapiens
cggcacgaggtgtgacaaaggcactgttcctccaacaccagtcgtgggaaaggcatatgatatggtttggcactgtgtccccagccaaatctcataatgaattatgagcttcagtgtaggaggaggggcctggtgggaggtgactggatcatgggggtgaatttcccccttgttgttctcgtgctagtgagttctcatgagatctggttgtttaaaagtgtgtggcactgccccttcactctatctctttcctgccgccatgtgaatatgtacttgcttcccctttgccttccaccatgattgtaagtttcctgaggcctccccagccatgcctcctgtatagcctgcaaaactgagtcaattaaaccttgtttctttata

SEQ ID NO: 484224 - DNA, 677 bp, Homo sapiens
ccacagtacacctttatgacttggcgatgcgggctcttttttggttccatatgaactttaaagtagttttctccaattctgtgaagaaagtcattggtagcttgatggggatggcattgaatctataaattaccttgggcagtatggccattttcatgatattgattcttcctatccatgagcatggaaggcttttccatttgtttgtgtcctctcttatttccttgagcagtggtttgtagttctccttgaagaggttcttcaatcccttttaagttgtattcctaggtactttattttctttgtaacaattgtgaatgggagttcactcatgatttggctctctgtctgttatttgtgtataggaatgcttgtgattttgcacattgaagaagttgcttgccagcttaagaaaaacctcctgagacgacggtgctttctatatatacaatcatgcatatgacatttattcttggactttacctggacacagccactgcatagatattccggttagcggatgctgatcctcatatatacactatcaattgcacgtcgcccagaacattgtagagccttcttatgcttcacttttcttacgtgaccatgattacctactagcccgagccttatggctcccttcacacctgacttcgcatttgtcgggcccattactc

SEQ ID NO: 484225 - DNA, 422 bp, Homo sapiens
cacacacagtgtataatcttgaccctttattatggaacttaaaaatttcaatcataaaactcatcaacgtatcacaaaactgtcttatcaacttctccccaggtgccgctgtgtgagctattacatcaggtcctccgtggttcctggaccatttaataacggctatttaggcaaataaaacctctctaccactctgaaaatagtattttatcaaacattaggagtctataccattgtattctattctctccacaagctatttccagtgccattaactaagtgccaactaactcttgactgaaatactggtttattctaaactccttattttgtccccagtgctaatcctactcacgtagaagcagcaggaagcatctagaatatcctgctacctggttttctaggcaacaagctatgaacag

SEQ ID NO: 484226 - DNA, 659 bp, Homo sapiens
  misc_feature (77)..(77): n is a, c, g, or t
  misc_feature (85)..(85): n is a, c, g, or t
  misc_feature (126)..(126): n is a, c, g, or t
  misc_feature (181)..(181): n is a, c, g, or t
  misc_feature (201)..(201): n is a, c, g, or t
  misc_feature (236)..(236): n is a, c, g, or t
  misc_feature (652)..(652): n is a, c, g, or t
gtgctcttcgagtgtattgtgttattaaccctcatgccattcccatgacgcctgtgcataggaggaatctgggaccnagagaggngggacggtaggcaggtctgatgagcagctgtgggtggtccnggtgggagctaaggagcaggcagcctgaggccaggcccattcccaatcacatgtngtactgagccagccaccacnttagattttagagtctcctggagcacgtgaaaacnactgaaaaagggtaaccacacatcatttcacttgtgatgtagcttgcctgtctccacaccatgcccctgaagaatagtatatcacctacagccccttccccagtcaggaatggaagtgcatgacacatgtgctcctctaccccttccatgctcatggcagacatcattaatcaattatagcactctttctgtagagccagagacagcatcacactctttcccctcctgcattccagggccaccactaccaactgaaatcgtgttagtaccataatgaatgctatgtaccattctctaccctaaggcgattgcaaactgtaaaatgaattgttgctggatttctgaggcccctcctaggatttggggggtaaattcatttcttgttttcaggaacacagggggatagggggacaccntgtggca

SEQ ID NO: 484227 - DNA, 670 bp, Homo sapiens
ttaccaatctcacttctaggaatactagtatatcgctcacacctcatgtcctccctactatgcctagaaggaataatagctatcgctgttcattatagactactctcataaccctcaacacccactccctcttagccaatattgtgcctattgccatactaggtctttgccgcctgcgaagcatgcggtgggcctagccctactagtctcaattcttccaacacatagtggccttagactacgtacataacctaaacctactccaatgctaaaactaatcgtcccgaacaattatattactaccactgacatgactttccaaaaaacacataatttgaatcaacacaatcacccagcagacctaattattagcatcatccctctactgattttttaagccaaatgcaagcaagcaacctatttagctgttccccaatcttttcctccgaacccctaacaacccactgcctaatactatgctacgctgaactcctatcccctcacaatcattggcaagccatcgccactttatccagtgaaccacctatcactaaaaaagactctacctctctatactaatctccctacaaatctccttcatttatgacaattcacagccactagaactaatcatatttttctatcttcttcgaagaccacacttattccc

SEQ ID NO: 484228 - DNA, 951 bp, Homo sapiens
gcaacctctgcctccggggttcgagcgattcttgtgcctcagcctcctgagtagctgggatcataggcgcgcaacaccacgaccagcactttgggaggccgaggcgggcggatcacgaggtcaggagatcgagaccatcctggctaacacggtgaaaccccgtctctactaaaaatacaaaaaaattagccgggcgttgtagcgggcgcctgtagtcccagctactcgggaggctgaggcaggagaatggcgtgaacccgggaggcggagcttgcagtgagccgagatcgtgccactgcactccagcctgggcgacagagtgagactccgtctcaaaaaaaaaaaaaaaaaaaaagaaaaggggcctgggataatcgtcagggggatggtaagggaactatattagtatttagcatgtcaaaccctctcccatctcagttggtgggcacgggcttaaaaaaatacctttatggagatataatttccctatcattccaatcactagcatgggtgatggcctaatggtggtacatgtgggatactggggcctaaaggtccgggatcttctcccaggtagatgctactgcctttagaaaacaatggaaagcttttaacactataataggggccacatgttctgccctctcctatttttaccagagtcaggtcacggtacacaataagcgcaggaccgaaattccccagtaccgaagtgcccgggtgggtgacagggtcatgactgtaatccacccttgaaagcgacgagggacaatgttgagcccaggcttggcaccgctggccccttgggactattctacaaaaactttatcacaaggtccggcgctggacccgccgaccacttgcggcggggggcatgaagacgaggactgccagggacgccttccaacaatggggggccctccgcgcgaaccacgggggcagcccgagcac

SEQ ID NO: 484229 - DNA, 920 bp, Homo sapiens
ggatgaacgaggtgccatgggaccagacagaactccagccgttccaaaataacagcacagtagctgtatgggccactgggggcaggacagtgtcagctccttcctcaggagcacagctgtatggactccaggcgggtccgtcagtaagcttagtgctgtgagggctgtaggggaccccagtggtgagtactgtaggtgtccaaggtggtgatgtacgcttgctggtatgctattgtcactttttccacactacggagaaagttccttctggttttcagctgatcttggctgggggatggggttgtggagacccaggtgttccattctctgcttggctatcctgagtttctatgctcaccagagttcttggttattactttgacgatattctggtgctttcctttagttatttgcgttaaagactgtattgctgatttgatttgggctctgtggggggtggggagaacaagcatgtacggatcgtgtaatctgcttcttgctgtaagtcactctcttgttaccagatatttggttggaaaacattttcattgtgtattctgttaaataactaggagtaggaatggtggtccatatgatatgtgtatatttagcggtataggaatggcaggtgtttgcacagatggctggtccagtttggatttctccaccaagtatttgtgggagctcccgtccttaatctttttggacccctggtttggttacactttgcgtcttcacttcaccgctgtgtgcgggctcccggtggcccacttctgctggaagtcacggttggccctcccgcttccgggactcctcgtcttccccctttttcgacagacgcccgtcgccgcggagggaaaaccacccccgtgatctgcccccaggtccccccattttgttggtgcgcgttgtcccgttct

SEQ ID NO: 484230 - DNA, 509 bp, Homo sapiens
  misc_feature (11)..(11): n is a, c, g, or t
  misc_feature (24)..(24): n is a, c, g, or t
  misc_feature (81)..(81): n is a, c, g, or t
  misc_feature (209)..(209): n is a, c, g, or t
  misc_feature (212)..(212): n is a, c, g, or t
  misc_feature (286)..(286): n is a, c, g, or t
  misc_feature (507)..(507): n is a, c, g, or t
aagaagctggnaagaaaaccctanaatctttcccccagtgaccagagacctagaaacacatttcaggaagacactttaaanagtgaaaagttttgcaaggatgaaaaagagttacagagatggatgatggtgatggtcaacacagcatcatggacgtgtttaaatacccactgaactgtaccccttgaaaaatggttaaagatgagtcntcntctgctaccccaggctggagtgcagtggtgtgatctcggctcactgcaacctccacctcccagattccagtgantcttctgcctcagccttccaagttacctgggattacaggcgcctgccaccatgcccagctaatgtttgtatttttagtagagacgggtttcaccatgttatccaggctggtctcgaactcctgacctcaggtgatccacccgcctctgcctcctaaagtgctgggattacagcatgagccactgcgcccggctgctttatgaatattaaaactgctaaaanaa

SEQ ID NO: 484231 - DNA, 342 bp, Homo sapiens
ttccaatttgtggctcttgtcattttaaaattaaatttgggtttgccatttattatttttttctagaaattctcgagtctgagaatatgagaatagagttggcctaggttcatacattgttttgttctcaccagataattacacaactttttcttcctattccaaagtaaccagtgttggggagtggaaattactgtggttaattttaacaccataatttggtggaaaaaaatttgggttttgggagccaagtttaaaaactaagcttttggcacttattgcctttaggactatttctataaccctaattaaaaacttttgaactctttaattttagatttt

SEQ ID NO: 484232 - DNA, 232 bp, Homo sapiens
cccacaatgacagcatgtctcaggcttttcaatgctgtgagagactagcatcaggagcccgggcacttgtcgctggacgcagtgctgagatttgttccctccttttccacctaagcgtcttcctcctacacatcacagtagcgaccactcactcctataaccacaactgctagtgcagccaggccagcgacaaatgccccaccaatggtggaatggtgtgactggttaaaat

SEQ ID NO: 484233 - DNA, 950 bp, Homo sapiens
ggcgggtgaaggtgtgtgtcagcttttgcgtcactcgagccctgtggcgctgcttgctaaagagccgagcacgcgggtctgtcatcatgtcagcgttacggcgcggtacggaggagaaaccaaggtgtatgttcggtcaacctgggacacttggctgctgcgcacaaggagcagtccagaaatgggcttctcagcttattcatggtcctcttaagacactgtactggattgcagagcaaatcctccaggactttgcctattgtgcgaattcgcaagactcctagcagatgcagacagatgcagctacgaggcactgcgatggacactggtgactaatgtaggctcccgacgtgagggttgaactatctgacaggcatgcctcaggacatcaacgtattgatagaccaactgcccgacgtcccttagatccaaatgatagatgctactgagtgctggcgaaaacgggccactcatgcttttcatgacttgtcatcgttacagccggcgaacaagacacgcaggtcccggactacaatcacaatctcgatcccaacggcaaggcgaacctcctacgatcacgcacacagggagctcgggcgaccgacgggcccaggacagcatcctcctccgacgacccccgacccaaccaccagcgtcagctcagcatcagccacactcacaagcacccagggctggcgtcctctacgaaggcacggaggccatacccactcacgaacgcagccaacgaatcaagacccaggaccaatcaccggacaacgaccgccgccacccaaggtcccgactctcaacaccaaaagacaccgaccccacagggagagcccaacaatggagccccgaccgacggaagagaaacgcggatacccttcgcagacagcggggcgacccaaacagggcaaggcgctgaacagcgcacacaggccatcaaaagg

SEQ ID NO: 484234 - DNA, 888 bp, Homo sapiens
  misc_feature (487)..(487): n is a, c, g, or t
gtttttaagaaatagactgaattcagctgttaatcctctagtacagtatccatgttaaaatgtttttccattgcatcttttatgtgaattcaaaggtcagaatttatgtctgtgatattgagaccatgtgtacaagaactacttttggcttttcatcattcactccttagcaaacgtttcgtaagtaccctctgtttgctactatatgaggtgctgcgaaattagtgggcgtggcttttatatttttcattcgggtgtatgcgctcaagtgtggggtgttctcgagtatgataccgcgagagaaatgctgcaaatttatgtggtcctcattgctgtgctgtcgtttcctttttaaagacgattatcaatgctgccatttggaacttcctataagaaactaaaaatgatctatttcagtgttcctttcgcctttcctctgcttttctgaataaatggtttcagtaacccatgctgttctctccctatnctacgtctttctccctatgttgaaaaaagattcccacaggttctgatgtgtgtgttatagtcttcatgtatgttaacatgttaggaactgagtattttaagagatgtcttaaaatgcttagtttcataatgtccttaatgtatttcattgattgtgttgacatgagtattacaaggggtgcggaagactctactgtgccattggttctgaatgtataatccggttgggggatgatgttccaagagggtgatttggcgccacacaagacctagggtttccgtgcaatagggggaacgcggcggaaaatggaaggcatttggattgggtataaaaaaaaaatgggccaataaaggcgggagttttttttttcttccgctgtattgctgtggcatcgggaggga

SEQ ID NO: 484235 - DNA, 574 bp, Homo sapiens
atccctgagaatccaaaattctccgtgccacctatcacaccaccatcctgaaaaaaaaaaaaaagaaaaaaaaagaaagaaaatggcggggcgcgcactggagccatagaaaaagttttgccaagaaccgatgccgggttggggggcgcggggcccccaacgagcgtacatctgcgagacgcgggcacagcagcgatgatctcgaaggaacaccggggccgcggcacagtgggggggagctctccacgaccatgaaaaagcggcccggagggcgagaccgaacgggtgcgaagatcaaagtgccatcgaggggagcgctcccgaggaggggtcagctaacggggagactcatatctacatagcgagggagcgctccaagggcggagcgctccgagatatatctacaaaatttagcgcgccgccggtcgggtggggaaggcgggggcacacaaacaagggaaaaacgacaaaaacaaggggacggaacaaagacgtggaacccaaaagaaaaaacacaccggggtaaaccaagagacagagcagtcggcggagaagaaccccccgcgcagaaaga

SEQ ID NO: 484236 - DNA, 1074 bp, Homo sapiens
  misc_feature (553)..(553): n is a, c, g, or t
gggttcctgtggtatttcccggatgttcgtttcgacgtgctgcgggcgtcttgtgtgggcttttcccgtccccggcaagttcgagagtcactagggtccggattgtcccggtgaaccaccggccgtgataaatgttggaggccctctataggcattttcgtcaactcggccggtatcccagttctgccaattgcagtctatcacaaggcgtgctgttggcccaacctcgcagggcaccggtacacaggggatttaaaggaaattgtcgtaggtatgaattccgggaaaatttgagagccagaccctctatcgcattaggatgcctttggtggaagattctttgtccattgccaatatcactagccagctcttattaagccaccttaggctgtttctcccccagcctcccttcctcgtcctgttcctcgtgcgccaaatttttgcccagatacccctgtggttaggtcccccgtgtccagtgtgtgatagaattaggaacacccctgggactctgcccagtgttttagacttgcatggaatagtagagtgtttntggtcccagagaccatcccaggaatagtctcacccaccaggattgaacacttttagcctccagatttctcaacccattttgcccggataattctcccgaatctcattgttttagcattgtctcttctctccctccccttgttgttctttctctttctctgttccgaaagcgtgctggatatattcttcccaagggaggcgttttctttagcgtcccgaatctcaccatattgtgtataatagcccaccagattagggagagtttcttttctttccaacatgtctcagcatcccacacatacgccatccctgcgtacatttctttccattgacatcccacccatttctgtctgtatcgcgtccagcctgtctctggcccaacgttctgcctggtgaccacccagatcctttctgatcatcccatagccggccaacggctcccggccagggtttgcgcgaccggatggaaacggatagtgtctccgactctttcagcctttcgctccgcgtccgggccgacca

SEQ ID NO: 484237 - DNA, 449 bp, Homo sapiens
ttctagaggatccctccatttaggtccacttgtatgaacaccgtgtgctctcctaacaaacacactccgtgatgcgttcggggcctgtgcgcgccgctgcatgacctcagctgtctcaaggcagcatctccgtactgaatacctgagcccattctttctgggtccagctcacctgattcgatttcgttaagtatttttcttgcacactgtacaaaagcctcttctacattctcccctgtgagcgcacttgtatccaaaaacatcagctcattttcttgagcacatctggaggcttctaagaaggtaacttcacagatctgcatccaggtccttcttgtttccacaaaggatgatcacaatgttctggctcgctagcattcgtgcatctggtgatatcatagacgagtgatgagccccggtgcgcgcctcgttaataacttctcgtcagg

SEQ ID NO: 484238 - DNA, 232 bp, Homo sapiens
  misc_feature (129)..(129): n is a, c, g, or t
  misc_feature (153)..(153): n is a, c, g, or t
ttttttttttttataatgcaagcccttgcatggcaatccaaatttattgaactactgatgctaagttatacaaaattgcaccactttaattaaggcttttagtttacatttggccacctcaagtagttnaacattaggaaggtcaatttaatntgtgctcctgtttgatagacacacacttcatcaacatagcatacaagcacagcatgaaataacagcatgtcgcatagct

SEQ ID NO: 484239 - DNA, 309 bp, Homo sapiens
tgcgggtgatctagaggatcccagcggcgcccttttttttgagatggtctgctctgtcgcctaggctggagagcagggcaagatctcggtacactgtaacctccacctcccgggttcaagtgattctcatgcctcagccactcaagcagctggcattacaggcacctgtcaccactcccagctaacttctgtattttcagtagagatgtgtttttttgtttgtttgttttccttgagacatagtcttgttctatggcccaggctggagtggaatggcgtgatcttggctcactgcaacctccgcctcca

SEQ ID NO: 484240 - DNA, 1521 bp, Homo sapiens
  misc_feature (575)..(575): n is a, c, g, or t
  misc_feature (581)..(581): n is a, c, g, or t
  misc_feature (972)..(972): n is a, c, g, or t
tagataccaccagtggttgtttggtttgtggcgggctacctccagccagccacagtggttgatttggccgcgggaggctttgtttgctgcggttctctggtgtatttcgtctttctaatattgtggtggtagttttcagtcctctggctgcttgcgtagtgggttcgctccgctctcggcgcgtccttcctttgtgtgagggtgttctcgcacagtaggtgtgctattgttggtcgcacagctctgccgatctcactggaggcgtcgtctataacgtgtatatcttatcgtcgtccgttttgtggaatattatcagggtgttggggcgttgcactgcacagattaccctcgtggtgtgacggttcctaactcgtgggtggcaccacccctggttgcgctcaggcgtccgcagaaatggtgttgggagatttatgttgtcccgacagggctcactcgtgtgttgtttttctgcaagcccgtagatttttcgtggggccgcccgccgtaccagtgtggtggggtccccaccccgcggcccgcggaattgtgcgtgttgtctgattaagccggcaggntcttcncctctgtcctaccgcagtgttctgcgaattgctcatccttattgttgtgctcggcccacaaggggtgttaaatatggagggaatattataggatagagtatgttggtgccccccctcgggggccgccacattagggcaacacacacacacctcttcactgggcttaaggtacgttctcacgcggcatataatacttggggatataaaagatgcccctcttccgcagctatataagaagatatatagtggtgctacccctctggaagagatgctctttgttgtattttctcgagatagatgcacagcgcacactcgggagattgtgtatagagaactgctggtgttggctcgaggatgttgtggacaacctcggtatatattggagagagtntatacaactcggtgttctccactctcgggtaaattagaacgctgggttcacgcggactcgaatgatgttctcgcggaatttcttcttaagaggcttggccaagagacccacggttgtgtttgttctatttcacgggtcttgtccaagggtgtggataatagtctccaacccgtatggagcacccacattgtctcctttctttagcctgaatgtctatttggcccagagacccccgttgggctggtgtgacattgctgttgtaatttggaaccggtgttgccatatgtacacgcccggtggaatagtgatatgccattgttgtaatattatagtgaagggttttttttgtgacacgccatatttcggatatctttgaaaagatagacccaccaattttggttttttactgttaactgagaaccataggcgccccagccacacgtccattgtgtaaggaaaaattaaagtgctgccggaactaccaaaaaaataagaaaaaaactcgagcataaacgtcggtcgagaagtaattagtggtcatctggtata

SEQ ID NO: 484241 - DNA, 120 bp, Homo sapiens
  misc_feature (63)..(63): n is a, c, g, or t
accctttcacagtacgtgttgtcccggtactcacgccttgcaactactgttacgacgactgtnacctgtctgccgcacttttgcaccggtttttcttcttttgactttactgacttacct

SEQ ID NO: 484242 - DNA, 322 bp, Homo sapiens
catggtggcaggtgcctgtactcccagctacacaggagtctgaggcaggagaatggcgtgaacctgggaggcggagcttgcaatgagctgagaccgtgctactgcactccagcttgggcgacagagcgagactccgtctcaaaaaaaaaaaaagaccgcgtcttctctacaaaacattgaaaaacacctacgcaggggccttagttgttaccaaccctgtgtagttcctcaaccttactgtggacaggctgaggcaagaggattacctggcttgcaggtgaccctgtgataattgcccaagttgcaccccccagtctggcga

SEQ ID NO: 484243 - DNA, 350 bp, Homo sapiens
ggcaaggggctcagatggagtaggtgcagagaaggggagggggttttatggaggaggctcagaaaagggaagggggtgagattgaggaggcgcagtgaagggaagctgctcagatggaggaggcgcagagaaggggaggtgagcagatggaggaggctcagagaagggaagggactcagatgtgaggagggggcgcagagaggagaaggttctcagatggaggaggaggccctgagacggccaggcgctcaagatgggaaggtggccctggtaggactcgactctgcttctgaaaaagcggctgagttttcagggtgaaggattgcagtctgcaggctgggatcccccct

SEQ ID NO: 484244 - DNA, 104 bp, Homo sapiens
taagtgatttgtgaagaacgacttctcgtgatctgcaacattatgctcacagttggagcaacttttgagtagagctcatcctctctatgatctctcttaatttc

SEQ ID NO: 484245 - DNA, 604 bp, Homo sapiens
atcagctcgtacccactatgtgatgggggtatgctaacgtcacccttcagaggatggccacggggactgttagttcgcaatgctggttttctagaccagtgagctggaagcatggtgagcaccgttatctggacgctcaggccgtgtcgggctgcagctcatcatccaccacacaggtgcagcatgacgctgtctggtagtcgcccttagttgtcttgctggatataatagtacagggacttgccgtagcttgctcttgaattcagacctaattttcaacatgtccacttcactgcgggagaccatgattctgatcaggaccttatctcgcgtccccttgcccttcatggagtcatacagccgatcagcaaaatacaggggcttgttctgaatgcactgaaccaggttcaggaaagcattttccaggtctcctttaacctctttcctgatgctttccaacatgtcataagggctgtaactcttgtacctatcaaatactttctggaggtggggcacgctccgctcggtcatgatgctgatccacttgggaacatcagttcctttcctcttcactccagcgtcatagagatcccgagccaatcaa

SEQ ID NO: 484246 - DNA, 410 bp, Homo sapiens
tatggactggatgtcccgcattgaagtgcggaatcaggtggagtggggttcggatcccccatgtcctctgcagaagtcctcaccagcctaccggtgtgagtgtcccggtagtaaactgccgtaatgaaaccgagctagaatctggaatctgttatttgtaatctgtgtgtacagaaaaaagaaaacaacgaagtcctacatgagaacgtgtgggaaaaacgcaaccaatatgtataaatacggatgcagaatgcataaatgcatgtatatgcaacctaatcggagaattaagccttccatttttgttcattaatcacttagtagttataatcacaaaaacggtgttattattgaaaacgacgacctggttacaatgcgagagtagtgaaaagattagggtaccgagctcg

SEQ ID NO: 484247 - DNA, 480 bp, Homo sapiens
gtctgtataggctgtcatatatgtagtaggactggaggtgctctgaattgagtcctagtaggactctggcgtttgaggcttcgggctgttgccaagcaagaagacatttgctctttgcacaggtgcgggggtggggagggaacgcccagcaacagaaatcccccttgcctccctcaggaggccctgttacttttgcaggctgtcactccgacatcagagccactttcctcgtactcttcaaagcttcctaagtgccattcaaacccataccacccactggggcagactgcccttcctaaagttcacatcacgtgcgagctcatggtcttctgcagatcctcacataccaccggggctaaatgccagtgcctttgacaagtgtccagggtcccttgctgcatgactgggagcagcttttccaagcctgtcacctacttcccctccaactgtggctttacttactgccaaaccccatgccgg

SEQ ID NO: 484248 - DNA, 472 bp, Homo sapiens
cagaggcacacgaggcaggagtgaatcatacctgccactcatccatccaggcgtgacccatgcggcaggtatctggatgactggcagagtctggtgaagaataggtgctcagatgggtatgcgagtggtgtctgacctggctcacaaggtatgggctgccatgattgccttcccgtggccctcatcccggctggcatccccatgtccttgacttggcccccagtctcaggtgcctatgtggacttccaatcaagatagagtccatccattcctatccccagcatggcggcttccagaagaagtatgaagcagagcttcaccaacccagcccatttctgctgcaaccggaaagcccagcttttgatctcacgcaggctgaaaagctccagccctgtcaacccacggctctagctgaaagcgcccacaccggtgacacgcgccagtggctagtggccaagctcagtcctcagac

SEQ ID NO: 484249 - DNA, 271 bp, Homo sapiens
  misc_feature (135)..(135): n is a, c, g, or t
  misc_feature (213)..(213): n is a, c, g, or t
  misc_feature (221)..(221): n is a, c, g, or t
  misc_feature (253)..(253): n is a, c, g, or t
gagcatctgctccagatggaaaatgggtaaggaacaatcaaattcaattcgggaagaatatagaggtggtaataattggtaaaagtctgcagggttttttttaaccaaaggaaactggtttgagaaaattgtganatcagcattgaaatttgttacctactccaatcaagatttgcaaactacaaaaaaatcattctggaagcttttcacctntaaatatntaccaaggttaatttcagataaggaatgtccngcaagggaggtggaaggc

SEQ ID NO: 484250 - DNA, 334 bp, Homo sapiens
aaggcagatcgaaatcatggcaggtcccgaaagtgatgcgcaataccagttcactggtattaaaaaactatttcaacacttctcctctcacaggtagactgaactgtgtactggccacatctggaagcattgcattgacttgtctactctttcaagttaaggtccacaaaaaactccagctgtgaaagccacatcactggactttaaacctgtctacggttcttaccctcactctgttaagttcccatgcctggagacgctacatgccaactcactcatgtgataattcaactttgtacaatacaattatgaccccggaacgacgaaaactgat

SEQ ID NO: 484251 - DNA, 136 bp, Homo sapiens
agcagaattcactctggtgagtgtagactcggtcacacaatgcctcaggcgccatccacttcacgggcagccggccgttggttgtcttcttgtagtaatcgaggttgttgccgttccgggccagcccgaagtctgc

SEQ ID NO: 484252 - DNA, 532 bp, Homo sapiens
agatccctttccatcccttttctgtcacatcatcaggctacatattttccaaactcttacgctctgctacctcttgaatgctttgctgcttagaaatttcttctgccaggtaccctaaatcgtgtctctcgagttctagttccacagatctctagggcaggggcaaaatgccaccaatctctttgctaaagcatagcaagagtgacctttactccagttctcaacaggttcctcaaatctgcatctgagaccacctcagcctggacttcattgtccatatcactatcagcattttggtcaaagccgttcaacaagtctctaggaagttccaaactttcccacatctttttgtcttctgagccctccaagtctctaggaagttccaaactttcccacatttccctgtcttcttctaagtcctccaaactgtttaaacctctgcctgttaaccagtgccaaagtcgcttccacattttcagctatccttagagtagcaccccactcccagtaccaatgtactagattaatctgt

SEQ ID NO: 484253 - DNA, 228 bp, Homo sapiens
  misc_feature (38)..(39): n is a, c, g, or t
atctatcagctctcattcgtgactcactcagaataagnnattccttattcaaaaaacaatgtaagtattccgacccaactgttctcagccatgaacaaaaaaaactatggccaggtgtggtggctcatgcctgtaatctcggcactgtggaagtcaaggtgggaggactgcttaagcccaggagtttgagaccaggctgagcaaccaatgagaccccctccccggccg

SEQ ID NO: 484254 - DNA, 219 bp, Homo sapiens
gtactgccaacacgtcccacatccatttcttcatctcgtctgctctggtcttctgtgtgtcttctgcgtctcttcaggttcttcttcaggctcttcttccacctttgcatcagggctcacagttcaaactgaggcgaagcattctttctattctatctccatatgctttagtgtctgataaaacagtttgggatctggctgtggtttggtttgaaacag

SEQ ID NO: 484255 - DNA, 280 bp, Homo sapiens
cctcgcgggaatggcccgcgtgtccattcttgctcgcgcccatacttgtaaatccaaaccagcgtaccacacagtgtgaactctgtataccataaatgtgaatgtcgaaacaatgtgacactccgattgactaatctttaaatatcacatataacatagatgtaaaacataactttacaagagctttggtaaaacaataatgaagaaataatagccggaaacagaaaggacacagaatctcactctgtcacaaaggctggagtgcagtggcgtgatcttg

SEQ ID NO: 484256 - DNA, 125 bp, Homo sapiens
gactcttgaggatccccctcccaagtgatgagaaagttgtcgtcaggacaggtcagatgcataaggttatacaggtgctgcagattgtccacaaccagcaatccattgtgactcaggtccagttc

SEQ ID NO: 484257 - DNA, 561 bp, Homo sapiens
  misc_feature (28)..(30): n is a, c, g, or t
  misc_feature (33)..(33): n is a, c, g, or t
  misc_feature (37)..(37): n is a, c, g, or t
  misc_feature (39)..(39): n is a, c, g, or t
  misc_feature (41)..(41): n is a, c, g, or t
  misc_feature (47)..(47): n is a, c, g, or t
  misc_feature (104)..(104): n is a, c, g, or t
  misc_feature (215)..(215): n is a, c, g, or t
  misc_feature (238)..(238): n is a, c, g, or t
  misc_feature (295)..(295): n is a, c, g, or t
  misc_feature (309)..(309): n is a, c, g, or t
  misc_feature (322)..(322): n is a, c, g, or t
  misc_feature (332)..(332): n is a, c, g, or t
  misc_feature (354)..(354): n is a, c, g, or t
  misc_feature (490)..(490): n is a, c, g, or t
  misc_feature (492)..(492): n is a, c, g, or t
  misc_feature (504)..(504): n is a, c, g, or t
  misc_feature (516)..(516): n is a, c, g, or t
  misc_feature (519)..(519): n is a, c, g, or t
  misc_feature (531)..(531): n is a, c, g, or t
  misc_feature (559)..(559): n is a, c, g, or t
tttttttttttcaacagtgtttgatttnnnttngggnanangggagnctttttatgttgcccaaactggggggcagggactagtcacaggggcaattatagggnactacagcttaaaactggtggtctaaagggatccttttgcctaaggctccccaaaagctgggattacagggacatgccagggcgtttggctccaatcctttaatttcaaangggaaggattacatataattctntcaaagggtatactgcttttattttaaataaacataaaaagagcgcaaagccaccgntttttttacaaatntccattatgaacncaaatggggnctttgcaaacttcaaaaatgtntcaaaccctaacctgggatctttagggccattgatcaattttgggcatacaggaagcactcaataaaagttgttgaatgcatgaaggaatgcataaatgttctttttggatatttagccttactttcccggcattnancttaaatgaccngagaagcacttnctnaaaataaccctntggctcaccatgagaagaatgcctggcnct

SEQ ID NO: 484258 - DNA, 261 bp, Homo sapiens
tcattaccgtccgggcataagagaagtgctcttccgacggaccccatacagtcatcaccccgtcacgggacctcagagagcagcgccacttacgacggaccccatccagtcatcacccccatcgatggtacaccggagatctgatgtcactctcctcgctgaagccctggtgactgtcacaaacatcgaggttattaattgcagcatcacagaaatagaaacaacaacttccagcatcccatgggccatcgagacgagaga

SEQ ID NO: 484259 - DNA, 204 bp, Homo sapiens
agccgcacgacggtcaaagttctgggattacaggcgtgagccattgagcctggcctatttttattttatagagataggatctttctatgtcgcccaggctattctcaaacctcctgacctcaagtgatcctcctgcgttggcctcccaaggttctgggattataggcataagccactgcacctggcctggtactttaagaaatt

SEQ ID NO: 484260 - DNA, 300 bp, Homo sapiens
  misc_feature (40)..(40): n is a, c, g, or t
  misc_feature (77)..(77): n is a, c, g, or t
  misc_feature (86)..(86): n is a, c, g, or t
  misc_feature (124)..(124): n is a, c, g, or t
  misc_feature (128)..(128): n is a, c, g, or t
  misc_feature (131)..(131): n is a, c, g, or t
  misc_feature (136)..(136): n is a, c, g, or t
  misc_feature (157)..(157): n is a, c, g, or t
  misc_feature (178)..(178): n is a, c, g, or t
  misc_feature (187)..(187): n is a, c, g, or t
  misc_feature (193)..(193): n is a, c, g, or t
  misc_feature (201)..(201): n is a, c, g, or t
  misc_feature (228)..(228): n is a, c, g, or t
  misc_feature (231)..(231): n is a, c, g, or t
  misc_feature (252)..(252): n is a, c, g, or t
  misc_feature (279)..(279): n is a, c, g, or t
  misc_feature (293)..(293): n is a, c, g, or t
  misc_feature (297)..(297): n is a, c, g, or t
gcactgcttattacaattttacgggtctctattttacccncctacaagcctcagagtacttcgagtctcccttcacnatttccganggcatctacggctcaacattttttgtagcgacaggctnccanggncttcncgtcattattggctcaacttncctcactatctgcttcatccnccaactaanatttcnctttacanccaaacatcactttggcttcgaagccnccncctgatactggcattttgtanatgtggtttgactatttctgtatgtcnccatctattgatgngggnctt

SEQ ID NO: 484261 - DNA, 261 bp, Homo sapiens
gccagtctatactagaaaatatccgtgagatctttctagggtaaaaggacgataagtgcacagagttaaaattaaactcatttaatttccaggagtgataagcatagggacacattactcaaatggatctggaatcccattatattccaagaaatctttcttgatacaatatggatagagtaggctataaatggacatatcttcctattaaattgccaagcagcaaccccagaacccaacattccattcttttgtctaata

SEQ ID NO: 484262 - DNA, 136 bp, Homo sapiens
gtccgtgacattaggtgattgggaaggtaacatctgtgctctcatcgccaaagctgactgtcttgtccccagtgagatccggaagctgaaggagcggatccgggaggagattgacaagtttgggatccatctacta

SEQ ID NO: 484263 - DNA, 100 bp, Homo sapiens
ggatagatgggaaggggaacgttgtatggattaaatgagtatctttggaaagtgcttacacctgagcctggagcaagtccagagctcagcctcctgggtg

SEQ ID NO: 484264 - DNA, 513 bp, Homo sapiens
  misc_feature (37)..(37): n is a, c, g, or t
  misc_feature (70)..(70): n is a, c, g, or t
  misc_feature (84)..(84): n is a, c, g, or t
  misc_feature (117)..(117): n is a, c, g, or t
  misc_feature (133)..(133): n is a, c, g, or t
  misc_feature (136)..(136): n is a, c, g, or t
  misc_feature (162)..(162): n is a, c, g, or t
  misc_feature (388)..(388): n is a, c, g, or t
  misc_feature (395)..(395): n is a, c, g, or t
  misc_feature (398)..(398): n is a, c, g, or t
  misc_feature (409)..(409): n is a, c, g, or t
  misc_feature (413)..(413): n is a, c, g, or t
  misc_feature (422)..(422): n is a, c, g, or t
caaaaggggttgaacccgccttaaatagcaccgaccntatgggcaaatttttaattatttcagggggcgnaaggaataacattnaaactggaattcaggccttcaaaaacaaggatnatccgggttcttttcnatntcggggggcctaattgaaatatgtanttttattttagacacgcttctgttaaaacagaccaggttttcctggtctcagacctatgatgacttgtccctttgatgtcactactgtgaattgaatataattagtaaaaatagacgatgaataaataacactttatagtaagaaaacaatatattttggccatctaaaaatgagaattataattattatgaattataatttaaactgtttaattttgtttaatgngtatatngantcttccaaatngaanccattattntcaattaagtactacaactatgacaatgcttgacctacatttctaaaataaaaattcacattttttgataaataaactacagttttaccag

SEQ ID NO: 484265 - DNA, 968 bp, Homo sapiens
gggccccccctcgtgccgtcagaatccccaaaataagtaggaatgggcagcgtctgctcacagtcagtacacctttcccatttgctaatacggcctggccaggctgagaggaatccttccctgccttaccctggacagtgaagccactgagaccatcggtaggcaccatgcggctgcttcaagcgactgttcttttcttccttttgtccaacagtctctgccacagtgaggacggcaaagatgttcagaatgactctattccaacaccggcagaaacttccacaacaaaagcctctgtcacaataccaggcatcgtgtcagtgacaaatcctaacaaaccagcagatggaacacctcccgaaggaacgaccaaaagtgacgtatcccaaacatctttggtgacaacaattaattcactgacaacaccaaaacatgaagtgggaacaacaactgaaggtcccctaaggaatgaaagttccactatgaaaataacagtgccaaatactccaacttcaaatgctaattcaacgctaccaggttcccagaacaagactgagaatcagagttcaatcagaacaacggaaatatcagttactactcaactactggatgccttgccgaaaatcactgcaacatcctctgcatctctaacaactgcacacaccatgtcactgcttcaagatactgaggataggaagattgcaaccactccatcaaccaccccctcctattccagtatcattttgcctgtggttatcgcgctggttgttataacactcttggtatttactctggtgggtttgtatcgaatatgctggaagagagacccaggcactccagaaaacggaaatgatcagcctcagtccgataaagagagtgtgaagctgctcactgttaagacaatctctcatgagtctggcgaacactctgcacaggggaaaaccaagaactgacatcgtgatggatcc

SEQ ID NO: 484266 - DNA, 410 bp, Homo sapiens
agcatacactgctctgcaagtccaactagagtccgcactagaaagatatcctatatttcaaacctatcctctgaaatccacatccatacaagatggcctagtaaactctgcatagaataattggcctcattaccactatttactctcatcctgaattccctatattcaaaggccctgcagttttatttccatgcaggtatttttaagtgttcgagaaattgaacataaccagcagtttcaaattttttcagtagctcattaagctgtaatacaggtactcaattacgtatagcttaaatccaacactttaaccattgtgaaaaaacacaactgctcatgttcacaattccgtgaaagccatgaagctgtccttccactattttctgatttactgaagtgtattatacaca

SEQ ID NO: 484267 - DNA, 457 bp, Homo sapiens
  misc_feature (210)..(210): n is a, c, g, or t
ggttatctgtctggacgcgctgggtggattgcgttgtgtggggctcctggtgaactgtgttggagccgagacaagcgctatgccatggctgcaatgcgcgcacagactgtagccatccgaggacaccccgggaccaccggtagcgactcgatggagaaaaccggcaaaatcctccgaatccccatggatatctggtagaggaaggttganatgcgaaagcggtctgggagcaccgagcacacagctagacacataacagatggaccaaactaaaaggaggaagttgaaatataatatcaagacagagattaattttaataaacgcacaccggctatgcaacatagatgatacacctctatagtgcacgcactgagaccagtgtaacatgcctaacgaccctgaaggtggccgcacaatgttaccaggcgatcccagccaagagcctggataaatcaa

SEQ ID NO: 484268 - DNA, 937 bp, Homo sapiens
ggttaataacgacgagataagagatccctgtctgtttttgtttgtttgttttctgaccgagtttcattcttgtgcctaggctggagtgcaatggcgccatctcggctcactgcaatccttgcctcccgggttcaagcggttctcctgtctcggcctccagagtggctgggattgcaggcgcccgccactacacctggctaatttttgtttatttggtagagacgaggtttcaccgtgtggccaggtgggtctcaaactcctgacctcaggtgatccaccttccacatcctcccaaagtgctgggactacaggcgtgagccacctcgcccggcgcttctacttattaaaaacaaaaaaaaaagttagcagtcaaaggaaggcctatacggaggtatccctgaagaaggctcgtaatccataggagaatgaccgatccggggacatgtaacggaccctcggggtacgggtccaccatagaaggggtcagaacaacatgcggaccatgaatcatcatgaacggggagacacgaacgggagacaggactcaaagaatcaaagaggtacacaacacaatgaacgagaccgcacgcaagtagaagaggaagagaaaacccaggggcggaaacgactgactcgcaaaaccacaaagagggcacgtgcaacggcagacttgaaagacggggtccaagaggtccaaagagcccggggaaaaccggggagcaaggtccaaagagtttcaaagggaggaacgggaacgtgaaggtaggggggagagatacagagagaacagaacaggctgggagaccagccgggaacgacaatcgacgaacggcaatcagaggcgcaggggagaggggcaccgatggggggtgcaccagcaggaaaggaacgggagcacaaaccagaacgaaacagagaacagtaggcacctacagag

SEQ ID NO: 484269 - DNA, 694 bp, Homo sapiens
gcgagacgacttcctgggccaggtggagcgtgccccttagtcaccttccgacagaagatccaaccatggagcgaccctatacatttaaggagtttctcctcagaccaagaagtcataagtctcgagttaagggatttttgcgacttgaaaatggcctatatgccaaaaaatggaggtcacagatgaagaacacacagtgaccagagggactgacatggagcatggatgggaagttgttgactcaaatgactcggcttctcagcaccaagaggaactatcctacctacctcctactgcctcccgggtgggacagacacaagtcggacaacttacgccgaactatactatagtcaaccacaacaaccggaccactcagtggcacagaccaagcctgatggacgtgtcctcgcgagtcggacaactaacatcagacagactcaaccaggaggcagcacaccggcgcacttcgctcccgacaggcacatcagcgaagactccggaagcccgaagccctcgagagggcgcgggcatgtccccgagcctatgggagaccatatcagaggaagtgaatatcaagatggaagaactcttctcgggtctggatctggcccacaccaccggcaattcccaggactctcagaccatgcctcaggaagccgtcacaggaacttagccacaaggcatccgattatac

SEQ ID NO: 484270 - DNA, 102 bp, Homo sapiens
  misc_feature (7)..(7): n is a, c, g, or t
ttcaagncttctaacgaatgtacgggcgacatgagttgtggttaatctgtgtttatttcttgttccacaagttaaataaatcataaaacttaaaaaaaaaaa

SEQ ID NO: 484271 - DNA, 120 bp, Homo sapiens
caccctgtcttttaagttagtgtgacaattttccataataaactacttaaagacagggtgagggagatatgtaaattgtccactagaaaattaaataaaagaactgaatgtgaaaaaaaa

SEQ ID NO: 484272 - DNA, 833 bp, Homo sapiens
ggtttatcctgtctcttcttgcctgaccgacttcagctgcaacggacaacggtatggggtcattgtcacggatttggtctctcatctaattaaatatcactgattgtcaagtgttttccacctatttccctggatactatttgatcggtcccgataggcatgtgcctctgtgtgggtgtaccttgtgttaggcttgctcctgtttctcagatgatttatcaatttatgcacaagttcggaagatgccagtaaatctgtatctcaaatctccccaggaccagagttctcttttatgttattaaagatgtttctggcaaaggccttcctgcatttatgaatgctctctcagagatgcaacgagaacatcctgtaggaagtgaatcagatgatgcagaacacagaggaatattcacctgctttaccaaataaagtacgtgttgaaacagatcatttctctctattctgtttcctagtgtgtaatattttacatacgttgaatgcagaattctgtaatcattgaatcacttagtggttaagtgtttgaaaaagctcttgcaatcaagtctcgtgatgtattaagtaatggctttataatatagtgtggtcagtcatcttaaggtacgcattgagccatgttcccctgtagtccgcgtacggggggcacctccttggcttttatgtcatccttccaatctcaacacatgaacttgcgacattaaattatggtaaagactatgtatcatgctggccatttcaaaggggttttctccaaaagtttaaacttctgttatgacggtttttgcaataatccaattgtcgtcaattatccaaat

SEQ ID NO: 484273 - DNA, 135 bp, Homo sapiens
gatttcgtgtgtgtgtgagtgtgttctgttttgtgttttgttctttgttgttgtatttaggtggatggttttcttttctttcccccggccggtcgagtacttcacagcactctggtgcgggaagaagcagaggca

SEQ ID NO: 484274 - DNA, 475 bp, Homo sapiens
atctttctgaccacccaggaacctgtgtggagagagtggctgggccactgtccagccagcgccgagagggtttccgagtagagatgttaccgcagggtcaccggttagtgttgtaaaataagactggtggttgtggatactaaacgtgtgcatgagatctacacggtaaaaaggccaaacaattttttaagcagtgatagaattttccctccagatttagaaggaatcgtccctgatgcttctggctttctaaaaccagggcggttttcccccccgccccgtggaacgccctttccttcattctggcatttcagatggcaggaagagcatttagctgaaatatttacctgctgatttggggttcttaaatttagaatcccctttcatgtgtttaagagagatatttacattcaaatcagccttttataattacattttaaattataataaaatgatggtgccggcgcaaaaaaaa

SEQ ID NO: 484275 - DNA, 406 bp, Homo sapiens
  misc_feature (175)..(175): n is a, c, g, or t
ctcgggtgccatttgctaactctgttctctgtgtagctgcttttggcagctcctcatctcccttctaatccaccactcacagtcctagagaacagaccacaagttaagaccgtcacctacagaatcccaagggccaaaactggtgcacgaaaggaacaaactcccaaatccttcnttacaagggcttctccacaaagcatcgttagactctaaggagatacgcttcagaatttcatggagcagaagccttgaaatgccttatgatcctcacacgatccatacgatcagacacggatggcggaagaacccagaagcaagagcactgataagctgaggtccataaattgaggactagtgtggtacggagggggaagaaacgaaaccttaatatcctatcaagaaagga

SEQ ID NO: 484276 - DNA, 447 bp, Homo sapiens
cacgaggccgatgcggctgttgcggccgaagccgagcccgatgccgtcgtggtcgatgacgacctgcggctcacggttgcgggaccggcttatgccctgcaccacgtagtagcccagcgccagcgccagcaagaagatcagcacgaagcgtcggtcgttcagggacaaagtcggcgcattggccggattgaccatgaaatacgcgatcacggccacgatcatgcccaacgacaccacggccatgctgagattgtgcagcacgccgaagcgcaccatcacaggtgatacggccatctcagctgcattgggcgcgatggcgcagcaggtggtcggccagcaccaccgccatcatcgcttcggcgaccggcgtgccgcggatgccgacgcagggatcgtggcggcccttggtgcgcagctcgacctccttgccgaagcggtcgacgcttc

SEQ ID NO: 484277 - DNA, 197 bp, Homo sapiens
cctttgggggaaaaaaaaaatggttttttttccccccccatttttttttttgaaaaaaaaaaagaaattttaacgttggggggggaaaaaaaaggaaccctttttttaaaatttttttttttttttttttttttttgccccccttttttttttttttttttcaaaaaggttttttatttttttttttggcgggttta

SEQ ID NO: 484278 - DNA, 345 bp, Homo sapiens
  misc_feature (13)..(13): n is a, c, g, or t
  misc_feature (326)..(326): n is a, c, g, or t
  misc_feature (337)..(337): n is a, c, g, or t
  misc_feature (341)..(341): n is a, c, g, or t
aatcaatttaatnggttgcaaccaacatttttttgaaaaaaaaaaaaaaaaaaaaagccagacgatggtgcacgcctataatcccagcactttgggaggccgaggcaggcggatcacttgaggtcaggagttcgagaccagcctggccaacatgctgaaactccgtctctactaaaaatacagaaattagctgggcgtagtgacgtatgcctgtaatcccagctacttgagaggctgaggcacgagaatcacttgaacccaggaggcagaggttgcagtgagctgagatcacactgttgcactccagcctgggtgacagagcgagnctctgtcaaanaaantaat

SEQ ID NO: 484279 - DNA, 373 bp, Homo sapiens
aagtgaaacaggaatatatcacgaaggctaataagaaaatgataagacagataggacagaggaagtcatgaataatagtataaacttactgaggagatacagagaacgtgatggcacattcctagtatcccagcactattgataaggatagatggtgtgaagacagaccgaacccaggtgtttgatcagcctgggtaaaaaatattgtaaaaaggtgagccaggtagtggtgtgctatatgcctagtgatcccagcctactatgggagcgcctgacgggaggtcgacggcatgctagtgacgtctattcgatcacagccggcacacctgccgagcctggtgagaacagtgagacacttgttctcaaagataaa

SEQ ID NO: 484280 - DNA, 1415 bp, Homo sapiens
cgtgggcctgccgtggtgcctggtcacctggggcatggcaacatggttgggcgtgcgtgggaaacggtggggcagaaggcctgtgcgtgcgtgtgcagatggcggtgcatgtggtgactgtccttcagctgatgccctgctcccgtgcagtgtatagtgtgctgctgtgcactgtgttccatgtgctgctttgcactgctgactgtgtgctgctgcgtggtgtgttggcttgtgatgccgtgactcagtgcgggatcttgacatgccttgtccgcgagggtaggtccctgccggtgtccccagctgcttgctgatgtgctgtgctgatgcgcatgtgatgtgggtgctgtgcatgcagatgctggtgggctggtacctctgttgcgctgactcccgcctcccctcgcgggcgctggcttctcaccgcggctgggcgcccgcgcaccctctctcggggctggtggcctgcgtgggcggccgggtggtcggcagagccgccggggcccccgggctcagaaagaggccgaaatggctgcgaagcaggccccgggcaggagtcgctcgggcgcagggaggaagtgaaccggccggaggtagcgcccggctgctggccccacagtcccgacaccttcggaactcctaactcctttacttgtccggctgaaaggtcaccagccccagtccccagctgtgccgcttgctgggcacagagcctctggtaactgccccctgatacacacagtgcccggggatagaacccgtgtgcgtggacctgggtgactgggaggccaccgagcgggcgctgggcagcgtgggccccgtggacctgctggtgaacaacgccgctgtcgccctgctgcagcccttcctggaggtcaccaaggaggcctttgacagatcctttgaggtgaacctgcgtgcggtcatccaggtgtcgcagattgtggccaggggcttaatagcccggggagtcccaggggccatcgtgaatgtctccagccagtgctcccagcgggcagtaactaaccatagcgtctactgctccaccaagggtgccctggacatgctgaccaaggtgatggccctagagctcgggccccacaagatccgagtgaatgcagtaaaccccacagtggtgatgacgtccatgggccaggccacctggagtgacccccacaaggccaagactatgctgaaccgaatcccacttggcaagtttgctgaggtagagcacgtggtgaacgccatcctctttctgctgagtgaccgaagtggcatgaccacgggttccactttgccggtggaagggggcttctgggcctgctgagctccctccacacacctcaagccccatgccgtgctcatcctacccccaatccctccaataaacctgattctgctgcccaaaaaaaaaa

SEQ ID NO: 484281 - DNA, 855 bp, Homo sapiens
  misc_feature (16)..(16): n is a, c, g, or t
atagcatagtagagcngggagactgcgccgacatggagctgttcctcgcgggccgccgggtgctggtcaccggggcaggcaaaggtatagggcgcggcacggtccaggcgctgcacgcgacgggcgcgcgggtggtggctgtgagccggactcaggcggatcttgacagccttgtccgcgagtgcccggggatagaacccgtgtgcgtggacctgggtgactgggaggccaccgagcgggcgctgggcagcgtgggccccgtggacctgctggtgaacaacgccgctgtcgccctgctgcagcccttcctggaggtcaccaaggaggcctttgacagatcctttgaggtgaacctgcgtgcggtcatccaggtgtcgcagattgtggccaggggcttaatagcccggggagtcccaggggccatcgtgaatgtctccagccagtgctcccagcgggcagtaactaaccatagcgtctactgctccaccaagggtgccctggacatgctgaccaaggtgatggccctagagctcgggccccacaagatccgagtgaatgcagtaaaccccacagtggtgatgacgtccatgggccaggccacctggagtgacccccacaaggccaagactatgctgaaccgaatcccacttggcaagtttgctgaggtagagcacgtggtgaacgccatcctctttctgctgagtgaccgaagtggcatgaccacgggttccactttgccggtggaagggggcttctgggcctgctgagctccctccacacacctcaagccccatgccgtgctcatcctacccccaatccctccaataaacctgattctgctgcccaaaaaaaaaa

SEQ ID NO: 484282 - DNA, 1394 bp, Homo sapiens
cagtcgtgcctcatatcttgttcaacactggaagacttcacactgcgcgagaagccctatgaatgtaaggagtgtggcaaggcctctcagctactggctcataccttgttcagcactcagagcgcatccatactggaggagaaaccctatgaactgtaaggaatgtggcaaagccttctattagctcgccatcagctctaccgtacatcaacacgggcttcatactgcgcacgacgaaacccatatgaaccctgtccagcgacactgccgcgccaggcccttcacgccaccgcacgcaacatcctccaccacagccactcggacaacacttcactacctgaccgctaccagcccctcatgcacctcgctcaccggacacgcagcgcaccagacctccacacgctcccgcagccctccgctcaccccagctccccacacacatcagccccgcaactccccatcacctcgcgcaaaacaaagccccctcctgcactcagctcaaccgcgcagccgcccgcccacaagcgcccccttcaagcacacaccctgcgccctccactaaccccactgactaccacacccacctccaacagaacactccccgctcacctgcgcgccacgcaaacacccccaccactccaactgccaacaccaacaacgctgccgccaacacgccctcacacacacgccccccacccggacccaaccccgaactcgggcaccctgacgcacctgctccccccacccgcgccgcaccacaccctctgcgcaccccgctaccacgcacacgcccgccaccggcccccaccagcacccctcacccccactccctccacctgccccaccagcgccaccaaccccccggcgcaagcccaccccactacacccgccccacacccgcgccaaaagacccccagacaaccccgcacaccccccacaccccgcgccttccgcgcaccccaccctgacccgacaccacccccacgacgccccgaagccccccccccaccacccacccgccccacgcccacccaccgcacacccccccccgaccactcgacgccccgccaccacccccgcgccgcaccacgcccgcgacagcccccccccaccccacctacaacgctaccaccctcacacaccaccgggcaccacaccgcccccagacaccacccgccgggcgcccacccgacccgcagcgcaccacacagggcacaccaccggcagaaccaccagccacacccccacgccgccccccgatcaccccaccccccccaccaaccgcgccacacccccaggcgcaccacccgcagcgaccggccgacgagagcgcacccaccccgcccgccccccacatgccccccccgcactcgccggccaacgcggcccgcacg

SEQ ID NO: 484283 - DNA, 176 bp, Homo sapiens
agcgaagctacataagagaaaaataagtaatcgggtaatgcaagcgttggtggtcaactccacatactctatctcatctgagggtcgtggagtacgccctactcgtctagagcgcagagagatgcgccctgccaagacgagtgagcgctagaagtgagtctgagccagagattcgg

SEQ ID NO: 484284 - DNA, 947 bp, Homo sapiens
  misc_feature (16)..(16): n is a, c, g, or t
atagcatagtagagcngggagactgcgccgacatggagctgttcctcgcgggccgccgggtgctggtcaccggggcaggcaaaggtatagggcgcggcacggtccaggcgctgcacgcgacgggcgcgcgggtggtggctgtgagccggactcaggcggatcttgacagccttgtccgcgagtgcccggggatagaacccgtgtgcgtggacctgggtgactgggaggccaccgagcgggcgctgggcagcgtgggccccgtggacctgctggtgaacaacgccgctgtcgccctgctgcagcccttcctggaggtcaccaaggaggcctttgacagatcctttgaggtgaacctgcgtgcggtcatccaggtgtcgcagattgtggccaggggcttaatagcccggggagtcccaggggccatcgtgaatgtctccagccagtgctcccagcgggcagtaactaaccatagcgtctactgctccaccaagggtgccctggacatgctgaccaaggtgatggccctagagctcgggccccacaagatccgagtgaatgcagtaaaccccacagtggtgatgacgtccatgggccaggccacctggagtgacccccacaaggccaagactatgctgaaccgaatcccacttggcaagtttgctgaggtagagcacgtggtgaacgccatcctctttctgctgagtgaccgaagtggcatgaccacgggttccactttgccggtggaagggggctttgggctgttgagtcctcaaaacttagccatgcgtgtatctacccatctcaataactgatttgtgccaaaaaaaaaaatataaagaggaaagggacaaaaaaaaggggggtaaacagggggaacacctttaaggtaagggaaagagggaagggaaggtgtggattgggagaaaaagaattgggtgggggagaac

SEQ ID NO: 484285 - DNA, 2224 bp, Homo sapiens
gactagttctagatcgcgagcggagctgctgactgcattcttctctgccactgcggatgctgcctccccgtttccagcctgtaagcccgttgtggtggtgagctccctgctgctgcaggaggaggagcccctggctggggggaagccgggtgcggacggtggcagcctggaggccgtgcggctggggccctcgtcaggcctcctagtggactggctggaaatgctggaccccgaggtggtcagcagctgccccgacctgcagctcaggctgctcttctcccggaggaagggcaaaggtcaggcccaggtgccctcgttccgtccctacctcctgaccctcttcacgcatcagtccagctggcccacactgcaccagtgcatccgagtcctgctgggcaagagccgggaacagaggttcgacccctctgcctctctggacttcctctgggcctgcatccatgttcctcgcatctggcaggggcgggaccagcgcaccccgcagaagcggcgggaggagctggtgctgcgggtccaggcccggagctcatcagcctggtggagctgatcctggccgaggcggagacgcggagccaggacggggacacagccgcctgcagcctcatccaggcccggctgcccctgctgctcagctgctgctgtggggacgatgagagtgtcaggaaggtgacggagcacctgtcaggctgcatccagcagtggggagacagcgtgctgggcaggcgctgccgagaccttctcctgcagctctacctacagcggccggagctgcgggtgcccgtgcctgaggtcctactgcacagcgaaggggctgccagcagcagcgtctgcaagctggacggactcatccaccgcttcatcacgctccttgcggacaccagcgactcccgggcgttggagaaccgaggggcggatgccagcatggcctgccggaagctggcggtggcgcacccgctgctgctgctcaggcacctgcccatgatcgcggcgctcctgcacggccgcacccacctcaacttccaggagttccggcagcagaaccacctgagctgcttcctgcacgtgctgggcctgctggagctgctgcagccgcacgtgttccgcagcgagcaccagggggcgctgtgggactgccttctgtccttcatccgcctgctgctgaattacaggaagtcctcccgccatctggctgccttcatcaacaagtttgtgcagttcatccataagtacattacctacaatgccccagcagccatctccttcctgcagaagcacgccgacccgctccacgacctgtccttcgacaacagtgacctggtgatgctgaaatccctccttgcagggctcagcctgcccagcagggacgacaggaccgaccgaggcctggacgaagagggcgaggaggagagctcagccggctccttgcccctggtcagcgtctccctgttcacccctctgaccgcggccgagatggccccctacatgaaacggctttcccggggccaaacggtggaggatctgctggaggttctgagtgacatagacgagatgtcccggcggagacccgagatcctgagcttcttctcgaccaacctgcagcggctgatgagctcggccgaggagtgttgccgcaacctcgccttcagcctggccctgcgctccatgcagaacagccccagcattgcagccgctttcctgcccacgttcatgtactgcctgggcagccaggactttgaggtggtgcagacggccctccggaacctgcctgagtacgctctcctgtgccaagagcacgcggctgtgctgctccaccgggccttcctggtgggcatgtacggccagatggaccccagcgcgcagatctccgaggccctgaggatcctgcatatggaggccgtgatgtgagcctgtggcagccgacccccctccaagccccggcccgtcccgtccccggggatcctcgaggcaaagcccaggaagcgtgggcgttgctggtctgtccgaggaggtgagggcgccgagccctgaggccaggcaggcccaggagcaatactccgagccctggggtggctccgggccggccgctggcatcaggggccgtccagcaagccctcattcaccttctgggccacagccctgccgcggagcggcggatccccccgggcatggcctgggctggttttgaatgaaacgacctgaactgtca

SEQ ID NO: 484286 - DNA, 655 bp, Homo sapiens
  misc_feature (332)..(332): n is a, c, g, or t
ggaatgctgagtttcagttttgagcagaggtgaggcagaatccactgtagccttttgccctggtatttggggggatgaccagcccaggcgttgggtgttagtctgcatgagtttgtgagaggaaatagctgggtgtcctggcagtgcccttgaagttggttaggaccttcctgtaaactcttgcccctacttctaactactctataaatatatacatatatttatatataaagtgattagttgaactggcatcctgctttagcctgagacttgccataagaaactgctgagtacttggcaaaccctttcatagttttgttctccatctgttnggggtaggtgttgatccgagtgaatgcagtaaaccccacagtggtgatgacgtccatgggccaggccacctggagtgacccccacaaggccaagactatgctgaaccgaatcccacttggcaagtttgctgaggtagagcacgtggtgaacgccatcctctttctgctgagtgaccgaagtggcatgaccacgggttccactttgccggtggaagggggcttctgggcctgctgagctccctccacacacctcaagccccatgccgtgctcatcctacccccaatccctccaataaacctgattctgctgcccaaaaaaaaaa

SEQ ID NO: 484287 - DNA, 103 bp, Homo sapiens
aatagcctgcaccgacattaggatgagaagagttgaggaagcctagagagtctctgcactgaggctgagccatgttcatgccactgccattaaaggagctgtt

SEQ ID NO: 484288 - DNA, 4925 bp, Homo sapiens
  misc_feature (5)..(5): n is a, c, g, or t
tggangaaaacttaatcgaaacctggtcatcgggctgtccgggagctccggctcgggctgcggacgccatggagcttgctgaccacctggtgaagcgggcggctgccgtgcaggcggatgatgtggaggtgctgaaggtggggaggacccagctgatcgacgccgttctgaatctgtgcacctaccatcaccctgaaaacatccagctcccaccggggtaccagcctccgaacctcgccatctctaccctctactggaaggcctggcccctcctgctggtcgtcgccgcattcaacccagagaacatcggcctggctgcgtgggaggagtacccgaccctgaagatgctcatggagatggtgatgaccaacaactactcctacccaccgtgcaccctgacggatgaggagacccggacggagatgctgaaccgtgagctgcagaccgcccagcgggagaagcaggagatcctggccttcgaggggcacctggcggccgcgtccaccaagcagaccatcactgagagcagcagcctcctcctgtcgcagctcaccagcctggacccccaggggcccccccggaggcctccccctcacatcctggatcaagtgaaaagcctcaaccagtccctccgcctcgggcacctcttgtgccgcagccgaaaccctgactttctcctccacatcatccagcggcaggcctcctcgcagtccatgccctggctggcggacctggtacagtccagcgagggctccctggacgtgctgcccgtgcagtgtctgtgcgagttcctgctgcacgatgctgtggacgatgctgcttccggggaggaggacgacgagggcgagagcaaggagcagaaggccaagaagcggcagaggcaacagaagcagcggcagctgctgggccgcctgcaggacctgctactgggcccgaaggctgatgagcagaccacgtgtgaggtgctggactacttcttgcggcgcctcggctcctcccaggtggcctcccgcgtgctggccatgaagggtttgtcgctggtgctttcggagggcagcctgcgggacggggaggagaaggagccccccatggaggaggatgtgggggacacagatgtgctgcagggctatcagtggctgctgcgggacctgcctcgcctgcctctgttcgacagcgtcaggagcaccacagccctggccctgcagcaggcaatccacatggagactgatccccagaccatcagcgcctacctgatctacttgtcccagcacacgcctgtggaggagcaggcccagcacagcgacctggccctggacgtggcccggctggtcgtggagcgctccaccatcatgtcccacctcttctcgaagctctccccgagtgccgcgtcggacgccgtgctgagcgctctgttgtccatcttctcacgctacgtgaggcgcatgcggcagagcaaggagggcgaggaggtctacagctggtcggagtctcaggaccaggtcttcctacgctggagcagcggggagacagccaccatgcacatcctcgtggtccatgccatggtgatcctgctgacgctgggcccgcctcgagccgacgacagcgagttccaggcgctgctggacatctggtttccggaggagaagccactgcccaccgccttcctggtggacacatcggaggaggcgctgctgcttcctgactggctgaagctgcgcatgatccgttctgaggtgctccgcctggtggacgccgccctgcaggacctggagccgcagcagctgctgctgttcgtgcagtcgtttggcatccccgtgtccagcatgagcaaactcctccagttcctggaccaggcagtggcccacgacccccagactctggagcagaacatcatggacaagaattacatggcccacctggtggaggtccagcatgagcgcggcgcctccggaggccagactttccactccttgctcacagcctccctgccgccccgccgagacagcacagaggcacccaaaccaaagagcagcccagagcagcccataggccagggccggattcgggtggggacccagctccgggtgctgggccctgaggacgacctggctggcatgttcctccagattttcccgctcagcccggaccctcggtggcagagctccagtccccgccccgtggccctcgccctgcagcaggccctgggccaggagctggcccgcgtcgtccagggcagccccgaggtgccgggcatcacggtgcgtgtcctgcaggccctcgccaccctgctcagctccccacacggcggtgccctggtgatgtccatgcaccgtagccacttcctggcctgcccgctgctgcgccagctctgccagtaccagcgctgtgtgccacaggacaccggcttctcctcgctcttcctgaaggtgctcctgcagatgctgcagtggctggacagccctggcgtggagggcgggcccctgcgggcacagctcaggatgcttgccagccaggcctcagccgggcgcaggctcagtgatgtgcgaggggggctcctgcgcctggccgaggccctggccttccgtcaggacctggaggtggtcagctccaccgtccgtgccgtcatcgccaccctgaggtctggggagcagtgcagcgtggagccggacctgatcagcaaagtcctccaggggctgatcgaggtgaggtccccccacctggaggagctgctgactgcattcttctctgccactgcggatgctgcctccccgtttccagcctgtaagcccgttgtggtggtgagctccctgctgctgcaggaggaggagcccctggctggggggaagccgggtgcggacggtggcagcctggaggccgtgcggctggggccctcgtcaggcctcctagtggactggctggaaatgctggaccccgaggtggtcagcagctgccccgacctgcagctcaggctgctcttctcccggaggaagggcaaaggtcaggcccaggtgccctcgttccgtccctacctcctgaccctcttcacgcatcagtccagctggcccacactgcaccagtgcatccgagtcctgctgggcaagagccgggaacagaggttcgacccctctgcctctctggacttcctctgggcctgcatccatgttcctcgcatctggcaggggcgggaccagcgcaccccgcagaagcggcgggaggagctggtgctgcgggtccaggcccggagctcatcagcctggtggagctgatcctggccgaggcggagacgcggagccaggacggggacacagccgcctgcagcctcatccaggcccggctgcccctgctgctcagctgctgctgtggggacgatgagagtgtcaggaaggtgacggagcacctgtcaggctgcatccagcagtggggagacagcgtgctgggcaggcgctgccgagaccttctcctgcagctctacctacagcggccggagctgcgggtgcccgtgcctgaggtcctactgcacagcgaaggggctgccagcagcagcgtctgcaagctggacggactcatccaccgcttcatcacgctccttgcggacaccagcgactcccgggcgttggagaaccgaggggcggatgccagcatggcctgccggaagctggcggtggcgcacccgctgctgctgctcaggcacctgcccatgatcgcggcgctcctgcacggccgcacccacctcaacttccaggagttccggcagcagaaccacctgagctgcttcctgcacgtgctgggcctgctggagctgctgcagccgcacgtgttccgcagcgagcaccagggggcgctgtgggactgccttctgtccttcatccgcctgctgctgaattacaggaagtcctcccgccatctggctgccttcatcaacaagtttgtgcagttcatccataagtacattacctacaatgccccagcagccatctccttcctgcagaagcacgccgacccgctccacgacctgtccttcgacaacagtgacctggtgatgctgaaatccctccttgcagggctcagcctgcccagcagggacgacaggaccgaccgaggcctggacgaagagggcgaggaggagagctcagccggctccttgcccctggtcagcgtctccctgttcacccctctgaccgcggccgagatggccccctacatgaaacggctttcccggggccaaacggtggaggatctgctggaggttctgagtgacatagacgagatgtcccggcggagacccgagatcctgagcttcttctcgaccaacctgcagcggctgatgagctcggccgaggagtgttgccgcaacctcgccttcagcctggccctgcgctccatgcagaacagccccagcattgcagccgctttcctgcccacgttcatgtactgcctgggcagccaggactttgaggtggtgcagacggccctccggaacctgcctgagtacgctctcctgtgccaagagcacgcggctgtgctgctccaccgggccttcctggtgggcatgtacggccagatggaccccagcgcgcagatctccgaggccctgaggatcctgcatatggaggccgtgatgtgagcctgtggcagccgacccccctccaagccccggcccgtcccgtccccggggatcctcgaggcaaagcccaggaagcgtgggcgttgctggtctgtccgaggaggtgagggcgccgagccctgaggccaggcaggcccaggagcaatactccgagccctggggtggctccgggccggccgctggcatcaggggccgtccagcaagccctcattcaccttctgggccacagccctgccgcggagcggcggatccccccgggcatggcctgggctggttttgaatgaaacgacctgaactgtca

SEQ ID NO: 484289 - DNA, 530 bp, Homo sapiens
tctctctctctctctctctctctctctctctctgtctctctctctctctgtttcctgcaaataaaacactttattgcagagctgggcctcaccggcctcgccttggctcgtgccgaattcggcacgagccgaatcccacttggcaagtttgctgaggtagagcacgtggtgaacgccatcctctttctgctgagtgaccgaagtggcatgaccacgggttccactttgccggtggaagggggcttctgggcctgctgagctccctccacacacctcaagccccatgccgtgctcatcctacccccaatccctccaataaacctgattctgctgcccaaaaaaaaaagctgcaataaaaaaatagagagcgagagcgagagagacagagggagagagagacattgagcgagggagacacccacccataccgaggtcactttaaccgagctgttaagatgaacagcattgactctcagtcacaacacacctcccctcgggccgaatcctttatgcgattgttgttctctccg

SEQ ID NO: 484290 - DNA, 692 bp, Homo sapiens
  misc_feature (332)..(332): n is a, c, g, or t
ggaatgctgagtttcagttttgagcagaggtgaggcagaatccactgtagccttttgccctggtatttggggggatgaccagcccaggcgttgggtgttagtctgcatgagtttgtgagaggaaatagctgggtgtcctggcagtgcccttgaagttggttaggaccttcctgtaaactcttgcccctacttctaactactctataaatatatacatatatttatatataaagtgattagttgaactggcatcctgctttagcctgagacttgccataagaaactgctgagtacttggcaaaccctttcatagttttgttctccatctgttnggggtaggtgttgagcgaggcaaatggatcttgatatttcagatgggcttttgatgcactgttgccaatgaaggctttttctgattttttgacaaatgaatttttgcacactttcattggggtcttgtggcaacttacacacattgtgagctattggacataattgtatatcctccttataaatgcattgctgattgaacttgtaacaatattgtaatgaacggttggcagtaggcccaacgctgattggtttgtaggaggaatagctaccagaacccttaacatactgggaattttttcttgacaacaatttagatttggcaaattactcttccgtcattatttagagctttttttttt

SEQ ID NO: 484291 - DNA, 4847 bp, Homo sapiens
aacgagctgcaactcaggggcgagctgccgtgcaggcggatgatgtggaggtgctgaaggtggggaggacccagctgatcgacgccgttctgaatctgtgcacctaccatcaccctgaaaacatccagctcccaccggggtaccagcctccgaacctcgccatctctaccctctactggaaggcctggcccctcctgctggtcgtcgccgcattcaacccagagaacatcggcctggctgcgtgggaggagtacccgaccctgaagatgctcatggagatggtgatgaccaacaactactcctacccaccgtgcaccctgacggatgaggagacccggacggagatgctgaaccgtgagctgcagaccgcccagcgggagaagcaggagatcctggccttcgaggggcacctggcggccgcgtccaccaagcagaccatcactgagagcagcagcctcctcctgtcgcagctcaccagcctggacccccaggggcccccccggaggcctccccctcacatcctggatcaagtgaaaagcctcaaccagtccctccgcctcgggcacctcttgtgccgcagccgaaaccctgactttctcctccacatcatccagcggcaggcctcctcgcagtccatgccctggctggcggacctggtacagtccagcgagggctccctggacgtgctgcccgtgcagtgtctgtgcgagttcctgctgcacgatgctgtggacgatgctgcttccggggaggaggacgacgagggcgagagcaaggagcagaaggccaagaagcggcagaggcaacagaagcagcggcagctgctgggccgcctgcaggacctgctactgggcccgaaggctgatgagcagaccacgtgtgaggtgctggactacttcttgcggcgcctcggctcctcccaggtggcctcccgcgtgctggccatgaagggtttgtcgctggtgctttcggagggcagcctgcgggacggggaggagaaggagccccccatggaggaggatgtgggggacacagatgtgctgcagggctatcagtggctgctgcgggacctgcctcgcctgcctctgttcgacagcgtcaggagcaccacagccctggccctgcagcaggcaatccacatggagactgatccccagaccatcagcgcctacctgatctacttgtcccagcacacgcctgtggaggagcaggcccagcacagcgacctggccctggacgtggcccggctggtcgtggagcgctccaccatcatgtcccacctcttctcgaagctctccccgagtgccgcgtcggacgccgtgctgagcgctctgttgtccatcttctcacgctacgtgaggcgcatgcggcagagcaaggagggcgaggaggtctacagctggtcggagtctcaggaccaggtcttcctacgctggagcagcggggagacagccaccatgcacatcctcgtggtccatgccatggtgatcctgctgacgctgggcccgcctcgagccgacgacagcgagttccaggcgctgctggacatctggtttccggaggagaagccactgcccaccgccttcctggtggacacatcggaggaggcgctgctgcttcctgactggctgaagctgcgcatgatccgttctgaggtgctccgcctggtggacgccgccctgcaggacctggagccgcagcagctgctgctgttcgtgcagtcgtttggcatccccgtgtccagcatgagcaaactcctccagttcctggaccaggcagtggcccacgacccccagactctggagcagaacatcatggacaagaattacatggcccacctggtggaggtccagcatgagcgcggcgcctccggaggccagactttccactccttgctcacagcctccctgccgccccgccgagacagcacagaggcacccaaaccaaagagcagcccagagcagcccataggccagggccggattcgggtggggacccagctccgggtgctgggccctgaggacgacctggctggcatgttcctccagattttcccgctcagcccggaccctcggtggcagagctccagtccccgccccgtggccctcgccctgcagcaggccctgggccaggagctggcccgcgtcgtccagggcagccccgaggtgccgggcatcacggtgcgtgtcctgcaggccctcgccaccctgctcagctccccacacggcggtgccctggtgatgtccatgcaccgtagccacttcctggcctgcccgctgctgcgccagctctgccagtaccagcgctgtgtgccacaggacaccggcttctcctcgctcttcctgaaggtgctcctgcagatgctgcagtggctggacagccctggcgtggagggcgggcccctgcgggcacagctcaggatgcttgccagccaggcctcagccgggcgcaggctcagtgatgtgcgaggggggctcctgcgcctggccgaggccctggccttccgtcaggacctggaggtggtcagctccaccgtccgtgccgtcatcgccaccctgaggtctggggagcagtgcagcgtggagccggacctgatcagcaaagtcctccaggggctgatcgaggtgaggtccccccacctggaggagctgctgactgcattcttctctgccactgcggatgctgcctccccgtttccagcctgtaagcccgttgtggtggtgagctccctgctgctgcaggaggaggagcccctggctggggggaagccgggtgcggacggtggcagcctggaggccgtgcggctggggccctcgtcaggcctcctagtggactggctggaaatgctggaccccgaggtggtcagcagctgccccgacctgcagctcaggctgctcttctcccggaggaagggcaaaggtcaggcccaggtgccctcgttccgtccctacctcctgaccctcttcacgcatcagtccagctggcccacactgcaccagtgcatccgagtcctgctgggcaagagccgggaacagaggttcgacccctctgcctctctggacttcctctgggcctgcatccatgttcctcgcatctggcaggggcgggaccagcgcaccccgcagaagcggcgggaggagctggtgctgcgggtccaggcccggagctcatcagcctggtggagctgatcctggccgaggcggagacgcggagccaggacggggacacagccgcctgcagcctcatccaggcccggctgcccctgctgctcagctgctgctgtggggacgatgagagtgtcaggaaggtgacggagcacctgtcaggctgcatccagcagtggggagacagcgtgctgggcaggcgctgccgagaccttctcctgcagctctacctacagcggccggagctgcgggtgcccgtgcctgaggtcctactgcacagcgaaggggctgccagcagcagcgtctgcaagctggacggactcatccaccgcttcatcacgctccttgcggacaccagcgactcccgggcgttggagaaccgaggggcggatgccagcatggcctgccggaagctggcggtggcgcacccgctgctgctgctcaggcacctgcccatgatcgcggcgctcctgcacggccgcacccacctcaacttccaggagttccggcagcagaaccacctgagctgcttcctgcacgtgctgggcctgctggagctgctgcagccgcacgtgttccgcagcgagcaccagggggcgctgtgggactgccttctgtccttcatccgcctgctgctgaattacaggaagtcctcccgccatctggctgccttcatcaacaagtttgtgcagttcatccataagtacattacctacaatgccccagcagccatctccttcctgcagaagcacgccgacccgctccacgacctgtccttcgacaacagtgacctggtgatgctgaaatccctccttgcagggctcagcctgcccagcagggacgacaggaccgaccgaggcctggacgaagagggcgaggaggagagctcagccggctccttgcccctggtcagcgtctccctgttcacccctctgaccgcggccgagatggccccctacatgaaacggctttcccggggccaaacggtggaggatctgctggaggttctgagtgacatagacgagatgtcccggcggagacccgagatcctgagcttcttctcgaccaacctgcagcggctgatgagctcggccgaggagtgttgccgcaacctcgccttcagcctggccctgcgctccatgcagaacagccccagcattgcagccgctttcctgcccacgttcatgtactgcctgggcagccaggactttgaggtggtgcagacggccctccggaacctgcctgagtacgctctcctgtgccaagagcacgcggctgtgctgctccaccgggccttcctggtgggcatgtacggccagatggaccccagcgcgcagatctccgaggccctgaggatcctgcatatggaggccgtgatgtgagcctgtggcagccgacccccctccaagccccggcccgtcccgtccccggggatcctcgaggcaaagcccaggaagcgtgggcgttgctggtctgtccgaggaggtgagggcgccgagccctgaggccaggcaggcccaggagcaatactccgagccctggggtggctccgggccggccgctggcatcaggggccgtccagcaagccctcattcaccttctgggccacagccctgccgcggagcggcggatccccccgggcatggcctgggctggttttgaatgaaacgacctgaactgtca

SEQ ID NO: 484292 - DNA, 252 bp, Homo sapiens
  misc_feature (6)..(7): n is a, c, g, or t
  misc_feature (9)..(9): n is a, c, g, or t
  misc_feature (98)..(98): n is a, c, g, or t
  misc_feature (113)..(113): n is a, c, g, or t
  misc_feature (148)..(148): n is a, c, g, or t
  misc_feature (155)..(155): n is a, c, g, or t
  misc_feature (180)..(180): n is a, c, g, or t
  misc_feature (209)..(209): n is a, c, g, or t
gcctgnncngacacgaagatgaccctcgacagccgccgggcgctgatcaccagggaaggcaaaggcataggccagcaccgatgaattccctttgaccnaagtctgcagcaggncccttttgcgcttccttcccctcaggcagcctctntcccccngggccactcccgggggcgagggggntacccctttcccaggctttttattcccgnggggctcaccccaaagcattaaaagcagctttgcaattccttg

SEQ ID NO: 484293 - DNA, 4699 bp, Homo sapiens
  misc_feature (20)..(20): n is a, c, g, or t
  misc_feature (26)..(26): n is a, c, g, or t
  misc_feature (40)..(41): n is a, c, g, or t
aacttacggctagtagagcngggtgntaatcggccgaggnnccctcctgctggtcgtcgccgcattcaacccagagaacatcggcctggctgcgtgggaggagtacccgaccctgaagatgctcatggagatggtgatgaccaacaactactcctacccaccgtgcaccctgacggatgaggagacccggacggagatgctgaaccgtgagctgcagaccgcccagcgggagaagcaggagatcctggccttcgaggggcacctggcggccgcgtccaccaagcagaccatcactgagagcagcagcctcctcctgtcgcagctcaccagcctggacccccaggggcccccccggaggcctccccctcacatcctggatcaagtgaaaagcctcaaccagtccctccgcctcgggcacctcttgtgccgcagccgaaaccctgactttctcctccacatcatccagcggcaggcctcctcgcagtccatgccctggctggcggacctggtacagtccagcgagggctccctggacgtgctgcccgtgcagtgtctgtgcgagttcctgctgcacgatgctgtggacgatgctgcttccggggaggaggacgacgagggcgagagcaaggagcagaaggccaagaagcggcagaggcaacagaagcagcggcagctgctgggccgcctgcaggacctgctactgggcccgaaggctgatgagcagaccacgtgtgaggtgctggactacttcttgcggcgcctcggctcctcccaggtggcctcccgcgtgctggccatgaagggtttgtcgctggtgctttcggagggcagcctgcgggacggggaggagaaggagccccccatggaggaggatgtgggggacacagatgtgctgcagggctatcagtggctgctgcgggacctgcctcgcctgcctctgttcgacagcgtcaggagcaccacagccctggccctgcagcaggcaatccacatggagactgatccccagaccatcagcgcctacctgatctacttgtcccagcacacgcctgtggaggagcaggcccagcacagcgacctggccctggacgtggcccggctggtcgtggagcgctccaccatcatgtcccacctcttctcgaagctctccccgagtgccgcgtcggacgccgtgctgagcgctctgttgtccatcttctcacgctacgtgaggcgcatgcggcagagcaaggagggcgaggaggtctacagctggtcggagtctcaggaccaggtcttcctacgctggagcagcggggagacagccaccatgcacatcctcgtggtccatgccatggtgatcctgctgacgctgggcccgcctcgagccgacgacagcgagttccaggcgctgctggacatctggtttccggaggagaagccactgcccaccgccttcctggtggacacatcggaggaggcgctgctgcttcctgactggctgaagctgcgcatgatccgttctgaggtgctccgcctggtggacgccgccctgcaggacctggagccgcagcagctgctgctgttcgtgcagtcgtttggcatccccgtgtccagcatgagcaaactcctccagttcctggaccaggcagtggcccacgacccccagactctggagcagaacatcatggacaagaattacatggcccacctggtggaggtccagcatgagcgcggcgcctccggaggccagactttccactccttgctcacagcctccctgccgccccgccgagacagcacagaggcacccaaaccaaagagcagcccagagcagcccataggccagggccggattcgggtggggacccagctccgggtgctgggccctgaggacgacctggctggcatgttcctccagattttcccgctcagcccggaccctcggtggcagagctccagtccccgccccgtggccctcgccctgcagcaggccctgggccaggagctggcccgcgtcgtccagggcagccccgaggtgccgggcatcacggtgcgtgtcctgcaggccctcgccaccctgctcagctccccacacggcggtgccctggtgatgtccatgcaccgtagccacttcctggcctgcccgctgctgcgccagctctgccagtaccagcgctgtgtgccacaggacaccggcttctcctcgctcttcctgaaggtgctcctgcagatgctgcagtggctggacagccctggcgtggagggcgggcccctgcgggcacagctcaggatgcttgccagccaggcctcagccgggcgcaggctcagtgatgtgcgaggggggctcctgcgcctggccgaggccctggccttccgtcaggacctggaggtggtcagctccaccgtccgtgccgtcatcgccaccctgaggtctggggagcagtgcagcgtggagccggacctgatcagcaaagtcctccaggggctgatcgaggtgaggtccccccacctggaggagctgctgactgcattcttctctgccactgcggatgctgcctccccgtttccagcctgtaagcccgttgtggtggtgagctccctgctgctgcaggaggaggagcccctggctggggggaagccgggtgcggacggtggcagcctggaggccgtgcggctggggccctcgtcaggcctcctagtggactggctggaaatgctggaccccgaggtggtcagcagctgccccgacctgcagctcaggctgctcttctcccggaggaagggcaaaggtcaggcccaggtgccctcgttccgtccctacctcctgaccctcttcacgcatcagtccagctggcccacactgcaccagtgcatccgagtcctgctgggcaagagccgggaacagaggttcgacccctctgcctctctggacttcctctgggcctgcatccatgttcctcgcatctggcaggggcgggaccagcgcaccccgcagaagcggcgggaggagctggtgctgcgggtccaggcccggagctcatcagcctggtggagctgatcctggccgaggcggagacgcggagccaggacggggacacagccgcctgcagcctcatccaggcccggctgcccctgctgctcagctgctgctgtggggacgatgagagtgtcaggaaggtgacggagcacctgtcaggctgcatccagcagtggggagacagcgtgctgggcaggcgctgccgagaccttctcctgcagctctacctacagcggccggagctgcgggtgcccgtgcctgaggtcctactgcacagcgaaggggctgccagcagcagcgtctgcaagctggacggactcatccaccgcttcatcacgctccttgcggacaccagcgactcccgggcgttggagaaccgaggggcggatgccagcatggcctgccggaagctggcggtggcgcacccgctgctgctgctcaggcacctgcccatgatcgcggcgctcctgcacggccgcacccacctcaacttccaggagttccggcagcagaaccacctgagctgcttcctgcacgtgctgggcctgctggagctgctgcagccgcacgtgttccgcagcgagcaccagggggcgctgtgggactgccttctgtccttcatccgcctgctgctgaattacaggaagtcctcccgccatctggctgccttcatcaacaagtttgtgcagttcatccataagtacattacctacaatgccccagcagccatctccttcctgcagaagcacgccgacccgctccacgacctgtccttcgacaacagtgacctggtgatgctgaaatccctccttgcagggctcagcctgcccagcagggacgacaggaccgaccgaggcctggacgaagagggcgaggaggagagctcagccggctccttgcccctggtcagcgtctccctgttcacccctctgaccgcggccgagatggccccctacatgaaacggctttcccggggccaaacggtggaggatctgctggaggttctgagtgacatagacgagatgtcccggcggagacccgagatcctgagcttcttctcgaccaacctgcagcggctgatgagctcggccgaggagtgttgccgcaacctcgccttcagcctggccctgcgctccatgcagaacagccccagcattgcagccgctttcctgcccacgttcatgtactgcctgggcagccaggactttgaggtggtgcagacggccctccggaacctgcctgagtacgctctcctgtgccaagagcacgcggctgtgctgctccaccgggccttcctggtgggcatgtacggccagatggaccccagcgcgcagatctccgaggccctgaggatcctgcatatggaggccgtgatgtgagcctgtggcagccgacccccctccaagccccggcccgtcccgtccccggggatcctcgaggcaaagcccaggaagcgtgggcgttgctggtctgtccgaggaggtgagggcgccgagccctgaggccaggcaggcccaggagcaatactccgagccctggggtggctccgggccggccgctggcatcaggggccgtccagcaagccctcattcaccttctgggccacagccctgccgcggagcggcggatccccccgggcatggcctgggctggttttgaatgaaacgacctgaactgtca

SEQ ID NO: 484294 - DNA, 1308 bp, Homo sapiens
  misc_feature (16)..(16): n is a, c, g, or t
  misc_feature (948)..(949): n is a, c, g, or t
  misc_feature (952)..(952): n is a, c, g, or t
  misc_feature (956)..(956): n is a, c, g, or t
  misc_feature (959)..(960): n is a, c, g, or t
  misc_feature (970)..(970): n is a, c, g, or t
  misc_feature (978)..(978): n is a, c, g, or t
  misc_feature (981)..(981): n is a, c, g, or t
  misc_feature (985)..(986): n is a, c, g, or t
  misc_feature (997)..(998): n is a, c, g, or t
  misc_feature (1022)..(1022): n is a, c, g, or t
  misc_feature (1025)..(1025): n is a, c, g, or t
  misc_feature (1036)..(1036): n is a, c, g, or t
  misc_feature (1044)..(1045): n is a, c, g, or t
  misc_feature (1053)..(1053): n is a, c, g, or t
  misc_feature (1056)..(1056): n is a, c, g, or t
  misc_feature (1065)..(1065): n is a, c, g, or t
  misc_feature (1074)..(1074): n is a, c, g, or t
  misc_feature (1076)..(1077): n is a, c, g, or t
  misc_feature (1079)..(1082): n is a, c, g, or t
  misc_feature (1089)..(1089): n is a, c, g, or t
  misc_feature (1093)..(1093): n is a, c, g, or t
  misc_feature (1102)..(1103): n is a, c, g, or t
  misc_feature (1105)..(1105): n is a, c, g, or t
  misc_feature (1107)..(1107): n is a, c, g, or t
  misc_feature (1110)..(1110): n is a, c, g, or t
  misc_feature (1112)..(1112): n is a, c, g, or t
  misc_feature (1114)..(1114): n is a, c, g, or t
  misc_feature (1119)..(1119): n is a, c, g, or t
atagcatagtagagcngggagactgcgccgacatggagctgttcctcgcgggccgccgggtgctggtcaccggggcaggcaaaggtatagggcgcggcacggtccaggcgctgcacgcgacgggcgcgcgggtggtggctgtgagccggactcaggcggatcttgacagccttgtccgcgagtgcccggggatagaacccgtgtgcgtggacctgggtgactgggaggccaccgagcgggcgctgggcagcgtgggccccgtggacctgctggtgaacaacgccgctgtcgccctgctgcagcccttcctggaggtcaccaaggaggcctttgacagatcctttgaggtgaacctgcgtgcggtcatccaggtgtcgcagattgtggccaggggcttaatagcccggggagtcccaggggccatcgtgaatgtctccagccagtgctcccagcgggcagtaactaaccatagcgtctactgctccaccaagggtgccctggacatgctgaccaaggtgatggccctagagctcgggccccacaagatccgagtgaatgcagtaaaccccacagtggtgatgacgtccatgggccaggccacctggagtgacccccacaaggccaagactatgctgaaccgaatcccacttggcaagtttgctgaggtagagcacgtggtgaacgccatcctctttctgctgagtgaccgaagtggcatgaccacgggttccactttgccggtggaagggggcttctgggcctgctgagctccctccacacacctcaagccccatgccgtgctcatcctacccccaatccctccaataaacctgattctgctgcccaaaaaaaaaaaaaaaaaaaaaaaaacaaaaaaaaaaaaaaaaaaaaaaaaaaaaaaaaaaaaaaaaaaaaaacaaaaaaaaaaaaaaaaaaaaaaaaaaaaanntgntggnccnnttggcccaanggcttttnaanttgnnaaagtttatcnngcggcccaatttggggccattggncanattgccctaangggggggnnttaaaatncangggcccggntttaaaacngnngnnnngggaaancccnggggttccnnantnaancngnttggngaaaaaacccctttttccaacgggggctatatccgaaaaggccccacaccaaggccctttccaaaaatgtcgccccccaaagggcaagggaaattggcgccctaaatttttggaaaaacccccggtaaattttggaaaaccacctctttttaaccaaagggccaaatcgggaaaccccctttaaccaaa

SEQ ID NO: 484295 - DNA, 4753 bp, Homo sapiens
aactcaggggcgagctgcgacaggaggaggctgctgctctcagtgatggtctgcttggtggacgcggccgccaggtgcccctcgaaggccaggatccctcctgctggtcgtcgccgcattcaacccagagaacatcggcctggctgcgtgggaggagtacccgaccctgaagatgctcatggagatggtgatgaccaacaactactcctacccaccgtgcaccctgacggatgaggagacccggacggagatgctgaaccgtgagctgcagaccgcccagcgggagaagcaggagatcctggccttcgaggggcacctggcggccgcgtccaccaagcagaccatcactgagagcagcagcctcctcctgtcgcagctcaccagcctggacccccaggggcccccccggaggcctccccctcacatcctggatcaagtgaaaagcctcaaccagtccctccgcctcgggcacctcttgtgccgcagccgaaaccctgactttctcctccacatcatccagcggcaggcctcctcgcagtccatgccctggctggcggacctggtacagtccagcgagggctccctggacgtgctgcccgtgcagtgtctgtgcgagttcctgctgcacgatgctgtggacgatgctgcttccggggaggaggacgacgagggcgagagcaaggagcagaaggccaagaagcggcagaggcaacagaagcagcggcagctgctgggccgcctgcaggacctgctactgggcccgaaggctgatgagcagaccacgtgtgaggtgctggactacttcttgcggcgcctcggctcctcccaggtggcctcccgcgtgctggccatgaagggtttgtcgctggtgctttcggagggcagcctgcgggacggggaggagaaggagccccccatggaggaggatgtgggggacacagatgtgctgcagggctatcagtggctgctgcgggacctgcctcgcctgcctctgttcgacagcgtcaggagcaccacagccctggccctgcagcaggcaatccacatggagactgatccccagaccatcagcgcctacctgatctacttgtcccagcacacgcctgtggaggagcaggcccagcacagcgacctggccctggacgtggcccggctggtcgtggagcgctccaccatcatgtcccacctcttctcgaagctctccccgagtgccgcgtcggacgccgtgctgagcgctctgttgtccatcttctcacgctacgtgaggcgcatgcggcagagcaaggagggcgaggaggtctacagctggtcggagtctcaggaccaggtcttcctacgctggagcagcggggagacagccaccatgcacatcctcgtggtccatgccatggtgatcctgctgacgctgggcccgcctcgagccgacgacagcgagttccaggcgctgctggacatctggtttccggaggagaagccactgcccaccgccttcctggtggacacatcggaggaggcgctgctgcttcctgactggctgaagctgcgcatgatccgttctgaggtgctccgcctggtggacgccgccctgcaggacctggagccgcagcagctgctgctgttcgtgcagtcgtttggcatccccgtgtccagcatgagcaaactcctccagttcctggaccaggcagtggcccacgacccccagactctggagcagaacatcatggacaagaattacatggcccacctggtggaggtccagcatgagcgcggcgcctccggaggccagactttccactccttgctcacagcctccctgccgccccgccgagacagcacagaggcacccaaaccaaagagcagcccagagcagcccataggccagggccggattcgggtggggacccagctccgggtgctgggccctgaggacgacctggctggcatgttcctccagattttcccgctcagcccggaccctcggtggcagagctccagtccccgccccgtggccctcgccctgcagcaggccctgggccaggagctggcccgcgtcgtccagggcagccccgaggtgccgggcatcacggtgcgtgtcctgcaggccctcgccaccctgctcagctccccacacggcggtgccctggtgatgtccatgcaccgtagccacttcctggcctgcccgctgctgcgccagctctgccagtaccagcgctgtgtgccacaggacaccggcttctcctcgctcttcctgaaggtgctcctgcagatgctgcagtggctggacagccctggcgtggagggcgggcccctgcgggcacagctcaggatgcttgccagccaggcctcagccgggcgcaggctcagtgatgtgcgaggggggctcctgcgcctggccgaggccctggccttccgtcaggacctggaggtggtcagctccaccgtccgtgccgtcatcgccaccctgaggtctggggagcagtgcagcgtggagccggacctgatcagcaaagtcctccaggggctgatcgaggtgaggtccccccacctggaggagctgctgactgcattcttctctgccactgcggatgctgcctccccgtttccagcctgtaagcccgttgtggtggtgagctccctgctgctgcaggaggaggagcccctggctggggggaagccgggtgcggacggtggcagcctggaggccgtgcggctggggccctcgtcaggcctcctagtggactggctggaaatgctggaccccgaggtggtcagcagctgccccgacctgcagctcaggctgctcttctcccggaggaagggcaaaggtcaggcccaggtgccctcgttccgtccctacctcctgaccctcttcacgcatcagtccagctggcccacactgcaccagtgcatccgagtcctgctgggcaagagccgggaacagaggttcgacccctctgcctctctggacttcctctgggcctgcatccatgttcctcgcatctggcaggggcgggaccagcgcaccccgcagaagcggcgggaggagctggtgctgcgggtccaggcccggagctcatcagcctggtggagctgatcctggccgaggcggagacgcggagccaggacggggacacagccgcctgcagcctcatccaggcccggctgcccctgctgctcagctgctgctgtggggacgatgagagtgtcaggaaggtgacggagcacctgtcaggctgcatccagcagtggggagacagcgtgctgggcaggcgctgccgagaccttctcctgcagctctacctacagcggccggagctgcgggtgcccgtgcctgaggtcctactgcacagcgaaggggctgccagcagcagcgtctgcaagctggacggactcatccaccgcttcatcacgctccttgcggacaccagcgactcccgggcgttggagaaccgaggggcggatgccagcatggcctgccggaagctggcggtggcgcacccgctgctgctgctcaggcacctgcccatgatcgcggcgctcctgcacggccgcacccacctcaacttccaggagttccggcagcagaaccacctgagctgcttcctgcacgtgctgggcctgctggagctgctgcagccgcacgtgttccgcagcgagcaccagggggcgctgtgggactgccttctgtccttcatccgcctgctgctgaattacaggaagtcctcccgccatctggctgccttcatcaacaagtttgtgcagttcatccataagtacattacctacaatgccccagcagccatctccttcctgcagaagcacgccgacccgctccacgacctgtccttcgacaacagtgacctggtgatgctgaaatccctccttgcagggctcagcctgcccagcagggacgacaggaccgaccgaggcctggacgaagagggcgaggaggagagctcagccggctccttgcccctggtcagcgtctccctgttcacccctctgaccgcggccgagatggccccctacatgaaacggctttcccggggccaaacggtggaggatctgctggaggttctgagtgacatagacgagatgtcccggcggagacccgagatcctgagcttcttctcgaccaacctgcagcggctgatgagctcggccgaggagtgttgccgcaacctcgccttcagcctggccctgcgctccatgcagaacagccccagcattgcagccgctttcctgcccacgttcatgtactgcctgggcagccaggactttgaggtggtgcagacggccctccggaacctgcctgagtacgctctcctgtgccaagagcacgcggctgtgctgctccaccgggccttcctggtgggcatgtacggccagatggaccccagcgcgcagatctccgaggccctgaggatcctgcatatggaggccgtgatgtgagcctgtggcagccgacccccctccaagccccggcccgtcccgtccccggggatcctcgaggcaaagcccaggaagcgtgggcgttgctggtctgtccgaggaggtgagggcgccgagccctgaggccaggcaggcccaggagcaatactccgagccctggggtggctccgggccggccgctggcatcaggggccgtccagcaagccctcattcaccttctgggccacagccctgccgcggagcggcggatccccccgggcatggcctgggctggttttgaatgaaacgacctgaactgtca

SEQ ID NO: 484296 - DNA, 1213 bp, Homo sapiens
  misc_feature (16)..(16): n is a, c, g, or t
  misc_feature (965)..(965): n is a, c, g, or t
  misc_feature (1010)..(1010): n is a, c, g, or t
atagcatagtagagcngggagactgcgccgacatggagctgttcctcgcgggccgccgggtgctggtcaccggggcaggcaaaggtatagggcgcggcacggtccaggcgctgcacgcgacgggcgcgcgggtggtggctgtgagccggactcaggcggatcttgacagccttgtccgcgagtgcccggggatagaacccgtgtgcgtggacctgggtgactgggaggccaccgagcgggcgctgggcagcgtgggccccgtggacctgctggtgaacaacgccgctgtcgccctgctgcagcccttcctggaggtcaccaaggaggcctttgacagatcctttgaggtgaacctgcgtgcggtcatccaggtgtcgcagattgtggccaggggcttaatagcccggggagtcccaggggccatcgtgaatgtctccagccagtgctcccagcgggcagtaactaaccatagcgtctactgctccaccaagggtgccctggacatgctgaccaaggtgatggccctagagctcgggccccacaagatccgagtgaatgcagtaaaccccacagtggtgatgacgtccatgggccaggccacctggagtgacccccacaaggccaagactatgctgaaccgaatcccacttggcaagtttgctgaggtagagcacgtggtgaacgccatcctctttctgctgagtgaccgaagtggcatgaccacgggttccactttgccggtggaagggggcttctgggcctgctgagctccctccacacacctcaagccccatgccgtgctcatcctacccccaatccctccaataaacctgattctgctgcccaaaaaaaaaaaaaaaaaaaaaaaaacaaaaaaaaaaaaaaaaaaaaaaaaaaaaaaaaaaaaaaaaaaaaaacaaaaaaaacccaaaacccctaaacaccaaaaaaccaaaaaaacttancccacaacccaacttcacagcccctttccccattttaccctattnaaatccattttcacatcacacttttcttacaatttcaaaattttacaaatacctaaaaacttcccattttcacaaatttattgcacctaacccccttttcccctttttgcaaatatccccaattaccaactaccccttccccttttccaaatttctaaacattccaaaactccaaacgatattgggaacctgctaactctttg

SEQ ID NO: 484297 - DNA, 265 bp, Homo sapiens
ttttatgccgacccaaggaatttagtgggtttgtcattggcccttttcccccaaaaataattttttcccaaagctaagataaatggaagactcttgaacctgtgaactgatgtgaaatgcagaatctcttttgagtttttgctgtttggaagatttaaaaatattgttcagcatgggtggccccccaaaagtaatttttagccctttagatgtccccatttaaaccaactggggagttgggtgctattgttaaataaaatatact

SEQ ID NO: 484298 - DNA, 4771 bp, Homo sapiens
  misc_feature (5)..(5): n is a, c, g, or t
tggangaaaacttaatcgaaacctggtcatcgggctgtccgggagctccggctcgggctgcggacgccatggagcttgctgaccacctggtgaagcgggcggctgccgtgcaggcggatgatgtggaggtgctgaaggtggggaggacccagctgatcgacgccgttctgaatctgtgcacctaccatcaccctgaaaacatccagctcccaccggggtaccagcctccgaacctcgccatctctaccctctactggaaggcctggcccctcctgctggtcgtcgccgcattcaacccagagaacatcggcctggctgcgtgggaggagtacccgaccctgaagatgctcatggagatggtgatgaccaacaactactcctacccaccgtgcaccctgacggatgaggagacccggacggagatgctgaaccgtgagctgcagaccgcccagcgggagaagcaggagatcctggccttcgaggggcacctggcggccgcgtccaccaagcagaccatcactgagagcagcagcctcctcctgtcgcagctcaccagcctggacccccaggggcccccccggaggcctccccctcacatcctggatcaagtgaaaagcctcaaccagtccctccgcctcgggcacctcttgtgccgcagccgaaaccctgactttctcctccacatcatccagcggcaggcctcctcgcagtccatgccctggctggcggacctggtacagtccagcgagggctccctggacgtgctgcccgtgcagtgtctgtgcgagttcctgctgcacgatgctgtggacgatgctgcttccggggaggaggacgacgagggcgagagcaaggagcagaaggccaagaagcggcagaggcaacagaagcagcggcagctgctgggccgcctgcaggacctgctactgggcccgaaggctgatgagcagaccacgtgtgaggtgctggactacttcttgcggcgcctcggctcctcccaggtggcctcccgcgtgctggccatgaagggtttgtcgctggtgctttcggagggcagcctgcgggacggggaggagaaggagccccccatggaggaggatgtgggggacacagatgtgctgcagggctatcagtggctgctgcgggacctgcctcgcctgcctctgttcgacagcgtcaggagcaccacagccctggccctgcagcaggcaatccacatggagactgatccccagaccatcagcgcctacctgatctacttgtcccagcacacgcctgtggaggagcaggcccagcacagcgacctggccctggacgtggcccggctggtcgtggagcgctccaccatcatgtcccacctcttctcgaagctctccccgagtgccgcgtcggacgccgtgctgagcgctctgttgtccatcttctcacgctacgtgaggcgcatgcggcagagcaaggagggcgaggaggtctacagctggtcggagtctcaggaccaggtcttcctacgctggagcagcggggagacagccaccatgcacatcctcgtggtccatgccatggtgatcctgctgacgctgggcccgcctcgagccgacgacagcgagttccaggcgctgctggacatctggtttccggaggagaagccactgcccaccgccttcctggtggacacatcggaggaggcgctgctgcttcctgactggctgaagctgcgcatgatccgttctgaggtgctccgcctggtggacgccgccctgcaggacctggagccgcagcagctgctgctgttcgtgcagtcgtttggcatccccgtgtccagcatgagcaaactcctccagttcctggaccaggcagtggcccacgacccccagactctggagcagaacatcatggacaagaattacatggcccacctggtggaggtccagcatgagcgcggcgcctccggaggccagactttccactccttgctcacagcctccctgccgccccgccgagacagcacagaggcacccaaaccaaagagcagcccagagcagcccataggccagggccggattcgggtggggacccagctccgggtgctgggccctgaggacgacctggctggcatgttcctccagattttcccgctcagcccggaccctcggtggcagagctccagtccccgccccgtggccctcgccctgcagcaggccctgggccaggagctggcccgcgtcgtccagggcagccccgaggtgccgggcatcacggtgcgtgtcctgcaggccctcgccaccctgctcagctccccacacggcggtgccctggtgatgtccatgcaccgtagccacttcctggcctgcccgctgctgcgccagctctgccagtaccagcgctgtgtgccacaggacaccggcttctcctcgctcttcctgaaggtgctcctgcagatgctgcagtggctggacagccctggcgtggagggcgggcccctgcgggcacagctcaggatgcttgccagccaggcctcagccgggcgcaggctcagtgatgtgcgaggggggctcctgcgcctggccgaggccctggccttccgtcaggacctggaggtggtcagctccaccgtccgtttccagcctgtaagcccgttgtggtggtgagctccctgctgctgcaggaggaggagcccctggctggggggaagccgggtgcggacggtggcagcctggaggccgtgcggctggggccctcgtcaggcctcctagtggactggctggaaatgctggaccccgaggtggtcagcagctgccccgacctgcagctcaggctgctcttctcccggaggaagggcaaaggtcaggcccaggtgccctcgttccgtccctacctcctgaccctcttcacgcatcagtccagctggcccacactgcaccagtgcatccgagtcctgctgggcaagagccgggaacagaggttcgacccctctgcctctctggacttcctctgggcctgcatccatgttcctcgcatctggcaggggcgggaccagcgcaccccgcagaagcggcgggaggagctggtgctgcgggtccaggcccggagctcatcagcctggtggagctgatcctggccgaggcggagacgcggagccaggacggggacacagccgcctgcagcctcatccaggcccggctgcccctgctgctcagctgctgctgtggggacgatgagagtgtcaggaaggtgacggagcacctgtcaggctgcatccagcagtggggagacagcgtgctgggcaggcgctgccgagaccttctcctgcagctctacctacagcggccggagctgcgggtgcccgtgcctgaggtcctactgcacagcgaaggggctgccagcagcagcgtctgcaagctggacggactcatccaccgcttcatcacgctccttgcggacaccagcgactcccgggcgttggagaaccgaggggcggatgccagcatggcctgccggaagctggcggtggcgcacccgctgctgctgctcaggcacctgcccatgatcgcggcgctcctgcacggccgcacccacctcaacttccaggagttccggcagcagaaccacctgagctgcttcctgcacgtgctgggcctgctggagctgctgcagccgcacgtgttccgcagcgagcaccagggggcgctgtgggactgccttctgtccttcatccgcctgctgctgaattacaggaagtcctcccgccatctggctgccttcatcaacaagtttgtgcagttcatccataagtacattacctacaatgccccagcagccatctccttcctgcagaagcacgccgacccgctccacgacctgtccttcgacaacagtgacctggtgatgctgaaatccctccttgcagggctcagcctgcccagcagggacgacaggaccgaccgaggcctggacgaagagggcgaggaggagagctcagccggctccttgcccctggtcagcgtctccctgttcacccctctgaccgcggccgagatggccccctacatgaaacggctttcccggggccaaacggtggaggatctgctggaggttctgagtgacatagacgagatgtcccggcggagacccgagatcctgagcttcttctcgaccaacctgcagcggctgatgagctcggccgaggagtgttgccgcaacctcgccttcagcctggccctgcgctccatgcagaacagccccagcattgcagccgctttcctgcccacgttcatgtactgcctgggcagccaggactttgaggtggtgcagacggccctccggaacctgcctgagtacgctctcctgtgccaagagcacgcggctgtgctgctccaccgggccttcctggtgggcatgtacggccagatggaccccagcgcgcagatctccgaggccctgaggatcctgcatatggaggccgtgatgtgagcctgtggcagccgacccccctccaagccccggcccgtcccgtccccggggatcctcgaggcaaagcccaggaagcgtgggcgttgctggtctgtccgaggaggtgagggcgccgagccctgaggccaggcaggcccaggagcaatactccgagccctggggtggctccgggccggccgctggcatcaggggccgtccagcaagccctcattcaccttctgggccacagccctgccgcggagcggcggatccccccgggcatggcctgggctggttttgaatgaaacgacctgaactgtca

SEQ ID NO: 484299 - DNA, 1375 bp, Homo sapiens
  misc_feature (16)..(16): n is a, c, g, or t
  misc_feature (1015)..(1016): n is a, c, g, or t
  misc_feature (1019)..(1019): n is a, c, g, or t
  misc_feature (1023)..(1023): n is a, c, g, or t
  misc_feature (1026)..(1027): n is a, c, g, or t
  misc_feature (1037)..(1037): n is a, c, g, or t
  misc_feature (1045)..(1045): n is a, c, g, or t
  misc_feature (1048)..(1048): n is a, c, g, or t
  misc_feature (1052)..(1053): n is a, c, g, or t
  misc_feature (1064)..(1065): n is a, c, g, or t
  misc_feature (1089)..(1089): n is a, c, g, or t
  misc_feature (1092)..(1092): n is a, c, g, or t
  misc_feature (1103)..(1103): n is a, c, g, or t
  misc_feature (1111)..(1112): n is a, c, g, or t
  misc_feature (1120)..(1120): n is a, c, g, or t
  misc_feature (1123)..(1123): n is a, c, g, or t
  misc_feature (1132)..(1132): n is a, c, g, or t
  misc_feature (1141)..(1141): n is a, c, g, or t
  misc_feature (1143)..(1144): n is a, c, g, or t
  misc_feature (1146)..(1149): n is a, c, g, or t
  misc_feature (1156)..(1156): n is a, c, g, or t
  misc_feature (1160)..(1160): n is a, c, g, or t
  misc_feature (1169)..(1170): n is a, c, g, or t
  misc_feature (1172)..(1172): n is a, c, g, or t
  misc_feature (1174)..(1174): n is a, c, g, or t
  misc_feature (1177)..(1177): n is a, c, g, or t
  misc_feature (1179)..(1179): n is a, c, g, or t
  misc_feature (1181)..(1181): n is a, c, g, or t
  misc_feature (1186)..(1186): n is a, c, g, or t
atagcatagtagagcngggagactgcgccgacatggagctgttcctcgcgggccgccgggtgctggtcaccggggcaggcaaaggtatagggcgcggcacggtccaggcgctgcacgcgacgggcgcgcgggtggtggctgtgagccggactcaggcggatcttgacagccttgtccgcgagtgcccggggatagaacccgtgtgcgtggacctgggtgactgggaggccaccgagcgggcgctgggcagcgtgggccccgtggacctgctggtgaacaacgccgctgtcgccctgctgcagcccttcctggaggtcaccaaggaggcctttgacagatcctttgaggtgaacctgcgtgcggtcatccaggtgtcgcagattgtggccaggggcttaatagcccggggagtcccaggggccatcgtgaatgtctccagccagtgctcccagcgggcagtaactaaccatagcgtctactgctccaccaagggtgccctggacatgctgaccaaggtgatggccctagagctcgggccccacaagatccgagtgaatgcagtaaaccccacagtggtgatgacgtccatgggccaggccacctggagtgacccccacaaggccaagactatgctgaaccgaatcccacttggcaagtttgctgaggtagagcacgtggtgaacgccatcctctttctgctgagtgaccgaagtggcatgaccacgggttccactttgccggtggaagggggcttctgggcctgctgagctccctccacacacctcaagccccatgccgtgctcatcctacccccaatccctccaataaacctgattctgctgcccaaaaaaaaaaaaaaaaaaaaaaaaacaaaaaaaaaaaaaaaaaaaaaaaaaaaaaaaaaaaaaaaaaaaaaacaaaaaaaaaaaaaaaaaaaaaaaaaaaaaaaaaaaaaaaaaaaaaaaaaaaaaaaaaaaaaaaaaaaggaaaacaaaaaaaaaaaaaaaaaaaaaanntgntggnccnnttggcccaanggcttttnaanttgnnaaagtttatcnngcggcccaatttggggccattggncanattgccctaangggggggnnttaaaatncangggcccggntttaaaacngnngnnnngggaaancccnggggttccnnantnaancngnttggngaaaaaacccctttttccaacgggggctatatccgaaaaggccccacaccaaggccctttccaaaaatgtcgccccccaaagggcaagggaaattggcgccctaaatttttggaaaaacccccggtaaattttggaaaaccacctctttttaaccaaagggccaaatcgggaaaccccctttaaccaaa

SEQ ID NO: 484300 - DNA, 4355 bp, Homo sapiens
aacggagattagtgagtgcgtctccgggtgttattgtcatcacgagggacgtggcgttgtcctcgtagctatctcgtgctgtcggcggtcaatttccagactttctcctccacatcatccagcggcaggcctcctcgcagtccatgccctggctggcggacctggtacagtccagcgagggctccctggacgtgctgcccgtgcagtgtctgtgcgagttcctgctgcacgatgctgtggacgatgctgcttccggggaggaggacgacgagggcgagagcaaggagcagaaggccaagaagcggcagaggcaacagaagcagcggcagctgctgggccgcctgcaggacctgctactgggcccgaaggctgatgagcagaccacgtgtgaggtgctggactacttcttgcggcgcctcggctcctcccaggtggcctcccgcgtgctggccatgaagggtttgtcgctggtgctttcggagggcagcctgcgggacggggaggagaaggagccccccatggaggaggatgtgggggacacagatgtgctgcagggctatcagtggctgctgcgggacctgcctcgcctgcctctgttcgacagcgtcaggagcaccacagccctggccctgcagcaggcaatccacatggagactgatccccagaccatcagcgcctacctgatctacttgtcccagcacacgcctgtggaggagcaggcccagcacagcgacctggccctggacgtggcccggctggtcgtggagcgctccaccatcatgtcccacctcttctcgaagctctccccgagtgccgcgtcggacgccgtgctgagcgctctgttgtccatcttctcacgctacgtgaggcgcatgcggcagagcaaggagggcgaggaggtctacagctggtcggagtctcaggaccaggtcttcctacgctggagcagcggggagacagccaccatgcacatcctcgtggtccatgccatggtgatcctgctgacgctgggcccgcctcgagccgacgacagcgagttccaggcgctgctggacatctggtttccggaggagaagccactgcccaccgccttcctggtggacacatcggaggaggcgctgctgcttcctgactggctgaagctgcgcatgatccgttctgaggtgctccgcctggtggacgccgccctgcaggacctggagccgcagcagctgctgctgttcgtgcagtcgtttggcatccccgtgtccagcatgagcaaactcctccagttcctggaccaggcagtggcccacgacccccagactctggagcagaacatcatggacaagaattacatggcccacctggtggaggtccagcatgagcgcggcgcctccggaggccagactttccactccttgctcacagcctccctgccgccccgccgagacagcacagaggcacccaaaccaaagagcagcccagagcagcccataggccagggccggattcgggtggggacccagctccgggtgctgggccctgaggacgacctggctggcatgttcctccagattttcccgctcagcccggaccctcggtggcagagctccagtccccgccccgtggccctcgccctgcagcaggccctgggccaggagctggcccgcgtcgtccagggcagccccgaggtgccgggcatcacggtgcgtgtcctgcaggccctcgccaccctgctcagctccccacacggcggtgccctggtgatgtccatgcaccgtagccacttcctggcctgcccgctgctgcgccagctctgccagtaccagcgctgtgtgccacaggacaccggcttctcctcgctcttcctgaaggtgctcctgcagatgctgcagtggctggacagccctggcgtggagggcgggcccctgcgggcacagctcaggatgcttgccagccaggcctcagccgggcgcaggctcagtgatgtgcgaggggggctcctgcgcctggccgaggccctggccttccgtcaggacctggaggtggtcagctccaccgtccgtgccgtcatcgccaccctgaggtctggggagcagtgcagcgtggagccggacctgatcagcaaagtcctccaggggctgatcgaggtgaggtccccccacctggaggagctgctgactgcattcttctctgccactgcggatgctgcctccccgtttccagcctgtaagcccgttgtggtggtgagctccctgctgctgcaggaggaggagcccctggctggggggaagccgggtgcggacggtggcagcctggaggccgtgcggctggggccctcgtcaggcctcctagtggactggctggaaatgctggaccccgaggtggtcagcagctgccccgacctgcagctcaggctgctcttctcccggaggaagggcaaaggtcaggcccaggtgccctcgttccgtccctacctcctgaccctcttcacgcatcagtccagctggcccacactgcaccagtgcatccgagtcctgctgggcaagagccgggaacagaggttcgacccctctgcctctctggacttcctctgggcctgcatccatgttcctcgcatctggcaggggcgggaccagcgcaccccgcagaagcggcgggaggagctggtgctgcgggtccaggcccggagctcatcagcctggtggagctgatcctggccgaggcggagacgcggagccaggacggggacacagccgcctgcagcctcatccaggcccggctgcccctgctgctcagctgctgctgtggggacgatgagagtgtcaggaaggtgacggagcacctgtcaggctgcatccagcagtggggagacagcgtgctgggcaggcgctgccgagaccttctcctgcagctctacctacagcggccggagctgcgggtgcccgtgcctgaggtcctactgcacagcgaaggggctgccagcagcagcgtctgcaagctggacggactcatccaccgcttcatcacgctccttgcggacaccagcgactcccgggcgttggagaaccgaggggcggatgccagcatggcctgccggaagctggcggtggcgcacccgctgctgctgctcaggcacctgcccatgatcgcggcgctcctgcacggccgcacccacctcaacttccaggagttccggcagcagaaccacctgagctgcttcctgcacgtgctgggcctgctggagctgctgcagccgcacgtgttccgcagcgagcaccagggggcgctgtgggactgccttctgtccttcatccgcctgctgctgaattacaggaagtcctcccgccatctggctgccttcatcaacaagtttgtgcagttcatccataagtacattacctacaatgccccagcagccatctccttcctgcagaagcacgccgacccgctccacgacctgtccttcgacaacagtgacctggtgatgctgaaatccctccttgcagggctcagcctgcccagcagggacgacaggaccgaccgaggcctggacgaagagggcgaggaggagagctcagccggctccttgcccctggtcagcgtctccctgttcacccctctgaccgcggccgagatggccccctacatgaaacggctttcccggggccaaacggtggaggatctgctggaggttctgagtgacatagacgagatgtcccggcggagacccgagatcctgagcttcttctcgaccaacctgcagcggctgatgagctcggccgaggagtgttgccgcaacctcgccttcagcctggccctgcgctccatgcagaacagccccagcattgcagccgctttcctgcccacgttcatgtactgcctgggcagccaggactttgaggtggtgcagacggccctccggaacctgcctgagtacgctctcctgtgccaagagcacgcggctgtgctgctccaccgggccttcctggtgggcatgtacggccagatggaccccagcgcgcagatctccgaggccctgaggatcctgcatatggaggccgtgatgtgagcctgtggcagccgacccccctccaagccccggcccgtcccgtccccggggatcctcgaggcaaagcccaggaagcgtgggcgttgctggtctgtccgaggaggtgagggcgccgagccctgaggccaggcaggcccaggagcaatactccgagccctggggtggctccgggccggccgctggcatcaggggccgtccagcaagccctcattcaccttctgggccacagccctgccgcggagcggcggatccccccgggcatggcctgggctggttttgaatgaaacgacctgaactgtca

SEQ ID NO: 484301 - DNA, 3621 bp, Homo sapiens
cggacataagggcgagaggtctacagctgggtgagggcgagaggtctacggccgggtgagggcgagaggtctacggctgggtgaggctgcacggaaggctcggtgccagctgtgtaccctcggcgctggcccagggtccctgaaccttacggcctgattccacctcttttcccacagtcggagtctcaggaccaggtcttcctacgctggagcagcggggagacagccaccatgcacatcctcgtggtccatgccatggtgatcctgctgacgctgggcccgcctcgagccgacgacagcgagttccaggcgctgctggacatctggtttccggaggagaagccactgcccaccgccttcctggtggacacatcggaggaggcgctgctgcttcctgactggctgaagctgcgcatgatccgttctgaggtgctccgcctggtggacgccgccctgcaggacctggagccgcagcagctgctgctgttcgtgcagtcgtttggcatccccgtgtccagcatgagcaaactcctccagttcctggaccaggcagtggcccacgacccccagactctggagcagaacatcatggacaagaattacatggcccacctggtggaggtccagcatgagcgcggcgcctccggaggccagactttccactccttgctcacagcctccctgccgccccgccgagacagcacagaggcacccaaaccaaagagcagcccagagcagcccataggccagggccggattcgggtggggacccagctccgggtgctgggccctgaggacgacctggctggcatgttcctccagattttcccgctcagcccggaccctcggtggcagagctccagtccccgccccgtggccctcgccctgcagcaggccctgggccaggagctggcccgcgtcgtccagggcagccccgaggtgccgggcatcacggtgcgtgtcctgcaggccctcgccaccctgctcagctccccacacggcggtgccctggtgatgtccatgcaccgtagccacttcctggcctgcccgctgctgcgccagctctgccagtaccagcgctgtgtgccacaggacaccggcttctcctcgctcttcctgaaggtgctcctgcagatgctgcagtggctggacagccctggcgtggagggcgggcccctgcgggcacagctcaggatgcttgccagccaggcctcagccgggcgcaggctcagtgatgtgcgaggggggctcctgcgcctggccgaggccctggccttccgtcaggacctggaggtggtcagctccaccgtccgtgccgtcatcgccaccctgaggtctggggagcagtgcagcgtggagccggacctgatcagcaaagtcctccaggggctgatcgaggtgaggtccccccacctggaggagctgctgactgcattcttctctgccactgcggatgctgcctccccgtttccagcctgtaagcccgttgtggtggtgagctccctgctgctgcaggaggaggagcccctggctggggggaagccgggtgcggacggtggcagcctggaggccgtgcggctggggccctcgtcaggcctcctagtggactggctggaaatgctggaccccgaggtggtcagcagctgccccgacctgcagctcaggctgctcttctcccggaggaagggcaaaggtcaggcccaggtgccctcgttccgtccctacctcctgaccctcttcacgcatcagtccagctggcccacactgcaccagtgcatccgagtcctgctgggcaagagccgggaacagaggttcgacccctctgcctctctggacttcctctgggcctgcatccatgttcctcgcatctggcaggggcgggaccagcgcaccccgcagaagcggcgggaggagctggtgctgcgggtccaggcccggagctcatcagcctggtggagctgatcctggccgaggcggagacgcggagccaggacggggacacagccgcctgcagcctcatccaggcccggctgcccctgctgctcagctgctgctgtggggacgatgagagtgtcaggaaggtgacggagcacctgtcaggctgcatccagcagtggggagacagcgtgctgggcaggcgctgccgagaccttctcctgcagctctacctacagcggccggagctgcgggtgcccgtgcctgaggtcctactgcacagcgaaggggctgccagcagcagcgtctgcaagctggacggactcatccaccgcttcatcacgctccttgcggacaccagcgactcccgggcgttggagaaccgaggggcggatgccagcatggcctgccggaagctggcggtggcgcacccgctgctgctgctcaggcacctgcccatgatcgcggcgctcctgcacggccgcacccacctcaacttccaggagttccggcagcagaaccacctgagctgcttcctgcacgtgctgggcctgctggagctgctgcagccgcacgtgttccgcagcgagcaccagggggcgctgtgggactgccttctgtccttcatccgcctgctgctgaattacaggaagtcctcccgccatctggctgccttcatcaacaagtttgtgcagttcatccataagtacattacctacaatgccccagcagccatctccttcctgcagaagcacgccgacccgctccacgacctgtccttcgacaacagtgacctggtgatgctgaaatccctccttgcagggctcagcctgcccagcagggacgacaggaccgaccgaggcctggacgaagagggcgaggaggagagctcagccggctccttgcccctggtcagcgtctccctgttcacccctctgaccgcggccgagatggccccctacatgaaacggctttcccggggccaaacggtggaggatctgctggaggttctgagtgacatagacgagatgtcccggcggagacccgagatcctgagcttcttctcgaccaacctgcagcggctgatgagctcggccgaggagtgttgccgcaacctcgccttcagcctggccctgcgctccatgcagaacagccccagcattgcagccgctttcctgcccacgttcatgtactgcctgggcagccaggactttgaggtggtgcagacggccctccggaacctgcctgagtacgctctcctgtgccaagagcacgcggctgtgctgctccaccgggccttcctggtgggcatgtacggccagatggaccccagcgcgcagatctccgaggccctgaggatcctgcatatggaggccgtgatgtgagcctgtggcagccgacccccctccaagccccggcccgtcccgtccccggggatcctcgaggcaaagcccaggaagcgtgggcgttgctggtctgtccgaggaggtgagggcgccgagccctgaggccaggcaggcccaggagcaatactccgagccctggggtggctccgggccggccgctggcatcaggggccgtccagcaagccctcattcaccttctgggccacagccctgccgcggagcggcggatccccccgggcatggcctgggctggttttgaatgaaacgacctgaactgtca

SEQ ID NO: 484302 - DNA, 480 bp, Homo sapiens
attccctttccatctctctgccaagctaatgagcctctgaatttcgtggagctggagtccctgccatcttggcagctttcattccgggtcttgtttcttttgctgtgtctgctagggaactttgtagtctgggggcaaggtaacctccccagcaaggcgcccctcaatcagtgccaacttgagatgacgtgctgattattttgtgcagacgtcaccaggaagagtgagtgctttggagccataataaataacttggacagctgctccttgacttacaaatggagttatgtcctgataaacccattgtaagttgaaaataccttaagtcaaaaatgtgtttgatacatctaacctaccaaaccaaatagttcagcctggcccaccttaaacatgctcagaacacttactttagcctgcagttgggcaaagtcatctaacacaaaactattttaaaataaagtgttgaatatctcatgtaaa

SEQ ID NO: 484303 - DNA, 1400 bp, Homo sapiens
  misc_feature (1399)..(1400): n is a, c, g, or t
cttgaacacgggaggcagaggttgcagtgagcagagattgcgccattgtactccagcctgggcaacaagagtgaaactccatctcaaaaaaaaaaaaaaaaaaaaagaaaatgaatctgccacgccatggcttaaacccttttaatgactctgtgagtgtactggggatgaggtccaaattttactaattaaggcctgcaaagcccgtgtgtaatttggctacctagttaatgggctgggcaaatcttggcaaccaacaaactaacaagccacacttggccaaccatcccccttggccaacaacaacaacatatttaacaacatgaacacaataagtagtggtttcactggtggtttgcgcaaatatcacagtctttttctcattctcccaggccttctttggagctttctcctctggccttgagaagatacggctcccagttcacattaagacatttggggggcacctaacattaaaaattacgctggtttaatcttggaatctcgggaactcgtatccatttgggaacccaagtttgggaacatttggctaacttctggtaaagctaggccttataattcttggaagttggctaattactcatacaaactcattttatgcatttagaccacacaagtcacctatggtcactggcacaaccatagttgtactccagaacgaggaaatagcttagggatgtggaattgtgcgctgtctccaggcgacaccgactattcggcactaatatgaagaactgtccataaacattattcggtattgcgtggacagattatcacgaaagaagaatgccttaaaagaggagcttaaaacaaacggggcgccaacatatgacgaggacaggaggtatggaacacccctgtgcaagaacaatccccgccgagtgcagacaacattggtagagccccccacatctgtgcgcgcgaagcagcgccatgatgaacacacagatgagagaaggagagacccccaaggaaagagatatagtcgacgagcacgacaccagccagcgacacaagacagaatacggtgacgaaaaaatgtacaccccccgcagagagacgagatatggtggtcgcaactgagaacagcgaggggattagacacgccccatcaaaatttagtgaataaaccaccaaagtaggagatgaagtagacaaaacacaaaaccacccgatgatagtgacaaagagcaataggagtgaatccacacaacaacagagagaaggagactagtgatatggacgaactgcagaaaacaaaacactaactattagagtagatcatgaaagaacaagacaacataagtaaaaaatggcagcacagatataatcatctgctgtattaacgtatttatatatattattctaataatgatgnn

SEQ ID NO: 484304 - DNA, 468 bp, Homo sapiens
tcccccttttttttttggtttgggggcccatttccccttttcccttttggaatttgggtcaaacccccctgggccaccttgtgggaccccccttttttttaaccttaaaaaaatttccctgccttgtgggtttcccccttttttcccctttctttggggggtttggccgggggatttctttttccccggggggggggggttccgtttgcttaaattgcccccccttttcccccccttggccccccggggggtcccttttcaaaaaaaaaaggaatttttttcccggaccttgttttccccccgggtttttttttttcggaccccccaatggtttttttgggggggtggggtttaaaatgtttccaaatgtttttttttttttttactgggggggaaaaattttttttttgttttccccccgtgtttggggtttttttcccgggggttttttaaaggttggaccctgga

SEQ ID NO: 484305 - DNA, 3112 bp, Homo sapiens
ggctcagttgtcaaacgttacgacgcagtactcggctaatcgagcggtgaatcgccagtcctctcacggccaccaccgacacttgcagaattacatggcccacctggtggaggtccagcatgagcgcggcgcctccggaggccagactttccactccttgctcacagcctccctgccgccccgccgagacagcacagaggcacccaaaccaaagagcagcccagagcagcccataggccagggccggattcgggtggggacccagctccgggtgctgggccctgaggacgacctggctggcatgttcctccagattttcccgctcagcccggaccctcggtggcagagctccagtccccgccccgtggccctcgccctgcagcaggccctgggccaggagctggcccgcgtcgtccagggcagccccgaggtgccgggcatcacggtgcgtgtcctgcaggccctcgccaccctgctcagctccccacacggcggtgccctggtgatgtccatgcaccgtagccacttcctggcctgcccgctgctgcgccagctctgccagtaccagcgctgtgtgccacaggacaccggcttctcctcgctcttcctgaaggtgctcctgcagatgctgcagtggctggacagccctggcgtggagggcgggcccctgcgggcacagctcaggatgcttgccagccaggcctcagccgggcgcaggctcagtgatgtgcgaggggggctcctgcgcctggccgaggccctggccttccgtcaggacctggaggtggtcagctccaccgtccgtgccgtcatcgccaccctgaggtctggggagcagtgcagcgtggagccggacctgatcagcaaagtcctccaggggctgatcgaggtgaggtccccccacctggaggagctgctgactgcattcttctctgccactgcggatgctgcctccccgtttccagcctgtaagcccgttgtggtggtgagctccctgctgctgcaggaggaggagcccctggctggggggaagccgggtgcggacggtggcagcctggaggccgtgcggctggggccctcgtcaggcctcctagtggactggctggaaatgctggaccccgaggtggtcagcagctgccccgacctgcagctcaggctgctcttctcccggaggaagggcaaaggtcaggcccaggtgccctcgttccgtccctacctcctgaccctcttcacgcatcagtccagctggcccacactgcaccagtgcatccgagtcctgctgggcaagagccgggaacagaggttcgacccctctgcctctctggacttcctctgggcctgcatccatgttcctcgcatctggcaggggcgggaccagcgcaccccgcagaagcggcgggaggagctggtgctgcgggtccaggcccggagctcatcagcctggtggagctgatcctggccgaggcggagacgcggagccaggacggggacacagccgcctgcagcctcatccaggcccggctgcccctgctgctcagctgctgctgtggggacgatgagagtgtcaggaaggtgacggagcacctgtcaggctgcatccagcagtggggagacagcgtgctgggcaggcgctgccgagaccttctcctgcagctctacctacagcggccggagctgcgggtgcccgtgcctgaggtcctactgcacagcgaaggggctgccagcagcagcgtctgcaagctggacggactcatccaccgcttcatcacgctccttgcggacaccagcgactcccgggcgttggagaaccgaggggcggatgccagcatggcctgccggaagctggcggtggcgcacccgctgctgctgctcaggcacctgcccatgatcgcggcgctcctgcacggccgcacccacctcaacttccaggagttccggcagcagaaccacctgagctgcttcctgcacgtgctgggcctgctggagctgctgcagccgcacgtgttccgcagcgagcaccagggggcgctgtgggactgccttctgtccttcatccgcctgctgctgaattacaggaagtcctcccgccatctggctgccttcatcaacaagtttgtgcagttcatccataagtacattacctacaatgccccagcagccatctccttcctgcagaagcacgccgacccgctccacgacctgtccttcgacaacagtgacctggtgatgctgaaatccctccttgcagggctcagcctgcccagcagggacgacaggaccgaccgaggcctggacgaagagggcgaggaggagagctcagccggctccttgcccctggtcagcgtctccctgttcacccctctgaccgcggccgagatggccccctacatgaaacggctttcccggggccaaacggtggaggatctgctggaggttctgagtgacatagacgagatgtcccggcggagacccgagatcctgagcttcttctcgaccaacctgcagcggctgatgagctcggccgaggagtgttgccgcaacctcgccttcagcctggccctgcgctccatgcagaacagccccagcattgcagccgctttcctgcccacgttcatgtactgcctgggcagccaggactttgaggtggtgcagacggccctccggaacctgcctgagtacgctctcctgtgccaagagcacgcggctgtgctgctccaccgggccttcctggtgggcatgtacggccagatggaccccagcgcgcagatctccgaggccctgaggatcctgcatatggaggccgtgatgtgagcctgtggcagccgacccccctccaagccccggcccgtcccgtccccggggatcctcgaggcaaagcccaggaagcgtgggcgttgctggtctgtccgaggaggtgagggcgccgagccctgaggccaggcaggcccaggagcaatactccgagccctggggtggctccgggccggccgctggcatcaggggccgtccagcaagccctcattcaccttctgggccacagccctgccgcggagcggcggatccccccgggcatggcctgggctggttttgaatgaaacgacctgaactgtca

SEQ ID NO: 484306 - DNA, 133 bp, Homo sapiens
aactgaatgatactacagatgataggatgtatcatgtgtgctgtatgcatcggggtagtactgagtaacgaggtgcctaccggataggccgagacagtgttgtgggcaagaatgttagatttacgcctgatga

SEQ ID NO: 484307 - DNA, 5137 bp, Homo sapiens
  misc_feature (5)..(5): n is a, c, g, or t
tggangaaaacttaatcgaaacctggtcatcgggctgtccgggagctccggctcgggctgcggacgccatggagcttgctgaccacctggtgaagcgggcggctgccgtgcaggcggatgatgtggaggtgctgaaggtggggaggacccagctgatcgacgccgttctgaatctgtgcacctaccatcaccctgaaaacatccagctcccaccggggtaccagcctccgaacctcgccatctctaccctctactggaaggcctggcccctcctgctggtcgtcgccgcattcaacccagagaacatcggcctggctgcgtgggaggagtacccgaccctgaagatgctcatggagatggtgatgaccaacaactactcctacccaccgtgcaccctgacggatgaggagacccggacggagatgctgaaccgtgagctgcagaccgcccagcgggagaagcaggagatcctggccttcgaggggcacctggcggccgcgtccaccaagcagaccatcactgagagcagcagcctcctcctgtcgcagctcaccagcctggacccccaggggcccccccggaggcctccccctcacatcctggatcaagtgaaaagcctcaaccagtccctccgcctcgggcacctcttgtgccgcagccgaaaccctgactttctcctccacatcatccagcggcaggcctcctcgcagtccatgccctggctggcggacctggtacagtccagcgagggctccctggacgtgctgcccgtgcagtgtctgtgcgagttcctgctgcacgatgctgtggacgatgctgcttccggggaggaggacgacgagggcgagagcaaggagcagaaggccaagaagcggcagaggcaacagaagcagcggcagctgctgggccgcctgcaggacctgctactgggcccgaaggctgatgagcagaccacgtgtgaggtgctggactacttcttgcggcgcctcggctcctcccaggtggcctcccgcgtgctggccatgaagggtttgtcgctggtgctttcggagggcagcctgcgggacggggaggagaaggagccccccatggaggaggatgtgggggacacagatgtgctgcagggctatcagtggctgctgcgggacctgcctcgcctgcctctgttcgacagcgtcaggagcaccacagccctggccctgcagcaggcaatccacatggagactgatccccagaccatcagcgcctacctgatctacttgtcccagcacacgcctgtggaggagcaggcccagcacagcgacctggccctggacgtggcccggctggtcgtggagcgctccaccatcatgtcccacctcttctcgaagctctccccgagtgccgcgtcggacgccgtgctgagcgctctgttgtccatcttctcacgctacgtgaggcgcatgcggcagagcaaggagggcgaggaggtctacagctggtcggagtctcaggaccaggtcttcctacgctggagcagcggggagacagccaccatgcacatcctcgtggtccatgccatggtgatcctgctgacgctgggcccgcctcgagccgacgacagcgagttccaggcgctgctggacatctggtttccggaggagaagccactgcccaccgccttcctggtggacacatcggaggaggcgctgctgcttcctgactggctgaagctgcgcatgatccgttctgaggtgctccgcctggtggacgccgccctgcaggacctggagccgcagcagctgctgctgttcgtgcagtcgtttggcatccccgtgtccagcatgagcaaactcctccagttcctggaccaggcagtggcccacgacccccagactctggagcagaacatcatggacaagaattacatggcccacctggtggaggtccagcatgagcgcggcgcctccggaggccagactttccactccttgctcacagcctccctgccgccccgccgagacagcacagaggcacccaaaccaaagagcagcccagagcagcccataggccagggccggattcgggtggggacccagctccgggtgctgggccctgaggacgacctggctggcatgttcctccagattttcccgctcagcccggaccctcggtggcagagctccagtccccgccccgtggccctcgccctgcagcaggccctgggccaggagctggcccgcgtcgtccagggcagccccgaggtgccgggcatcacggtgcgtgtcctgcaggccctcgccaccctgctcagctccccacacggcggtgccctggtgatgtccatgcaccgtagccacttcctggcctgcccgctgctgcgccagctctgccagtaccagcgctgtgtgccacaggacaccggcttctcctcgctcttcctgaaggtgctcctgcagatgctgcagtggctggacagccctggcgtggagggcgggcccctgcgggcacagctcaggatgcttgccagccaggcctcagccgggcgcaggctcagtgatgtgcgaggggggctcctgcgcctggccgaggccctggccttccgtcaggacctggaggtggtcagctccaccgtccgtgccgtcatcgccaccctgaggtctggggagcagtgcagcgtggagccggacctgatcagcaaagtcctccaggggctgatcgaggtgaggtccccccacctggaggagctgctgactgcattcttctctgccactgcggatgctgcctccccgtttccagcctgtaagcccgttgtggtggtgagctccctgctgctgcaggaggaggagcccctggctggggggaagccgggtgcggacggtggcagcctggaggccgtgcggctggggccctcgtcaggcctcctagtggactggctggaaatgctggaccccgaggtggtcagcagctgccccgacctgcagctcaggctgctcttctcccggaggaagggcaaaggtcaggcccaggtgccctcgttccgtccctacctcctgaccctcttcacgcatcagtccagctggcccacactgcaccagtgcatccgagtcctgctgggcaagagccgggaacagaggttcgacccctctgcctctctggacttcctctgggcctgcatccatgttcctcgcatctggcaggggcgggaccagcgcaccccgcagaagcggcgggaggagctggtgctgcgggtccaggcccggagctcatcagcctggtggagctgatcctggccgaggcggagacgcggagccaggacggggacacagccgcctgcagcctcatccaggcccggctgcccctgctgctcagctgctgctgtggggacgatgagagtgtcaggaaggtgacggagcacctgtcaggctgcatccagcagtggggagacagcgtgctgggcaggcgctgccgagaccttctcctgcagctctacctacagcggccggagctgcgggtgcccgtgcctgaggtcctactgcacagcgaaggggctgccagcagcagcgtctgcaagctggacggactcatccaccgcttcatcacgctccttgcggacaccagcgactcccgggcgttggagaaccgaggggcggatgccagcatggcctgccggaagctggcggtggcgcacccgctgctgctgctcaggcacctgcccatgatcgcggcgctcctgcacggccgcacccacctcaacttccaggagttccggcagcagaaccacctgagctgcttcctgcacgtgctgggcctgctggagctgctgcagccgcacgtgttccgcagcgagcaccagggggcgctgtgggactgccttctgtccttcatccgcctgctgctgaattacaggaagtcctcccgccatctggctgccttcatcaacaagtttgtgcagttcatccataagtacattacctacaatgccccagcagccatctccttcctgcagaagcacgccgacccgctccacgacctgtccttcgacaacagtgacctggtgatgctgaaatccctccttgcagggctcagcctgcccagcagggacgacaggaccgaccgaggcctggacgaagagggcgaggaggagagctcagccggctccttgcccctggtcagcgtctccctgttcacccctctgaccgcggccgagatggccccctacatgaaacggctttcccggggccaaacggtggaggatctgctggaggttctgagtgacatagacgagatgtcccggcggagacccgagatcctgagcttcttctcgaccaacctgcagcggctgatgagctcggccgaggagtgttgccgcaacctcgccttcagcctggccctgcgctccatgcagaacagccccagcattgcagccgctttcctgcccacgttcatgtactgcctgggcagccaggactttgaggtggtgcagacggccctccggaacctgcctgagtacgctctcctgtgccaagagcacgcggctgtgctgctccaccgggccttcctggtgggcatgtacggccagatggaccccagcgcgcagatctccgaggccctgaggatcctgcatatggaggccgtgatgtgagcctgtggcagccgacccccctccaagccccggcccgtcccgtccccggggatcctcgaggcaaagcccaggaagcgtgggcgttgctggtctgtccgaggaggtgagggcgccgagccctgaggccaggcaggcccaggagcaatactccgagccctggggtggctccgggccggccgctggcatcaggggccgtccagcaagccctcattcaccttctgggccacagccctgccgcggagcggcggatccccccgggcatggcctgggctggttttgaatgaaacgacctgaactgtcaaaaaaaaaaacaaacaaaaaaaaaaaaacatcacaaaactaacataacaacaaactcaacgaaacacaaaacacacactcacaaaaccaaaacacacgccgcggccttctttttggggggcggacacaaaacagtgcatggcggcggccagtgccatttgttttcccccccccccccttttttctccccggggggtttatcgcgcgccccta

SEQ ID NO: 484308 - DNA, 1403 bp, Homo sapiens
ccacgcgtcggactagttctagatcgcgagcggccgcccttatatttttttttttggagatagaattctcactctgttgcccaaactggattgcagtggtgcaatctcgtgtcactgcaacctctgcctcccagtttcaagcaatcctctcgccttcagcctcccaagcagttgggatcacaggcttgtgccataaggtcatgaggccttttgcgctcatgaatggcctgtccattatcgtgggagtttggtatagtaacctcaagagtgagtgcctgggtaattttatatggtatttccaggtacgaaccggggtgtttacaccgatacctggccatgtgctggtcttggaactcccagacctcaatgtagatccgcccgtctacagcctcccaaagtactgggatcacatggctgtgagccaccactgtacttggcctatataaggagtcaatctaatatgcagaggttaaatccccaaggatcgtagggcccaagatccttcctagatctgataaggaacagctgaacactctattgtgacctcgtgcgtgagtattgaggacaaggaacatcatctgcacttacgagttttcatcttacactgtgctcaactttgacgccataaacaatatcgccagcatctagttgctttgcccaaaatttctccaagagtattcagaattacgggtgataccacagtgttgatttagttgactacatagaagattgcgcacttggtccccttttacactttgttcaaggatacctacacgtgatatctcttaagcagtggtgtacggccaataatcacgcgaagatcaaaggggaccaattgcctgacaggggacattggccacaggttgtttccccggatgactatgaacgcgaccctctagcttcatgtacacacacgggacaccgcacttgacgccacaccgaaggggaaaaaccaactacgcgatgattaatcgacagtgagcaccggacacgaaaaaagaacacgcaggcgctgacagaacaaaaacacgaaccagcgcccacgaacgccagaagtgaacggtattaggaagatacacgtgcggcgaaagagaaaaaaacgacacaccagaaagaccagcgttggcgaccccacacggagcacaggaccctgacggacgagacacagatgtaacgaacacacgaggactgcacgaagagaacgacgggggcccacatagtgccagcacagaacaagagaaggcgccgagcaagccaccgaggcgcaacggcagagacgacagagaagaccgagagggtacgacacgacaaaaacacacgacgaacacgcggactagcacgagcgagtcaaccgagaaagcgacgacgagagcgacgaatgacgggcgcgcgacatgaggtgc

SEQ ID NO: 484309 - DNA, 239 bp, Homo sapiens
tacaagcgggagcacattaacctgcgggctgcgacatgggatttcgacatttgctggggccttccatgccggggtgctctggtgctaggttaggaggcctggctggccggctaccagatgaatttttgaggctcacaaaatcccgagtgacccagagcaactttgcagttggctacaagacttatgaattcccagcttcacactattgtgagtcacgggacagagtttcgcggctccat

SEQ ID NO: 484310 - DNA, 1092 bp, Homo sapiens
  misc_feature (447)..(447): n is a, c, g, or t
  misc_feature (566)..(566): n is a, c, g, or t
  misc_feature (710)..(710): n is a, c, g, or t
cttcaaagggcctgtgtggatccccctccagggggaaccccccccgggtttttccgaacttgccccttctccaaaggttctccccctgccctgtcaatcccccctttcaatggcccccgttcttggttccacaagaccattgagcctgttcagagtcaatgaaagggggaaacccccaccccaactaattggaagaaatttcttcactcacaccttttggaggaaaagattgtagagatgattggcccacgaaagcccgctcgccgcgaattttctggcacaccacgcttgtgccccatagcccaccacaaacccctcgtggcccctgctgtcttcacaccacctctcacgaaagacccgcagttgttttccccacccccctcgcactcgagtggacccacagccccacgcgttggggcccgagaggatatttccacacacaaacgnctctcgcgagagcccacgttgtccccctctgaggagccaccccgccgaagagtttcccacaccgcacagcgacacactgcgggggctcttaagtgtgcccacggccacagcgctcgaanagagttcactttgaagacacaccccacagcccgcgggagaactctctgtccccgccgctctctctctctcgcagagagagcctcgcgagagcccactcgagagagagagggggtctcgggagactcgggagagactgggagagncacagcgcacactctgcacagaccggcgagaaacccacaggggttgttgcccggggccacacagattaactcacacacaggctgggccaccacagcttggcgcacaaggcttctctccctctggaagttggaacttcgagagtgtccctcgggagagcacaggcacagttgtgtggaaggcacgccactcccccgctgatgaactggcacgctataaggaggaacctcgcgaagtggaacccgaagccacgcgaattatacgaatgtacccacaggcccaaggaaagggaaggacacacaaagaaggccccacaggaggtgggtggagaatggagatgcgcctgggacacttgtgtgccaaacgacaggtttccaccaccca

SEQ ID NO: 484311 - DNA, 81 bp, Homo sapiens
tttctgtacaagtcgcattgggttttgttttaagttttactaatttctatatgaaataaaagatataatgattgtgctttt

SEQ ID NO: 484312 - DNA, 351 bp, Homo sapiens
  misc_feature (166)..(166): n is a, c, g, or t
  misc_feature (322)..(322): n is a, c, g, or t
ttttggagatggagtcttgctctgttgcccaggctggagttcaatggcacaaactcggctcactgcaacctccgcctcccaggttcaagcaattttcctgcctcagcctcccgagtagctggaattacaggcacacgccaccatgcccagctaatttttgtatttnagtagagacgggggtttcaccatgttggccaggctggtctcaaactcctgaactcaggtgatccactccctcggcctcccaaagggttgggattgcaggcgtgagcaccacggccagccatgatccttaaacttgttttaagaggtataataactngaaatcatgatgctctttaaggaatacca

SEQ ID NO: 484313 - DNA, 727 bp, Homo sapiens
gggttgcctaccatgtttgcctacaggaggtgtgcctctttgtcgccgggcgcctttgcgtcgtggtgactgtacatgcccgtagatgctatctctctttatttggggcacgatgtgtccccgctggtggcgccccttggttccgctgtgctatgcggggttctttatcaatctgcgcgtgggtgaacccccccaagcaggcgcgcttgggtggagtaatctgcatggctgggttcgggctcttctgtggtgttactggttctcgcgctcgctgtttggtgtctccgccgcgcgtgcacccccaacattgtgtggtaaacctccctgctactcgcgtctccccccccctcagataaggttatggcaggatttgttgcacacccccaaatccaccccccacacctccctcaggttataatagttatgtatactgttcgccacagctactcactctgacattgatttcttcttctatagaaaccagagaagttttcgacattgattgatgccccactctgttttgacagagccatgcgagacaacattgtttcactcctctcccctttgtgtgcccgtccactacttctcatcaccccctatcataataatgtatgcccccctccctttagatgataatattcatactaatctcccctctcgtccccccgagtacttctaaaatttttcgtagttatccctccccctgttttatcaatagtcacaaaat

SEQ ID NO: 484314 - DNA, 605 bp, Homo sapiens
aacgatggtcctcagctgcattacagccccagttcctggcctgtcttgggggaagtgaaggtgtgtgagaggatggcgccagatactgatgctaagaagtttgcagcagatgcagactaaagaggacagaccagggacagatgagggttcactgggaggatgaagcagaatccccaggcttagctgaaggatgagaaacatggggttgctactgttcttgaggaggagatggatgaatgtgagcagtcgtgggctggagatcgcgaatgccaagtgagcattcatgtcacctgtccaagagtaccttagtgtcggaagaatttaagcgcaatgtactccagtagaggacatagtctctgtggtcctggcatatttctaggaacactttgataaggacggctggtccctgtggtactcagagtatcgcttccctgaagaactcactcagaccttcatgagctgcaatctcatcactggaatgttccagcgactggacaagctgaggaccatcgtcaacgatggtcctcagctccacgaagaatgtactattacctgaatgcttctattccttttatgatcttcgaaaagaattgagaaatgttgcc

SEQ ID NO: 484315 - DNA, 802 bp, Homo sapiens
  misc_feature (723)..(723): n is a, c, g, or t
agcgggcggggatggggtgcgagctgcgcggcgcctgcccggcgtgcggagcgggctccccggtgccgccgccgagtagggggagccggaagtcggcgcgggcgcccctcggcccgacgacgccgtgaccttggccgtcccgctcacctctcggaatctcgcctgtccgggaccgcgaagtggggggcgaccgcggacgtccctctccgtcggcgcagtcctcgacggcgcttgggatttgaccccggcgcgcttgcatcgacccttctcccgagaaggggtatcgtgacatctagtcctactactagatggtagaatgtaagctgtgaactgactcatgatgtatagaaatcagagggcacatcaagctaaagatcatagcaggtagggcaactttgcttcacaataggaaagttacccatacatttagcaatttctacgttataactggagcttagttctattataaatttggaccttcaatactggaggctgagccagtgaaagcaagacatatgagcacagtcatactggagaagagccatcgaattagtccctatttcccctggagaaacgctagcccttcctgagaaactcgaaagcaatttcgatccaatagtactagtttggtgacggactttcgacttatgagacgagacgaaaagtcatcctcaagtgctggttgaaggtgttttatcgagacattgaaggtgggcccgtcgngcgggaaccagggttccatcacgtatccccttggctaagccgctaggaacttcgacagtaagcaagggaaaagcggatg

SEQ ID NO: 484316 - DNA, 292 bp, Homo sapiens
agaggagatctcatatgtagcgcacaagagaacaggcgttgtaaaccacatcacctgtttaaagaatctgattggtaaattaactcttgaactactagcattttagctctaatagttttaaatgatttgtcatttgcttataaagctttcatctgtcaaattgttttataattcagtcaacaaatatttgtttagaaaatatatgagtacttattttagataggcgctgaggctacagctgtaaataaaacaaagttcttatccttatatatatctgtctgcctgggagaga

SEQ ID NO: 484317 - DNA, 425 bp, Homo sapiens
  misc_feature (13)..(13): n is a, c, g, or t
  misc_feature (119)..(119): n is a, c, g, or t
  misc_feature (417)..(417): n is a, c, g, or t
taagtatcctgtngagagttactctactaaaaatacaaaaattagctgggtgtggtagctcacacttgtgatcccagctacttgggaggctgagacaggagaatctcttgaacctttgnctcccagtctcaagcagttccactgcctcaacctcccaagtagctgggattacatgtgtgcaccaccatgtttttgttttttcagtagagacagggtttcaccatgttggccagactggtctcgaactcctaatctcaggtgatcggcccacttcggcctcccaaagtgccaggattacaggcgtgacacccaaaccctgccaaatatcctgtttctcatggaaactttcaccttctggttttataggccaaagtctaaggcaggaagcccctgcgaaccatttccaacattgacagnatcattcc

SEQ ID NO: 484318 - DNA, 114 bp, Homo sapiens
agtcctgaggtggtcgtgggcatgtagacgttgtgaggattgctgggttgtaataggcgctggcggtgcttctgctggacttgtgcttcggcttgcaggaagtgtgaggggaca

SEQ ID NO: 484319 - DNA, 364 bp, Homo sapiens
ataaaattccaccccaagggcaagggctttttgggaaatcccctcaaggggaatttccccaagttccttttcgccaagaagggggggggggtgaagggcttcggccccctggggggccccctggggataaaaagggccccccccccctttttttagccccccaaggggggggccccgccggggcccctgcccacgcccttggggccttcccccggcattttatagggcccccctgcaaccctgtgggggggggaaccccaaaaatccggggggcccccccccgggggagggtcccctggcctgtgggggttgggtggggcccccccccccggggtcccttgggggaataacccgccaaattaga

SEQ ID NO: 484320 - DNA, 363 bp, Homo sapiens
cccctgggaattttgggggcccgtttgccatgcccgggggcccgggaaaggtttatcctaggatccggtccccccccgggcattttttttccttttttgggccccgggggccgggggagggggggggttccccccccgggcctaagaaggggccccggttttttacctggtggaggaagtttttttttgggcccgggccctttggggggggttgggggccattctggggggggttttttcccttttggggggtggggggggggggggggggggtattggtgggttttaaaaaaaaagggggtttagggctttttttttttttaatttggggcgggaataaatttttggggaatttttttccca

SEQ ID NO: 484321 - DNA, 396 bp, Homo sapiens
ccagtctaaagtagggaagcggccgtgttgcaactctagaaaggcctcaggtataatccacagctacatcacttgaagtgcattctacaacactggacgctcagtacatagcatccctgctgcctgccatgacaataggcgtgccagctcccatcccccgccggctttcccctccagatacactgtggaactatttgagcaggtgggacgagctatggccattgcagccctggacatggcggaatgtaatccgtggccccgaattgtactgtcagagcacagcagccttactaatctacgggcctggatgctgaaacatgtacgcaacagccgagccctaagcagcactctgaatgtgggtgtcaacaagaagaggggccttcgaactccacccaa

SEQ ID NO: 484322 - DNA, 449 bp, Homo sapiens
  misc_feature (448)..(448): n is a, c, g, or t
caccatttaagaagcacgtgattaaaataggtgatttcatgttttgtttttttaaatgagggttttcttttgcattttgtgtggcttggtgcctttgtgtgtgttacagagaaagcagaaaataatggggaaatattttagtacaggaagatgagaacatgcaaaatgaataatgaaagacttaccatttattcagataatgaggatttaatttgcctaaaactcaggcatcttaaaagataacttacaaccttaagactcctgttcctcccaagacttgctgttaaactgaagttaaaatgaatggaagaatgaatgaatatgaatgacagccaagtatagactttattgaccttttgcttcaccagaccagaatttactctacaaaaaggttcatcttaactacatttactgaatctgtccccacctcaaacttgaatcccattant

SEQ ID NO: 484323 - DNA, 575 bp, Homo sapiens
  misc_feature (29)..(29): n is a, c, g, or t
  misc_feature (122)..(122): n is a, c, g, or t
  misc_feature (125)..(125): n is a, c, g, or t
  misc_feature (129)..(130): n is a, c, g, or t
  misc_feature (152)..(152): n is a, c, g, or t
  misc_feature (168)..(168): n is a, c, g, or t
  misc_feature (175)..(175): n is a, c, g, or t
  misc_feature (212)..(214): n is a, c, g, or t
  misc_feature (328)..(328): n is a, c, g, or t
  misc_feature (347)..(347): n is a, c, g, or t
  misc_feature (374)..(374): n is a, c, g, or t
  misc_feature (380)..(380): n is a, c, g, or t
  misc_feature (402)..(402): n is a, c, g, or t
  misc_feature (421)..(421): n is a, c, g, or t
  misc_feature (450)..(450): n is a, c, g, or t
  misc_feature (471)..(471): n is a, c, g, or t
  misc_feature (524)..(524): n is a, c, g, or t
  misc_feature (526)..(526): n is a, c, g, or t
  misc_feature (533)..(533): n is a, c, g, or t
  misc_feature (535)..(535): n is a, c, g, or t
  misc_feature (547)..(547): n is a, c, g, or t
  misc_feature (549)..(549): n is a, c, g, or t
gtctctttactacaacagtgaaggatggnaaaatatgagttcagcatgtattttaatgttgcaaaggaatgacaactcagcaagctgtagaaaatggcagaggagacggggtaataacagangcnatgnnggctcctgggtgtgcccgaggncatcctacggccagcngcttggnttctcccagaatcagtttacagacttgctcagcctgnnngggggcccagggatcatgcaggaagaaaacggaatacgcttgattctgggattggtcattttaagacgcttttagtaagatggtttcctgtctacacccaagtcttgccaaccnagacgcatcaacgtgaacngctcagagacattcctgcacggggggnctgggnggtggcagcggaaaggtacctntgagctgccgtgcccggtngcgctggccacctccctgcgctccggttnccctcccccgctccctcaggngttcactttcagtttccccaccttgcagcagccgttaggctccgagtcacccncnctccatncntccctctgctcntnccctgcctgttgtgtggctccgtcta

SEQ ID NO: 484324 - DNA, 391 bp, Homo sapiens
atcctaatgtacatcttacatatattggctgatgtctgcctgtacttctgacccctaaaacgtataaaatcaagctgtaacccaagcaccttgggcacatgttctcgggacttcctggggctgtgtcacgggccttggtcactcatatttggctcagaataaacctctttaaacattttacagagtttgactcttgtttgtttgtttggttttgagacagagtctcactctgtcactcaggccggagtgcagtggcgcgatcttggctcactgcagcctctgcctcctaggttcaggtgattctcctgcctcagtctcccgagtagctgggattacatgcaggaaccactgtgcctggccaagatctctgttttaatgctggtcatttgtg

SEQ ID NO: 484325 - DNA, 213 bp, Homo sapiens
atcatgtatccctttttatcctatctggaaacaagacttggacacattattactctccaaataaaaagaatggagaagttgtataaatgaatgttagtgcttttaaactgtaaattatataacatgtaagttatatctagtttcagaagcatcccaacgtaatacatgaaatttgaaaggccaatttttgggtaaacagactactttctagaa

SEQ ID NO: 484326 - DNA, 209 bp, Homo sapiens
ggagtagcctcaaggtagtacataggtaaaatgggctattaggatgatccttgaagcctttagaatggtgcatgttggacactgtacatccacacaaagtagcttttcctcctatgttggaaaaaaagactgtttctttgttttgagaccaagtgaagttgttggtgtttgtttaggggccatattgttaccaaacaaacaaacaaaaa

SEQ ID NO: 484327 - DNA, 232 bp, Homo sapiens
gtagattgagaccagctgggcagatggcagatcctgtctctacaaattagaattagctgggcatggtgttgtgcaccaattgttccagctgacttgggaggctgagacgggaggatcccctgagcccaggaattcaaggcaacagtgagctatgattgtgccactgctctccagcctggttggattttttttttttttttttttttttttttttttttttttttttttattg

SEQ ID NO: 484328 - DNA, 197 bp, Homo sapiens
  misc_feature (179)..(179): n is a, c, g, or t
tgtgtgcagtctctggtgctggctccgtggggcacatttggttgcaaggtcctccccatactgcagtgcatttcatagggtttctccccagtcatggcattctctgtgtgtttggtcacgtgccgcagctgttccggcaagccttttaagccattcgtgtccattcatccaggtctctnctcctgcactgcgtcgcg

SEQ ID NO: 484329 - DNA, 300 bp, Homo sapiens
cgtgggagcagacagctttgacatcatgagtaaatttacttggttgacattgttggcgtccgtgtcgcgggttcacatatagagattcttcgactatgtgagtcatctccatgagagagtgtaagaggtagtcatcgtcggtccaacaccacttcctccccttcttcctcatcctcatcatcctcatccacagctgcttctgtgaagtcttccagatctgcttcagataggaaattcactttaataaacatcatagtcttcctcttcatcttcctcttcctcttcctcttcatcttcctc

SEQ ID NO: 484330 - DNA, 157 bp, Homo sapiens
tgtgcagtgtgtagccgagagaccgcgattcactgaatacgaagtgaggtcaaaacaagagaggcactcaaaaacaccaggtaacctaccttcttttttttttccaggttctttttttctttttttttcttttttttaatctatcatggcaccaggg

SEQ ID NO: 484331 - DNA, 169 bp, Homo sapiens
acgaatcgagctggtacccgctcacacatgcacagccgctcacaacagcacaggtgggagtcttttgtatatagttgtaaattatgtcttggttatgtaaaaatgaaattttttagacacagtaatgaactgtattcctgtttgtatatttaataaatttcttgttttc

SEQ ID NO: 484332 - DNA, 143 bp, Homo sapiens
ttgaagcacaaagcttcactattgcagcggaagatagtgaggctcactttgggaaagattttggggcactcacacactctgggcccagggctgcatggccaaggtagggcttacttataaccaaggtgtacccaagccaccca

SEQ ID NO: 484333 - DNA, 740 bp, Homo sapiens
  misc_feature (721)..(721): n is a, c, g, or t
ggacttcaacatcactggtgaggccagtggggaggaagcgggttgttgagaaacctgtcactgcctgggggagggacacattcctcccctgtgagattggggccatatgggtatgacgcaggggatatatatccaacctgagtgaaaacagaagatccactaatacccattaaagccggcaagaggctctctgaggctccctgagtctccctttagttgacttcaaagctgccaaagatttggggacctcctcgcacccagccttctttctgaggcccacaccacagtgggcacccacgttgctgccatctgggagccaaagaccatctgagccctattcctgcagcaccagaacacaagcccggcccggtgagcagtccaccaatcagctcaggcctgatgaccagtccaccaatcagctcagtactccgggccaggcacaagcctcagatttctcataggtacaattattgaagatgaaaatagtattttcagacttcagtcatgattttagttacatccaagtgccaactttacaatggcaccctggttcacttgctttatccaagtgttacctgtgccatgacttttattaagttgtttttcttctaatggactgaatctcttaagcaaatttggaatgttgatggtcaggacttcatctgtctgtggcaagttatgcttaccttagacagaaagttaactgtaaaaataaaagttnctaaaaagaaaagaaaaaa

SEQ ID NO: 484334 - DNA, 980 bp, Homo sapiens
gtggagctggaccaggaggagctgcagctgggccggggcggagcgccggtcgcgccaggcccgcgagggaggggcgtgttgctgctggcccagcggagccgccccagcccgcgccgaggcgccttcccgccaggccggctggcttccggctctttccatttgcctccgtgaatcgtcagcccggcgacgctcgtggagcgcctgccgctctctgggtggagaagctcccgggcgcttcccggtttcactccttctcaggctgggctcccagccccctctctccttttcctggagctggctgctcacgcccccttcggtccccttcctttagctcaggctccctaccccttcctgttaggcccgacagaccagagtcccgagctcctcagtctgttgcctcaggcatgggtcccaggcttccttcttgctttcctttgcactatcccgtagtcctgcccgcgttcctctagtccctagggctcagtgttcccgacagtccgtgcgtcccccttcccaggaccggagtaccagagctttttggtctccgtttcgtggtcgttctgtgtccttgccgcccttttccccacgtttggagttccacgatgcggagccgggctcctcccagccccagaaaatgcttccatggagaatggctctctaaaacatgactattcctagagactaggcaaatctctattaccagtagttgaccctattgtacctatgttgccgggtttaatactcattgggaaagggcaaggtggtttggaagcaggaccatggttctgcggttggatttgtgggctttttcaatggatttccttacttaattcgaggtgttcgatggaggggatgagaagaaaggagatggatatagttatctcacatggaaagcatagagtaaggccaagaaaccaaggagagtcaacggcacagggaacaagagagtttaaatccaataatagaaaggagacgaagga

SEQ ID NO: 484335 - DNA, 1423 bp, Homo sapiens
gagcggggagctgcgtgcggaggatctggggcgcagagcagcggcgtggagtgaggcggacacgtggcaacagctggtagcagcccgggcggtggcagcaacagctggcggcgggatcaggccctatgccagcaggcctgccctgcattacatcaactgactccccgcaggcagaccctatacatccactacacactcttggttccacactgggtagcaagatacgactacagccagagagctagactctagcgctactaaatcaacatcgataactcacagacaacagaacccctgcaccgcccgaggacacctgcggcaaccgagcatccaactggcccgacaccggcgcttcgggaccgcccgactacaggcattcgagcccgctgccaagagcttgcaatcaaaagagacaacgggctgactacagaaacggcgcacacaacaggggacacagcacagaccacgcggagacactgggactggaaccctcaaagaccagcgcaaccgcccccccccccctgcgccgtgcaaatcgacaacacccctcacacgcccatgaactgaagacactacactccgctcgcaactactgccgcccccaacacctattgaaagcacatcaggagcatcttcccgcaatcctaccgatcgtagacagccctgagtaactaccattctacgacgcaaaaattacgatctaccataaacagaccaccatacatctcccacagtacactaccccaaaaataacgtacacctagcacactcgtaacactacaacgaacatacctacggtctcgaaccaagttcacacacaagacgaacagacaacacccaccacaacagtgctacacttgcgacacacattcggacacacccacccatcccacaccaacaccaaacccataaccacctacaacaacttactccgacccctccgatacaacacaagacaccaatagcaacacactcaaggtcaacccaactacaccactgaattccggtaataaccaacagcaacgacgcataacataacacacacaactatgccagtcatacctacatatacttgacatccagcccgtgccttacatctaccaaccaccaacagccaaactgcccaacctcagccaggcaaccccaccagaaaacaaccgcatgcacaaacacaacactcctacaccacgaggcaccacatagcctcaccacaacaacacacacaatcccaagtacacagccacgcccaaatgacagatcagaactcgctgactccacctacactgcacatcttctctagtcctatcctagctccaggccctcatagcgtctatatcacagacaaatgctaacactcacacgcacccagctccacaactagcacctcataccaacaccaacctcaagcaaacagcatagtcag

SEQ ID NO: 484336 - DNA, 245 bp, Homo sapiens
tgaatatcagcaggattgagtgtttgactgattgctaaagtagtataccatgtgtgtatattgccacatttcctttatccattcatctgctgatggacacctaggttgcttccaaatcttggctattgtgaatagtgctgcaatgaacataggagtgtagctatctctttgatatactgatttctttcctttttgatatatttcagcaagccacggtcaatcccacaagccacggttcaacccac

SEQ ID NO: 484337 - DNA, 264 bp, Homo sapiens
gtggcgatcgacctcgcgcaggaactttcgccgtccgcgatcatccaggtgcagcgcattccgcccgcccacgttgacgaaaccaccgcgctcagttgtgccggcaatgcgtcggtcctgtggaaaccggtgagcaaaacgcgtttggcggtctatgccgtgggctgcgacccggcggatcacgccgagacggtgcaattccgtctcaagattcttgaccagccttccctaaatacgcccggaccgattaagctgctcccctag

SEQ ID NO: 484338 - DNA, 125 bp, Homo sapiens
ctcctgggcatgtcctcctgctcagctcctctagctcctccagccgttcatcctcatccacatcatctccaaagcccatagggcgagaaatggcatctgagatctgctgggcacacattatggag

SEQ ID NO: 484339 - DNA, 156 bp, Homo sapiens
agactctcaacaacataagcacatggagggggtgaggggggtcatagtagaagagcgacggtgagagctaagtgtcgggcggtgatgtagaggggtgatggtagatgtggcgggtttagggggctctttgggtgaaagagtttttatgggcgtcag

SEQ ID NO: 484340 - DNA, 219 bp, Homo sapiens
ccaccgagataatctgcatgtctgggcagtagcgtgtttcgccaggctttaggatcacagtgtggtaagatcagctacatagcattcatgaccgtgaggctattggcaccacacatcagccaagaactgaccagtgaggcgccattcgcgtaatcgatagctgagtgtatgctgttgtaatggcaatcctagaaatagatttcttggtcaaatcgttcg

SEQ ID NO: 484341 - DNA, 533 bp, Homo sapiens
cacgagggccttgtcgctcgcgctgggcagcagcccggcgatggccgacccatccaaggatgcttcgatgctgaagctcgccgccagcagtggctgcaccgtctgtcacagcgtggagccggccaagaatgccgacggccgcacgccggtcgggcctccgtggcgtgacgtcgccgcgcgctactacggcgtcaaggacgcgcagaagcagctggtgcagacggtgatgaagggctccaacccctacgacagtcactggaagggcaaggccgccggtctggcgatgccgcccaatgcggtggccatcaacgaagccgacgccagcaagctggtcggctggatactgtcgatggacgtccgctgaaacttgacttgaaccccgcacccccttaaggtgcgggtccgcgccgatttgagcctccagcttgcgggcgcgttataaatgccgctaaagcgagctgcccacgacccgtcagcacgctttccgcgttcggcgggtttttcgcttttgtgtccgccattcgatgatcacg

SEQ ID NO: 484342 - DNA, 81 bp, Homo sapiens
ccggcacgaggctaacatgagataagtggaactacaagttgtataggctttattgtttattgctggtttatgaccttaata

SEQ ID NO: 484343 - DNA, 277 bp, Homo sapiens
  misc_feature (249)..(249): n is a, c, g, or t
gtgctctagaggattctttgcggtgcctttccatacacacctggagaacaggggaggttctcggcggcgcaaggtctacttcgcgtcctgctgacggtggcgctgacgggaaactggagtactaacggacatcatgcacacgctcttcctggagctcctggagcagtacgtggtgggcaagaaacccaaagctgatgcttgcgcaggtctgagactgtggtggagaggatgctgtccaacgtggatgtnccatctgcctgtaccaggtaccttcaag

SEQ ID NO: 484344 - DNA, 622 bp, Homo sapiens
  misc_feature (34)..(34): n is a, c, g, or t
aaagatttaggcaatagacacattcattcagggntggtgtgtaaacccatttcttgtaacaaaataccttcccatcagaaatgcatgttcacagaaaaaaaattactgcagcatgcccccctcccaaaattagctaataaaccctctcttgcagaacataaagaaccatagttgtgtataaattatcataattgtgtatttcatgcccccacgacccatatcttcaatagttggcttaccatttataggtaaaagaaacattctctaacccccatgcccttgaaccattgtctgggccgatttcattccagaagatagtgccttaaaccttgtcagctcagctgtatcttttcacattctacagcctccagagggtctagattccatatcatcaatacatacctgataaccctttgagaacattttctacctgtaaccctcagaagtcattagtagttccgatccagaaattctacctgtatgcttcagcattacaacatatatgtggcatttaaaatacacaggttaaaaaatgtccctttgatgaagctgtcctgtacacaggcctggtagagcctcaaatactcctgtcaatcctgtccacctatcacagccatcgctg

SEQ ID NO: 484345 - DNA, 190 bp, Homo sapiens
  misc_feature (59)..(59): n is a, c, g, or t
  misc_feature (62)..(62): n is a, c, g, or t
  misc_feature (149)..(149): n is a, c, g, or t
ccggtcttcagtcatttacgccttaatctactgagctactcacagatagaacttgcatntanactaattatcatgacgcgctgtgaaatctgcgctgtccatccatagtagtagacacttgtgctgagattctcccatctgtacacaantgggggagaagataatagaagtcattagtaatcacaaagta

SEQ ID NO: 484346 - DNA, 103 bp, Homo sapiens
tatacctgggccagagttagagggggcacgataaggttgacgaacattcgacttccctgcaaaccttggtatagatcacttccttttctgttaggaaacgaaa

SEQ ID NO: 484347 - DNA, 560 bp, Homo sapiens
gatctagaggatcccgtctattactgaatccccatcgaacgatcgctcgaccacccacacctgacgtaagtgacctcttccatttccttcaggttgtggatcgggttggactcctcaaccaccttgacggccggatcctgatggatcgtccgccacacagcgaacggattgagctccaccttggctgccgacgtaccgcgcgaacgatgcacgcggattgccttgaccatttcctggtagaccatacccggccagcgctcgtaaccacggatacgctgataggccatgtcggtttcagccggcgaccagtcgctctccagcagttcgcacgaacggaacaccagaccaatgaaggtctccggctccttcatctcctgcaggatctccagggtgatcggatcgacgaacagatcgaccatcaggtccatctcgcgcaggtagcgcatgccgatcttttcgttctccaagatgttcaggtcaatgtccttcttgtcgaacagaccaatcggatagttacgcagccacttgtcgaactggaggaagcagccagatcagcgtgc

SEQ ID NO: 484348 - DNA, 981 bp, Homo sapiens
ggcagcgaacgctgaatactgtgtactattgagcgcgattgtgccgaccggctagcgtagttgctctcgtaactagttgcactgtgcgcattgtgcgagtgctttgcggtcagtgatctccctttcgatcagttcaagcggatacaggtcgacatacactagacgctatgatacatagttgtgctatcgctcttacgcacttgcacaactaagcggatttagggtcataaggggggttccctggctttgacatccagacatgacttcctagtgggctttggtgtcgctcatgaggtcgtgtcgatcgtctacacacagccaatgaatctcgtggaccttgcgttggtgcgaatgtcccctcgtattagggggagaagatcttgagaaaatggagtaacgcatgtcaagtctcgtaagacgacggtacctagtgggtcccttggtgcgtcttctgtatcgcaatgtgagcattcatctggcatggaaacccaaaaccaacaaataaatgggccttccaccaggatttttgtcaatcatgcagcgtgaacccaatagaaacgtggaagtatgtgtatctgtgaatgagacagaatcaatggctggcattggttacatgggaccacaaaagctggaaaacgacggcacaggggccactgcacacgtatatgcctgcgcacagacgaccccaatgatggagactgacagaactaagcaaaggtacgccaagcgaaacaagtgagagccacacggcacacccacagccaaagagagaagaacttcaaacagcaagttgagagacatagcaacatggatagaaaaccaacactgcgagaaataaacaagcccataaagcaaggatagaccacgcacatcaagagaaatacgtccaagacccaacagaccccacgaaaaactacacgcccgtaatgactagacaagagccacatccaagaggacgaaaagccaaacacacaaaataca

SEQ ID NO: 484349 - DNA, 415 bp, Homo sapiens
agcgcatacactattagggagaaacccgacgtatattagcgtagcatgaatctgggactgacttacttacttctcaggatacaggtagacttaagaaccaataactccttgacttgggataaccgataaagatatccaccacctgagatgcttttctgggaacaacaggcagggacgtgacatgtcagactatgtatgcattagcatgccctatggaatttaaagatgcacagacaggggctcagataatatatgaccccgttgttaaggcacgttaaatgacatctcattcatcataagagcatgctctgttgattattgcttttgaaggcgatgttcttcatcgcgttcccgcttcattcacaccagtcatagcgccctacagagataactgctgctgtgaacaactacacgg

SEQ ID NO: 484350 - DNA, 199 bp, Homo sapiens
cggacgcgtgggctgcggcgcggtctggctgccccatgggcctgcgctgtagactgtcccccataggtcgccccagggcctctgcccaccctgagccccaccactctcagaacccccgatccagctgcactggctgacctcgctgcctcacctggaagaccttgcctctgtgcctgtggaggtccaggaggaaactgtg

SEQ ID NO: 484351 - DNA, 176 bp, Homo sapiens
cgaaccgagctggtaccccgagttgtgaaagtccattagcaaacaaggatgctgtgactcaatgtggggtggaggtggtgggactgtttccacagactccaagcaatgaagtcagttctgcagcagtcactagcagggctatcctccagtgcagttctgagattacctggagatag

SEQ ID NO: 484352 - DNA, 891 bp, Homo sapiens
gcccaactattcgatcgaagaggagtccttggtaggaaggatagaaggtgatcgaagaggctatcctagtgaagcatcttgtctaatcgtatagagcgtgtggatcctcatgcaattaagaatagagcgaaaggtgcaagttacagggtgccgcatttgagtaaggttgctaagttcgaaagtccgttggaaccttaacgtggaagttcttgaatacagacatgtgaagacttatgaatgaagtctggaattttgagatattcggaggtgaaaattgtcatttttgtataatagtgctgactgtaattgggttttgaaattagaacagagttgttaaccatacattgtgggctccgtgacctttcctaaggacaaaccgtgtgcaggccattgacagcacaagccctaaagctgtcaagaagacttgactcggtcattggccttcacttccttaagaattaaaggaaacctagcaaaagtgtggttgtacaactttgtatactgtctagttttaccttcagatctaagactggtaagtctgaacccagacatttgtataacagacttgtcagtgtgaaacatgaccttgatttttggagaggactttgttaatcacaacaacaattcgtaaatcttcttcctctatgtatattcgtgcagctagggcgcagtttgtgtaagcagttggaggtaatgcgtggtaacgctgttaagggtggcgtgttgcagtgcagagtgcttgggttgtttcctggtatctcccgattgctcctgtgtaacgaatccttggcgtgcgaaccacatgggtgccagttttttaaagtgctggcactggcttcaggcaccgggctgctataaaacggggcacacaggggccctcctgtgatgaag

SEQ ID NO: 484353 - DNA, 365 bp, Homo sapiens
aaagaggagctgtagaggacagccgggcgaggggggcactttgcgaacaggtcagagtctgggctcagtccccctggcagtgttgcccagtgacatagaacatgaactctgggtgccgggaacggtacctcacgcctgtaatcccagcactttggcaggccaaggcaggaagatcactagcccagtgttggagaacagcctgggccaacgtattgagactctgtcttctacaaagaataagaaagttagctggatgtggtgttggcaccctgtggtctcagctactcaggaggccgagccagggggatcaattgagcccaggaattttagagttggagtctgtctaacctgcttggggtaccgga

SEQ ID NO: 484354 - DNA, 262 bp, Homo sapiens
atcactcccattcctgataaacatcatcttaccatctctatactacacaatctatagacgccctcgtgtttacttctcttccttctctccttaatgacatttacgactattctcaccagacctcctaggctacccatactattataccactaggcaaacccttaaacagcactcctcacatcaagcctgaatgatgtttcctagttcgcctacaggattctccgagtccgtccctaagaagatcttggagtcgcccttgtgt

SEQ ID NO: 484355 - DNA, 580 bp, Homo sapiens
gagtcgtcacactgggttcgagttctgacagaatattcacaaagctatagtgaggaatgaatgagaaggtatcaaaagggcttaatacctaggtgataggttgataggtgcagcaaaccaccatggcacatgtttaactatgtaacaaacctgcacatcctgtacatgtatcctggaacttaaaataaaatagaaaagacaaagaaggatattacataatggcaaaggcttcaattcaacaagaagatctaactatcctaaatatatattcatccaacacaggagcacccagattcataagtaaagttcttagagacctacaaagtatgtttcacagtaatagtgggagactttcacactccaatgacagtattagatcattgaggcaaaaaaatgaacaaagatattcaggacctgaactcaacattggatcaaatggatctgatagacctttacagaactctgcactcaaaaacaacagaatatgcattcctcacatcatcatatgccacatactctaaaatcaaccacataattggacataaagcaatcctcagcaaatgcaaagcaactgaactcg

SEQ ID NO: 484356 - DNA, 164 bp, Homo sapiens
attacgccaatatcggccctcataaattcgctaatttccacacctaattacaggaaaggatctcaagaacgacactgttaaggataattccaggttgtccccgcctcacttatcccctggtcattcttgtgcccgagcgagcagctaaagggcgccaaaacaaa

SEQ ID NO: 484357 - DNA, 682 bp, Homo sapiens
  misc_feature (24)..(24): n is a, c, g, or t
  misc_feature (61)..(61): n is a, c, g, or t
  misc_feature (124)..(125): n is a, c, g, or t
  misc_feature (133)..(134): n is a, c, g, or t
  misc_feature (138)..(138): n is a, c, g, or t
  misc_feature (140)..(140): n is a, c, g, or t
  misc_feature (180)..(180): n is a, c, g, or t
  misc_feature (187)..(187): n is a, c, g, or t
  misc_feature (232)..(232): n is a, c, g, or t
  misc_feature (239)..(239): n is a, c, g, or t
  misc_feature (262)..(262): n is a, c, g, or t
  misc_feature (264)..(264): n is a, c, g, or t
  misc_feature (286)..(286): n is a, c, g, or t
  misc_feature (289)..(289): n is a, c, g, or t
  misc_feature (291)..(291): n is a, c, g, or t
  misc_feature (318)..(318): n is a, c, g, or t
  misc_feature (327)..(327): n is a, c, g, or t
  misc_feature (361)..(361): n is a, c, g, or t
  misc_feature (372)..(372): n is a, c, g, or t
  misc_feature (380)..(380): n is a, c, g, or t
  misc_feature (384)..(384): n is a, c, g, or t
  misc_feature (415)..(415): n is a, c, g, or t
  misc_feature (423)..(423): n is a, c, g, or t
  misc_feature (451)..(451): n is a, c, g, or t
  misc_feature (508)..(508): n is a, c, g, or t
  misc_feature (549)..(549): n is a, c, g, or t
  misc_feature (682)..(682): n is a, c, g, or t
tcaccaggggactaaacacaaaancaccagcaccatgagggcgctctcgaaccaaaaaagncctggtccccgtcagttaatgtgactgagtccgccattgaggccagtatggctggacccaaannaaccctcnnaatncncaactccctggccagcaaggagtgaagctccatgcccctnggaccangcctctagagtctgagcatatcctgcagcctcgatctcaggaggnaacgcangcagcccccctgcaatcagaaangnggcttctccagtcgtggtcttnttntntgtccacaagtttccagatggcccctncttggagcncctgcccaggcagggaacggccacatcctcgggnagagccaagantcaccgtntttngtgggcctgggaccaggcccagctaggacgntaggaggntgcctctgctgccatgggctggatcaanatggtggtggcctgcagcgggtagtagcggccccgccaggttttccagaagattttntttttaagcttctgctgctgctgtgggatggagcggaagtnctggccgttgaggttggaatggctgcaggtgccaaaccatcagccttcagagaggctcttggcgcagttcttgtccctgcggaggtcgtgatcctggtcccaagtggagaagggtacggagaggccgctgggn

SEQ ID NO: 484358 - DNA, 939 bp, Homo sapiens
  misc_feature (285)..(285): n is a, c, g, or t
ggtgaacggaagagtccttatgttgcagtaatgctgtatagtaactgagcctatcagcatcctacttcatacaagtagactggggaaaatgccagaatgtagattgccatcagagtatctgattagtgaacaaaggactgcatctgcagatagcataatggcatgaggcatgtttaacttctttgctatctccgacacattgaatgaggatcaaatttcgcagatgctgttctctatctcttaatgcttcatgggacccaatgttcttcgtcatcaagactaganttcaacgatgctaacccatttacatgagtcctgtaacagatcaatcctctagttactcgtcacttacagaatagttaccatgtctggcaatattgttatatcgtagtatgtattcatgagtacgaatagatttataggtgaaggtatctgctaatggcgacagtatgtacgaaatacgaaaattgggtgtaagtatacatcaaagttccatttcactgctgaatatgagaaactgattgtaactctctagatagcacatcgagaacctttgttccggactaccgcatatcttgttcacttagacatagtggctcacacttctgtgtcacgatcaacggatacgcatttcaatatttaataggtgctctgctgtttttcctctgaggcgacaccattattcgatcgattaaccagcagtacctcatacttcttagccagactctagctttatgacaagtattctaaacattatctaaaaccaaggctttatggcagttctctaaaacggatcgacacgtgacctggagatggtaacttcaacgaaatcactattgcccagacatgccgcataagttcaagcgtttgctgggcactataccacgtaggcctaacatgctctccgtaggtccctggaaacattcttgcctagtcctt

SEQ ID NO: 484359 - DNA, 157 bp, Homo sapiens
cagccacaacagctgctgctgatgcctcaactggcccaagcagtaggagcccctccacgctactgcgcaagacgcccactgccattaagactgagcgaacacctgcagaagtcaagaagacgactgcaaagtctgtaccagctgactagagcgacgt

SEQ ID NO: 484360 - DNA, 936 bp, Homo sapiens
  misc_feature (779)..(779): n is a, c, g, or t
gactctgggtccatcttcaagacactgggctgtggatcaacccaaccaccactcctcttccaagaatcatttgacaggttctttgggaggaactccttctctttttaacccactgcttttaataagaacaaagagtgggctgcaataggaatagaggtgaagaaagctggtggctgcggatgcggtgccccagacaccggggtaccgggatgtggagccttgagcctggtgaccgccagtgcaaacccaagagtaagaaagaaattgaggctcttctggcattaaggatcgagttcgtcttaagggaagaatgcaggatgaattcagggagggatttctcatgtttgatgagaacaggggattgtccaagattgcaccttatagccaggtcggtgatggtcctgtcgagactctgggcacgaaatcgccgaccaagtgcggaggtcacggaaaggttctggggaaagcccggcagaatgaagagctgaattgccaagaaaatggagtttgaacaatttcttgctatgatgcgaagcatttccaatgaagaaggaccaggcacctatgaagaactttgtgaggggctgagtgtcttggacaaggagggattggacagtcatgggtgtgaactccgcagtgtctagccacctggttgaatgatgagagaggacaattggagcctggttgagttcagaaagatccatggttgtcataagaagttttgtaggaattatgttgatcgatggagttcaaaaaagctgtaaggagtgctggaattntttattaacctgaaatttccgtttttgtcatctcggaaacgagctggcggttatggcagccgatgtaactgctttctgggatacaccaagttgtgtttgagaactcgtctcaacaaaaaacgcggcgtcacacacgcgggagaatatacttgtcaca

SEQ ID NO: 484361 - DNA, 697 bp, Homo sapiens
cgcacatgagacagaaaaactctggacaaagcaactttacttttatgatggtttctgcaggaaggaactggtgaggcagggtaagcaggcttgagattgctagtttgaataatttcagcctcccgagtagctgcgattgcagacatgcgccaccatgcctggctaattttgtatttttagtagagatggggtttctccatgttgatcaggctggtctcgaactcccgacctcgggtgatctgcccgccttggcctcccaaggtgctgggattgcaggcgtgagccactgtgcctggcccgttttttttttcttttcttttcttttcttttttttggagacagagtcttgctctgtcacccaggttggagtcaagtggtgtgatctcggctcactgcaaactccacctgccaggttcaagcaactctcctgcctcagccttcggagtagctgggattaaggcgcctgccaccacgcccggctaattttggtattttatagtagagagggggttcaccatgtaggccaggtaggtcctgaactcctgaccatcagggtgaccatgccaagacactatggaagagactgaggcatgttggaattgttcgacggacaaggagatatgaaaccagcctggaaccaacccatggcgaacaccagatttctccacaacatacacacctaagctagggcgaggag

SEQ ID NO: 484362 - DNA, 674 bp, Homo sapiens
cacgcgtccgacataccaccacatccggctaatttttaaaattttttgtagcaatagggtcttactatgttgcctgggctggtcttgaacccttggcttcaagggatcttcccgtctcagcctcccaaagctctgggtttataattgtgagccactgtgcccagcccatctttcagttttaaaaacaaacacgtgagcccctctttgtgtaactgttgagagctgatcggtcctgtgtgccaccttccctaggtggaggctgtatgtcatcttagttccggtgcttcttattcccccatcaagcaaccatgattattagattgaagtatacattttactggttactttatttaccattgtttgctgtatccaagtttcccctcctttttggcagtatttaatgacttttttttttttttttttttttgagacaatctcagactggagtgcagtggcatgatctcgtcttactgcggccacgaccccctgggctccagcgatcctctcacctgagcctcctgagtagctgggactacaggcatgtgccatcatgcccggctaattttttgtgtgtttttttgtttttttgttttttttgttttttgttttttttttcgtagagatggggttttgccatgttggccaggtaagccaccgcacccagccatgacttt

SEQ ID NO: 484363 - DNA, 206 bp, Homo sapiens
cagcaagaatggcatatcagatccatggttcgttacaagcttcattttaggtcacaggccctaaagatgccattatgctcagtttacatcaatatacaaagcccaacatttactatttcaaaaacattaaagcaaaccccctaaaccccacaccgaacacaaaggcttggtttggacatcaccactgtatatgccattcttgcttg

SEQ ID NO: 484364 - DNA, 878 bp, Homo sapiens
  misc_feature (41)..(41): n is a, c, g, or t
  misc_feature (222)..(222): n is a, c, g, or t
  misc_feature (238)..(238): n is a, c, g, or t
  misc_feature (252)..(252): n is a, c, g, or t
  misc_feature (258)..(258): n is a, c, g, or t
  misc_feature (266)..(268): n is a, c, g, or t
  misc_feature (270)..(270): n is a, c, g, or t
  misc_feature (273)..(274): n is a, c, g, or t
  misc_feature (285)..(286): n is a, c, g, or t
  misc_feature (299)..(299): n is a, c, g, or t
  misc_feature (305)..(306): n is a, c, g, or t
  misc_feature (314)..(316): n is a, c, g, or t
  misc_feature (318)..(319): n is a, c, g, or t
  misc_feature (334)..(334): n is a, c, g, or t
  misc_feature (348)..(348): n is a, c, g, or t
  misc_feature (350)..(350): n is a, c, g, or t
  misc_feature (364)..(364): n is a, c, g, or t
  misc_feature (368)..(368): n is a, c, g, or t
  misc_feature (384)..(384): n is a, c, g, or t
  misc_feature (392)..(392): n is a, c, g, or t
  misc_feature (422)..(422): n is a, c, g, or t
  misc_feature (426)..(429): n is a, c, g, or t
  misc_feature (437)..(438): n is a, c, g, or t
  misc_feature (443)..(445): n is a, c, g, or t
  misc_feature (447)..(447): n is a, c, g, or t
  misc_feature (456)..(456): n is a, c, g, or t
  misc_feature (458)..(458): n is a, c, g, or t
  misc_feature (464)..(464): n is a, c, g, or t
  misc_feature (467)..(467): n is a, c, g, or t
  misc_feature (477)..(478): n is a, c, g, or t
  misc_feature (499)..(499): n is a, c, g, or t
  misc_feature (503)..(503): n is a, c, g, or t
  misc_feature (541)..(541): n is a, c, g, or t
  misc_feature (561)..(562): n is a, c, g, or t
  misc_feature (569)..(569): n is a, c, g, or t
  misc_feature (780)..(780): n is a, c, g, or t
  misc_feature (809)..(809): n is a, c, g, or t
  misc_feature (813)..(813): n is a, c, g, or t
  misc_feature (854)..(854): n is a, c, g, or t
ggaattttagggcaacaaaagtctaaaaggccacaaaaganaaatagcaccactgtcatttgaacaatggctagttacttgcattttttggcattgttaatcactgaatctgggttttcctctgaattccacacagagcatgcactacacaacatttttatcataaaatacttgctttctacacacatttcagacaagctaccaccagcaacgatcaatacnatacatcggggctgancaatctcagtagtnggtganacacattnnncnganncctgccaaacnnaggaactgaatangctgcnngcaaaccnnncnncggagagttaaggcntgccgttttttccntntttttggttggttngggnggggtagtgtgttttngggggggnggggttgggtttttgtgacagactaatggntttnnnntccaaagnnttttnnntnttggttttntntttggnttnttgtggagtnntgtgaacagcagattccgaantttncccatcttggtagttcccaaggttacgttggccttttntgaccactccctttgccagnngtccagnaagaacttgcagcatgatcacctgcctgctgcacttccaactctaagcagcaaacttcaaggagccaaagaggagtccccagtgggcaaggggagcagagaagagaaacgtggtaaatgtaaacctaaaagacagtaaaatgggatacaatccccattcaaatcccagagatgtgggcaagtccccaaaagtagttgttagattaaaaaantgggcacacctcacttcccaaaaaatatnatanatagaaatttcggggatacttggaaaatagagaaatgctcnaatgaaaccaagctcttcactgta

SEQ ID NO: 484365 - DNA, 758 bp, Homo sapiens
ggagtggaggcgcgtcgcgagactatgcaaggcgacgcgcatgttcggcggcgagatccttatccgagaaagcgagagatgctctggcgcgggcggagccacagaacagtccagaggatgcccaacggatgggttaacttcttgtattacccgtgaaggtcttcagcttcactctcgggtgctgggactttctgctgatgcgcgtgcgacgacgattggctcgaggtactgtgagactcgaccgggccaggtgtagggctgtaggactgatggagtccgctgtggggatggagagggacagggggggtattcgggccaggaacttgtatataattctgctcgaactaaacgagaagacgacaaatggcggcagtagcagttaagagtgtcgtgggacatgaggtgcagggagcaccgaatcttcccgtcgtaacacggccgctcggtctctagatgtttctgtttaaatcgtcgtagccctagtctagagcgccggcttaggggtcaggcccgggttcgagtcccagccttcgccgctgcgtcgagtgacttaacctctcctagcttcagtcacctgcagattgagagtctactactttttactgggtcagaacttcctattccttagctgcaaaataggcagaaagtacgcgtcaaatccttgtctcaaagaattgagaagcgttacactaagagaacccggtaaaaacatcgatcacacaggttgttgtagacgtacaacaaaaatttagttcact

SEQ ID NO: 484366 - DNA, 326 bp, Homo sapiens
gagctttgtgggtaccgtatggaaggcagcccgtgtccccagaatctcatgacctttgaagggggaagcaagtgtctcatctcagttccacagagtcccaggcaggtctgtcctcagattaggttgctccctgtgggtgatcttgagccagtgtggccctccccaaccttccacccacccacagaagtgagaagtgctccatgcctccccctccccaggagacccaacatttacaggaactcttacagtgcccagctactctgcaatccagatccaccaggatcccaaatattcatcccaagacacccacgggggcaagtttccac

SEQ ID NO: 484367 - DNA, 520 bp, Homo sapiens
taatggatgacttggagagaggttcaagatttcagtggaggaattaactgcaaatacagtggtagtagcaaactagaattagaagtggagccagaaggtgtaactgagttgctacagtctcttgataaaacttgatcagataaggagttgcttcttatggtggacgaccagagaaagtggtttcttgagatggaatctactgtgaacattgttgaaaaaggattttgaatattccataaacttagttgataaagcagtagcaaggtttgagagcattgcctccaatatcgaaggatgttttgctgtgtgtaaaatgctatcaaacaatatcatgtactccagagaaatttttcataaaaggaagaatcagtcgatacggcaaactttattactgttttattttaggaaattttcacagctaccccagccttcagcaaccactaccttgatcagtcagcaggcatccttattgaggcaaggccctccagccaaagaaaagattatgacttactttgtttca

SEQ ID NO: 484368 - DNA, 105 bp, Homo sapiens
gggctctgtgctcatcaccttctgcctcattatttgctcatatactcatcttttatcatgtactacaactgtgatttagaaagtacattccaccgataggggtac

SEQ ID NO: 484369 - DNA, 180 bp, Homo sapiens
gctgatgttatatgctgacagagctttatctagcccatcattatcttgtttgtgcttggtttggtctggcatgacttttgctaaggcaagtctagaagagtttttctgatgtatcttctagaatttatggctcggtctagattagttttgatcccttgagttggtttttatataaagggg

SEQ ID NO: 484370 - DNA, 744 bp, Homo sapiens
gcaatatcagctgggcgcttataatcctgacactttgggaggctgagacaggcagatcacttgagcccaggagttcaagcgtagcctggccaacatggcaaaacctcatctctactatatatatatatattatataatgtgtgtgtgtgtgtgtgtgtgtgtgtgtgtgtgtgtatcatgttatcacacaaagacacacgcgtagggcatcacacaagggagatgatgaataagtggtgctgtcctatataatatatgtggtgtcgtcatacgtagtacgtataccgtcgtcgtcgtgcgcggagagcagcatgcagcagcagcagagagaggggggggggcgcgtgctgcatctactacataatgatgaagaccaaataataataatgtgtgctgctgctgcagcagcgaagagaagtagtaacaccgctgccgcgcacgagggcggggcgtgctgtgtcgatgagaagatagtaacaacaaccagctactatcatccatctctatcaatgatgatcgtcgtggcctcgaagcattcagcgcggcagaaaaaggagtcgtcgtgatgaagagaagatagaagagaagacaacaaaagagagagctgtgtagatatcatcatagcatcagcacacagacgcagagacgaccgggtcatcagcccaacgtgtagtatgtgtactaccacacgggggggcgctctactatactagacccacgcggtagaagtgggggagagagtaa

SEQ ID NO: 484371 - DNA, 517 bp, Homo sapiens
accaaatccaagctccagatgcatctcatgtaaccatcatacagttcatagtcattaacttaacctgcttctagcaactacaactaacaagaggtcaaaagcacatgaaccaaaggggcagtggattcctcacacattactcctaaggtatggaatcaaactaagtgttaattaacaggtgaataaatatagaaaatgtggtatcatttcacacaatggaatgctattcagccacttcaaaagacagcaacatctggttcatgtgcaaccacacatctaatgcaacctggaggcacattatgctcaagtaaaataagtcagcaccaaaacactgtagaagcagagcagtagcacatgcatgattgcctggggctgggggtggcaggcagcatgtgggtcaaaagtaatgggtcttccctatgtctcttaccttcaacatgtaatttattcttctctccagttttgattcaccagggaatggaattatatgctgaggagtcaaaacttaatgtaggta

SEQ ID NO: 484372 - DNA, 392 bp, Homo sapiens
actcctagaggatccccccgcagtctggggcttgtatggtgtcagaacgctgcaaaggagcttagccattatcatgttttgcatttgtatggtcgccttcacccttggccaaattatttcttctacattctttttctgcttctgcctcctggattttacagtctaattgaggagacaggacttgttcttttgcatacgttttagtttgtcgaacaaggcttggtatctcttgtcattgcccaaacagtgtttaagcctgagtgtgttccgacggtttcgatcctacactggatgggttgcttttctggtgtgtcgccggccgtaggatccctggctgggcatacaatttcagcgctggccttctgtttctgcttggccgtttcctcctcctt

SEQ ID NO: 484373 - DNA, 186 bp, Homo sapiens
ctgtgcctaccatgaccaccttgagtatcagtgccagaaattccttacctaaagtggcaaatgcgaccgggatggggtgggtcatagccatctgttatgcctttgtattttctgcactgattgaatttgccactgtcaactatttcaccaagcggagttgggcttgggaaggcaagaaggtgccag

SEQ ID NO: 484374 - DNA, 318 bp, Homo sapiens
cgaattatgcaccaactcgatcggacgacccgaggaacggaggggggagcctttagtgctgactggggatactattttaatgaatttccggatagctggttcaagacggcgtaatttcactttttcttcatctggggacggggtaaaaaatgttgtatcacctccctggtaacagctgtcttctccactcatatagaaaaacctaaaagaaaaatatttctttaagaatgttttcaaatctgtttccactatttttaaaagccaacgattagttgtacaatttattctaaggggggggatagaatatttctaatgctg

SEQ ID NO: 484375 - DNA, 1360 bp, Homo sapiens
cgcatggctcatgcgtgtaatccctgcactttgggaggctgaggcgggctgatcacctgaggtcaggagttggcagccagcccggcaaccatggtgaacccccgtctctactacaacaataccaaaacaaacacaacaaaaaacaccaaaaattagccggcgtgtgcgtggtgcctatagtccccagctacctggccacggcacacagaatcacttgaccccaggacggtgccgcatcgcccgtcctgcccgcgatgtgcccactgcattcccccctgtgtccccccccactgacgactcggtctcccccccccccgtcccctgtccctgcgccttccctctagctcaacctcactgtctcccctttggtaccggcccgccccgtcccggccgcctccctcctaccacccgccaacttcacgagactccaggcaccaccctccctttcagacggcccccacctgcgtcaccttcttctaccctttgcctgcctcccgcgagtcgcccttcctggctggttgcgccaccttgccttcctttccactacccccgggcttcctccctacctgcctacgcgcaccgccttccttggtccctctgactgccacgtcccgcgtacctctcctttcactccccccttcctcccaccggccccccctccacacgcccaccccccgccgcctcgcctttcgcccacctcccccctttccacctccgcccacaccccgccccctcccccccaccccccccccccctccacacatcccttttgctctactggagcatacgtacccccccccccccccccccccccccccctcccccccccccccccccccccccccctccccacccctcacctctctcccttctcttccaccctcttccatccttccctccttccctactcccctccctcacacaccaccatcctttccccctactcccccctcctcaccttatcccccaactctaacctcttccgcttactccctcccccccccccccctatcttcccccccccccccgcccaccccccctcgcctcccccccccccccgccccctccgccccccccctccgcccggcccccctccctcgcgctctccgcccaccctccccctcttcgtcccgtctctactcgctctactctcctccccctcccccccccctcccccccccccaccccacccctccctcactcccctccccacccccacccaccacccacacaaccccccacaccccccccccacacccccaccctcactacctcccccccctcccctacccccccacctgcatctacccccaacaccctcccccctcctccctcacacctcctcctccctcccccccca

SEQ ID NO: 484376 - DNA, 1080 bp, Homo sapiens
actcaattcgacaatgcgtcctcgctagaagataaaatccatctgtaactaccctatgttgtgaatcctctgcatgacaacagaacttagatgcccactagtgacaaaatgacatatcttgacggtccatgctacttccttgagatcttccgaaattatttgcttctacttcataccagacaatagtctctctatctgtagcgatagcagagaacccgttgggtctccccagtccttatgcaccgggatgcctgctatgtcccttcgtcgttgaaacggctgatgttgctgatggacgagaacaacatagatgtgcaatgcccgtcccgaggagtaatcgctggatgaatagtccagctccttagatgcattacctgtctgagctccataatcacgtgggcgtaatgtgggcctatgtagttctactatgcatacactttattgcactgatgcatagacagcaatgtgggcatgacccaacgtgatgtgatgtactagctgtgtgtgccgatgtatgtggtgaccaattgtgccctaggataacagttcctgtgtgctaagcctgaaacacaagttactgggccccgaggatacaagctccttttaaaacctaggatatatttaatctactcattaatgttcctccagagcgtctgcaattgataatacctgtatgcatgcataggttgcatcttgcttccccaagtgtatacgataaggggaagccaggcgtataaccaaagtatggctttaagattctcattggtctcccaccaagctactttgggaatgaacattccggcgggatgtccccaaaaggttaattctttacaaccgtaagtgttgagtactcatgaagaaacactggcataccgaatctggaaggtgacccatgcacacttcaggcttaaattggctaccatgtgtttgggcacgcttatctcacagggaaaaatccggcttttggggaagcgaaacaccatataaaaggtagcaagcgaaacagactagtgtacagtataccaagcataagacaagtagcaaaaagagaataaatgcaaacagtcaagagagaaaaca

SEQ ID NO: 484377 - DNA, 906 bp, Homo sapiens
cccaatgtcccaggtgtaggtggagcgccacatctacctgagattattagtacgaatgggcaagcacgtgtttggcttatagcacctctggatgagaagagccttggttaattgactcaattatgcttcagcgatgtcctaagagtacctggcaaagaattctgcaaggctttgttcagtgccagcgattatgaagtggctcctcctgaatgtaccatcggaaagctgtgtgagacggcacgtctcactcacttatgtcttggatctccgtagagatcacattaatgtgtcttagtctatctcttgtatcagaacgtatgttgcttgttgagacgaatgtgtagtggtcataagcaagatttgagtcgtgtttgtttgtcttgtcttgattttgtaaaacagacgataaaaataagcatgggggtaatagctccttgcatcttctgactgtaagatctatcgtttcaaaatggctagtccagagtgtgcaactgtatggagaaaagagggatatgcgggagaggtgtcgaatggcgctgaatgggacatagagcatgctgtggaactgcggggtggttctattcctttgagataacgtcactttatctacatacttgttaatgctatattgacatagcattgtctctggattgctagatgccgaaaaggtccagatatcagtgtgatatatctgggatcatcactcatcgcattggggagctactggaggaaagtaaaatgggtgctggcaaggtaaaaagggagcccatccgttgtgccatgtccttgcccagtgtgggtaccgttaaaggcattgtatcattgggctcaagattgtttgcacgcacagggccggttgggaccaggggtagaattgggtccaaagggcccggttgaatcttgatg

SEQ ID NO: 484378 - DNA, 205 bp, Homo sapiens
tcgtcgtcagatggggaggtaggcgcagacgacctagcctgaattagcactgtaacctaccagatgtggaaatgtctggcctctgtggaaagaaaagtaggagatgatccccagtgacagcacccagtggggaggggttccagtgaacccacagtgctctttacagaagcaagagatggcttgcaatgtccatctgacccatctt

SEQ ID NO: 484379 - DNA, 501 bp, Homo sapiens
ggcgactactggaattcagtaaccaccacctcgtttggttatctcaggctcgggatgttgtagctacattggaaagtagggaggtggtttacgaagtgaagatgaggtcaggtgcctgaattcaacagtctacccattccccttttccagataatgctcggaatattttacaatgtcctgactggtatgtcgctggcggacgttcccttcacggagaaagattgtgagaatggcccccagaacatatacaatctttacgagcaagtcagctacaactgtttcatcgctgcaggcctttacctcctcctcggaggcttctctttctgccaagttcggctcaataagcgcaaggaatacatggtgcgctagggccccggcgcgtttccccgctccagcccctcctctatttaaagactccctgcaccgtgtcacccaggtcgcgtcccacccttgccggcgccctctgtgggactgggtttcccgggcgagagactgaatccc

SEQ ID NO: 484380 - DNA, 103 bp, Homo sapiens
tggatccttatgaggaacgtcactcacgcattctcctgtactcagccttcggaagtagctgggactaccaggtgccctgcaacaaaactggctaatttttctc

SEQ ID NO: 484381 - DNA, 181 bp, Homo sapiens
gctgcagcccaagagcaagcccaccagcctaagtccagcagaggacctcccacccaaggtcttgttctaatgagaaggggacgtagccacagaaaatcaatttatctataattacaaaattctcttgactcaccttaaagttctattgacactagtgctttaaacctattggaaatttgat

SEQ ID NO: 484382 - DNA, 961 bp, Homo sapiens
  misc_feature (164)..(164): n is a, c, g, or t
  misc_feature (285)..(285): n is a, c, g, or t
  misc_feature (297)..(297): n is a, c, g, or t
  misc_feature (317)..(317): n is a, c, g, or t
  misc_feature (322)..(324): n is a, c, g, or t
  misc_feature (330)..(330): n is a, c, g, or t
  misc_feature (337)..(337): n is a, c, g, or t
  misc_feature (348)..(348): n is a, c, g, or t
  misc_feature (352)..(352): n is a, c, g, or t
  misc_feature (377)..(378): n is a, c, g, or t
cttctgtttgatgggtgcaacctgaccagagagagctggaaggccctggagcgggccagcttctctaagctgaagctgcagcacatccaggccccactgtcctgggagttggtgcgccctcatatctatggatatgctgtgaaatagtgtgagctggcagttangagctgaatggctcaaagaatttaaagcttcagttttacatttaaaatgctaagtgggagaagagaaacctttttttggggggcggttttttggttgtgtggtttttttttttttttgggngggaaaaaagantttggctctgttgcccaggntggannntgcagnggcgtgntctccgctcantggnaacctccacctcgcgggttaaagcnnattcttcgttgccgtgtaatcccaggtactgggaagggcggaggcgggagaatctctggaacccagagggcgagggtggcagtgaaccgagatcaggccatggtactctagccggggtgacaagagcaagactccgtctcaaaaaaaaaaaaacacaaaaaaggaggtggaaaccggggacacggggccccccgggggtcgccaaaggcgggttgtgaaactcggggggcaggtgtttcccccccttgggcccccaaagggggggggactaccgggtggaaacggccccggacgaaataagctcaaagtttcggaaacacagtcgggacgcctggcactccaacgccgcggggcgcttccgaaataaactcacgggtgcccccgctgtctgccagttgtgttcttgttgcgatcttccccaggtgggtcggatccaccagttgaaaaatggctgcgcggcttcccaaaaggggggggggcggcgcaccactgggtgatggggcgacagcatcgagcgcaatgatgggcccacgagtcggaagatgtgcataagatagaagaggatgtgtgacggacggcatcg

SEQ ID NO: 484383 - DNA, 362 bp, Homo sapiens
tattacgatcctttcctctctcacgtggatctcaagccgaactgcttgcttgtacttctccacattcttaatgatcatcagggcaactcgagccccacccctgcgatggtcaacacattgtacaactcggccgaaggtcccctctcctaaggtgctaacgatttcatctgaaatgaaagagagcagggtcggggagagggagggagagaaggtggggaatgagctgagttggaagaaaaaaggggacagcaacctggggtggagatgaaggaaggggaacagatacagatggtcacaggggaagaaaacccctgcgtgatttccaccacctttaacccatgggccgtgaaagagggaaggat

SEQ ID NO: 484384 - DNA, 784 bp, Homo sapiens
  misc_feature (164)..(164): n is a, c, g, or t
  misc_feature (285)..(285): n is a, c, g, or t
  misc_feature (297)..(297): n is a, c, g, or t
  misc_feature (317)..(317): n is a, c, g, or t
  misc_feature (322)..(324): n is a, c, g, or t
  misc_feature (330)..(330): n is a, c, g, or t
  misc_feature (337)..(337): n is a, c, g, or t
  misc_feature (348)..(348): n is a, c, g, or t
  misc_feature (352)..(352): n is a, c, g, or t
  misc_feature (377)..(378): n is a, c, g, or t
cttctgtttgatgggtgcaacctgaccagagagagctggaaggccctggagcgggccagcttctctaagctgaagctgcagcacatccaggccccactgtcctgggagttggtgcgccctcatatctatggatatgctgtgaaatagtgtgagctggcagttangagctgaatggctcaaagaatttaaagcttcagttttacatttaaaatgctaagtgggagaagagaaacctttttttggggggcggttttttggttgtgtggtttttttttttttttgggngggaaaaaagantttggctctgttgcccaggntggannntgcagnggcgtgntctccgctcantggnaacctccacctcgcgggttaaagcnnattcttctgcctcagcctccctagtggctggggattgcaggtgcccaccaccatgcccagctaattggtattttaagttgacgacagggtttcactacgtgggccaggctggtcttgaactcctgatctcaggcaatccacccacctcagcctcccaaagtgctggggatgacaggcttgagcaaccgcacccagtcttagggttttccggtttcggttctcgaaacggagtttccgctctggtgtgcccaggcgggacgtgcaaatgctgtgatctcagtttaccacaacctcccacctcccgggtcacaagtgatcacacctgcctcagcctcctgagtggctggtatacaggcttgcgtcaccacgccggctaatttggtactttagaacaacctggtgttcc

SEQ ID NO: 484385 - DNA, 931 bp, Homo sapiens
  misc_feature (240)..(240): n is a, c, g, or t
gctgctctgggtgcggcattgccagccggctgtagcgcattacagggcagtgtcttctgcatctcctagtgaacctcgggagacggcagatccggcgcctggtacccgacgaggcggagtaccgggagaattcccgggcactacacattcggtccccactgtgagtcaagagagcggtcacatgggtagtaccgacgttgcccacaggatccgtgggactgcgaggccacaaaacttgcnccctgttgaaaaataccttaccagtgccagctgcatgcgaaccttgaatgaggcccatttcggaccatcacattgaaagagggagagcatggatatgcacagcgcataaacaccgtcgtcccacaaagcccatttgggacaggtgaccatggcacaaacacttcataacttacgcccgttacaaccacgagtgggcttcgagacaattcacgaccactagtgacattaccatactatacgccctggccacgatcggcataccctaggggagccataatgggcaagggtacaatcacatatcacatggcaccccattgggaggatgcattccgaatatgagtagagacattgaacggcacgagcactcccaatacaaaaagccttaaattaccaacgaggacctaaaaaaaaaggagacagaccaggccaaatacactacctcctacttggtcaccattcggcaatccgcaggacaaattcacggggagcgcaatcttacctttgcaggacacggctttatcatcctcccaggttcttggccacacaacatcccaacaaagtgcgcataaccccacaaggcgcttcccccaagatggacggcggggtcacatgtgggcaacaccatgtaccacccgtaggacttacaatgataggcatggacccatatgtgagccactgagagtgcatgcat

SEQ ID NO: 484386 - DNA, 1337 bp, Homo sapiens
agaggtggccaataatgttcgcgcaaagcgactaggagctactacagccaggatgccaatgcctcttccctcttagacatctatagcttctggctccatacaggtctgccaaggtcccagagcgaatagtttacatgctaaataggaccagtggctaaccaaagctaagaagaaggcctcgatccagtgactagttgaggactagctagctgcaggaggcacgcgacggaatttcaatggtgcctccagtcaaacgaacggtctgcctgtatccatgtccaaagccgacgctctggtctcgccatccttgggatatggctgcatgccaatagcagtcaggacgcagtagcaaggcaagctgagatgagtccaagtcgtatcgattgcatcgtatgacggaggacacaacatacggcacaaccagtctggtccagcaaggagagttaagccctcatagctcacatgtgccagcctaaagctctctcctcaatcaaggccaagaagctcctagatatcttgatttctagagctcaactgctccggatggggatagaagcccaacctagaagatacccacgaagcccaacagaataagcacctgttgagccacggtaacacgctccagactaaacaagcccacctcctcaaataacctagcctcgatgcaagccaaccttaccatagtagcgccaagtgggtacaagtcaaggccaaggtaaccagccacgtgagacaagccagcaagacacgccacgctagcagcgggatgcacctcaggaagcggcagcggaagaacgcgcacagcagacaagcccccccagcaacgacttggtactccttaaacacaaggcaacacctctggtgagcccaaacgggccccccagatttaaacacgcccaggttacatcgaacccattaacccgggacaccaaagttctctagacacgtgcagggatctcccatccacaccgacaccaacgagaccaagcgcgcacaacagaacccgcaatcgaccacaacaaccaacggccccacacggaggacacaccccccgcgagatacttatgttaccaccacccaaaagaaaactactttgtacaacccaccacctcccatcaaaaccgtcgtcaagtaactctccccgctgtcaactaatacaacaacaacacaactctctacaacctacttagctaaacacacaacacccaacctgacacatctataccacccaaccaccaccccataaaaaagaagccacacactaacagcccaacatctatcaaccaatacactcgcaacacatatactgaacttcccactaaccatacatcacctaa

SEQ ID NO: 484387 - DNA, 626 bp, Homo sapiens
tgaaggaatcttagacagcaaaactctattcgccaaacgactgctgtgaattatacctgattaacattcctgacaccatctgtgtggtcatcctttccctgtgacctgttcagtggacagctttcaatgcatgtgcttgtatgtgatggtcccatcttggccaagaacttaccttcagaacatactactaataatgcagccatggagcctgtcatgccagatcccaaatgagtgccttccgaaattgacccacctgtggagctatttacaaatgtccatgtgggagacgagagagcatgagagcacatgtagcccatgcctgctggtcagcatggctcactctgtggttcacctgtagacagagagcatgatcaatgtgtacttcagacaccagaaatgtctggtgtgctttggtcccaagtgggaaaagagaactgcccatgcccatgcttgtagattatcgcttaccttgagaccttgatgcccacactcgcggtcgtatggacttctgtgacacgtacttgtctcctggactgaaccattgtgaacggaggcccctaaacctagttctcatcctcccctggtctgcacatgctagctggagcagggattgacccaagacgcga

SEQ ID NO: 484388 - DNA, 291 bp, Homo sapiens
tctcattgccctatgtatgccatgccctgccctcttagactcaaatgcggtggggacctacgcctagcccccgtgcacagacagcccttcccacagtgcacagacagccccacccacagtacatgatacgccctgcccacagtgcacagaacaggcccacccgatagtgtatcccacgagccctaccccacatgtgtacacctacagtgccctccccgcacaaccacactagcacgacccccgaccatacctcagcagagctgggacgaggctgcagacaaggactttgcc

SEQ ID NO: 484389 - DNA, 267 bp, Homo sapiens
ccgctacacttccttactggttacatgcagttccaaacattgttcgctgaatttctctctcaccagcagaattggagtcatatctttgtgtcccaatggacgtctatttcatcagataaacagcgatggacgcgtgcatgttcttcacacaagctcggtagacaattccccgatagcgagtttgggccctatcacctaccgtacttctagaatactttcagacgaccaatccactgctctaagaatagagagctgagagtttgagta

SEQ ID NO: 484390 - DNA, 888 bp, Homo sapiens
cgtagccggaaacatggcctccgattgtggctgtcactgatggtgtcatcaaggtgtgcaagcgacatgaaggtgcgtaggtcttcaacgccagtgaggaggtgaagaaagcgcaagaaggcggtgcatcttactagcgctgagtgaggatcaatgcaagaacatcgatgcctggaggagggcaaggagatccatggtgggtcgactggtaggggcgcagagctgtacggaggatgcgccgtacgcgcgaaccttggttcaagatggctggccagataaggaactggacgctatgcccgtctatgactgcaaaccgtatgagatcgcaacggatgaggcaaagaccgtgacggactcatggcagattgactacttcctggggacccgccgaagagacaagtagccacctatacagacggcagaaatagaaggaaatagaccatgatgccaacggaagagcccaatcaagagcatagaagcgtgacacaggggatacaaagacgatggacaggagggcaagggcaagagaccatggcattaccggaaaagaaagggaacaccaagggaacgcggcctggacagaccgcaagggcgagaacgaagcgcaagaaggggagggaaaaaagggccccggacacagatccaacacacgaagaggaagtggcaaaaaggcacaaagagaagaatcacaaagacacacacagacaatcagagggaatcacaacaccatgggccataggagaaggcaaagtcaacgggaccagagaacgcccaaaaacaacgcatggacaccccaaaggagagatgggaatgagaccacaggccatggagcacacgaaatgagacagtagcaaccaacagacgacacggcgaaggggagggcaacag

SEQ ID NO: 484391 - DNA, 135 bp, Homo sapiens
ggttttaaaaagggggggggcccccaaaaaattttttttttaccccctttttcccccccctgggttttaaaaaatttcccccaggggcccctgggaatgggttttgttccctttaaaaaaggggtgggggtttta

SEQ ID NO: 484392 - DNA, 477 bp, Homo sapiens
ggggggggggggggggggggggggaaaaaaaaaaaaaggggccccctctttggttccttggaggtccctggtcggagagggacatagaatctgtgacctctgacaactgtgaagccaccctgggctacagaaaccacagtcttcccagcaattattacaattcttgaattccttggggattttttactgccctttcaaagcacttaagtgttagatctaacgtgttccagtgtctgtctgaggtgacttaaaaaatcagaacaaaacttctattatccagagtcatgggagagtacaccctttccaggaataatgttttgggaaacactgaaatgaaatcttcccagtattataaattgtgtatttaaaaaaaagaaacttttctgaatgcctacctggcggtgtataccaggcagtgtgccagtttaaaaagatgaaaaagaataaaaacttttgaggaactctcgtagtctggtt

SEQ ID NO: 484393 - DNA, 289 bp, Homo sapiens
tcggtggtggtcacttacggtttgcgttgtctcttacgcttttctcgttagactcgtacattctctgctcactgtaggtctcatgaaacacattgtttccttcataacagaacaaaaaactttaaggtaagtcataaggatcgtttcctcttgtgaaaaatggggaagttcgtctatatcatgtctattgtctctaccaaatccatgagtcagagaaaacatgaagcacatcacactttttgtgcgatcccatagcactatgctactctccagccatcgtcagtgacca

SEQ ID NO: 484394 - DNA, 1295 bp, Homo sapiens
actggcttcaagcaatggtaaaaaaggaaaccctgaacgtccccacaatcggtgtcattgccgttgtcttagccacacatctgtgcgatgaagtcagtttggcgggttttggatatgacctcaatcaacccagaacacctttgcactacttcgacagtcaatgcatggctgctatgaactttcagaccatgcataatgtgacaacggaaaccaagttcctcttaaagctggtcaaagagggagtggtgaaagatctcagtggaggcattgatcgtgaattttgaacacagaaaacctcagttgaaaatgcaactctaactctgagagctgtttttgacagccttcttgatgtatttctccatcctgcagatactttgaagtgcagctcatgtttttaacttttaatttaaaaacacaaaaaaaattttagctcttcccactttttttttcctatttatttgaggtcagtgtttgtttttgcacaccattttgtaaatgaaacttaagaattgaattggaaagacttctcaaagagaattgtatgtaacgatgttgtattgatttttaagaaagtaatttaatttgtaaaacttctgctcgtttacactgcacattgaatacaggtaactaattggaaggagaggggaggtcactcttttgatggtggccctgaacctcattctggttccctgctgcgctgcttggtgtgacccacggaggatccactcccaggatgacgtgctccgtagctctgctgctgatactgggtctgcgatgcagcggcgtgaggcctgggctggttggagaaggtcacaacccttctctgttggtctgccttctgctgaaagactcgagaaccaaccagggaagctgtcctggaggtccctggtcggagagggacatagaatctgtgacctctgacaactgtgaagccaccctgggctacagaaaccacagtcttcccagcaattattacaattcttgaattccttggggattttttactgccctttcaaagcacttaagtgttagatctaacgtgttccagtgtctgtctgaggtgacttaaaaaatcagaacaaaacttctattatccagagtcatgggagagtacaccctttccaggaataatgttttgggaaacactgaaatgaaatcttcccagtattataaattgtgtatttaaaaaaaagaaacttttctgaatgcctacctggcggtgtataccaggcagtgtgccagtttaaaaagatgaaaaagaataaaaacttttgaggaactctcgtagtctggtt

SEQ ID NO: 484395 - DNA, 1237 bp, Homo sapiens
actggcttcaagcaatggtaaaaaaggaaaccctgaacgtccccacaatcggtgtcattgccgttgtcttagccacacatctgtgcgatgaagtcagtttggcgggttttggatatgacctcaatcaacccagaacacctttgcactacttcgacagtcaatgcatggctgctatgaactttcagaccatgcataatgtgacaacggaaaccaagttcctcttaaagctggtcaaagagggagtggtgaaagatctcagtggaggcattgatcgtgaattttgaacacagaaaacctcagttgaaaatgcaactctaactctgagagctgtttttgacagccttcttgatgtatttctccatcctgcagatactttgaagtgcagctcatgtttttaacttttaatttaaaaacactttttgcacaccattttgtaaatgaaacttaagaattgaattggaaagacttctcaaagagaattgtatgtaacgatgttgtattgatttttaagaaagtaatttaatttgtaaaacttctgctcgtttacactgcacattgaatacaggtaactaattggaaggagaggggaggtcactcttttgatggtggccctgaacctcattctggttccctgctgcgctgcttggtgtgacccacggaggatccactcccaggatgacgtgctccgtagctctgctgctgatactgggtctgcgatgcagcggcgtgaggcctgggctggttggagaaggtcacaacccttctctgttggtctgccttctgctgaaagactcgagaaccaaccagggaagctgtcctggaggtccctggtcggagagggacatagaatctgtgacctctgacaactgtgaagccaccctgggctacagaaaccacagtcttcccagcaattattacaattcttgaattccttggggattttttactgccctttcaaagcacttaagtgttagatctaacgtgttccagtgtctgtctgaggtgacttaaaaaatcagaacaaaacttctattatccagagtcatgggagagtacaccctttccaggaataatgttttgggaaacactgaaatgaaatcttcccagtattataaattgtgtatttaaaaaaaagaaacttttctgaatgcctacctggcggtgtataccaggcagtgtgccagtttaaaaagatgaaaaagaataaaaacttttgaggaactctcgtagtctggtt

SEQ ID NO: 484396 - DNA, 1184 bp, Homo sapiens
actggcttcaagcaatggtaaaaaaggaaaccctgaacgtccccacaatcggtgtcattgccgttgtcttagccacacatctgtgcgatgaagtcagtttggcgggttttggatatgacctcaatcaacccagaacacctttgcactacttcgacagtcaatgcatggctgctatgaactttcagaccatgcataatgtgacaacggaaaccaagttcctcttaaagctggtcaaagagggagtggtgaaagatctcagtggaggcattgatcgtgaattttgaacacagaaaacctcagttgaaaatgcaactctaactctgagagctgtttttgacagccttcttgatgtatttctccatcctgcagatactttgaagtgcagctcatgtttttaacttttaatttaaaaacacaaaaaaaattttagctcttcccactttttttttcctatttatttgaggtcagtgtttgtttttgcacaccattttgtaaatgaaacttaagaattgaattggaaagacttctcaaagagaattgtatgtaacgatgttgtattgatttttaagaaagtaatttaatttgtaaaacttctgctcgtttacactgcacattgaatacaggtaactaattggaaggagaggggaggtcactcttttgatggtggccctgaacctcattctggttccctgctgcgctgcttggtgtgacccacggaggatccactcccaggatgacgtgctccgtagctctgctgctgatactgggtctgcgatgcagcggcgtgaggcctgggctggttggagaaggtcacaacccttctctgttggtctgccttctgctgaaagactcgagaaccaaccagggaagctgtcctggaggtccctggtcggagagggacatagaatctgtgacctctgacaactgtgaagccaccctgggctacagaaaccacagtcttcccagcaattattacaattcttgaattccttggggattttttactgccctttcaaagcacttaagtgttagatctaacgtgttccagtgtctgtctgaggtgacttaaaaaatcagaacaaaacttctattatccagagtcatgggagagtacaccctttccaggaataatgttttgggaaacactgaaatgaaatcttcccagtattataaattgtgtattt

SEQ ID NO: 484397 - DNA, 1296 bp, Homo sapiens
actggcttcaagcaatggtaaaaaaggaaaccctgaacgtccccacaatcggtgtcattgccgttgtcttagccacacatctgtgcgatgaagtcagtttggcgggttttggatatgacctcaatcaacccagaacacctttgcactacttcgacagtcaatgcatggctgctatgaactttcagaccatgcataatgtgacaacggaaaccaagttcctcttaaagctggtcaaagagggagtggtgaaagatctcagtggaggcattgatcgtgaattttgaacacagaaaacctcagttgaaaatgcaactctaactctgagagctgtttttgacagccttcttgatgtatttctccatcctgcagatactttgaagtgcagctcatgtttttaacttttaatttaaaaacacaaaaaaaattttagctcttcccactttttttttcctatttatttgaggtcagtgtttgtttttgcacaccattttgtaaatgaaacttaagaattgaattggaaagacttctcaaagagaattgtatgtaacgatgttgtattgatttttaagaaagtaatttaatttgtaaaacttctgctcgtttacactgcacattgaatacaggtaactaattggaaggagaggggaggtcactcttttgatggtggccctgaacctcattctggttccctgctgcgctgcttggtgtgacccacggaggatccactcccaggatgacgtgctccgtagctctgctgctgatactgggtctgcgatgcagcggcgtgaggcctgggctggttggagaaggtcacaacccttctctgttggtctgccttctgctgaaagactcgagaaccaaccagggaagctgtcctggaggtccctggtcggagagggacatagaatctgtgacctctgacaactgtgaagccaccctgggctacagaaaccacagtcttcccagcaattattacaattcttgaattccttggggattttttactgccctttcaaagcacttaagtgttagatctaacgtgttccagtgtctgtctgaggtgagattgttgtttcctttctctcctcccgaaggcacaggtgatgcatgctcacaccctttccaggaataatgttttgggaaacactgaaatgaaatcttcccagtattataaattgtgtatttaaaaaaaagaaacttttctgaatgcctacctggcggtgtataccaggcagtgtgccagtttaaaaagatgaaaaagaataaaaacttttgaggaactctcgtagtctggtt

SEQ ID NO: 484398 - DNA, 102 bp, Homo sapiens
gatccgaatttaagcgcagggggtttatattgaaattggtgtggtgaaattgatggccctaagatagaggagacaactgctaagtgtcaggagaaagatggt

SEQ ID NO: 484399 - DNA, 161 bp, Homo sapiens
acggattcgaggaaaatatagaggagaggtcacattacattgtcatgggtcaaatgcagcctgccgcatgttattttatatggtccacaaacgaaggatggtttgttatatttctatacggaggcttgagggaaaaaaaaagacaagaaattattatgaaa

SEQ ID NO: 484400 - DNA, 140 bp, Homo sapiens
ctctagaggagccacactcattctcagcccctgaaagaagtatagctaccttcttgtactatccctatgaggataattatacaagctccatctgctacgaaaacaggacttaaattcgtcaattgtaactctttaaatca

SEQ ID NO: 484401 - DNA, 163 bp, Homo sapiens
ataagcttgattgaaaatgacatagaggcaggcctgtgtaccttcaggaggctctagtgggagaatctgctcttgccttatccagcttcttaaagggccaccatgcattttatagccctgtggtccctatcctatgacctatcagaagctatatcactactag

SEQ ID NO: 484402 - DNA, 393 bp, Homo sapiens
cacttgttttttttcaatatttaactcaaagggcctaaagcattcttttctgcttacaggagatgtgttgttggtatttttggtggcatagcataatgggaagaaatcggccgggagcggtggctcacgcctgtaatcccagcactttgggaggctgaggtgggtggatcacgaggtcaggagatcgagaccatcttggctaacacggtgaaaccccgtctctactgaaaatacaaaaattagctgggcgtggtggcatgtgcctctaatcccagctatttgggaggctgaggcataagaattacttaaacccaggaggcagaggttgcagtgagccgagatggcaccactgcactccagactggacaacagagcaagactccatctcaaaaa

SEQ ID NO: 484403 - DNA, 938 bp, Homo sapiens
gtcctctcacgcttgccgtcggtatggaggggtcacactcctgttccaacatgcgtatcgaatagtgtcattcctgctcgatatccatgtatcctgaataaggaatgatgtgcgcaccggaacgagttgcaatcgatgttcatgatgcttgccatgtctaagtgtcatagaaccttgtaagcatgatgcgcgagatactctcgcaagagattaagggtgcgacacaagacgccgattccaggaagaaggcagcttggatataatgatgcttgactaggcgcgagtaattgtccgattaagagagtgggaaaaagagtgtaccaaaatgaaaaccttatcaaacaatacccaggcgagacgcctaatggaaagtaaagaactcatgagattgcgatccatacgcacgaggttagcataaaaatttcattaccaagaatggctgccaagctgaggattctataattgagacaggaattgacagacaacacatggatagaggctccagaaaaggtccaggcgatattcgatagaagtgtccgagctacaaaaagttccagtcctgatatgccgagcccccattcttgcatggcgaagtgcgataccacacgtgtgctacagcagcacccctactgtgttacacgcaaggcttgactagacgtagggaattgtgcgtaccaattggaatatcatggctcccttaaaagaatttgctgaaaagccgatttttccttctctatgctaaccttttatgtagagaaatgacgccatttgcggtatacattgggacttgctgaaattaataatatatcttcaaagcataaaggtgcacttttacagtgaaacaggcgagaaaaagcaaattttcttcctttgcattggaggaactaggatccgtatccaacaatagacggcaggtgaaatgacctttagcggttaac

SEQ ID NO: 484404 - DNA, 1046 bp, Homo sapiens
  misc_feature (4)..(4): n is a, c, g, or t
  misc_feature (14)..(14): n is a, c, g, or t
  misc_feature (499)..(499): n is a, c, g, or t
  misc_feature (628)..(628): n is a, c, g, or t
atancgcgggcgcngaagagggaacgaatagacctaccgccccttctttttgtggtttgggggggggaaacttccgcaacaattatttttattatctctagaggttcccgcggacattgcgcgcctttttcaggaggaggttacaccggtgtggtaggtggggcctctttgggaaaggggtgtttctctccagcaaggcctaaagggagaagtggaaactttctctcctctttgctggaggggggcccaaccggtattgtccttggggcatatagcacccgtgccctgtggagatcccaagggtgccataagaattccttggttttggcccgactctaactggtttggtcttcaacttgcaaccaggccctccggaatattgggaagataaacaggttggtttgaaatttgggcatggtcctcacgcacctggtggcagaagcaagctttccagaagatgctgttcttaagacagtggagatgaaaggggaagtccccnccagaggttttcttttgagcctccgcccagcggatagcctgtgatgaagaattttccaatttttaggatgaaggagaaggaggttcaaaaaatgtggctggtccttaaaaaggggccaagaaagcttgnatttgagaagattagaaagaccccgggggccaaaaaacccgcgtttagggagaagattaatcccagggcccccgtggtggaaaaaccaattcccaagggacccaattagaacaggtccgccacccctggatttggccgtttcccccatttccggaaatcctttaaaaaaaaaaattgaaagggaaaaggttttttttttaaaacctttgggttcctttttaaccactttgggaagggcggggtttattttccaaagggcttttcggttttggtttttttggccaggtttattggggggttttttaaatatgaagcaaaattttttttttccccccgggtttttgtgataggattttaaatttatgtggggttttttggccaaaaaactggtttttttaaaaaggaattggcccttcca

SEQ ID NO: 484405 - DNA, 173 bp, Homo sapiens
gagacaagactgcaagaccaacgccttctcttcctccccatctctctccgcctctgcctactcaatgtgaggacaatgagaatgaagacttttatgttgacccacttccatttaatgaatagtaaatatattttctctttcttatgattttctaaataacattttctctagct

SEQ ID NO: 484406 - DNA, 901 bp, Homo sapiens
ggacagctcggtgatgagctgtggcggagccgcagggcctggtcggccgccgagtgaagtgtgactccgtggtgcctggccgtggaggctgggcgcgctatgctgcggcctggctcgtgaatcgcgcgtggttttcctgctcctggcaagggaaggggcctgcgagaagggagcggggacagttagcagacaggcagacctccatgccttcctctcttccctctcctcccttctcttggataaagctgagctggtgcagacacgagctgcctactcaatagcgagactggacactctgtgcctagagccccctctgcagctggcctttactcctgggaccccacttatcctcacttctgctttctttttcttccctgacctggctccctgcgcaagggtcccagagagcacgcagttgagtgcagaggaaaatttcgtcacaagccagccaagaaggggctttaagcaaggatgttggcacgatggtgattcacggggccagcctttctgacggctcttgaccaaggaggcctgggcacagccttcttattacacgcaactgcatcgcgaaatcgcagccttcagccgcggaggaaagactggctgcacggcaccggtattctcaggcaccccagaatattgtttccccacgcttcgcaatccagttgccgagctttgaccactatagaaccaccattattacccgcgcacaacccgtagcaccttgaaaactttgcgcaaaacaaaccattttaccacccaaaatactgaacaatacccatctcctcacaccaaatcttaggtccttacgcataaacttaacgaacaacagaaagtttactccaatgtacaggaagccctgcaattaccaagtacagacaatcacggatcgaaccatacc

SEQ ID NO: 484407 - DNA, 467 bp, Homo sapiens
ttgctgctcgtcgtgtctagattatcccctctctgttcgtcgtttctcagtgtctgtgactggcgggacctgccggtcctgcccccaggtcggcggtgttgtttgtccctcctgctctaggtttcacgggtaccagccttgggtcctggtggtatgatgttcccaaatacctagactcagcagaatccccagagggctttgacctcagttgaaatgatctttctgtgcctctggcaagggccaattggctaaaaatcttcccaaagggttagtttttattgcaaacagtccttggactcctttgggaccactgggtcacaaacattagtgccagcctctcccatctcagagcactgagatccagctgcagtgaaaccctggccctggctggagctggagggagacttccatcgaagtgtttgggaaggaaagcagggaaacctgcctctctggagcagcaagtgcat

SEQ ID NO: 484408 - DNA, 534 bp, Homo sapiens
gcgggtctcaaactcttgggcctcaagcaaaccttgccggcttggccatccaaagtccggggataatgggcatgagccaccacaccgggccgggttatactttaaaatgatgtattctcccctcctcctaccagagtatgagaagatgtttctccagtctcaccctgagagcggggtgggggctaatgggaggtaaaactcagactgggtagggggcactcccaagtgattattccctgggagttttggtctcgtacgggtccaggctcagtctctgccattggtcagttcccctttcctctcggcgggtgcgggctctagggttctgcccggaattggagcggtgattcttagcatggcatatcggtctctccatcttgggggtaatggttttgccatgtgacctcaataatctgagggatcggagaacagtcatggatttgaagttggccagctttctggtggtgaggaggggagtgatgacttcttgagcctttacaagctggacaggacctgggaatgtcccatttcatt

SEQ ID NO: 484409 - DNA, 535 bp, Homo sapiens
tagactgaatgctcttttttgtaatagctgtttagcattacaagttgaaagcagcgctcccttttcaatgatgtgtataaagctgcatgacctcttttctgaatcactgatggtcggcatgttctttctaataggcttgtatatcccggcttgatctttggtaggagtggccataccagtttatcaggaaataacatcataaaggtcaatctacgaacccagcgctagtgtacggtgaaactctactcattcaatattatggattataaacgctaccagactcatacatgcttaatctgttacaccttatggaccatatgcactaggtggctccaggggcgcctaggatggagacggctgaactatccatctcttactctctcctcaaataggactatgatccataccagtccaaagacgggtgtcgtgctagatgagtctcagagcatggctctgctcttggatataattgaacatgtgcatatttctgaccgacgataagaataaacttaacagggtgggcctttatttgctt

SEQ ID NO: 484410 - DNA, 948 bp, Homo sapiens
  misc_feature (29)..(29): n is a, c, g, or t
  misc_feature (84)..(87): n is a, c, g, or t
  misc_feature (131)..(131): n is a, c, g, or t
  misc_feature (133)..(133): n is a, c, g, or t
  misc_feature (138)..(138): n is a, c, g, or t
  misc_feature (167)..(167): n is a, c, g, or t
  misc_feature (169)..(169): n is a, c, g, or t
  misc_feature (179)..(179): n is a, c, g, or t
  misc_feature (183)..(183): n is a, c, g, or t
  misc_feature (221)..(221): n is a, c, g, or t
  misc_feature (254)..(254): n is a, c, g, or t
  misc_feature (256)..(256): n is a, c, g, or t
  misc_feature (266)..(268): n is a, c, g, or t
  misc_feature (276)..(277): n is a, c, g, or t
  misc_feature (301)..(302): n is a, c, g, or t
  misc_feature (304)..(304): n is a, c, g, or t
  misc_feature (327)..(327): n is a, c, g, or t
  misc_feature (363)..(363): n is a, c, g, or t
  misc_feature (365)..(365): n is a, c, g, or t
  misc_feature (391)..(391): n is a, c, g, or t
  misc_feature (407)..(407): n is a, c, g, or t
  misc_feature (410)..(410): n is a, c, g, or t
  misc_feature (435)..(435): n is a, c, g, or t
  misc_feature (458)..(458): n is a, c, g, or t
  misc_feature (464)..(464): n is a, c, g, or t
  misc_feature (519)..(519): n is a, c, g, or t
  misc_feature (522)..(523): n is a, c, g, or t
  misc_feature (561)..(561): n is a, c, g, or t
  misc_feature (568)..(568): n is a, c, g, or t
  misc_feature (571)..(571): n is a, c, g, or t
  misc_feature (592)..(592): n is a, c, g, or t
  misc_feature (605)..(606): n is a, c, g, or t
  misc_feature (721)..(721): n is a, c, g, or t
  misc_feature (730)..(730): n is a, c, g, or t
  misc_feature (758)..(758): n is a, c, g, or t
  misc_feature (770)..(770): n is a, c, g, or t
  misc_feature (798)..(798): n is a, c, g, or t
  misc_feature (810)..(810): n is a, c, g, or t
  misc_feature (815)..(815): n is a, c, g, or t
  misc_feature (844)..(844): n is a, c, g, or t
  misc_feature (942)..(942): n is a, c, g, or t
gataatcttttaaatatgaaaaaagaagnaagttcaaaataaaatagaaatctcaaatgtaggatagaaaaaaacaaagtgtgnnnngggggaagaaaaagcaaaaggaagaaattagatgtatgcaaaananatggnggaggagttaacatctactctggggaatnantcaaacactnatgnggcagtatacaccaatccagagttaggggtgttaattnttttttgggagttaaataagagtggggattaanangatgtttatnnnaaattagnnaaaaggttgagtatcttatatacnnantccaaacccccttgatccctttntatgattaggggaaaggagctgagtgagggaggtananttggaaagggaaggattccacttganagagtgggacagactnctncagagtagagcttggagggagattnaaagtggagataatactgctganacctcncttgaagctgagatgggaaatggacataattagaaatttagtgactttaatagantgnnatattacctatccaaaacttttaaaatgagaaaatcancatcccnttncttatatagatgacttctacncactaccttctannattttctactttgggcttaggatgatggccattatctacatgtgttttcagcacctggttggttctaaatgggatctggagacccagcttcttggagatttttaagaggaagtantaactgganaaatggaatgggcaccagaaagaaatanagggtcacccanaatggcagaaacctaggtttcccagaanggaaagagagangaganattcaacaaacaagtatttattgagcgcntactatgtgccaggcactgttctagaccccccccagaagaaaaaacaaaaaacaagatagaggcagcaaacacaaattctgagggagaggaaaggggnagttga

SEQ ID NO: 484411 - DNA, 1332 bp, Homo sapiens
  misc_feature (914)..(914): n is a, c, g, or t
gccacgcacttatagctacttggaaggctgaggtgggaggatcacttgagcctaggaggcggaggttgcagtgagccaagattgcaccactgcactccaggctgggtgaccaagtgagaccctctctcaccgaaaaaaaaaaaaaaagctgagttccaggaagttccaggatccatgtgggggacctagtggttgaaaccccaatctctacacaaaattacaaaaaattagcccgggttgtgatggacacacaccatatagtcccagataccttgggaaggctgaggataggaggaaatcacctgaggacggggaggcagtatgtttgaagttgagccattgactgcgccaacgctgaactcacagccatggtgtgacaagaaacagaggacccttagaaaaaaaaaaattacgaaacattagggggataaaaatatcataaacgtccttagtgttggggccaggacacaagggatctaaaacaccgtgtaaataccatgtggagttggaatggctttgaagccagaggaactatgaagaaaccaggcattgaggacaaaagtgtgcgaaaaaacgagtgataatcataacagagagaattagaaaaatttaacgatggagaacacgtgggagagcgggcacaactataacccacgtggagggagcagcacataaagagcatacacccccggggagaacgggctatgaacacaacaacggggaagagcacaccggtgctgataacaccgcccagcgggacaccggcaccagaagggcagtagaacaggaaggagcgcccagaagagaaatgtggagcaacccaacgacgagaggaacgccaatcgacaagcagtccacaacaaccacgaggtaggacgacacaggaggaacacgacaaaggcaagaccgcaccnaaatcctaatcgacacagccaacagaacgaaaaactagcgaaagagaaacaacactgagaacggcgagaaccacatacaagaaaatgcagcaggaggaggtcgaagaagaaagaacaaaaagaagaagcaacgaaacggaagacacaagagagacggacacagaccgaggtgagcgaaccacaagaacggaagctggcacagaccagcagacgaacagacgcactgacaccattgacatagacgtaccgaacacacagcgggaggaaacaacacaacaacaggagggaaggagtccaaccgctaaagaacgggtacggacgctgagggacctaagaacagcaggatgacatagacaagaagccagccagagggagagacacagccgcgacaattacacgaacggaagtggaaaaaaaa

SEQ ID NO: 484412 - DNA, 301 bp, Homo sapiens
acccataaatttgccggccgggcgcggtggctcacgaggtcaggagatcaagaccatcctagctaacacggtgaaaccccctctctactaaaaatacaaaaaattagcgtggtggcgggtgcctgaagtcggagctactcgggaggctgaggtgggagaatggggtgaatccgggaggcggagcttacagtgagccgagatcacaccactgcactccagcctgggcgacagagcaagactccgtctcaaaataaataaataaataaataaaaaataaaaggaagtcagaaagctaagcaaa

SEQ ID NO: 484413 - DNA, 296 bp, Homo sapiens
  misc_feature (192)..(192): n is a, c, g, or t
ttttttttttgggggggggggggttttttttccccaaagggggcccccctaggggggggggggtggaaaaattggggggggggttgggaaaaatttgtggggggggggcccccccccccccgggatttttttttttgggggtttggggattttttttccccccccccccttgaaaggaatcaaaaggggggnaaagggggtggtggggggggggtttcccccccccccccttttggggggggggggggggttccccccggtttttttttttacggggtttttttttttccccccca

SEQ ID NO: 484414 - DNA, 394 bp, Homo sapiens
catcccggggctgtttctgtcgaccagcagcgctctcagagtctcctaaacagaccatgggtcatccccgtggagttcaggatgctactgacagcccgattccggaaggtcaagtgttatacaggactggagaggccacaattcatcaaaagtaatcaaagcgcaacgcgtatcagcgctatgagaataatgttggtctgtgtccccagtaacgaatctcatcataagccctaggacagaatggctttgtaagtgatggttttgaaggaaatgcataacaaagtagttggaactcctctgttaatgtgtctttcataattgttgaagtgcaaggtgattatacttaaactaatggaaaataaaaatccatcccttgaaaggtgactataaaaaa

SEQ ID NO: 484415 - DNA, 474 bp, Homo sapiens
  misc_feature (474)..(474): n is a, c, g, or t
atttacagtccaatgcttcactcagccattttacctcacccctaaaaaaaaaaaaaaaaaaaaaaaaaaaaagattgtggggcggccatggaccatgaaaaaagtttttaaaaccatttcgtgtgggcgggggggcgcaagttaggttaagtgacaagtgtgctataagctgtgtccttagggaagacccggggtccacagactaatgtgtcggggtgttcttccacacaaattaaaaagaacggccgggcggggcacacacgaaggttgtttccggaacaaactcccaaagaggcagaggttccagcaggggccaatacacgggcgtcctaaaccaaccacggcgagcgtcccaacagcaagagcgctcggaatcattacaatattaacgcgcccggcgcaccggtcgggggaggcaggatgtataccgcacaaccacaccacagcgagacccaccaacgcagcaccgacacn

SEQ ID NO: 484416 - DNA, 1043 bp, Homo sapiens
  misc_feature (1016)..(1017): n is a, c, g, or t
cgcctttatcgtgacagtatggtggtgtgaagtgtcatctacatgtactccgactgccagtatatgtatccctacgtgtcttttcttgactcctgtagcgctgcccgctgggtactctgctgtagaagggtgacagtatgcattacctggaaaggtaggtgagccatgctactggcggtctacagacaacaagaacttccgtggatacggaggtgtgtgtgtgatctcgacattcgtggcggttccattctgccaaggccaggaatgcccaggttgctcaaggaccgccacgtggtctgggaatgcttgatgcccaccttggtttgagaatccgagctcatgaagtccgcgtggcgctagggggagatacgatggggatgcccttcgatgtgtcgagagcttctgaagactgtgcttggtggatcaccggagtgatctcttgctccaggggtagctagtctggactttgcgccctcgatgctgcagaagatggctgtgaccacagtattctgacaggagtatgatgaagatgccgggggcgctggactggctggtgctgaaggcagtgaagactgactggagacgagggtattggcactgttcatccgggtgttgtgtgcactcactcaagtatgtgtgcctgtggtacatctggcggcacgatgtaatgtccttgctggatggcaaggactagtgtgaactaggcgtagtggtggctgtggtgttgacttggcccgttgaaaagttggaacgtccgttgcctgtttaccacctgtcgggcagggtgggataacgccgcgaggggttcccacggagacaggttgcaacgggcctccttttgtcccgaggaattgtctgaggcgaactagcgtcaagggcgggtttgtgggtgaccaccaggcttcttatcgagcgggggagaatgatccctctcatcaatattgtgtgtgcgctatgtcggcgacactcagttgattatacaatcgcatgcatatatgttatggtatgactgctcnngttcaacatataccaactatacaaag

SEQ ID NO: 484417 - DNA, 1535 bp, Homo sapiens
  misc_feature (421)..(421): n is a, c, g, or t
  misc_feature (759)..(759): n is a, c, g, or t
  misc_feature (1276)..(1276): n is a, c, g, or t
gacccatggtggtcgatctatgcagactgcgctcgtgcgctacggaccgttccgcactggtgcatgctaatgatgctcgtgggtgccgtgagtctgggtcgtgttaccgcgctggatcctttgtctgtctccatgcggtagcaaggagactcatggcttgctcgtaggactactcggccgtgggagatacttaccacgatgattgcctcgtatctcaggtcgtcgtatggagcatacgcagtcggattatgaagacagtgaaggattgtagactgtggattgggcagtgacatagtctcggagtcttactacgtacgtactgatactgtcagaccgctgtgggtcgagtatgcgtggcgcgagggcaccactgatgacatgtcccgcggagggaagcgcagtcatgactccgacagcggtntggtagcgttcgagataggcggatacagcgagcccgtgagatagaggaatccggcgaggtttgatccctgatcttacgcactgtggattgagattgagtaagcagcaacggaggcgtaaacgagggagtcgctagaattgatcctttcccgcagttagcagttcctgtactactaagagcataaacttgcacaagcgcatcgacagaaattgacacctaaagcgaaaagcagacgcccaatacattcctgtaggtatttctctgcatagcgactatgtgtgcacacgcaaggcgtacgtgtaccacagtgcaatcgccctgaggagagagacatagcnatcgaggtatgacgatggtcgggaacgccaatcaatactgagattcgtctgagacgtatagcgacgcgatcgcaatccgttgaccacatatcgaaactaatacgtcagcaccacattacgcaagacacagctcccagacctccgtagttccttggacacgcaacagtgttaagtcacaagacgcacccctaaggaacttaacctcccgcattatcgactaagaatctacctttcaacacctaacttaccacaatccaaatgacgaccctgcatataatcaaccagatcactccttcaacgacagctgacaccaatatcaccacgacctgagagacaccaacaataattgctcaatacataccactacaacaacatcccgcttagcgatatcatctgatctcgccacacatccgaacctcacacacatacagctgataacaaaaccccacacagagccacttaacaacaactgcccaacatattggcaccttaagcatgctaactacgtgcagagtgnagatgacatacaaactaagccttgcatatacctcaacgatctcaccagtacctcaactagcacaaacatcgtacactcgacctacaaaatagcaccaccagcttatacccacatatacagactacacactacacacgcacaaccaaaaccgcacacatcacatcagacagcacagaacaatccgaccacaaccacaccacaccaactaaaaaatcaccaccaaacctacgaccctacacaacagactcgaaccaaccaa

SEQ ID NO: 484418 - DNA, 914 bp, Homo sapiens
  misc_feature (12)..(12): n is a, c, g, or t
  misc_feature (70)..(70): n is a, c, g, or t
  misc_feature (80)..(80): n is a, c, g, or t
  misc_feature (84)..(84): n is a, c, g, or t
  misc_feature (93)..(94): n is a, c, g, or t
  misc_feature (107)..(107): n is a, c, g, or t
  misc_feature (123)..(123): n is a, c, g, or t
  misc_feature (133)..(133): n is a, c, g, or t
  misc_feature (157)..(157): n is a, c, g, or t
  misc_feature (162)..(162): n is a, c, g, or t
  misc_feature (166)..(166): n is a, c, g, or t
  misc_feature (171)..(171): n is a, c, g, or t
  misc_feature (178)..(178): n is a, c, g, or t
  misc_feature (187)..(188): n is a, c, g, or t
  misc_feature (206)..(206): n is a, c, g, or t
  misc_feature (220)..(220): n is a, c, g, or t
  misc_feature (222)..(222): n is a, c, g, or t
  misc_feature (288)..(288): n is a, c, g, or t
  misc_feature (290)..(290): n is a, c, g, or t
  misc_feature (293)..(294): n is a, c, g, or t
  misc_feature (296)..(296): n is a, c, g, or t
  misc_feature (305)..(305): n is a, c, g, or t
  misc_feature (309)..(309): n is a, c, g, or t
  misc_feature (321)..(321): n is a, c, g, or t
  misc_feature (330)..(330): n is a, c, g, or t
  misc_feature (335)..(335): n is a, c, g, or t
  misc_feature (346)..(346): n is a, c, g, or t
  misc_feature (369)..(369): n is a, c, g, or t
  misc_feature (406)..(406): n is a, c, g, or t
taccaatttttnttgtcatctcttctaagaatcgtgttttgcgtacaaaaaaaaccttacatatattaanaatgtatacntttncaggcgtanntgcataccgcttncaactcaaagctagtnacagcccacngtgttctggccaaagacatctgcnagganaggngactnggtcctnggggttggnntttccaaccctgacaganccgcaagttaaaananctggttcttgccagcctctagagatatcccagtacatttttttttttttttttttttccctgcacntnttnntngttgctggncacnctgtctctccangccacagtnttgtnttccacaagcncgttcttaccttagccacgaagnaccaagccacacgtactaaaggttgaactcaaagttntgtacagggttttaaacaaataccaaggggaacagttaacttcaatacaaggtcaaaatcagcaacaagttctacaatccagtgctgatatcagatacaagcttcaaggacaatttcttttcgaaggcttattccagtttcgtgaggctagcatgaggtgtgtgcatttgccagggcgcaaatttctattctcaattaacccatgccgcaaatgctacgcgatctgctgagtccgtttagaagcatttgcggttggacgatggaggggcccgactcgtcgtactcctgcttgctaatccacatctgctggaaggtggacagtgaggccaggatggagccaccgatccacaccgagtacttgcgctctgggggtgcgatgatcttgatcttcatggtgctgggcgccagggcggtgatctccttctgcatcctgtcggcaatgcccggatacatggtggtgccgcccgacagcaccgtgttggcgtacaggtctttgcggatgtcacgt

SEQ ID NO: 484419 - DNA, 244 bp, Homo sapiens
  misc_feature (166)..(166): n is a, c, g, or t
tccctctctgtctcccagattccagtttactgaaatgaaatgagaaaatctggtacttgttttatgttacattacataaaatggtatggataaacaccaaccttagggccttgccactgctacagtaacgcacttagctaactacatccttcgcctcctccctagncctcctttgagcttaaacaatccacaggcttcctacttcctcacacctttgccctagcaactccttaactacttcttc

SEQ ID NO: 484420 - DNA, 114 bp, Homo sapiens
  misc_feature (73)..(73): n is a, c, g, or t
agcgactggtcaaacaatatactgcctgggaacacccaaagggatgagagcactccaagtctctgccctgagntgaagtgaggttgtcctccatttccaggtaccaccccctct

SEQ ID NO: 484421 - DNA, 228 bp, Homo sapiens
caggacaaatcacctgagctcactactagtcatcatagaaaacagaccgaaaccaaataattcaagcactgcttataacaatctaactagggtcactattctaccctcctacaagcctcagagtacttcgagtctcccttcaccatttccgagggcatctacggttcaacatactttgtatccacatggttccatgtcgttcacgtccttattggccctcatcgacgt

SEQ ID NO: 484422 - DNA, 146 bp, Homo sapiens
atttatcttaaggaggtggacgtacattaggcgtaagtagaagtagaggttacggcgggtgatggtgcgctatgactggtgaggatgatgagcgctattgttttcttgtgaattcttcgcatcatggcccatttggagcaaaaagc

SEQ ID NO: 484423 - DNA, 870 bp, Homo sapiens
  misc_feature (13)..(13): n is a, c, g, or t
  misc_feature (106)..(107): n is a, c, g, or t
  misc_feature (126)..(126): n is a, c, g, or t
  misc_feature (138)..(138): n is a, c, g, or t
  misc_feature (140)..(140): n is a, c, g, or t
  misc_feature (157)..(157): n is a, c, g, or t
  misc_feature (163)..(163): n is a, c, g, or t
  misc_feature (169)..(169): n is a, c, g, or t
  misc_feature (174)..(174): n is a, c, g, or t
  misc_feature (184)..(184): n is a, c, g, or t
  misc_feature (187)..(187): n is a, c, g, or t
  misc_feature (197)..(197): n is a, c, g, or t
  misc_feature (199)..(199): n is a, c, g, or t
  misc_feature (205)..(205): n is a, c, g, or t
  misc_feature (210)..(210): n is a, c, g, or t
  misc_feature (231)..(231): n is a, c, g, or t
  misc_feature (277)..(277): n is a, c, g, or t
  misc_feature (281)..(281): n is a, c, g, or t
  misc_feature (284)..(284): n is a, c, g, or t
  misc_feature (286)..(287): n is a, c, g, or t
  misc_feature (297)..(297): n is a, c, g, or t
  misc_feature (358)..(358): n is a, c, g, or t
  misc_feature (424)..(424): n is a, c, g, or t
  misc_feature (449)..(449): n is a, c, g, or t
  misc_feature (474)..(474): n is a, c, g, or t
  misc_feature (538)..(538): n is a, c, g, or t
  misc_feature (615)..(615): n is a, c, g, or t
  misc_feature (670)..(670): n is a, c, g, or t
  misc_feature (675)..(675): n is a, c, g, or t
  misc_feature (684)..(684): n is a, c, g, or t
  misc_feature (735)..(735): n is a, c, g, or t
  misc_feature (765)..(765): n is a, c, g, or t
  misc_feature (865)..(865): n is a, c, g, or t
taccaaagtgaanaaaaaaagatactgtcaaaaaagcacagtggacataaaaactgacaggagaaatagagcacatttgtcttgatccttttatattaccacatcnngattcgcagtgggaagagntcagtgcatggnantctaaacagaaaacatngaactnagactnaaaanaaaaaagggnagngggaggaccngncaaaanccaancacaggataacaccacaagcnaaaattcacatgtcccaaaggcgaccacactcaagaagtgacgtanaganacncnngcaggataanaggcaccagtttagaaaggggacccacttccaacctttgcacagtccaaaaacaaaggcanttaaatgatttaaaagcaattacatacatatctacctacttgtttgtttagaattatttatagtcnatcgggggtttcatgtacaaaattngtctctaaatcatgtacaaaaagcngcattttgaaaaagtcaccacatactgtacaagtttacaaggaagagatcccgttattttctcnagcatttttggccttgccggcttgcgtcacattatgagaatgattgtgtaaaccttatactcttaaaaaaaaaaggnaaaaaaaaaacccaaaacatagaaatctttacaactttctctaaatttgcctccnatgtnaagtcaggnaaatcatagctttacttctagttgaagtgatgtagttggaaaacagaagcnataaatatgtcacaagcttcaatttttgtnatgccccttctatttcctgcatagcaataagcctgttaatacattaaatgtttttgctttctctttaaaatgccaattattttacatctgtttcaaaaanaaatt

SEQ ID NO: 484424 - DNA, 221 bp, Homo sapiens
gggggtggcaaccaaggattggaaaaagggggacccctttttcttgaatggtgggccaagaggccctgccgttggcttttaaaaaaaaaaccattgaccggttggggggtaaacccacccatgtcaatgtgtttgttgttatgggggagggggggggcccctgttattgagccgcccgcctgtccccccccctgaataaattccatgttcccccaagcaga

SEQ ID NO: 484425 - DNA, 361 bp, Homo sapiens
aaaagtatgatgaaatactcagaagtgacagaataaaacggtcctaatgttagccattttggatcataggagccatgtggagtaatgactgataagggggacacaatgagaaaaattcttccaaagaactcagtcaggcacagttctcacttaaacacaggagaagcagggaaatattcagtagagagtttagaaagaaaataatagtaaaaaagtacaggtaaggaaaattactagaacaaaactacatgtattagaaagaaaaaatgagagaatcatattccagctaagtgtgagatgaatagctagcaactactcagctgtggcaatgaagatgagaagacaaatcttaaagtcttct

SEQ ID NO: 484426 - DNA, 577 bp, Homo sapiens
agcggggggggttgtcttgttttatgatggccaatgtgttaacaagagttacagactcgtatttgatatcaaatgtagcagctataataccttttaaaaactttaccaaaaaaaaaaaaaaaaagattaagagaaaattcccttgggaaatttccacctggagcaaaagaatcctagctcctgaggtccagcatactccatctgggacaagacagtgcggggcaaataggaaaccggtgggagaacgcaggcagatgtttctaagtacagcttggtggcaggaatgacctgtttgacaaaaacccttggaataagtgttggtggacctttaacgggcaatgatttatcgacatgagctataatggtaatacagcaatttaacagatacgggacatacggtgaaacacgagaagtgtgttttccaactgggcccagtaatcacctgtggagactgcagagcaggccaccacggggatgcagacgtaccctggagcctgcaaggtactgggcttcagtaataccctttcaccgtgaagagtgccaagctcccctacgctgtttcaagagcaccacctaa

SEQ ID NO: 484427 - DNA, 416 bp, Homo sapiens
taaacaattacaaaatgcacagaactaaatacacacacacacacacatacactacatctaatctcggtgaaatctgaataatcatgaatgtattgtatcaatgtcaaattcctgtctttgatactgtatttagctgtcccaaatgtccccattggggtaaatatgggtgaaagtgcatacatagatctctgtattatttcttacaactgcacgcgaactacaagtaatctcaaaataaaaagtcttttttcagaagacaggccacaagctgaaatttataatacacatacatactagactatcgggaacaaaatacaaaaaatacctataagctatgacgacacaatataataacaaagggcgaaagggtacgagctcgggattcacagaagaggaaattcgcagcttataatacc

SEQ ID NO: 484428 - DNA, 605 bp, Homo sapiens
  misc_feature (169)..(169): n is a, c, g, or t
atcgtggttcagtgactacgcagactctgtgccctgaccctgtagtgccctgtattgtgtggaagtggacacgttcatggaggcatatgaccagaacgatcgctgaggaagaagctaagggcgcgaggggaggaggagggggtccctgacgaggatgggctgggctgancgcgtgacccgccgggggccggctggcctgtgctcccccggactgaggcaggccaggcttgcgggtgctggagagggagagacggaagctgcagccgaaaagagctgcgtcgaacttcatacgcctggcagcgagtcggaggagagcgagaggatggagcatctagcgcagctgcgcaagaaggttcgaggaggacaatgcagaggatcgagctgctgctgggcccagcgcaaattccgaccgtactgagctgtgagaagccgcaagatgaatggctggaggtgcagggccaggaggaggcgatggcagtggcctgcaagcggtcatctgaagaggccgagcatcatggccaactgggccccaggttgaaggccaacgagtccaacagccccatcagagtccacaaggccaggagggaaggaccagggccacccct

SEQ ID NO: 484429 - DNA, 230 bp, Homo sapiens
cagtgggtaaggtggagggccactgccagaggctgcctgccagtgcccctcctgggaagtgcccagggaccctccagctgccagacccaggggatccccaatccccttatctctgcctgaaaagtggctattgctgcttcgttatcctcccagtgctcacagggaatgcctgtgccctgcagcacatcccacttttagttttttttttttccaaacctgctcactcactc

SEQ ID NO: 484430 - DNA, 302 bp, Homo sapiens
agccagtatctactaaaactcaagaaaattagccagacgtgttgcattgtgcctgtagtcccagcacttggggaggccaaggtgggtggatcacttgaggtcaggagtttgagacctgcctgaccaacttggtggaaaccccatctctactaaaatacaaaaattagccgggcgttgtggcaggcacctgtaatcgcaactacctgggaggctgaggcaagagaattgtttgaaccccagaggcgaaggttgcagtgagccgagatcgcgccattgcactctaacctgggccacaagagcgg

SEQ ID NO: 484431 - DNA, 188 bp, Homo sapiens
ctcaacctcatctccttggacatgattttctcttttcaacttcttgagcttgcgtcattactggatgtgcgtcctgaatcttgtggtccgcccaccccctgttggccctcactatccttggagtctgtactagggaaggcctcccagcatctgcgactctcagagtgggcagcccctctacctcctgg

SEQ ID NO: 484432 - DNA, 288 bp, Homo sapiens
aactcacggatcctcgatgttgtctacaatgcatctaataactgagctagttcgtaccaagagcctggtgaagaattgcatcgtgctcatcgacagcacacctgtaccgacagtggtacgagtcccactatgctgctgcccctgtggccgcacagaagggagccaatgctgactcctgcaggaagcacgcacattttaaaccaaaaaacgatctaacaaaacttcagaagcaaatatgcatgaaaggacaaacgaatgccacacaatcagcatgtctcctagcaggag

SEQ ID NO: 484433 - DNA, 324 bp, Homo sapiens
tataaattcgtgtccatgctaggacttcaccagcaaagcgaactattatactcaagtggatccaataacttgagccaggcgtgaacgagttaccgctaggtgctaacaggcgcaatccgtattctagagtccatatcaacaatagggttacgaccgcgatgtaggagtcaggacactcccgactggtgcatgactcgctattcaaaggttcgctcgttcaacgatgacagtacctacgctgatctagtactcagaacggagtaagtccaggtcggtttctatctacttcacgttcctccctgtacgaaaggacacgaatgttca

SEQ ID NO: 484434 - DNA, 1011 bp, Homo sapiens
tatcgatgataggaataactctaccttatatggtagagtatcctatcatcgataatatatatggtatatatagagagcacgtgcctaactgcagattgatccacttcagtccactgtgaatggcgcctcctggaggtgtgccaagtactgcgcccagaacacaaggtccacacctcagtacaacgactctgataagactgacaaacatacctttgcaagggacagtgcgagtctgacaatacaagaacaaaactacacagctaaatacacaaaaacacaaaatgtactaacgatccataaagccaaatagacaagacacgaccacatacggcactaccataccaatacaacccaaaaaacacacaccaaaccaaaagccaaaaaggcacccgtagatccaacagaaacgtacaacacgaaccctgatcctagaacatccaagaaagagacgaagcctagaacctaaacacctcaactacgtgctatggaacaggcaaccagactccgcgggcgcaacaaacacgaacagacatagccatccgaactacccagccgcagatccagaggcgcaaacaccacggccgaacagactcgacctagaccacactacgagaccaacctccacggaagacaaatacaccaagaaacatcactacggcaccacacaaccaccatcagcaaaaaccaccgcaccagcaaccgcacccgcactgataggaagagcacacagaacgccgacgaaccattaagcccagaaacacgccgcaacacacgtagacaaagaacggggcaaaaagagaaacagaacaaaagaaaacacgaaagccaagcaaccaaagatgcaacccacacggagcgccgccgccaaaaacaaacaggcaacaaaaccacgagaagcgaagcaaagaacgaaacaacgaaaacccgccacagcgcgaaacaacgtgagaagagacgaacagaaaagagatcaccagcgaagagaaaatgaccagacgaaacaagagaacg

SEQ ID NO: 484435 - DNA, 442 bp, Homo sapiens
  misc_feature (9)..(9): n is a, c, g, or t
  misc_feature (89)..(89): n is a, c, g, or t
agggttcanccggagaagcaggtgatatggatttaattccatcttcctccaaaatatactagagtcctaacctccaggtaccccagaantgtgaccttatttagagatagggttgttacagagttaatcagttaaaatgaggttattagcctgggccctaatccagtatgactagtgtccttattaaaaggagaaaattggaagcagagagacatacacacacagggagaatatcatgtaatgatgaaggcagaggttggggcaatacattatctacaggccaaggggcaccagtgactgtcagtaaaccaccagaagctagaggagaggcttggggcagactcctcgtcacagccctcagatagagccaaccctgctgacaccttgatcttggacttctagcctccagaactatgagacaataaatttctgttgttctaaa

SEQ ID NO: 484436 - DNA, 449 bp, Homo sapiens
tctctgctcccagattcaagtgattcttctgcctcagctcccaaggagctgtagctacggcgggcaccaccacatctgggtaatttttttttggtattattattggtatagacgggttttgccatgttgtccaggcgtggtctcgaacttttgacctcaagtgatccacccgcctcgggcttccaaagtgctgggattataggcgtgagccaccggacccagcctgtgtgttgcccggccttctaagcactttacaaataaccaactcatcaaatctctgggaggaagaagaatacacaaaaggaacagacagaaaatcaaagtagacccaggagaagcccagggagacttgtagggtgaacagtattgggtccacatgtgcacattaaacaaacacagatgtatctattatccctatgtatatcctctgtactcaggccaaagaggtc

SEQ ID NO: 484437 - DNA, 358 bp, Homo sapiens
tcagaatatgttgcacatggtaagagtagttactgtttcattaaacttgtctcaatgacaaagtaagaaaatttactttgacacccagttaaaatggaaacgaggccaggcgtggtggctcacacctgtaatcccagcactttgggaggctgaggcaggtggattgtttgaggtcaggagttcgagaccagcctggccaacgtggtgaaacccccgtctctactaaaaatacaataattagctggcttggtggcccatgcctgtaatcccagctactcagaggccaaggtgggagaattgcttgaacccaggaggcagaggttgcagcaagccgagattgtgcctgtgtactccagcc

SEQ ID NO: 484438 - DNA, 398 bp, Homo sapiens
agtttttaaaaggaagatttatttaacaagtttcacttagtacaatacatctaaatggaattcacaatacaaggtaaggtttaaatcaaagccccagaattccatacaaataacatgaccaaactcctaatgtattggtatcacatctcaaaattgttccggatctttaaaaaaaaagtgaaagtgtacactcacgtgccttacaggatattaaaccaaaaagctagaattaacaaacatgccaaatgttgtcactttgaatcatagacacagctcctatatatatttttttttacagaaaagcatgtttttcaacatgcatctgaagttttcgatgtattgtggtataagagcaacatttaacgtaagtgaaactggctttaaacctaaatatgctt

SEQ ID NO: 484439 - DNA, 177 bp, Homo sapiens
  misc_feature (14)..(14): n is a, c, g, or t
ttggaatgttttantctccagatttatgaactttttttcttcagcaattggtaaagtatacttttgtaaacaaaaattgaaacatttgcttttgctctctatctgagtgccccagaattgggaaactattcatgagtattcataggtttatggtaataaagttatttgcacaagttc

SEQ ID NO: 484440 - DNA, 153 bp, Homo sapiens
  misc_feature (71)..(71): n is a, c, g, or t
gtcgacgtcaaatacatgagacacatggacaactacatcagacacatggtcaactacatcagacacatggncaactacatcagacacatggtcaactacatcagacacatggtcaactacatgagacacatggtcaactacatcaaacacatg

SEQ ID NO: 484441 - DNA, 489 bp, Homo sapiens
actttttccttggaccagccggggggcaccgtggatttgaccctgatccgtgcccgcttccagaagaagttgtccccccttacagctccccacaggagtttgcccaggatgtgggccgcatgttcaagcaattcaccaagttaactgaggccaaggcagaggtgcagtccatcatgggcctgcagggtttttttaaaaggggcatgaaaggggccttgggtgaccccaagttttttgttgtgttggtggggccccccccgatgagcctgcctggggtgggcctgagttcccaggagttgtttggtggccctggtgatggcccctgaggttggagcccccatggccagcccagccgggttttgttttttgtcttgtccccccatcccccctccccggggggcctgattccccctccctgggggccccctcccccagttcctcccgatatggtttttatttttggggttttaataaaaatttccccggtta

SEQ ID NO: 484442 - DNA, 128 bp, Homo sapiens
gcaattgactgagtgatcaaaatcttttggtgatatttgaagactttaccacaaagtttggttttttttaaccagaatgcaatcggccgtgtagatgattggaatagtcaaaacaaatgaaaatcccc

SEQ ID NO: 484443 - DNA, 955 bp, Homo sapiens
agcgggccaagggtcctgggggaggcagccggggcaatgggggatggtggctgtgggcagagtgcaaggcactgaggcaggaagactgctggatgccgattggacttcctgtggagaaaatgtctgtgctgtcgcctgtgtgatctacagaggccccgacaggaacagaaactcgcatcaacccactgggggcagcacaccggtgtgacaggacaggccagaccccgggaggaagcaaacggagcgcagggactcaagagaggaaaccgagtgtacgtagcccgatcacccaacaaagtgggctacacaggggtgagcgaagagaaaacgattccctgcaagagcaaaattcaaaggtagaaaagagcaactacctcccgcctggtggcgtactaccggccagaggaaacatcgcagggtcggaaacccttatccgagacatcaaacagacaccaagacgtagcagaaagcaaggaaaaagacaagcccactggtgaaaagagagttcccaagaggggcaccacctgggagggcaaaacccaataaaaggggcgcaacgataacccgcggggagaagccgggaacgagtgccgccaccaccgtacttaccactaggacccaaaggcagcccacattgagaagaacgccatagggtgagacggggaaaatgcacaaggaccaaagtggagtgagtcgacagcattgtgataagcacgcgcaaaggtcaactggggccagaggacagaagagaaaaagaaaacgacgggaagggaaacagcgaactaggtgggggcctagcactagtcgtacagacgacacacgagcaacatcatcttccgcttagcaaggtcccgcactgagcctagataaaagcacataaccagaatgccaagcagtgaagatagaaccaaaccggcaaacacaaacgacagcgaacgaagcaccatgaaagcca

SEQ ID NO: 484444 - DNA, 902 bp, Homo sapiens
ctgcgtctggacctggctggcgcgggacctgacttgactacctcatgacgatcctcaccgagctcggctacagcttcaccaccacggccgaccggtataatcgtgcgtgagataaaggagaagctgtgctacgtcgccctgaacttcgagcaagagatggccacggctgcttccacctcctccctggagacagagctacgagctgcctgacggccatggtcagtcaacacatttggcaactgatgcgggttcctgctgcccatgaggcacctcttccattactttctcttcactggtgcactggatgtcctgtggcatccacagaaactaccttcaactccaatcatgaaatgtgacgtggacgatctcggcacagtaggaccgtgtacgtccacatcggacaggtgctgtctggcggcaccacgcagtgtaccctgggcaattgccgacagtgcatgcagcatgcagcatcactgcccatggacaccctagctgcaatgaaagatcaatgatcattgctcctcctgcatgcgacaaagtactccgccgatggcatcggcgcgctccatcctgtgcctcgacctgtgccaccttccagcggatgtggatcagcaagcaaggagtatgacgagtccggcccctccattcgtccaccgcacatgcttctagtgcggactatgacttaggttgcgtcacgcccctttcttgacgaaaacctaacttgcgcagcaagcccacgatgagattggcactcgctgattaagcctttgaccggagcgctaggcgcaccacaacaccgagggcctcacccggattccagcgcggcggtctccgggcccccccgtgggggaatcccccacagttagggggcggagactcttccccctggtggttactccccg

SEQ ID NO: 484445 - DNA, 228 bp, Homo sapiens
caaccagtgtgctgaagagctaacaatgtcagcttggctcttccaaggttgcaggagcgagactcccagtgagctacgtactgtctagggggctgacagacaggcctaggagggacaaccagccaaggggagggatagtctgagaccaacctagagtaagtgccaccagcgcccccgcgcgtaagggccagcagaggcgtaaggggcaggcgcgtaagtggccagcag

SEQ ID NO: 484446 - DNA, 446 bp, Homo sapiens
agatagccctgccataccgtgggaattcaagatgagattgggtggggacacagccaaaccatattacctctggagcccctagaaacccaaggtcagtcatttagggcaactgctctgagctggagaaaggaggatctgaaggcccttacttgatgctcagtcactgcagcaccagccaacttagtcatttttgttctcccatttgccagcaaggcaattccttcatacattatctctagggggtagcttgcatcctcagtgattatatacttagtggttataattttatcagccacagatgaaattctcaacctgcaatcatttttatgtttgataaaagtagggaaaattgtataatgaggagtaagatgttcttctggtccccaagcagtcagtgtgctttacatgcaataaatggtgtaaaatgcacttgtgcgcactgaaat

SEQ ID NO: 484447 - DNA, 1436 bp, Homo sapiens
caaaccaaacttttattctggaaaaactgggctgtacaatatctaaaaaaaaatgtgacattgaaggaagcaattctacaactttccttccggcttagcggtgcagtgcattgtgtggtgtacggtgcacggtgttgtcacggtgttctgcagtggtggtgggaactccgggggcgtggcaggtgtggagctatacacggagcaggcttgagcgggagaacgccgagacgatgtgggcgtggagacgccacttggggcatattggagaagatcccgtggacgcgtggacgggggaccgtggtccccaggccttccgtggatatccccccaaaaagggggaacgtgccgcatgagtgtggggagaccgggggaccaaatgtgtcgcggagggaagagaactcgtggacaaacgcgacatgggaacgggtgggggcacctccctttgggcccttcccccgtgttgggggggagaacgttgaagacaccagcgaagtggtacctttcctggggaaccactccaccaggggaacacaaagacggggacgcaaaggcggctagggggggagtgtagccagagtgaggtagagcacgaggggagcaaaacccacaatcttggaaccaaatagggggctgggcacacgcctcgggggagcaccgcggggaggtagagtaaaacacgggggcaaaaatccgcgggcggcgtggggacaacccctggacaaccgggagaggccccaaaagcgtcgcctcagaaggcggaaccagggaaccctagcatagaagggtcggagatagagagagcagcataggagcaagagcaacgaatcgacacactttgacccagtaacaagctgcggcgctcgggacaccgaacgggggagaaagcgtcccagatggaagggggacgcaacgccccgacacaccagggacgacgaaccacacacaaactgtgcttcttggagacaccaagggaaacaggtggcccaaatggggacagagcccaagggaaaaaccatttagagagcaacagcacaagggggcgttgacgacagaggcacacaacggcctggtagtggggccccatggcgacagaaaagcaggatacacggcaaatgggagcccggggcggctaggaagataaaagtggcgcacaccacagggggccaccagggagagtaaacctgtcggctagacaacagcggtcgaagaaaccacacgccgtggggccccgcagcagcggttgacaccccggtgggatagccaagaagaaagtaggccacagggagcaccacggaaatcgtgtgcggaaaaggagaccacagagaatcgacacaccaggaaagagggcagcacacactagcctaaaacgagacaccaacggcgtacccaggagaggccacaaagcaggcagttgccaacacacgggaacaagagca

SEQ ID NO: 484448 - DNA, 144 bp, Homo sapiens
  misc_feature (9)..(9): n is a, c, g, or t
  misc_feature (22)..(22): n is a, c, g, or t
  misc_feature (96)..(96): n is a, c, g, or t
gcctttgcnttgcatattgtgngtggatgtgtgtgtgtgtgtgtgtgtgtgtgtgtgtgtatgtgtgtgcttctgtgtgtgcctaatgctctgtcncttggtcactgaagcatccaaataaagaatttccctcaaaaaaaaaaa

SEQ ID NO: 484449 - DNA, 562 bp, Homo sapiens
tcgacagtttctgcaacatgtagactggtgagacctgtcgtgtaccccactcagtcccagtgtggcccataagaacttggtacatcagtcaagaaccccaaggacaagaggcctgtctggttcggcgagagcgtgaccgatggattccatgttcgagtatggcggtcagggctccgatcactgcgcgatgtggccatccagctgaccttcctgcgcctgagtgtccaccgaggcctcccagaacatcacctatccactgcaagaacagcgtggcctacatggaccagcatgactggcaacctctagaatgccctgatcctccagggctcctacgacatcgagatccgcgccgagtgcaacagctcgcttcgagctagcgggcgtcaggtatcgatggctgcaacgagtcacaccggagcctggggcaagacagtgattgaataccacatcaccatgagctcccggctgcccatcattgatgtgtgcccttggacgttggtgccccagaccaggcattcggcttcgacgttcgtcctgtctgcttcctgcttctgccccaagc

SEQ ID NO: 484450 - DNA, 141 bp, Homo sapiens
agtaacctgtcttatataaaaatgcttctactaaagaatgcttattcctaccccacactacctatcactataagagtataacgtactaccccctaaagtgcatttctcaaggcatatacaacacagcactagtgattatgc

SEQ ID NO: 484451 - DNA, 817 bp, Homo sapiens
ctgttcttcaggcaccacagtgtcatcgtagtctgtgttccacggatatctgcggtcctcagacatactgcaggggctgatggcggaatatgctggttcctgagctgccctagtcggtgatggctggagacggactggacctggttggagcgggtgatggtcacgcgcatgcctgtgtgcatgagggcgcctaccaggtgcggctgtgcaatggacggcgacgtggaccacggtgctaggtggactgacatgctagcccgtgtgattgagtgccgggctagacctcgctctttctcgacaggctgcacgcgtgaagcatgctgtgggtgagccctcatcgatgaagtgcgctggccaatgctgcactggctcctactttgcgctccaggcggagccgagccatcgaagggcctggtcactgctcacctggtgccccctgtgagagccttggtgctgcgagctcagctccactagagccccgcgaggagcccgttgactactgacctcatctgggccaaaatgctgagttctaaggaggctgggttacctcatgggtgcctcctgtaggcgggggcaacatgaagggtggacgattcggcctacgagagcctgggccttggccccggcattgcctactccatcctggatgtccgagatgtccagggcaccaggcttctgcggctccgagacccgtgggggccgaaactcctggaacggcaggctggtccggacgagtaggcacactggactggggcacctgcgttgggaagctcatgccgcacggcaagcagtgagggcgtctactggatggaagtag

SEQ ID NO: 484452 - DNA, 493 bp, Homo sapiens
cagttctctccaagtattttagctcactgatggagagcatcaaaagactgttttcaaactcagttggctcctggagcaagagctgctaatatcctgtatctccagcttattttggctccatggaagaggagatgcaaatgttttgtggttcatgatggaaagctggtatgcaattagaaattcttcattctttcattcaacatggtatttattgtctttcatgtaccaggctctttgctaggataaaagagtaaaatacatcccctaaaagactaatagtctagtagaaagaaattgattatgaaacagagaagatgactataaaacactgtgataaatgcagtaataaagaaacattataggagcactaaagaggcagtcatttactaatccatcctatgctgaagtgagatggaaggatttgtcatggagggctgcgttgaagggtgttattcaagggacaaaaaatgaagggcattccaggtagaaagag

SEQ ID NO: 484453 - DNA, 556 bp, Homo sapiens
  misc_feature (13)..(13): n is a, c, g, or t
ggtcggccccccnttgatgagggtgctcaggacaggagccttctgaggattgcagaggggactctggggagaggaacatggtggccacagctggagtgaccgcagtgtacagagatgggatgggagcaggaaacccaagaagagccggccctggaaccaggtggaggggaggcagcccggccatgacccagagcaggtgatatgatttggatctgtgttcccacccaaattttaggttcagttttaatcctcagtgttggaggtgggtcctggtgggaggtgatcagatcatgggagtggattctaatggtttagcaccattccctcggtgatgtcctcatgatggtgagctatcatgagatctggttgtttgaaagcgtgttgcacctcccctgactccctctcttggtcccgcccctgccatgtaggacacctgctccacttcaccttttgccatgagtaaaagctccctgaggcctcccaagaagttgatgccctgtgcttcctgtacagctgcggaaccgtgagccaattaaacctcttatctttgtaaatt

SEQ ID NO: 484454 - DNA, 123 bp, Homo sapiens
  misc_feature (44)..(44): n is a, c, g, or t
tccatgttgggcatactgtgtttagtaattagtgagctgtgggnaggatagtgtctccctgggtctgtaagggctccagtctgaatgatagaccgagactccatctcaaaagaaaaaaaaaac

SEQ ID NO: 484455 - DNA, 432 bp, Homo sapiens
  misc_feature (143)..(143): n is a, c, g, or t
acaggacggcctcaattcctctccctcactttttttaaagagcagttactatataacacactgctcttcaccaaaggtctgggctttgggtctgggagttaaaattgagtctgctgatagaagaaaatgatttctcatacatnaaattactaatcctgtggtgttttagggacaatttgtctcacacctatattagaaagcagcaaatatttctgttacttatctattacttagagatggggtctcagtctgtgacccaggctggagtgcagtgacacgatctcggctcactgcagtttcaacctctggggctcaggtgatcttcccacctcagcctcctgagtagcttggaccacaggagagcaccaccacgcctggccaaatatttctactttgatctacaaaatacgaaactctcttcaaagcgcagat

SEQ ID NO: 484456 - DNA, 499 bp, Homo sapiens
  misc_feature (349)..(349): n is a, c, g, or t
  misc_feature (432)..(432): n is a, c, g, or t
  misc_feature (468)..(468): n is a, c, g, or t
  misc_feature (473)..(473): n is a, c, g, or t
gccgaattcggcacgaggctgtctccagaatccagataggcccactgaatgtttttgctgctttcttggtggtgggaagggtcaggtgcaataatttattcttcacttagaaggaatatctctgtaggccgcaccactggactcctaagaatttcattgaggtagaaggccctttaattttgattggatttattccctatcctctgatatccatgtgttaccaacaagtccaaagtagttgctacttcctgctcatatatgctgtttaatgtctccttaaggtaaaactttgaatgtattaccgctggtgcttgtcaattggaaagcaaattgtttctggtggggattnatggacagggtattggagaaaaagacatttgttggatcaatagcaacataccatgtaccaggagatgtgttaatcttgtcaangtaaggttaccattctggtacagcagttgatttggngtcantacttaaattggaggaggcaacctgt

SEQ ID NO: 484457 - DNA, 383 bp, Homo sapiens
tggcaatccacgcatggcctgagctcgggagttcaagaccagcctgggcaacatggcagagccctgtctctaccaaaaatacaaaaaattagccaggcatggtggtgctcctgtaattccagctattcgggagcctgaggtgggaggatcgcttgagcctgggaggtggaggttgcagtgagctcagattgcgccactgcactccaacctgggtgacagagtgagaccttgtcctcaaaaaaaaaaaaaaaaaaatgaagagtctgagtagggtggccaaatttggcaattacaattacaaggtctcccaattaattttaatttacaattcaccaacaaacaattttttcaagtataagtatgccccatgcgtgaatggccag

SEQ ID NO: 484458 - DNA, 467 bp, Homo sapiens
  misc_feature (424)..(424): n is a, c, g, or t
tagaggaccctgtgacggtaccaacaccgggaagtacccatagaccttccatcagaaccaaggtgagagccgggccccgcggccggggaaagcaggttgagtgcccagccttgtgggcaagtcctgggccggccaggcctccacaggctgcagcctccttccctccgtctctatctctcattggggttggggaccaaagaggtgaggatgcctcagggggctagccccagggggttgactgggctgggaggcactgggcacagttcctgttctcacgggccacccttacacagcagcactccctcgggaaccctggggacagagcacagccctggggacacggcagcagccgggtgtacttaaggggtcttcctattagcctgctctccccattgcctggcggtgcctgtagctcttgcctgtnagaggggagcctggaagggctgctgggggctttgaagccgttc

SEQ ID NO: 484459 - DNA, 328 bp, Homo sapiens
cagaaactgcctgccatagagaccaatgagaattcatgaatgagctgggcatggcggcgcatgcctataatcctagcactttaggggctgaggctggaggatcactagaggtcaggagttcgagagcagcctggccaacatagtaaaaccccgtctgtactaaaatacaaaaatcagccggacgtggtggtgcgtgcctgtaatcccagctacttggggagcctgaggcatgagggtcacttgaacctgggaggcggaggctgcagtgagctgtaattgtgcaactgcactccagcttgggtgcagagtgagacactgtctctaaaaa

SEQ ID NO: 484460 - DNA, 424 bp, Homo sapiens
ggagtcagagcacaagctcaagtcacttcagtaaattccactctgcaagtgcagcaatgtacaaacaaaatgtatttttgaatactctaaaattgtaaatagccatataaattcatattactatatgctctgcattgttgtacacattatatttatatcgagagtggcttaaacatgcctgctggattttatgggcaattttcaatgatattttaattgtgtacaattttcaccttgtgtgttggatttagaagctgctccctacccaagagataataacttgagtgtagctgtctcaggccagacctctagaaagttccattcaaggccgggtgcagtgctcaagcctgtaatcccagcactttgggagcccaaggcaggtagatcgcctgaggtcaggagtttgagaccagcctggccaaca

SEQ ID NO: 484461 - DNA, 257 bp, Homo sapiens
cacccttgcctgcccccttctttctgccttaagaatgtccttttaggctgggcatggtggctcacgcctgtaaccccagcactttgggaggcggagacgggcagataacctgaggtcaggatttcgagaccaacctgacctacatggagaaactccgcctctagtaaaaatacaaaattagccgggcatggtggtgcacgcctctaatcccagctactcgggaggctgaggcaggagaatcacttgaacccgggaag

SEQ ID NO: 484462 - DNA, 1213 bp, Homo sapiens
  misc_feature (548)..(548): n is a, c, g, or t
  misc_feature (1020)..(1020): n is a, c, g, or t
  misc_feature (1024)..(1024): n is a, c, g, or t
  misc_feature (1049)..(1050): n is a, c, g, or t
  misc_feature (1052)..(1052): n is a, c, g, or t
  misc_feature (1054)..(1055): n is a, c, g, or t
  misc_feature (1057)..(1057): n is a, c, g, or t
  misc_feature (1059)..(1059): n is a, c, g, or t
  misc_feature (1062)..(1062): n is a, c, g, or t
  misc_feature (1066)..(1066): n is a, c, g, or t
  misc_feature (1076)..(1076): n is a, c, g, or t
  misc_feature (1082)..(1082): n is a, c, g, or t
  misc_feature (1092)..(1092): n is a, c, g, or t
ctgctagactggacctatgtccgatggtgtgaccccaaatcttcttttcagagagtagctgggagtgtaccttattcatgatcactctggcgagctagactgagttgaataccttacttctggaagcatatcttcgtgttccaacgtccatgtcactccacttaagattggtggtagaattctctttattggtggcatcacagctcccagcagtgagacagtactacgcttgaccgtcaccgacacacagtgcaagcgcgtaggaacacaaatgctgggtgtctggggctcattggtttcctggcaggccatagattgtgcataaaattgggacaagatctcttctctaggagcccaagatactctatgtggtgcttggcttctttgcgtggcttgcaccactttcctctgtctgtacggcatgattcggtatgcagaacactatggtcaccgagaaaagacctactcggagtgtgaagatggcacctacagtccagagatctcctggcgtcacaggaaagggacaaaaggttctgaagacagcccanccaagcatgcaggcaacaacgaaagccattcttccaggagaaggaatcggcattccaagtcaaaagtcaccaatggcgttggaaagaaatgaaaaaccctggttaatcaaagatgttccagagtgcctagaactgagagggaaatggaactcatttggaactccccgtgaggaggtcgaggcgcacagggcaagcaggaagaggcgagggcacttgggggtcattatttgagatcgtaagtcttgtttcccacagacctggggcgcgtcaggccagatccttcggccggggggcccttggccacgcttggggctctctctctactctctcagactcttgatgtgcggtcaccggtggcagcgcggtgtgtcgaccgggaccccggtagctattcattcacagttgccaagagcagctccgcgcctgctggatcgtggatgcagcgtaaacatcttccttcagacgaggcatnaacnccatggttaatggactggtcaccanntntnntntnatnttangatctacctntccttnactgatttcncgttcaggccacttttctgtcttttattccggttactgtagtcatatgttataacgttaggatgccttttaacagcctttagaagccgctgctgaaattgatactgggggacaggttccac

SEQ ID NO: 484463 - DNA, 239 bp, Homo sapiens
gttgtagtacttttttttcatgttatcataggtatcttgcgtgatgtgtgacttgattgttcgtgctctggtgctctttgcgttactacgccaacttctctcccccttcacaccccctccgtccagccacgtcccccggcgttcgcctgagtcggccgagcgtccccagctccctggagaaccctgaggaccggccactgcgcccagacccgtgccgcggcgccccgccccttacccgc

SEQ ID NO: 484464 - DNA, 84 bp, Homo sapiens
acgcggaatggcaacgtgcctgagaggcgcggcgtcgcaaccgtgccagaagctgaggaagccggcgccagttcgcggggctcc

SEQ ID NO: 484465 - DNA, 377 bp, Homo sapiens
tagttttcatttggggctggatcattctttgctgtggagctgtctgtgcactgtaggttgtttagccacacccctgttctccactcactgggtaccagtggtatctactcctcttttgtccagttatgacaccaaaaatgttttcagatattgccaatatccctggtgaggcaaaattaccctcagttgagagtcactgtcataaacctactgccactgctttctacattttatttcacaaacttttttgggtactttctgataagaagaacctatgagacactttggacgagtagggaaggtgggctccaagttctttatttgttatgtacttggttgagtgaagcacacagttttcatttctaggggtggggata

SEQ ID NO: 484466 - DNA, 276 bp, Homo sapiens
cctgtactggaaacttctgcccattccctctgcttatgcctcggatcaaacctaacagaaacaggcaagacaaggtgggaaagatgagtgcagggaacacagaggacttttagggcagtgaaaatactctgcatgatactataatggtggaatacatgtcttcatacgtttgtccaaacccacagatcatgcaacaccaagaatgaaccctaatgtaaactatgggtttcaggtgctgtggctctgtcagtgtaatgtgggctccccgggcggccg

SEQ ID NO: 484467 - DNA, 200 bp, Homo sapiens
gctaccagtgtaaagccagagctgaggttcttgatagtccacaatggggtgaaccacagcaagttagtgcacttccaccaccctccaatgccaatatatcaagggattatacgggatgaaaatattcaggagggcttagctcccaggcctcccccctccattaaaaggcacagttacatgatgtttggcattcagttcca

SEQ ID NO: 484468 - DNA, 388 bp, Homo sapiens
acagcgtgtactgcacccaggacagcggtgtgtcatcctgccccgtctctctgaaatctcacccaggcaacagggtacggacttccacacagagcttatttcccatggcaaggttagtgccatagacacgcctcacttcggggtgcttcgaaaaacaacgggacacgggacggaaaccgaacacggggtcttctctatctaggtggacaggacgggggcccacagcggttctgcccttgtcctgggggaccggaggacctctgactgggggccccgggcgaccccactccactgcacatgatgtgtgtcctcccgcactgcctcggactcactttgccacgtgttctcccttcttcttcagggagacacctgtccagccacctccctc

SEQ ID NO: 484469 - DNA, 1380 bp, Homo sapiens
gtgtattccccctcctctctttctttgttcttcctctcttatagggggggggccgcttcttttgagttgcgccccttccttttttttgtttttcacccgctctcgctcggttctactatcattgtttgtttgttgttggtttccttttctctcgctctctttattattatttatgctttcgtttttgttatgtaatgtgttgtggttctgttgtttttgtctgtgtcatcacttgtcgtgtttctcccttcattatttctttcccctcttgtttggtgtggggccgttgtttttttttcacccttggtggtgtgttttcgcaccttgttgttgtttgtggggttgttctctcttgcaggctctccccttcctgcgctctctatgtagcgcgcctccttcttcattgtttttgtgggggatgttatctcctctttctttgttttgtgtctcctccctctcctcgcaagtgttttttgtttttttttccccacgcaggttgtgttttgtttgtgcgcgcactctctttttgcccgcactcgtcgcgctcgtctctttgtgtcgctctcttctctcgctccccccccctcttcttttatgtagggagagcgccgctctgttgtgcgcgcgcgctctcactctctgcgctcacatcactccccgcccttctatattattctccctctctcagaaatattctccaccctctctctctcatacacacaacacacacctctctctctatatatatctctctctcctctcacagcgagagatgtgtctcacattcatcatcacaccctcgcgagcgtctctccagcatctcttattttattatatatatagagagacacacacacaccactcacaccactctcacactatatcatatatataacacacacacatcgctgtgtctcttactacacacatctctctactctctgctgtgtgtctctatatatttatactacacacctctctcacaacacacacactctctcacagcagagtgtgtcttgtggagtgttcgctctctctcttaccccgtctctcttctcgcagcgcgcgtacttttgtgtcgcgggcgcacacacactcttttgtgtggtcgcaccacacgcgtgttgtctcccgcgcgtgtcttctctctcgctctctcttttgttgtggcgacactctttctctcccctcacatattgtttttacacccctccccccatcatataatttctctctttatacacacacccacacacacaccacaccttgtggtttaaacacccccccccgaagatatactgacacacactttttaaaatatgtggtgtttaaatattttttttttttctctcctttttggtgatggggggggtttatata

SEQ ID NO: 484470 - DNA, 1245 bp, Homo sapiens
ggtgcaaatggtactgctattcactatgacccggagaaccccacgaaatcatgcaaatcaagaggttccaatcttcgtgtacactatataagaacactcgtgaacctgcacaggccatacaagggtatgcatcatacgaaaagccacgacgtctctgaacagatgtcacttatcacagcacaacagtagtgtacccattccgacgtatccacatggatggcagttaggccaggtgtgcgcaggccaaagcaatggcggcctaggcacaacacagggtcggctggaccaacaaaacagagtagctaggacattacaaagcgtgccaaacatgcatataaaccaacgccagcagagtcaatagctgcaacattccagcggtctcaacatgtagcatacatcatggtcaaacggaggcaataatccaacagtgaaacaaaaggacaacataaaagaatgcggccggccgggcacacaaaccagcgactcgatggatcagggatacaaacccaacacaatgaagcatcaaccccagacaacagtagcaacatgaatcctgaacgggcaacacagggaaaacaagacaacgaaacactaaaacgaccagacacagcaggaaggggtaggcccagaacagaaagaagcaagagcagccagaacaggagagaggcacaccacacagaagaacacgcacgggccacgcgcaaacatacaacgccagacaaaacacaaacaacagtggataactaacaagaaagggacgagaccaaaaatacaaaacacgaaacaaacaagcgaaggagcacaataaaacaacaagccccacccaaaacaaaaaacagaaaaaggaaacagaggacaaaaacaaaagacggcaaacaagaataaaaagaacaaaagcaacaaacacgaacggggaaaaagcaacaaaggaacgccacaaaagaagaaatagcgcaggataaccgcaaaaaagaaaacacccaagaggaggacaacaagaagcagagaaggagaagaggaccacaaaaaagcaagagaccagacgagaaggaggaggccgcaggaccggaagaagaaacgaggcacgcaaggaggaagagagcagaaaggagaaacgcacgaggagcagagggcgacagaaaaaagcagaggcgaagagaagggcacaagagggcaacgcgagggaacggagccacgacagcgacgggacggcgagacacagccggaagggggacagaaggacga

SEQ ID NO: 484471 - DNA, 202 bp, Homo sapiens
ttagacctctctgagtgtggacgtcttcataagcacccagtgaactcatgatccccatatgacagataaaggaaacgaggctgtgacagagtgagggggcgaggtcacacaaagtcacaccaccagggaacatgagcacagcctccataggtgtacagcagctcagagagatgctgagctgcccgagcagcagggaaagaca

SEQ ID NO: 484472 - DNA, 610 bp, Homo sapiens
acgagtgcagtatggagccccctcttagagtgcgtcatcgcaggccacgagagcggagagctcaaccagtatagcgccaagtctggagaggtgttggtgatcgtaaaggaacactctcggcagatcaatgacatccagttgtatagagacatgaccatgtttgtcgctgcatctaaggacaacacagctaagctcttcgactccacgactcttgaacatcagaagactttccgaacagagcgtcctgtcaactcggctgctctctctcccaactatgaccatgtggtgctgggaggaggtcaggaagccatggatgtgaccacaacctccaccaggattggcaagtttgaggccaggttcttccatttggcttttgaggaagagtttggaagagtcaagggccactttggaccgatcaacagcgttgccttccatcctgatggcaagagctacagcagcggtggtgaagatggttacgtccgcatccactacttcgacccacagtactttgagttcgagtttgaggcctaagttctgggtctccatccacaacagagaagctgctcacagaaggttttagactcagaaataaattagtttgttaaaaata

SEQ ID NO: 484473 - DNA, 251 bp, Homo sapiens
aaaaaaatgccttttttttttttaaaactgtgggccgggggaaaaagaggggaaaaggcccgtttggccccttttgtctttttttcccttttcccccaaaatggggtttttgccccttgtaaacccccccccgggcttaaacaacaaaaaaaacccggaaagggtccattgcctttccccgccccccccccccagggttttccacattccaacccccccccccccccgggggaaaaaaaggggttttggga

SEQ ID NO: 484474 - DNA, 162 bp, Homo sapiens
cgcatacacgtttattctcccatacacacacacacgtacattccattcacatctacacacacatcacacacatttgactgtagcattcatgtcacacacactcacatgcagtcacgcatccacacacacactcatccacactgttacacacacacaatccgg

SEQ ID NO: 484475 - DNA, 794 bp, Homo sapiens
ggcgcctctcgcgccgattcgcttggtgatgcctccctactttgcctagaaggattaatactatcgatgtcatagtagctattctcagtaagcctcaagaccatttctctctgagcttatatggtgcgtgaatggcgagtacgtagtctgtgtggctctgcctgcagagaggcagaggggtggggtctatggcaatagataggtcgacaagagtcgtccgaaatatgtttgggtataagacataggggacgattagcctagtacactaattgtaaataggtaaagattaagttcgtgttccatcaaagttatctttcggttagacaattgagggtgatttttccaattgatagtcgtcattagtttgtgcgtcaaacagcaagccagctccataggcctaaatttactcacgtggtctagtcccttcgaccttattttgatttactcctatagttcatacagcgatccccttactataggcttgttgcccaataactattattccgtcggagccctcattaaaaaaacgccacttcctaaattacgtaccacgtaattgtgtgtattctttaactaccttgaaaaaattcaatttggggacattcataaattgcgaattttgaattccagggtggaaccttattattcaacgggaagggaaaacaaacgggttaattttagggaagccatcatttgttgctgctagcaagcctggaggctcttctggataatgttttaaaaagattcacagtcaggtataggcacgaagatgaaggcattttaggatagccagt

SEQ ID NO: 484476 - DNA, 555 bp, Homo sapiens
  misc_feature (89)..(89): n is a, c, g, or t
agtctataaggtagcatatgataccggtgaggaaaggatggacttgttaatacaagtggttaaacgttaaccacttggagaaagacganaatgaatctgcacttcataccatacactaagacaaattccaaatgggtcaaaagtactaggaaaaagtgaattccttcatcaccggggagtgggcaaaatcttcttaaatatgacttaaaacccaggagtgataaaagacaaaatgtatactgggaaaaaagttttataacatagcacattttcaaagtgtcggtgacttgagtgggaagcagggcagtgactgtcggggactgagggtggggggatggtgttgaacgggcgcggggtctccttctggcgtgatgaaggctttggaagcacacagaagtgatggttgtacgttatgaatgtattaaatgctgctaaattgtagactttaagagatggttaaaatggtgaatttttttaaccatctataggactctgataaaaatgttgttttatgtatattttacctcaataaaaattataacttaaaatgaaaaa

SEQ ID NO: 484477 - DNA, 177 bp, Homo sapiens
tcaatatcaagctttcttccacgaaatccgatgtcgacgcaacttatgcagttagcaacatattctcatccagggttcactctagagaagggaaatccagcccccctcgtggtgctcagctttttctgggtacagcgaaggacacacacctgactgatacaattgtcatggcgaacc

SEQ ID NO: 484478 - DNA, 730 bp, Homo sapiens
ggggggcccaagtccttctgatcgagaccatcctggccaacatggtaaaactactaaaatacaaaaaattagctgggcatggtggtgcgcacctgtaattccagctactcaggaggctgaggcaggggaatcgcttgaacccgggaggtggagattgcagtgagctgagatggcaccactgcactccagcctggtgacagagcaagacaacgtctcaaaaaaaaaaaaaacaagggtggtgcccctttctttacgtgtgttaaatagccttttcaaatttctgtgaagagtgcctcctctttctctccaagagcctttacttcaaggctaaattacctcacatgttgggtggctctccaaaaccttctttcccggggttaccctgtggtgtcaatggcgcttctataaaggtgaacgtccttgaaacccgggacacactttttgtttggaccaattagaccctttacgattgtgtgaggcatatatctacatgtgctcggaattatttcccaatttaaacccttatttagccaaccctttcgctgtgtagcttaataccccttcttctttacacaacttagcggaacctgaagccaagaagaggaggggggtaacctatttttacccggggttttctcaagttatgggtctgacccaagtaaggtcacagtaagaatggtcactctctagaaagcccaggtgtcttgtcgttaaatttgcaatttaccta

SEQ ID NO: 484479 - DNA, 327 bp, Homo sapiens
atgaagtgtgagatgtttctaaaatctctacatgggccgaccacaacctgctatcttctgctactgtgtgccatgctagagctccccctaccctgagggtggggggatggtgttgaacgggcgcggggtctccttctggcgtgatgaaggctttggaagcacacagaagtgatggttgtacgttatgaatgtattaaatgctgctaaattgtagactttaagagatggttaaaatggtgaatttttttaaccatctataggactctgataaaaatgttgttttatgtatattttacctcaataaaaattataacttaaaatgaaaaa

SEQ ID NO: 484480 - DNA, 574 bp, Homo sapiens
  misc_feature (573)..(573): n is a, c, g, or t
caccactgagtcaacgtgggctgctatccctcgagcatgcgagtcggggcaacaaatgccaatcaataaatgtgattcatcacataaacagaactaaaaacaaaaaccacatgatcatctgaatagatgcagaaaaacctttcgataaaattcaacatcctttcaagttaaataccctcaacaaattaggcactgaagaaacatacctcaaagtaataagaaccatctatgacaaacccacagccaacatcatactgaatgggcaaaagtgggaagcattcccttagagaaccagaacaagacgaggatgctgaccctcaccagtcctatttatcatattactggtagtcacagccaaagcaatcaaacaagagaaagaaataaaggcatccaaatagaaaacgaggaagtcaaactatttgtttgcagatgatatgattctatacctagaaaatgccatagtctctactcaaagctcctaaatttgataagcaattcaaaaaaggttcaggattacagatggacatacaaaattcagtagcatacctaataaacattaatgtccaagctgang

SEQ ID NO: 484481 - DNA, 793 bp, Homo sapiens
  misc_feature (734)..(734): n is a, c, g, or t
ctcgcgccgttcgtttctcctccgcgcgctgggacaggctgcttcttcgccagaaccaaccggttgcttgctgtcccagcggcgccccctcatcaccgtcgccatgcccggaggtctgcttctcggggacgtggctcccaactttgaggccaataccaccgtcggccgcatccgtttccacgactttctgggagactcatggggcattctcttctcccaccctcgggactttaccccagtgtgcaccacagagcttggcagagctgcaaagctggcaccagaatttgccaagaggaatgtcacagtggatgtgccctttcaatagacagtgttgaggaccatcttgcctggagcaaggatatcaatgcttacaattgtgaagagcccacagaaaagttaccttttcccatcatcgatgataggaatcgggagcttgccatcctgtgtgggcatgctggatccagcagagaaggatgaacaagggcatgccttgtgacagctcgtgtggtgtcgtttggtcctgataagaagctgaagctgtctatcctctacccagttaccactggcaggaactttgatgagattctcagggtagtcatctctctccagtgacagcagaacaaagggttgcaccccagttgatttgcaggatggggatagtgtgatggtccttccaaccatccctgaagaagaagcaaaaaacattttcccgaaaggagtcttcaccaaagagntcccatctggcaagaaatactccgtaaacaaccaagctttagtcttggagaattgggcg

SEQ ID NO: 484482 - DNA, 932 bp, Homo sapiens
gctgtgactttgtctgacgttctaacacctcgaaatgtgcctccagcgatatcgtgcgtgtggtggatgagcagctgggggaggagtcagaagaaaggggtgaccatttattaccaagtgtggattgcagctttagtatgtccagcgtcttcctcagtcccccaaaccaaagctagacgagccagatttctcaagcagtctcaactccagtccctcagtctcgacccttactattgctcttgctttccagttggcttttgatgtgcatcttctcactagtaaaactgccttccctttgtttccttattgtctggtttcttctctagagaggtacagtgtgtaagtcagcagttaatgatacatagggcctgtgaagggacagaggcttatgcaatgtctcttgagactcagccagttacaagtaggcatatgggcacaactggtgtagcaggctcagtggccgttggtcatttaagcacattttcacaagtttgggagacggctggcatttctttagattaaaacaatgaaatgccaagagaaggatgatttagtacagggctggatggcttccatgttgtatccggtaccctatagtagcctccatgaaaatctggtatatcttgctgcttgggactacctttgcagtgattgcttgcgttgccagtcccacgtactctccgttgtaggtctgagcctggagaatgttctagaattgcttttcccacctctgagattaggtccgggagcatgtgaattccccatttacgggttttcggtccccccccctctttgtggcgctgggggcccgttagctggatgcgccacagaaggggtgtctgccgctagcaaggctccaaacccggggggaggtcctgtcgcaggtccagggccctcggggggcgggttcactgaggagttccgcacatatt

SEQ ID NO: 484483 - DNA, 332 bp, Homo sapiens
atcgagctcggtccccctggcacatggtgagactctgccttaaataacaacaaaaattatccaggcattacggtgcacacctgtatgtcctagtcttctcgggaggctgagataggaggatcgcttgagcccaggagttcaaggtctgcagtgaactataatcacaccactgccactccagcctgggcaacagagtgagaccctgtctctaaataataataatagccattctaactggggtagaatgatatctcattgtggttttgatattcatttccctgatggttagtgatatcaaccgttttttcatagacctgttggcccttatcgag

SEQ ID NO: 484484 - DNA, 478 bp, Homo sapiens
tccacatgtaagtgagaacatatgttatttgtctttctggtccttacttatttcacttagcataatgttctaaaattccatccaatttttcacaaatgtcagaatctcttttgtttttaaggctgaatagtattctattgtgtatatataccacattttctttattcatctgttaaacgcttaggttgatttcataacttagctattgtgaataatgctgcaatgaacatgagactacagacatcccttcaacaaactgatttcagatgtttggggtaaatacccagaagtgggattgctggatcatatggcaattatatttgtagtttttttgaggaaccactatactgttttccataatggctgtaccaatttacattcctaccaatggtgtgcaagggttcccttttctccacatccttggtaacacttatctttcatcttcttgataaaagatattcagacaaatgagaaatga

SEQ ID NO: 484485 - DNA, 351 bp, Homo sapiens
gttccgggttttttttattgggttttgaaaactttgtccctccacccctgggggggttttgccggggggggggggggaaatgtccccgcatccgggcctgttttcccaaatggggcccccccccggtcccccccccggccggggtttcttcttaaccctttccccccaggggccggggggggggtttcttcccccccggggggggccccaagttcctccagagccccggctttccccgccccctttccgcccttgttttttttgcccccccccccgcccaaattcatttttgttttcccagggggccccctttccccctcctgttgaaaaaaaaagcggggggttgtccta

SEQ ID NO: 484486 - DNA, 1145 bp, Homo sapiens
  misc_feature (252)..(252): n is a, c, g, or t
  misc_feature (377)..(377): n is a, c, g, or t
tacggataccggtttttttacccaaggcaaattttaaaacccccccgggacttcgggtaaaaggaggagggcgcgaaaaaccgaccgtgcagaacctgcaagaggggagccgtgatccggggcccacgtgggttccccaccagaacaagcagcgtacataagaagaaggaaacggtggcccctcacaggcgagggtgtgcctgtgccacacaagcagctcagacagagggggtaaccaagaagtttcccagncgcagaaaacacaggtggggggacaggggagaggcccaaaaacaaacagagcagcgtgaaaaatatacacagagaaaagaggccgagggtgtggtgtaggaacagctaaatgcacgacgccactncacgtgtgtgtggcggccacaaaattatcgcagggttgcaccgagttagagagtgccgaaagaggactcttctccacaaacgaggcgggggagaaatcatgtggatcacacaacaaggaaataagaggcgcgattgaaagagaaacacgcgcatttgtgagagaatatcacacaagtgtgcgtggggaaccaacgttggcatatcaacagcctggcgaaaaaaaacacacagacgcggtgggagccccgcgactcctccacaggggagagagaaaacggcgtgcaaggagaaaagactccacagagggggtctaccagagagaacccccccagggagaaaaatgcacagacgccccgatgagtctcccctacaccagggagggtgagccccaaacatatggggggcgcagaggccacccggggagaaaacaaaccttcaaagaaaaagggctacagtggggagtatcaggagaagcggggacatggggagatggggcccccgaggagccaatagaccaagagaacaaaagagcacaatagcccgccccacaaaagcgctaacgggaagacgagttcgacaaacaatctatcgccaagctggaaccatgtatcagacacaagcgagggggtcaaccaaaagaaaaacgtatgcaaagagcgagtagacaaagagcccacacaaagtgtgagtagcgacagagagagccagatgggtgtagtaggtacagccccccaggaaggggccccggagaaacaccaaatagagaa

SEQ ID NO: 484487 - DNA, 115 bp, Homo sapiens
gcatagcaatatgtcagcggcagacgggtgagtaacgcgtgggaacgtaccttttggttcggaacaacacagggaaacctgtgctaataccggataagcccttacggggaaagat

SEQ ID NO: 484488 - DNA, 226 bp, Homo sapiens
ccccatggagacctaacccagtagactaactattgattcttctctcttttcttctttattagtctggccagtggtctattttgttaatcttttaaaaaaaaaaccagctccgggattcattgatttttttttttttttggggaggggtttttcttgtccttcagtttcggctcggatcttagtttttctgtgttctctcggcatagctttggaaatgtggtgggct

SEQ ID NO: 484489 - DNA, 943 bp, Homo sapiens
taatagtcctagagttggcagctggtaaaaccagaggctacatccagtatactgctagagacattcttcatccaccattgttggtctgtatgaaaatggtgtactgtatacttataacatgccccatatttgtgtatgggagagtacaataattgtaaatcctaaaagcaccacttatttttaggtataataaaagaaagtccaagagagttcctaatattagatatccagataaattcgtttcttgtgataattgtgtaggcttatgggtaattttttttacgaaaattcaaggttccatttatttattgggtaccaaaaataaagggcttgggattaaccacagactatatacttttttaactttttacaaaaacctggtggagaccggcttgactctgggtctttaaaacatgatagtcctttaaagtataagggtcttagattaaaagaccgttgccctaatatctgttgggcaaggaccatggtccagaccttctcacaaatctccttatttatatgtttccttttttttgtttacatatgcggaacccatgttactaggtcgtgttggtcccgtggggggttcctaccccacgacagctgttctcttttttcccacaccaattttttcaatggtcttcaccactttttggtcatccattcccaggtccgcgacggtagaaactccaggtggaaagcctgggtgggccaggcctcaggttttgggccaaccccaaacaccaggttgaacaatggccggaaggagtgcccaacgtaccctcggccgaacatcagggggcgcgcaccgggcgtcaagggcgacacccacaacagcattgggcgagacacggggcaaagtggtcacaccgggggtcacaaggggaagagtggttcacgaccatagacactccagtgcggacaacaacagagcatcagcacg

SEQ ID NO: 484490 - DNA, 269 bp, Homo sapiens
gtcgacccttgcctgaagcaatcctctttcgttgggggagggggtggggggaacggagtcttgctctgtcgtccaggctggagtgcagtggcgtgacctcagctcactgcaagctgtgcctcctgggttcatgccattctcctgcctcagcctcccaagtagctgggactacaggcgctcacaaccttgcccggctaattttttgtatttttagtggagacggggtttcactgtgttagctaggatggtctcaatctcctgacctcatg

SEQ ID NO: 484491 - DNA, 144 bp, Homo sapiens
gttcaagctcaacacccactacctaaaaaatcccaaacatataactgaacttctcacaacccaattgggacccaatctatcaaccctatagaggactaatgtttagtataagtaccatgaaaccattctcctccgcataagctt

SEQ ID NO: 484492 - DNA, 355 bp, Homo sapiens
acagcacaatcacatgtacatcatgggcatccctacccaaggcatcctggccatatccaccagagtgaaacgaccgataggtaggatcatcctgacgatatccaaggggtatctccctgggcaccaatatcacagtccaagatcagcagtctcattccaagccattggctctgttctgaagagagcgctggtcagcctcaactcaaagccgtcccttgtcatcttgtggctagacctcagacattcggaacaaaacagcagctgcatactgtcgccacaccttcattcctagagtgacgtacctctgtcagaggagctagtggctccctcagcttcaatagcttcagcatgggga

SEQ ID NO: 484493 - DNA, 286 bp, Homo sapiens
ccttgtaaccttttccccccagagcaagatttgtgctaatgtacggcatatatatgtgctctccttagtagtcacagaattctctcacactagataacatggatagttctcagcgtccgctggcctttctgcaaagaccgtcgtgcctttggaaagcctcaggttccctgttttgcctcaatgctaactaaaaagctgcatttctttccaaaatctaattaattaatagaggctatctaattttacactctgtattgaaaatggctttctcagccaggcgtggtta

SEQ ID NO: 484494 - DNA, 167 bp, Homo sapiens
aaagtcaatcttaacaatttttgcaataccttatataagcagaccattggatttatgaaactgcactctcggtgtaatttatgggatgcacatgataggttccatgaaccgtttcaagtagtaaactcctagaccctttattaaaatggacctaagtaagtgagaaa

SEQ ID NO: 484495 - DNA, 516 bp, Homo sapiens
  misc_feature (6)..(6): n is a, c, g, or t
  misc_feature (79)..(79): n is a, c, g, or t
  misc_feature (82)..(82): n is a, c, g, or t
  misc_feature (88)..(88): n is a, c, g, or t
  misc_feature (91)..(91): n is a, c, g, or t
  misc_feature (131)..(131): n is a, c, g, or t
  misc_feature (135)..(135): n is a, c, g, or t
  misc_feature (138)..(138): n is a, c, g, or t
  misc_feature (142)..(142): n is a, c, g, or t
  misc_feature (155)..(155): n is a, c, g, or t
  misc_feature (192)..(192): n is a, c, g, or t
  misc_feature (194)..(194): n is a, c, g, or t
  misc_feature (198)..(198): n is a, c, g, or t
  misc_feature (205)..(205): n is a, c, g, or t
  misc_feature (209)..(209): n is a, c, g, or t
  misc_feature (313)..(313): n is a, c, g, or t
  misc_feature (318)..(318): n is a, c, g, or t
  misc_feature (321)..(321): n is a, c, g, or t
  misc_feature (350)..(350): n is a, c, g, or t
  misc_feature (384)..(384): n is a, c, g, or t
  misc_feature (418)..(418): n is a, c, g, or t
  misc_feature (428)..(428): n is a, c, g, or t
  misc_feature (430)..(430): n is a, c, g, or t
  misc_feature (455)..(455): n is a, c, g, or t
gtgggntccggcagggtgggggtggggggaaacccctcaaaaggggggaatttgaggggggtgggggggacccgggggntantgttgnggngcctgggtgagcgcagttgggctggaaggagaagccctcnttgntgntgtncaggacagacggngccacgtatgtgaagcccaggaaggcctggttggcantntcgntgagggntgtntcatcaggactgtccaccggcgtctgccgtgtgaagcgggtatcaaactggctcacgtcctcctctgactgcagacagggcctaaaaagggggtccccccgccnggccnganggtcgtcccaattcatgtgccggaaaaanggatgtctctgcacatcagcagcatcccctgggncacccccaatccgctggctgggattccgtttcanaaactttttnanaaggtcccgggcatctggggtgaanaaagggggcagtgccagcttgcccctgatgatcttatccatggttttcttccggttctctg

SEQ ID NO: 484496 - DNA, 224 bp, Homo sapiens
ttaaatttagggggcccccctgggaaacccccgtagttttacccagccaaaaaaatttccttccccccgaaaaacggggggggggggaaattcccccctcccaaaccccccaaaaattttcccagggcccccctttcaaaaattaaaccccgggaacccaaaaattcggggggggttcccggttttggggaaaaaaaaaaccgccaaaaaaaggttttttttta

SEQ ID NO: 484497 - DNA, 442 bp, Homo sapiens
  misc_feature (189)..(189): n is a, c, g, or t
cgacgctagaggaccccttcgattggcgggcacttatgacatgcatgataggttttggaaggtaacttttaactgcaaacctataaagtactattttttattttataaatgaacagggttttaacgtgctcaactttaatttttttcaattgtatgaaggccttaaaaaagctacattaagcgtagtanaaataattaattgggactaaaaactaacagaacttcattcccagaatttttttactttttggggcaaatgttacacttccaattaagggggaaaaggtagacccagccaaattgagtgccagtggcgggagaaaacctgctcacattaattctccatctgggggtaatacacgggcaagtcatttccaaatcctctggagatacagagcatcagaatgacctctatgattccttgtttaattggcccgcaaac

SEQ ID NO: 484498 - DNA, 95 bp, Homo sapiens
gacagggtttcaccatgttggtcagggtggtgtcaaactcctgacctcgtgatctgccaatgataccggccaaataaaaacctcttcctttttta

SEQ ID NO: 484499 - DNA, 600 bp, Homo sapiens
  misc_feature (1)..(1): n is a, c, g, or t
  misc_feature (122)..(122): n is a, c, g, or t
  misc_feature (140)..(140): n is a, c, g, or t
  misc_feature (144)..(144): n is a, c, g, or t
  misc_feature (149)..(150): n is a, c, g, or t
  misc_feature (155)..(155): n is a, c, g, or t
  misc_feature (169)..(169): n is a, c, g, or t
  misc_feature (173)..(173): n is a, c, g, or t
  misc_feature (193)..(193): n is a, c, g, or t
  misc_feature (233)..(233): n is a, c, g, or t
  misc_feature (356)..(356): n is a, c, g, or t
  misc_feature (416)..(416): n is a, c, g, or t
  misc_feature (423)..(423): n is a, c, g, or t
  misc_feature (535)..(535): n is a, c, g, or t
  misc_feature (567)..(567): n is a, c, g, or t
ngaaagactgttatttgcaaacttgactcttcaattgaattacccaattagtacaggccactgatttgactgacacagtcgataacatgcagcctatccagaaggtgtctgttgggaaagtntaggataaaactttttcnttanttcannccttncctggccaagtccnaaangaattggtgtttgaattccnttaagaagaaagaaaatacttcaatttggtgctcctgatncactgaaagtaataacctcagcactttaatagccgtccacaggcataactgatgctaggccccagattggtgttgcccaggctctttaccatcatcttccggactgtttttgtttcctggttncattttcagtctggcccgctctacataatggggccagtgtcagctccaagtccacatccntactatncatgattcaaaagggaagagagagaacttcctttttcagggtccacaaatcaaatctataaaaggactctggtcttcccaggatcacctgcccttgcattggaccagtcccngtgggaagaggggatgggggcctgtgatcttngggcaggcctgggctatctatctgcaatgtcat

SEQ ID NO: 484500 - DNA, 214 bp, Homo sapiens
  misc_feature (5)..(5): n is a, c, g, or t
taaanctgggaggcagaggttgctatgagaccaagatcatgccattacactccagcctgggggacaaaggaagactacttctcaaaaaaagaaaaaaaaaaaagtaaacttcaaaaaacatacatatatttgggaaacactcttgctctgttgcccagggttgaagtgcaatggcagaatcagtggttcacttcagtcttgaagctccttgaag

SEQ ID NO: 484501 - DNA, 737 bp, Homo sapiens
taaggtttgagggggaatgctggagattgtaatgggtatggagacttgtcatataagtaatgctaggtgtgagtggtaggaatgtttttcacataggaggtgtatagagtgtggccgtagctggaatcgggggtatgctgttcgaattcataagaacagtggatggttacgaagtagggtctgggtgacaaaatatgttgtgtaagagttcaggggagagtgcgctcatatgttgtccctaggaagatttgtagtggtgagggttgtatattataataatggtttgggtgtatacacggctatagaaagaatatggtgccgaatgtgtggcctgcggacgatattcgattgttgaacgccttgaggactatttctggattcccccttcggcaatggtcagacaggtgggtatcggtttggctctctgctagttgtgggagactcaactccataattagtggccaaaggtgtcactagaatgcgcaaggagtacatcacgcacgcgtgtcaccttagcagaacggtcgcacacacgggcgtggacgaaacgggcttacaaagtgatgccccccacttacttaacatctattgtctgacacgtctcccaactgactggtgcctacgggctgacttcacatatatgcgcaattgtttcggggccacactgccccgcattgtgcccgaaccaggggccgtaacttgcagtttgtatgcctcaccccttatatcccgggcgt

SEQ ID NO: 484502 - DNA, 818 bp, Homo sapiens
gggaagcccaaccaggggggcgccccaccaccagggggcccgcacagcaaaaaagacattggggcggcgcaagactgggaaagagtcgcacatgtaaaccgatggatttcgcccgaagaacgcctatggtagagaccaaaggtggagggagtcgcaaaaagaaggccctaagcaaaaatgtttgcgcccctgctccccgaaggcatctcaaggacaccagcgcgaggttctatgtgtgccacgccgaagcggcacagtaaatagaaggccaaagacacatgttggctcgaacagaggcggcaagaccaacaccccgcgtctcattagtgtctttgaacaataaggggaaaagcactggagtccacaactgtggcgagctctcccttcatccagtgcccaaacccactccgcagtggatgtgcgcgtctcggttcgaaaacaccgcacgctgcccctattcgagagagagaccctgttggcacagagcaaaagatgtagcgcttctctgaagatcttcccgttctactcacagcatggaatacactctctctccttccctctagaaggatattcactcgtctatctccctttggtacaaagattctcgcctttctatccaatcatttacaggcacccctcgccttggaaccaggctttcctaatattgattgattatatacataaaaagaatctagtctgttcttataccagtcccatcgagcataataaagtaggaaaaataacaacccttcgaggaacagatacttattgcactaaaaaaaattcaaacaaaaccctcttcctgtgccccatatcca

SEQ ID NO: 484503 - DNA, 137 bp, Homo sapiens
tctttttgatgggggggtttttttgtgactgagccagtaaactcccactaaaagcttttttgggtttggccgttccttcccccccccccccagttttttcaaatttttttacctttttttaattaaactgttttgga

SEQ ID NO: 484504 - DNA, 1301 bp, Homo sapiens
  misc_feature (34)..(34): n is a, c, g, or t
  misc_feature (128)..(128): n is a, c, g, or t
  misc_feature (148)..(148): n is a, c, g, or t
  misc_feature (166)..(166): n is a, c, g, or t
  misc_feature (181)..(181): n is a, c, g, or t
  misc_feature (293)..(293): n is a, c, g, or t
  misc_feature (301)..(301): n is a, c, g, or t
  misc_feature (807)..(807): n is a, c, g, or t
  misc_feature (839)..(839): n is a, c, g, or t
  misc_feature (843)..(844): n is a, c, g, or t
ggcgtggcgtcagcgcaagatggcggctcggcancggtgttctcgcgcttgcgaagcgggctccggctcggctcgcggggactgtgcacgaggttggcgacgccgtcccgcctcgggccccagatcanggccgtcagagatcgggcangccgcgggagcactaagngcgcaagggccacangtcagcagccgggctcagagggtcccagctatgccaataataagttgcgctctggcttgctgggctgcttggacgctggtgggactgtgacgcgtcggtctatactctttgngaaacaancccggtggacgaacacatggtgccaagcattcctgatgagttcgacaatgactccaattctggtacagcagttgcgccggacatacaaatatttcaaagattatagacagatgatcatcgagcccaccagacccttgccttctcccagaccctctgcaggaaccgtactaccagccaccctacacgctcgttttggagctcaccggcgtcctcttgcatcctgagtggtcgctggccactggctggaggtttaagaagcgcccaggcatcgagaccttgttccagcagcttgcccctttatatgaaattgtcatctttacgtcagagactggcatgactgcgtttccactcattgatagtgtggacccccatggcttcatctcctaccgctattccgggacgccacaagatacatggatggacaccatgtaaacggatatttcatgtctgaatcgggacccagctcgagtagtagttgtggactgcagaaggaagccttccgctgnaccctataacgggttgccctgcggccctgggncggnnactctgatgaccggtcttgtggatctgtctgccttcctcaagaccattgcactgaatggtgtggaggacgtgcgaaccgtgctggagcactatgccctggaggatgacccgcgtggcggtttacaaacagcggaaagccgggtagagcaggaggagcagcagtgcctggcgaggctctccaagtccaaaaagccagaacactctttccttggctccctcaaccatgcgcttgttggcctcgctccaaaacagcctgaaactctgggctcctcaaaactcagtgacttgggtccagggccccagttgcttccaagacaagactttgggccacaacttgtccaataaagtacatcccagacgccacacctgttgtgttcccgagagtctccaacgatggggggcatcaggttgacggtcccggggacttcttggggtcacatcgtcccaccagtggtcg

SEQ ID NO: 484505 - DNA, 693 bp, Homo sapiens
  misc_feature (34)..(34): n is a, c, g, or t
  misc_feature (199)..(199): n is a, c, g, or t
  misc_feature (231)..(231): n is a, c, g, or t
  misc_feature (235)..(236): n is a, c, g, or t
ggcgtggcgtcagcgcaagatggcggctcggcancggtgttctcgcgcttgcgaagcgggctccggctcggctcgcggggactgtgcacgaggttggcgacgccgtcccgcctcgggccccagatcaggatatttcatgtctgaatcgggacccagctcgagtagtagttgtggactgcagaaggaagccttccgctgnaccctataacgggttgccctgcggccctgggncggnnactctgatgaccggtcttgtggatctgtctgccttcctcaagaccattgcactgaatggtgtggaggacgtgcgaaccgtgctggagcactatgccctggaggatgacccgcgtggcggtttacaaacagcggaaagccgggtagagcaggaggagcagcagtgcctggcgaggctctccaagtccaaaaagccagaacactctttccttggctccctcaaccatgcgcttgttggcctcgctccaaaacagcctgaaactctgggctcctcaaaactcagtgacttgggtccagggccccagttgcttccaagacaagactttgggccacaacttgtccaataaagtacatcccagacgccacacctgttgtgttcccgagagtctccaacgatggggggcatcaggttgacggtcccggggacttcttggggtcacatcgtcccaccagtggtcg

SEQ ID NO: 484506 - DNA, 624 bp, Homo sapiens
ccatcctcctgatccgagcttaacatctccctgtacaactttgctcccctacaaagggcacccgatatgcaaggcttcacactagtacttctctcgacaatacttcatcatgtgcacagaccgatcagttgcgtcagcgcctagagtatgatagtccttatcctcctttaggagctatgtgcggcttggtgtctcattcactacttcgcttccaggccgtcgcagtcatctcttctgcatttgaggtcatcacgtttctataacgcacatcttctcgcacgtcagctacaattgtcatggcaccctagtgttcgtacgcagtgcttggtcagaaggtcctactgcagtacagactaatgatccagccgttgaatcctcatgccaatacagtctatgctcacgactcttcaggttgtcttccaactggatcccatctgccccatccagttgactgatttctgtgcaatgtctgcttggagagggttcaggatcatagacactgccatagcagatggtgtaataagaatgtgctggagtctcgtcatccgtcagccctatggttctctgggtcctccagttcccagtagcgtatgtagtagcccctgtagagtccaaggatgcacg

SEQ ID NO: 484507 - DNA, 177 bp, Homo sapiens
ggtatacatcatatctgtgcaccagctatcaccaaccgcaagcctccacaaaaaaaatgcaaagaagagagagtgatattgtagggagaatcctcaacctgtaacattttaacaaacaaagcccagctgggctgatgtggtgcgtgcttgtagtcccagctacttggtgcgctcgtg

SEQ ID NO: 484508 - DNA, 272 bp, Homo sapiens
agggcaggattcacgaaagtacacctaagtaggccccgttacattatagttcaagcaaactgaggcccagagagcagctgcaacaccaagattggccagaatacagaagacctacgcgtctagcagatccaggcgctggaaaggtagctggtccccctatctggaccatagaccccgcccagcacgtaatgtgccaggcactgtgcttaacacttaataaacatggttctattgaatcttcataataatcctggaacaggaatattccttat

SEQ ID NO: 484509 - DNA, 297 bp, Homo sapiens
tgtagcacgaatgtcgtggatagcgtaagcgctcagactttccagccttttccaggacaaagccacggatatctcccgcatcgtccttaccccgacacacgaacacatccgcaaatcggactgttggtgatccacatcttcgcgccggtcaggctgtagccgccatccattttgcgtgcacggggtaaatcattcgcccccggaatcgcaaaccaatggttggggctcggtcaagccccaaaagcaaaccggattccatttcacccagagggcccacgttatgggccaaataccttc

SEQ ID NO: 484510 - DNA, 133 bp, Homo sapiens
gaaactgactggattactccggtctgaactcagatcacgtaggacttaatcgttgaacaaacgcaactttaatagcgggtgcaccatcggggatgttccttggagttcccaacatcgaggtcgtaaaacctat

SEQ ID NO: 484511 - DNA, 411 bp, Homo sapiens
attccattctgtcttattgcatggagttctctgagaacaaaacatagcaaaaggacaagggtcctatgtaaagagggcatttctggtggaaaaattccttgacctccttagctcttgcgttgaactctatcaacaaagagctatgttttgagccttgattacaaattttaaaactggtaaataacaaatacatcttgcctctgattgcttcctcctctgactacattgagatatctttattagacccttaatattttcattatcttcttatcttagactctaatcactttactctcatttcagtgtctgcaagttcttttcccattagtcttctctgtaccaacccagcaagaactctggacccgggatgaatgttacctggacttttactggccatcaagcatttttggg

SEQ ID NO: 484512 - DNA, 972 bp, Homo sapiens
ggcggaagtgcctcgctgcagcttcccggagccggagcgcagcgcctgggccgcccgtgccccgccgtcctccttcccgcgcccgtgagggacaccgggctcgccgtaagcggaagctgccgaggtggcaggccccagcccggaacccaagacaatggcaccccttcaagggaggccttcatctagcagggcagaacacctttggcacaatgtaacccagaaagttacagaattgtctggaaggggcgcccagttgtggggagacgctccggtcccatgggaaggccttccgcttggttgtaccagtatttttccacaaggatgttgcgcccagatttatcagtcccgtggggctaagaaccaaaggtcccaccacccctaaccacgggttgtgtccaaatgtgtgtccgatggaccaccttgcggctctgaagctttggtcctaaccaattgatgcgagttaaaccgttgctgccaagggtggacaccttttgtggaccctaattggccttggggggaattctacccattctaaaatcttttatcataagcttttttcttttcccccaagaggtgggtctccttccctataagtgtgaagactccagggattgacgggtccttcgtaaacccacccaaaaaagaaggaggaaattcccgccccttattaattcggaaggggcccccggatgttataatttgtggcactgccggctccaacggccattccttgggacaaatgggacgtgtatttttcttccgaacactttacaacgccccggtgttctggccgatctgggatgtacatcacatcatgccctctgttcacgcatgaagggggatactccagccactgaatagtaccgggaactcccgtacccttggagagaagctacaggaggatatgcggaagcttccacaaaacggaaagaggcccctgtgaaacatttgcctttaaaacacttgtcaaac

SEQ ID NO: 484513 - DNA, 345 bp, Homo sapiens
cagagatagagagccacagcaaactctcatatagcgctccgacgttacggagcgactattctttgcccttcgtggcacacatgtaccgtataacgccatgttacctagcgcactctgacaactgacttcttacctaacactttgacacgctaactccaatgtgcaccacagaaggagacacctgcctcacttatgaaggcttggaccgccaacttatatcctttcgggcacccgctacggacaggcacgcctatacacaccgtaagtatctcccagaagacttttgtaacggccttgagcactgaggttttttgggttcgaccttccggctgtgagcacagaccc

SEQ ID NO: 484514 - DNA, 348 bp, Homo sapiens
gtgcaacaaggaggtgtgcttcgccgagagggtgacctctttgggcaaggacgggcatcggccttgcctgaagtcagagaaatgtgggaagacggtgacctttgggggccacgttgagcatgaaggcaaaccttgaagcatacacgcctgattcgcaaccatgcctggcccttcagcctccgtcagcgttggcagcgaagcattagcaggaagacctttcatcgcaggtttctactccaaaggccgcatcatgggacccgcaaccatatcatacccgaccgcgggaagcctagtcgcaggatttctcattgctaacaacatttcccccgcatcccccttccaagcaac

SEQ ID NO: 484515 - DNA, 157 bp, Homo sapiens
gtagggaagccgtggagcaggaagaggaggaggaaggggcgcatagtagcgctggtcagaggctggtgtgcagccagtggactaggcaggaagtctgggtggcaggtccagcagggaggggaccaggatctcttgctccaagtgccccttagaccca

SEQ ID NO: 484516 - DNA, 156 bp, Homo sapiens
tagaggaccaacctcaggcgcgagctgctaactcaggggcgagctgctaactcaggggcgagctgttaactcagggccgagctgctaactcaggggcgatctgccacagtattacaaaaataaaatgacagttagttatcagctcgcccctgatgt

SEQ ID NO: 484517 - DNA, 246 bp, Homo sapiens
ttacaccccatcgatcacccttttctaccatccagaggttacttttcttatatttttttcggaaacggagtctagccttgtcgcccaggctggggtagcaatgacttgatatcggctcactgcaacctccacctcccgggtcccgggtacaagcgattctcctgcctcagcatcccaagatagctcagattacaggacttgcaaccaccaggcccagcttcattttttttatcatttggatactct

SEQ ID NO: 484518 - DNA, 217 bp, Homo sapiens
tagtagagacggggtttcaccatgctagccaggatggtctcgatctcctgacctcacgatccgcctgccttggctcccaaagtgctgggattacaggcgtgcgaccgcgcccagccagcaatatactcttttcaaagatttaaatgtacctagtttgacattttattgtttgaataggtattacatttacatggttcaaatttagaaaatgtaaaag

SEQ ID NO: 484519 - DNA, 281 bp, Homo sapiens
gacgcgatctagcgagatctcgcactcaattatattcgaggagctgccgtgcgtggaccgatcctcaagccctgcaaggatatcttcctggtgcgggacactcggtagctgcagctggaggaggagttgtacgccaagctcatcttcttctaccgctcaccgaggaccatgatcaagtgcactcgtgagaaggagtaggagctgctgctgccggccagagagggaaggagccgtgctgctgggcgtcgtggccacaaaagaagagcactcgctggtgctct

SEQ ID NO: 484520 - DNA, 258 bp, Homo sapiens
  misc_feature (121)..(121): n is a, c, g, or t
  misc_feature (242)..(242): n is a, c, g, or t
ctcttcacaatatactctccggacaaggaaccataaccaatactaccaatcaatactcatcattaataatcataatgggctatatgcaattaaaatctaaggaattagcccctctttcacnttctggagtcccaggagtgtggcccaagggcaccccttcggacatccgggccggctttcttctcacattgacaataaacatagcccccattctcaattcacattaccaaattctctctctnactaaatggtgcggaa

SEQ ID NO: 484521 - DNA, 116 bp, Homo sapiens
ggcgcggggagagatttaatttacatagcagccacttggggtccagtcagagctggggcagagggggaatctcctccccagagggttctccccagacccccacccccgggagacct

SEQ ID NO: 484522 - DNA, 861 bp, Homo sapiens
ggaaggcgtcgctttaacatgttttgccgggcttgtggcggctcgtgccattctgctggctcgccaacattgtcgtcccgccgaagttttccgacccgttttggtgcccatgtccgcagaagtacgaggtggagcgcagcgcctgtaaaaccggcatggcggcctacctgcgctgctcatggtagcgcggcttgcctcttgttgctccggcgcctgggtactgcaccggccgttccaagaccctcagcgttccccgtgaagtactcaagcgccgcgggcgggcccacaggccaccggcgactacgacaagaaggaactacgtctgagggcgctgggcacggccgggcccctcctgccagccaacgcctgcgaggcgttggataagcctggggatccccgcatggaccgcggcttccgccgggtagagcgggcgagcaggctcctcggaacgtccgggcatctgcgccccgacggcggcatccaggaatccgctccagcctgcgcacgcagcatgaccttcgtcctgccaactagcccggcccatgccgcttaacagacggaatgaagtttccttttctgtgcgcggcgctgtttccataggcagagcgggtgtcagactgaggatttcgcttcccctccaagacgctgggggtcttggctgctgcctgacttcctagaggctccatgctagacttccggaggggcggatgcagagcccagggcccacaccggaagatgtgacacctggtctgtactcaatcggcagggcccgacgcccagggacaagtgacttggcctggacctccaggtctaactccagatctccccaggcaaggctataagcaccgagctgagagaggt

SEQ ID NO: 484523 - DNA, 136 bp, Homo sapiens
  misc_feature (118)..(118): n is a, c, g, or t
ggctgaggcggcgaccgggagcgggaacttcggggcgggggagtcgaggcatttgcgctgggcttcggagcgtagcaagggccctgaagccttttaaagcaaggaggaggggaagganaaaattggggcttcctct

SEQ ID NO: 484524 - DNA, 129 bp, Homo sapiens
  misc_feature (55)..(55): n is a, c, g, or t
  misc_feature (73)..(73): n is a, c, g, or t
  misc_feature (95)..(95): n is a, c, g, or t
ggttcacggaggtggggtaccctactctactctgtaagttttacccaggactcanatgttacccaatcctttncttagcactatggtcccctcanagttctcactggcctggctataaagccctccagt

SEQ ID NO: 484525 - DNA, 139 bp, Homo sapiens
tttcctttcttccagaaagggataaagaccactgctgtctaaggaaggagttccccctccccccaaagtgctgggattacaagcatgagccaccgcacgtagatgataccgggtttcttgatgggggagcccaaaagag

SEQ ID NO: 484526 - DNA, 342 bp, Homo sapiens
gcagcagccctctctttctctaacatatttatttatttatttatttagagacatggtcttgccatgacgctcaggctggtcttgaaagtctgccttaggcttggcgtggtcgcacgcctgtaatcccagcactttcggaggccgaggcgggtggatcacgaggtcaagagatcaagaccatcctggccaacatggtgaaaccccgtctctactaaatatacaaaaaattagccaggcgtggtggcgggagcctgtagtcctagctactcgggaggctgaggcaggagaatggcatgaacccgggaggcggagcttgcagtgagccgagatttgccactgcac

SEQ ID NO: 484527 - DNA, 108 bp, Homo sapiens
ctcctaatgtcactagagagaggcgctgcgagagaggtctaaaaacagatacaaacaccagacaaactgaaggaaaccctaaatgactgtgtgtaattgataaacatt

SEQ ID NO: 484528 - DNA, 489 bp, Homo sapiens
tcagctcaactcaacagggctttgttgccatgccaggcacccagcttcaattcacaagcaccacaaatttaacacagtgcaaacacattcattttgggcgtgtcacaaccactgcaacacaaaaaatcttgcaatctcatgcttgttttataaatgtgatcccatggtttgaagtagtgggttacatgctgtccacagaaatcagttgcatcaatgaattcaggatgatgtttggctacttgttttggcattggttgtttcattcaacatgtgttgccacgtccactcagccaaaacgacagcgacagtgtaagcctgaatctcttgcttttcatcatcattttaggatcaacactgtatgttgcaactttttatactcccacaaaggcatgtccccagagtgaggcaatgccttggtcaaacttgatagaagcaaactgtgtcctaaatctcaagataatcaatatcctgtgtgagtatgtaagaaga

SEQ ID NO: 484529 - DNA, 895 bp, Homo sapiens
gccctccagctctttcctccttccatggaacctgacgtagctgcaaaggacagatccagggactgaagccaaagttatgcaagggactgtgtgtcgccacaggacatcagtcagtattctccagtctccaccaggaatcctcttcagacaagtgtgctttatgctgaaacagaatactgttcaaggagccaaaagaggggggaagatcaggtcaatactatctactctcctcatctctacaccacgtctcacggtatctcttgagcatttaaatatagatgtaacataggtttgtctttaactgtcaaaaagtttggtctctgtgtctgtgttttaataagacgagaggacgagcgattgaggtgtatggagagaaaacagacctaatgctccttgttcctagagtagaagtgcgagggagggtggcctaaagagtcgagctctcggaactgcatgcgtgctggacagtatcagctgtctttcctagatggcaggtcacgttgaattccatttttcaaacggtaaattcttgtgctctaaatagcccaagaatgggaggtggacctcagatcgtgacattgatctccttcctggttcctgaactgtgggggtgcacatgctctgcgttgagtcaggttagagtcgaggcttgagagaacccgttgggttgagaacatccaaaatctaataatggccccgtcataatcattaagggggactctaggcaaaggtttactttggctgggaaatggggatggctggcaggaaaaggtgaaacctctttcgagacacaaagggggggaaaattttggataagactgcgctggcacaaaaaaaataaaaattttggcccggctccaaaaccaaaacatgggggccccgaaacaacataata

SEQ ID NO: 484530 - DNA, 174 bp, Homo sapiens
attgctcgagctcccagtccctttatatggatgctctttccgtcaaatgtcgttgggtctgaatggtgtcttgtatcagggctcttggctcaaatgttactctttcataagtgcttccctaagcaccctccccacatccacttgactccccatctccctggtaggtatgatgaa

SEQ ID NO: 484531 - DNA, 327 bp, Homo sapiens
tgtggtccaggtacttgtaaaacacggatgatacaagatatatgatatatacatagttcttatcctcagaggagcgtctagagtattgtggtcgaagcagacattgagaccaattggcaggcaattataattctggtctcaaatagttgatgagaaacagaccaacttgtaaaatagtctccaatcataacatgaaaggcatattttaaatccttaacaatatcatacacgaccttacttaggtctttcctctgttctatgaccagggtggagatcttcattatcaagtttcctgtaactaaaagggaacagatcgttgagaagctt

SEQ ID NO: 484532 - DNA, 164 bp, Homo sapiens
agagaatgaaactggatcctcatctctcaccttatacaaaaatcaacctcaagatggatcaagggacttaaatctaaggcctgaaactaaaaactgtagaagataacattgaaaaaaatccttctagacattggcttaggcaaggatttcatgagccagaaccc

SEQ ID NO: 484533 - DNA, 269 bp, Homo sapiens
gggactggggatgtgtaaaaaatacaggtcccacactgggtgctgggggacttggctgttcagccagagaatcaaagatcaaagcagttggaaggcagcccgtctccgcttgggttcgcacccccaatcctggagagaggagcaccagggcaacggtaccccagcccggctgcaggcacacacaccaagtgcagggaggatcctggcctgctggaaactggggagcctcagtgaccctttcaagtacaggccaaaaggcccctggaggc

SEQ ID NO: 484534 - DNA, 379 bp, Homo sapiens
ggctagcatcgaatctgacgcacagctgaggtgagccgtgatgtcctgttgtctgcctcagcctctcagttatgggatttcaggcactcccactacatccagtttacaaggcgggttaacagtggctacaggaacacatctgctttctctgatgggagaaggcgagtaagtcagatgtcctataacatcattatgggtcaaaatccccgtgacaaaggtcccatatatactgactttgattgatagctgaaagttgttttattgtatttatattttcatttagctactaccagtaaattagaagttttttacatgtatattttgatatgtggcctttggggatcctgtgttcaataaaaaggtggttttttttttaaaa

SEQ ID NO: 484535 - DNA, 243 bp, Homo sapiens
gctgcctggcatcatcactgacccgatcccagcttttggctgtgaactgcttgcttcccaggggggaactcatcaggtgggctgtctttgaggcacaggcaggaggtgtgtatcctcccagggagcacttccacgaatctaagcttagagatttctaggacccttccacccccaggtgatagggaatgaatattgggctagcagtcaccatgaacggctggacaagtggataggagctacctt

SEQ ID NO: 484536 - DNA, 124 bp, Homo sapiens
gtaatggagtgatgaaaaacgtcatagaaggatctgggtttaggtgtccacaatcaagccttgttcttccgggtggtcaatttgtatttgcaacattctgaaccagtctgaaagaacggccttc

SEQ ID NO: 484537 - DNA, 161 bp, Homo sapiens
  misc_feature (112)..(112): n is a, c, g, or t
agttcttcccttggtgggtggcggtaaaactactgtaattaatacgcttctgactgcttcagataaagtttaagccttatattttccattttgattttgaatattcagcttnaagtttggattaaaagcatggggtgggcacccaatgggggaagaaactt

SEQ ID NO: 484538 - DNA, 1220 bp, Homo sapiens
  misc_feature (915)..(915): n is a, c, g, or t
gcagaaaggtcgggcatgggctgggtatgccgaaagctctgtctcccactccgtgctgtctgagatgcaggtgattgagcaggaaaccccagtgagtgcaaaatcctctcgctcgcagactggacttgtatgacgatgttggtactttcgcctctggatcccctgaagttacaaggcacaattcccttttccttaggggaaagctttgtgctcccgctgggatacagaatgctgccgtgggggtactggacagggtagaggaggaagtgagcacaagcataggttgagacattcatctaagcatcacgtgcactatttcgaggatacaggagccacagaaccggagtggaagttggagtagctcggagcatcaggccctcggagtctatgatgaggcgcgtcagaaattcgcaggagccaaagccatctcatctgacatgttctttgggcgggaggtggatgcggagtactgaggccaggtctcggctgcagcagctctcaggcagcagtgccatcagctcttcagacctctttggggacatggatggagctcacggagcaggaagtgtatctctggggaacgtgctgcctacagcggacattgcccagtttaagcagggttgtcaagtctggggctgggaaaatggctgtgctggccaatggtgtgatgaataccttgcaggatcgctacggttcctacggatccgagctctgtgactcatgcgttactacttggtgacggcaacagagaacgtccacatggttcccagagtctggggactgctatagccttgtggaagctggggaggatttgttacttcggtagtgtgtggtgtgtgtgtggggtggcctttgaggcgctcactcgctgtgacggggtaatggtcacgtaccaggcccttgtcctctgcctgntgtgactgagcccgtttattgcccgtctcgacatccacaccctctcggtgatagttgaggacttcttgggtccttcgtgtccatgccccgcacagcgtgctgctcacttatcgctgccatactgggaaagggggttcccccacgatgtgcttattctgggtccagactttccccaggtagggaaagcggaaggtagaaggctttttttgctggctctagggttcttctagttcgaggccttgggtccccatcctctggaaccagggggaggccttgaaatgagttcactgtagacccgtccctgg

SEQ ID NO: 484539 - DNA, 217 bp, Homo sapiens
tacaataaagtggtcttaaactcttcaccttatcacaaacaagaacactctgattactcctgtgcatcatgacccttgtgcataatatatgatttatcttcacactagcagagacattgagtactatgaaaatgtgcagaacaagcgcaagttgcgaggcaggcttcagtgcgcttgaccgggtacccgagctctgaatatccggaatcataggtcc

SEQ ID NO: 484540 - DNA, 134 bp, Homo sapiens
ggtatcctccttgtgatgatctcacatgtgaccaacctcaaagaggattgccaatggccgtgaacgatgaatgtcctgcaacgtgcctccttgctctaatgtcaacctatgagttggctcctgtgacctgagtc

SEQ ID NO: 484541 - DNA, 114 bp, Homo sapiens
ggtggagagagtataaatatttaacataggttttgatttatatgtgtaattttctaaatgaaaatgtaacttttcttacagcacattctttctttgggatgtgggatgcaggcg

SEQ ID NO: 484542 - DNA, 99 bp, Homo sapiens
tgatggccgtaccggcgcgcccgttcagccgctgggcgagtgggacccggtgaagatcgatgtgcgtgatcgatcagatctccggtttcatgttccaca

SEQ ID NO: 484543 - DNA, 280 bp, Homo sapiens
taacaactctaactcgaaaggccggttatatacgctgacagctcttcacaaaaatagctatgaacggtcagtcacagtgctaagttgctgtacagcgaacccaaaatccccatattcggtggtccagtgaaccaattgacatttctgctccatatttttttatatccagactatgctctgaaaccttgttccatcaagctgaacccccacgttgaacagtgaaactgaatctatctgtaatgtgccttccatggggtcctctcgctatgaactagcggtc

SEQ ID NO: 484544 - DNA, 415 bp, Homo sapiens
  misc_feature (34)..(34): n is a, c, g, or t
  misc_feature (42)..(42): n is a, c, g, or t
  misc_feature (81)..(81): n is a, c, g, or t
  misc_feature (109)..(109): n is a, c, g, or t
  misc_feature (144)..(144): n is a, c, g, or t
  misc_feature (223)..(223): n is a, c, g, or t
  misc_feature (388)..(388): n is a, c, g, or t
  misc_feature (391)..(391): n is a, c, g, or t
gtgaaaaaattttttttccccaggcccaaccctnatccccgnaaaaaaacccctttttcctagtggtattttttggccttnaatcccagaccattttcccagtccagtnaccccctgttgtcaactgtctctgtgaagggcatngctgcttcctaaagacttcacctatgtgtgggctgggatggaactctgggcagggaatttaaatgcctgtgcacttacngccttaacacctccagcttgctgagagagggatcctgttttctgtagcactcttgtttctagtggaatgatgcatgagtgccttgggtacattggtcagccttccatgttggagcttctctctgaacactctccagttattcagcagctctttgggaacctcatnctncgtgcttggcacagttgtgtatat

SEQ ID NO: 484545 - DNA, 857 bp, Homo sapiens
ggtccttgtcgagtgaaacagcctcggttgggaagtcagtgcgttctctcctctcctctcttcttgtgtgaacatggtgcggactaaatgactagtacagtgtatccaggctagcttacctctaacacaggtggtgtggctgtcgagcccccataaaggtgcttggttcttccacctctgccactaattgcgacatcagtttcatcgaggtaaagctgaaaattgaatatgtcagggagggaaacccgtggcgtgcgcccaaatcccaagtgggtaacaaaggaattgagaattctttagggtggtcccctaagagattctgaaaaagagaatcagattcctgaagaggcaggaagcggtggcgttaggaaaaggaaagagaatagcatgtacttgtgaaagctgatgacacgaatgaggagagaacgaatagagactttctcattcatctttgaataacgtgtcctgtttacccgtggtattctagaatgtaagttttcggtaaatgtgtgtgttccgattagtgggttgagcaggctttatgaagcatgaggtgtaagtgagatgtcaaaagtggttgtgacattgacacttgtaccaagaattcggctaacttagcttagtgttcctatatgctgtgtgggtttctttgacaacttagtgtctagtcctgctactccgtctggctgtgttcgactaccgctgtgtccctggaacgccaacgctgactgggccctcagggggcatgcaagggcccatggcccctctgggaacgcaatggcccaacagttttctttccacaaaacattttaaaaaaaggggcgccaaaagcggcagaaaggagtaaccaagtttct

SEQ ID NO: 484546 - DNA, 219 bp, Homo sapiens
  misc_feature (9)..(9): n is a, c, g, or t
ggcagttangatttatatctagcgggggatcagctgacgctccgcattgcacactgcggagtcagacggcgctatgtacgccctacttacctcctggccagcctcctgggcgcgcgtctagccggcccgtccttggagtgaaagaatgcaccagtggctcggcagttgttggtgcccagaattgtgaagacggcgtccgacttgcggggcagtgaagca

SEQ ID NO: 484547 - DNA, 324 bp, Homo sapiens
gggaggggcggcgtgcccccctcgctttgtctgggggggtcttgtggggggggggtgggggtgggcttggctagggggtgccatcggtgtgtcgcgttggggtcgggggggggtgggttagctgcggtggggttcgtgggtcggtggtggttggggcgggggttggggtggagggtttgtgtgtgtggggtgccgtggtcgttcttggggtcagagtttgtcggcagcgggggtgaattcctcgcaggtgtggtttgctggcctcgtggcctagagtggaagagtagagagttggtgtgttgggtgggttcggggggcggcgtg

SEQ ID NO: 484548 - DNA, 282 bp, Homo sapiens
tcttgaggatccctgacgctccttgaggagatggatactgatgcgactgtgagtgcgtacgtagtttgaacttttctattatgacgaaataaacaataaaggcatccaatagaatattcaaaattctaaatattacgactgccaaactagaattcttggactatatagttccctaagaactaactctgtagaccagtctgtagaggtgcttcacgaagcactgtgtgctcactaatccccagcaaccataagtttgaacttctcaataattctgggatggga

SEQ ID NO: 484549 - DNA, 865 bp, Homo sapiens
  misc_feature (1)..(1): n is a, c, g, or t
  misc_feature (84)..(84): n is a, c, g, or t
  misc_feature (150)..(150): n is a, c, g, or t
  misc_feature (306)..(306): n is a, c, g, or t
  misc_feature (310)..(310): n is a, c, g, or t
  misc_feature (444)..(444): n is a, c, g, or t
  misc_feature (477)..(477): n is a, c, g, or t
  misc_feature (488)..(488): n is a, c, g, or t
  misc_feature (567)..(567): n is a, c, g, or t
  misc_feature (570)..(570): n is a, c, g, or t
  misc_feature (604)..(604): n is a, c, g, or t
  misc_feature (662)..(662): n is a, c, g, or t
  misc_feature (768)..(768): n is a, c, g, or t
  misc_feature (777)..(777): n is a, c, g, or t
  misc_feature (795)..(795): n is a, c, g, or t
  misc_feature (861)..(861): n is a, c, g, or t
nggaaagaggtttgcccattgtgacctgcccccggcaacagtggccagatgggcttctagtaaagcccaattcaagtttgctcntgagcggcaggagccaccgctgttgctcgataccgcgctgcgaattctgcaggcggttggtaattnaaggcgctgtgcggccgcgcctcgttgtaatcctggcgccacgccgcgatgacagcgctgtgcatgggcaaggctcgtgaaccagtgctcattcaggcattcgtctcggaacttgccgttgaacgactcgatgtaggcattctgcgtcggtttgcnagcntgaatcaatttcagggacacgccgctggcgtatgcccactggtccagcgctcggctcgtgaactccggcccttggtccgtgcgcaggctttggggtagcccctgaagcgcgccgcatggtccagcgctcgtgcnacatataagcctgagatgccgtggtctacgacnatgtcgatcgnttctttcgtgaagtcatcaacgatggtcaggcacttcaggcgacgcccattggacaacgcgtccatcacgaagtctatngancagacctcgttcggtgcggccggcagagccagtngctcgcgctcgacacatcacgccgtggcgtcgccgccgacgccgcacagccaagccancctcgcgatataaccggtgtacgcgtttgtgattcgcgtgcagaccctcgcgctccagcagaacgtgcagtcgccggtaaccaaagcgccgacgctcatgcgccantccaaccanccgcgctttgagtatctngtttcctggcgcagtttgcgcttcgtaatgcagcacgctgcgggacagcccgacaagccggcaggncgac

SEQ ID NO: 484550 - DNA, 288 bp, Homo sapiens
ggagtcgtagggcatgacagtgccccaaagttcgcactgggttacgccgatccctcgggtttatcacaaagaataggactgggataaagaaaggggacacttaaataagctataaattatatggtcctggtctagcaggagacaacggcacaggtatactaccagcgttgggatattgatatatacatggcaaactctgacatactggttttactgacgacggccgggcaacggggtacaaacaccaaacttgaactccgacaccatacggactacagtacgggacga

SEQ ID NO: 484551 - DNA, 318 bp, Homo sapiens
ttttttttgagacagggtcttactctgtcacccaggcaggagtgcaatggtgagatctcggctcactgcagccttggcctcccaggctcaagcaattctcgtaccctcagcctcccaagtagcctgggactacaaaggggcacaccaccacgcccagctaattttttgtattttaggtaaagacagggttttgccatgttgcccaggctggtctcaaacccctggggctcatgcctcggcctcccaaagtgctaggattacaggcgcaaacttttctttaagtatgaaattattttcaaaatagaaaggtcgtcgacg

SEQ ID NO: 484552 - DNA, 115 bp, Homo sapiens
tgcgctccatcaggatccacgttactgtggctgtggtgtaggaaggcagctgtagctctgattcaaaccctagcctgggaacctccatatgccgtgagtgcagccctaaaaagcc

SEQ ID NO: 484553 - DNA, 239 bp, Homo sapiens
cgtatcgacttctgctctagcaaagatacgtcatctggcacaacagctgcaatcggaacaagtatttggtcaagtttatgagagtccactgtcaccctccaagactgtctgctttttcagagcaatcgtggtgttgttaaattggcgcattaaacaggatcatccctggcacgggtgcgagtggctcacgccatgtaagtcctatgcactattgggacggctagaggacgtgtgggatc

SEQ ID NO: 484554 - DNA, 750 bp, Homo sapiens
  misc_feature (1)..(1): n is a, c, g, or t
  misc_feature (82)..(82): n is a, c, g, or t
  misc_feature (197)..(197): n is a, c, g, or t
  misc_feature (204)..(204): n is a, c, g, or t
  misc_feature (213)..(213): n is a, c, g, or t
  misc_feature (263)..(263): n is a, c, g, or t
  misc_feature (266)..(267): n is a, c, g, or t
  misc_feature (299)..(300): n is a, c, g, or t
  misc_feature (304)..(304): n is a, c, g, or t
  misc_feature (313)..(313): n is a, c, g, or t
  misc_feature (326)..(326): n is a, c, g, or t
  misc_feature (328)..(328): n is a, c, g, or t
  misc_feature (330)..(330): n is a, c, g, or t
  misc_feature (338)..(338): n is a, c, g, or t
  misc_feature (346)..(346): n is a, c, g, or t
  misc_feature (354)..(354): n is a, c, g, or t
  misc_feature (357)..(357): n is a, c, g, or t
  misc_feature (360)..(360): n is a, c, g, or t
  misc_feature (365)..(365): n is a, c, g, or t
  misc_feature (369)..(369): n is a, c, g, or t
  misc_feature (382)..(382): n is a, c, g, or t
  misc_feature (384)..(385): n is a, c, g, or t
  misc_feature (389)..(389): n is a, c, g, or t
  misc_feature (392)..(392): n is a, c, g, or t
  misc_feature (400)..(400): n is a, c, g, or t
  misc_feature (405)..(405): n is a, c, g, or t
  misc_feature (408)..(408): n is a, c, g, or t
  misc_feature (427)..(428): n is a, c, g, or t
  misc_feature (433)..(433): n is a, c, g, or t
  misc_feature (436)..(436): n is a, c, g, or t
  misc_feature (444)..(444): n is a, c, g, or t
  misc_feature (452)..(452): n is a, c, g, or t
  misc_feature (463)..(464): n is a, c, g, or t
  misc_feature (476)..(476): n is a, c, g, or t
  misc_feature (597)..(597): n is a, c, g, or t
  misc_feature (611)..(611): n is a, c, g, or t
  misc_feature (618)..(618): n is a, c, g, or t
  misc_feature (644)..(644): n is a, c, g, or t
  misc_feature (650)..(651): n is a, c, g, or t
  misc_feature (658)..(658): n is a, c, g, or t
  misc_feature (660)..(660): n is a, c, g, or t
  misc_feature (662)..(662): n is a, c, g, or t
  misc_feature (672)..(672): n is a, c, g, or t
  misc_feature (742)..(742): n is a, c, g, or t
nttggttgtggtcttggtattgcaaataacatgtcttggaaatgtttagatgtagagagagaaataaacaaagtcacaaggncgaggctttaacataccactctaagaaataagtacacatagccaaaaacaacatactattacagtattatacagtattctgacacagctaggtttcagaaatcattatacttganaaaaagnataatttanattctttttaaaatcccatgtaacaattacaaaaatctctttagtaacanagnnaatctctcgccattctcccacgtcgtcttttnntgcntggcatttnccgcccacaatanancnctagttgntggccacncgccaganaanggnataanacgngcctacctgtttngnnatgngcncttttctnctttnctnggtttggggggggaaccgnnccttncgntttttttnggggcctnttgcttttttnnctttcggggganctttgttttcgaatggcggctattgttgttttgtgggttctttgttttcttttccctccctgggggtacagatttcgaataaattttgtcctatttgtatttcctcggtcttgggagcggntttttacagtccanaatattntgatatctatgatcgcatttcccagnggcaannatttttngnangatttcgtgntatagtagttatctccttaattatgaataaaataaatatatttatatttaatggtttaaaaattttaganattatgta

SEQ ID NO: 484555 - DNA, 424 bp, Homo sapiens
tcaccgatcgtagaactaggaatcaatagtcgactcgtcatttccccacataaactatgtagaactgttacagtgggtaagaaagaggaactctcagatacagctggctaggacatgcgaatcagtacagccattatgagaatcagtacagacgttcctcaaacatattaaaaataagatctatcatatgatcgagcaatcttcaccctcagtactgggtatatagacgcagaggtaagtgaaatcagtgaggttgacagagacatgtgcactcccatgttcatgggagcactattcacaattgtgagcatatggcctcaacttaaatgtccatcacgaagtgaattaacactggaatcgtggaatatatacacgagatatgaatagtacagagccatagtaaaacttaaatcctgtgcatttg

SEQ ID NO: 484556 - DNA, 106 bp, Homo sapiens
gatgcatgaatgtgtatgaagctggaaggatgcctccccagaagtccaagagtaatggaaatgtggagagaattgaagaaagcgcacttttcactcttaatgggag

SEQ ID NO: 484557 - DNA, 461 bp, Homo sapiens
ggtcagccccgacctcgggccgacgatgtcagaagctccgggggtgggtccagaagatctgttttattcaatcctctaggtgattctgtatgctcgctagaggttgataactactgctattagaatgtagtcgtataataaagtctctgacaaggccttattcagaatatgcaagaaaggttctgtgattcactttggcttctgtggctggaaaaaaacttctctggaacccacacatcaagtgcgtagttggtatgtgcccaggcaagtcctgacatcttcatgtccccctctgctagagggcggctgtaggatgttcacatgtctgcgtatggtcagacatcatctccttggcggcccttaggaaccaaatcatttgcgctggggatcaagtgctcaattggcattagtgagaagcccatcctatcccttgagatacttaatcatatatctctccagag

SEQ ID NO: 484558 - DNA, 226 bp, Homo sapiens
cacatggcatgggtcttggcagcatcattcattctcacagtgcaagtgcactccaggcaatggaaacaccaagcgtcgtgtgtactccactcctcaagtgggcagctcacagctgtgcaggatgcacaaggccataagcactgcatacaatggcacttatggggcattatgggggcacatgtgggcaggggcgtgcagggcatcacagactcaccccattgggctc

SEQ ID NO: 484559 - DNA, 275 bp, Homo sapiens
gacctgcgctaagccccacccagccccccggcgcccggcttcctgccccatctgctcagagagagatgctgccgagacttgctgaagagcttccctcctttcccatctgcagagtcccgcggcccacagagagcagggcgcaccgggagacagcatgcagcggcgcgagaggcccaggctgctgtccggacagtcaccctctgttctcgctacatccctagccccatgtccatatactgaagcgcccataggagcccttcacccccaaaaccagc

SEQ ID NO: 484560 - DNA, 169 bp, Homo sapiens
  misc_feature (169)..(169): n is a, c, g, or t
cccgtccgtaatatgtaacatgcagagcatagtatctatatgtattttgaaaattttccttgttactcattgatacatagttacttaattacatgtgattccatgtacactgaaaacaatataggaaatatatacatctaagacttctacttgggttacatattacggn

SEQ ID NO: 484561 - DNA, 864 bp, Homo sapiens
ccgttggggaaggaacccgcccttgctgcggggccacccggtcgaagtgttttcgccggcacacaggatgggtcgctcttcgccggccggagggatttattccgcgctccgcaagaaggggaccccaccgcgcatgcgtggtttttatttgcacacacaggttcgggggggcacccccagagcgtttactcatgttttattgggtcgcgccgctgcaagccgcgccgcacaccgcccccagacagctggttctgttcattgagaaaatgggtgcgcgctaaactttggatggtatgtagttgtggtatgtccaaccctggtcctgcgccacacccggtggttctaacggggcgttaaagacattggcgccacatcaacgcagagtcttttctatgcgcgcgttcaaagtcttttagggtccacggaccgcggagacctcgccaacggaaggatttagaaaaataaaggtctgcgcgtttccttccacggaagttacattctccttctgagacagtgcgggcgctcacaaagtacacattgggagatacaattgtgtaagggctcagattaaaagaggcggtgcccctcttctgtggggcgtagttctcacctaatataaatgggcgcttctttcgtgtgcagaacaacacaggggtgatccctgagcaccgggacaacagtggtgtactgtaaacgttagaccctttttttccagtgtcgggtaatatacgtggtggaccacgcagcgtaccccgcagtgtggtacccctagtagtgagggccgtcagttctccccgcagtcgtacgggggtgtgtatttcttcttgccaatctataggtcatcaagttacaccccaacataac

SEQ ID NO: 484562 - DNA, 167 bp, Homo sapiens
  misc_feature (4)..(5): n is a, c, g, or t
aggnnctccttcagaacaccgtggtgacataaatacccttgtccgtctggtcttcagagaagggattcggggaagggtccgggtcgattccacctccaaggctgaaacccaggattaagttctcacctgtgacgcagctgtgtgaatttcaacctcttggcaccact

SEQ ID NO: 484563 - DNA, 106 bp, Homo sapiens
aggagatttaacttaacttgacccaccacccatctctgaccatgaggacacctgaggtgctggactcggggctttttacccttccgggagaaaaacactaaccctg

SEQ ID NO: 484564 - DNA, 486 bp, Homo sapiens
  misc_feature (377)..(377): n is a, c, g, or t
ctcgggacttaccttttgcctgattctgggccctctgcttttgcctggttctgggcccttctacctttttggctggatctgcagcccctcccgggatccttaaccctctagctttgtgccctgattagcaacgaatctgcctttttgccctggatgggagctccctctcctttttggccttggtagggactcctttctgccttttggacctgagccccttctgtctacatttatacaccctgattctgggctccctctccttttgggcccagggttaagggcccgggccggaacccttaacgtataccaaccttggatatcatcaacggatgaggccaccagccagaacgcctgaacgcaggcacatacttccaatnctacaacctagtaggctcccttcccctattcatcgcactaccttacactcacaacaacctaggctcactaaacattctaactcctcactctcactggccaagaactatc

SEQ ID NO: 484565 - DNA, 156 bp, Homo sapiens
gatcccgtgctggtgctcaggtcattctcctggaaggtctgtggacagggaaccagcatcttccccagcttgtccatggccacaacaactgacgcagcccagcacgaatcccttagcaccagcacgaattcccttagcaccagcacgaattccctt

SEQ ID NO: 484566 - DNA, 1751 bp, Homo sapiens
  misc_feature (504)..(504): n is a, c, g, or t
  misc_feature (531)..(531): n is a, c, g, or t
catgctgcccgctcgtctaccgttcagggctggctgagtcctatatttcttctgtggaatactcagctacctcacggataggcgcagtccgatggcctcgtaccgtgggagtccgcttcctggagaagggatggtcgcgtctgaccggtcgtcctcctttccagacactcatcgcagtcgtgggaacggcgagcttgccattattgagccccgttggaacaacggtacggggcgttagtgagaaaggatggatgaacatgcaggtgagcgctttgcttgtatcccggtatgtgtaccagtcctgcgagtccgagagcacgacaagccttactcgcgacagaaaaaagctagacgagacaagagaacgcattccaatggcaagcatggcgagggcacgtgacgtggatggagacagtaccatgtatgagtccaagaccaagctgcgaccgcgagtaaagtgaaagaccgtgtcgggcaactaagcgaaagaaatccgtaaagggnggacccatgggtgcgcccagacgatgnagtgcgtaacaccccaggggttcccggtcaggtaggggccacccgcaagagaaaatccgccgcgacgattttaggggtcaaggctcctccgaaggcttgtggacggtttgcaaaacttggagactcacccggggacctatagtcgcgtggggggcccttatgcacctcattaagtctacttgggtcgctaggtggaactaggccccggcggtaaagctttgtcacctcatgttgtctttaaacactataggatgtctgcgccacgaaaaggaaaggcaatagagggtttaccctaataaccctggtcgagacgtgtaggacagcggcagctgggacccaagaaaacccgcgggctcgcgtggcccttggggagcaaacgggggaaaacccacgagttgggattgcgcccaaggagccgaccgttgacggttgggtcttataggcatgggttctgagccaaccccaaacagcaggtggggcaggccggcagtaccgttaattaggccccatgtggcaaaggggattggaagaggccccatggatgggaagggacaaacgattatccccgttgggggaaacggcccttaggtggttgaagagccagccccggccagattatatggccagtggcgcgggggcacccagagggcaccccacgataccccccgtgagaggatatggagctatcacataaaccacgtttggcgtttgtggaaacccttttgggctaggggaaaatcacttggggcccccacggacagggagccccctgtggcgttggggacgccggaaaaagtgttagaggccccccggcggaccctaggggatggggggagaccccggcaaaacgaccaaagcattggagatccggaggggcctgaggggcgaaaaacaacaaacaaacggtgtgggaaaaccaatacgattgtgaccccagaagaagacagtggactcccactagggctaaccccgggggacaaaaaagcgcagtagaggtggaacgcgacaccatgcgtggggcacaggacacatgggttgcaccccgggcgcaccagaggagcagtcaccaggatgtagcagcccaggggtgtccacccagagagaggcccacacaagcagccccgggcagacgaaggagacacagccgcacacgcagcgggggacgagaaccagaaacaccgcacacacagcagcagacgacgagagaacaggcacgacgg

SEQ ID NO: 484567 - DNA, 140 bp, Homo sapiens
ggtaacactgagtgacgacgtatcctgtctctaacaaatataaaaattacctgggcatggcaggctcatagctgagggtcccagctgattttttttatttttagtagagacaggtttcaccgtgttggccaggatggtct

SEQ ID NO: 484568 - DNA, 158 bp, Homo sapiens
ttgccccccgggggaaaaggcccctttatttttaacccaaattttcaaaaggggccaatttttttttcaaagccgggggagggttaatttaaaaccccctttttccccccccctttcccccaattttttcccgggaaattttttggggtgggacccca

SEQ ID NO: 484569 - DNA, 1385 bp, Homo sapiens
  misc_feature (1031)..(1031): n is a, c, g, or t
tggctgcgtctactgcgaaaatgaaaacttttctcagccaactcagaacgtgtgtcgacattctccaaaaaatgtgttcgacatttacctctgaagggacgcccagttatctcggtgaagggccccagaggaacccgggcggagggactttcaactcacattcaagtgtagaactctcgagccctttctttggaaagagaaaacaaaagagagaggctctccgggtgtgtgcaccacaagtggggtggggttacacaagaacagaggcgacacggggcttcaccggtgccggacacttaattttgttcagcctctgtgttccccaagaacactgttgtactccgcgggcggggtcgttttacccgctgtgggggcttctcagcgggttacccagcaggagtggagagctcctgggtgctttgtgctctcaacttttcccctcttttcaaagcgtttgtgtgttttactccccgagcgagcgacacagtgggcgctccctctctgtggcgtgtgcgaaaatccgccggcgaaagtaattctctccgtggtgggcgtgttgaaaaccataataataaccatattccccgggagaaggggggtgtcctccggcgagtgttgacaagaacacccccgcgtcgcttcgcttgtgccgtcgtgtccctccccgacgctactattctttccaaagagggccccccgacgaaagaagaggtagttgtacattcttcaaaactccctcctgttgggaagcacgcgccacaacatgtcggcactccatttttagcgaaactccttcgtggcgttttcccccacaaccacattcctccacacggccgcggcggcccattatgagtcgcacatatctccagacggccacaaaagcgtccccccactccacaacacgccgactgtctgttcaccacccacaacacccaacgggggggcgactatcttccccgcaggcgacaaccaactttcttcttcgtcggggggacagtggggggcacaacattccatagagatggtctttntcctcccttcggcacaaaccacccacagacggcggcaaacgtccgtttggtctctccccacgccgcacggccggcccgtgagcactatgaacactatcaaacggcgacctctccttaacaagaagcgttattacccccgctagggctggctaatcccgcaaacacgaagcatacaatcaatcttgctccccgaggataggtgcacccccccttttaaaggaaccccaccttcccgtctggcgcacgacatactctctccacagctgtgtcgtcttgcgccgcaactcaaagacgacacccccttatttctgacgttgtggcgcgaccacaccaaacacccatccatacacatcg

SEQ ID NO: 484570 - DNA, 544 bp, Homo sapiens
acgcgtccggtcttctgtaagtaaataagtgaagagatactctgtgactatggccagtgaggctcaattctgtgactataggaagtgaggctcaattctgagactcaatattgtcaagatgccaaatttctggacatttaactgatgagaatgagtttcattttttggagtttacttggcctacccgggatgataagcactttctatgcactgtaccaggggatcgtcacgacagccctgggttctggtgccgccttgcaggggagaaggtgaaggtggagcggtaacccggggttctggtgccgccttgcaggggagaaggtgaagatggaggggtaaccctgggttctggtgctgccttgcaggagagaaggtgaagatggagtggttaggggccatttcgaacgctgcagtaagtgccaaatccacagtttgaatcgaattccagaaactccagagtttgccttccgaaccaatctgagaattatgctggtcctcacatgcagtcccacgcctgtctcattggtctcaagctatggctttg

SEQ ID NO: 484571 - DNA, 317 bp, Homo sapiens
gagacagtaatgactggtgcgaaatatacagctgtagattccccttatcccggtgcagacgctttgactagcagtggtgaattggcctgtgccttcgatattcctgcgtcacctgagcatccgcgtcctcatctcgtatgctggcgcggtggaagggattactcagcaggagatactcggtgtagagacatggttctcctcagtgaactggcaggaccagtgtgggcttacctgtgagcacaaggtcgaccttctccctatcagtgcatccgtccagtttatgaaaatgcctgcacagttaccccaacccctgacag

SEQ ID NO: 484572 - DNA, 106 bp, Homo sapiens
cgtaagcagagagagcaggaagccgcatgatgctccgagtgtcccagcagctgatgagcaggcgcacttgaacgcacgctcgtaggtagccgccgcacccatcgtc

SEQ ID NO: 484573 - DNA, 229 bp, Homo sapiens
gatctctgcaaggaatcagaatctaaaaagagcaggccgactataccaaaagggacagtatggcaaagaaggcacgattctatatgcctacaaggatactccaccgataactcatctagcccataaatcataggacacagaccccagcgatagtgcacgggtcagagactccacaccctactatggaaatgcctcatagaagctagcatagtcactcccctagatgctt

SEQ ID NO: 484574 - DNA, 1384 bp, Homo sapiens
ggcgagtcgtcggggtttcctgcttaccaacagtgcttggacggaacccgcgcgctcgttccccacctgccggccgggcgtccatagccagccctccgtcacctcttcatcgcaccctcggactgccccaaggtaccccgccgtcgaatccagacgtccgggtcagcgcaatccggtcggcgacgtgcgtgcgtctgcttatgtcgggctgccaatgacggacactgggttgcaccatcgacaggtgcgccagaacctaccaccaggactcagaggcccgccatcaaggcgtcagatcaacctggaagctctaacgcctcctacgttgttagcatgtccgatgtctgtacgtacttgtgtacctgcgcaggcatgtggcttatgcaacggaaccgtgggccatagagtaacttagctatctaccgaatgctcgatgagggaagcaggggaaccatgctgagcacaagtgcatgggaaggctggcagacagtcgaactgatgtgtgtgccgacatctttcgcttcaagggataatcagggaaatcgagaacgtgtgactagactggggaagaacgcgtggttgtaattgcaaatgggacgtgtagacatgaacattgtcgggaataaacatagtgtgacatctcccgatgcaatcagcatggtcacatattggcacaaaacaattgagcccggcatgtatagaccaaagatggagacccgctcacaacggagcggtgaaaccttaactcttggcagcgactcagccatttaatcacttgtactattgccctccacagcgctggagcaaacgcacaatcacgacacactaacattcggcataatcgaaactgccggtcggcaccccaaacgcgtaaggacgcacccacacaatagggccaacgacggccacggccagatcctcgggctccgctggcccgccagacccgagaatacctaccatcgattcgacccagatcggcagcagccacaccccttgtgcgggtcagcaccactcgccgcgttcatctcgagcacagcctacacaacaccacccaggcccagcgcagcgagaacaactaccccacgcggtacaacacaccgccgctcgtcagaccgacagacacagtccacgcgccccggcacggacgacgcaccacacagtgcacagccgcgacggccgacagtggcaccgacgtgatgtggccgcagcgtaacacccacacagtgagcactccaacacgtgcgcgagactcacgcagacgcgggcggacacgaccaacacacagcagtgcgcagagccagcaacgaacgagacacacggaccagaatgacagacacacgacccgcacagcacgacacacacacagcagaacacatggagaaca

SEQ ID NO: 484575 - DNA, 252 bp, Homo sapiens
aactttccaatatttgatggttggaaattatgcttcagcattgggaactggaccccatgaaggatatgctcatcctctctgcactgaggcagatgctgcgggccgcagatgatttattagaagattcgcctcttgaggaaactggtgcaattgagagagcgttacagcctagcattttgtggacattcatgacccggctttgagaagtcatagatctactcatgttgtaaagagttgtcttgaagaacacgt

SEQ ID NO: 484576 - DNA, 259 bp, Homo sapiens
atactaacctaaagaaagttgacaaagccacactgacattggatgaagtagactttaaggaaagaagcattatgagataatgaagcgtgttccagactgatttaaaaaggttaatcaggaagataaaataattctaaacttatcttaccaaataactaacctgaaaatataagccaaactgacagaactaaaagagacagatcaatccacagtcatagtgggggatcttaacttacccccttagtaactgttagaatca

SEQ ID NO: 484577 - DNA, 511 bp, Homo sapiens
agctgtgggttaggttctgtgaaaatagtttgtttctttttgctatgcgttttattttgggaccaatatataaaaaagaggtggcgctctagagaaatcgaaatgcttgttggatgtagatagcaagttgcttcatcatgttttgaaaacgttgattcattatagtgctagataaaacctgattatgcattcttgcacaacattataaaccctcagtttctgacatttgccttagattataaagtgctttttcatatagttgacatgaggtgtaaatactatttttgtattacaatgttaaaagttatggggttttatatccacaaaagcgtatattttgatacagttatggaccatcatcatgcagaaaagagaaagaaataatttcattataaaacggtttaaatcaggattaacattacacttttttgttttctctccatacctatcttgttcttgtgacattcctagctgtatttttctttgccctcaataaatacttgtttactga

SEQ ID NO: 484578 - DNA, 335 bp, Homo sapiens
agctcgctatctgtaacaggataggagtattaactactctgggcagcagaagctagtagacttcttcctccatccaagagactaagccatttagtaccctagtctacccaggtactgtagatgcttacctctgcctctgctcttcgatcctgtggcagtcttatcgaatcccagagtttggtctcctcaactataacctatagaagcaacttacctttcaccaggaatgtgaggtatagtcaggtactcctctttagttaccctccatacatctcctttgatccagatagaaagacactcagctccttccccaaaaatcatcacaagaggggaac

SEQ ID NO: 484579 - DNA, 96 bp, Homo sapiens
ggccgattcggcaagcaggacttcatctacatggctgtttcggacgaatattgatgccccgggccagatgctgacgcgctgcgttcctcagtggaa

SEQ ID NO: 484580 - DNA, 443 bp, Homo sapiens
  misc_feature (400)..(401): n is a, c, g, or t
tacgaatcatagttcactgcagccttgatctcctgggcctcaagtgaacctcctgattcagctgcctgagtagctggtaactacaggcgcatgccaccacagtaggctaatttttaaatttttttgtagagatggagtctctacaaaaacacctgggttggctgggcacggtggctcatgcttgtaatcccagcactttgggaggctgaggcgggtggatcacctgaggtcaggagttaaagaccagcctggccaacatggagaaacccagtctctattaaaaatacaaaaattagctggtggtggtggcaggcgcctgtaatcccagctactcaggaggctggggcaggagaatcatttgaacccagcaggtggaggttgcagtgagtcgagatcacanngttgcactctagcctgggcaacaagagtgaaactccatctca

SEQ ID NO: 484581 - DNA, 403 bp, Homo sapiens
  misc_feature (46)..(46): n is a, c, g, or t
  misc_feature (48)..(48): n is a, c, g, or t
  misc_feature (214)..(214): n is a, c, g, or t
  misc_feature (240)..(240): n is a, c, g, or t
  misc_feature (267)..(267): n is a, c, g, or t
  misc_feature (304)..(304): n is a, c, g, or t
  misc_feature (319)..(319): n is a, c, g, or t
  misc_feature (334)..(334): n is a, c, g, or t
  misc_feature (355)..(355): n is a, c, g, or t
  misc_feature (365)..(365): n is a, c, g, or t
  misc_feature (388)..(388): n is a, c, g, or t
  misc_feature (394)..(394): n is a, c, g, or t
cctgagctgcacgcccgtaatcccagcacttcgaaagccgaggcgngntggatcacctgaagtcaggagctcgagatcagcctggccaacatgcagaaacagcgtctctgctaaaaatacaaaagttagccagggagtggtggtgctcttctgtagtcccagctactaggggaggttcagtctgggagaatctctttgaacccaggagggcggnagttgcagtgagcccgccatttgcantccagcctggggcgacagagttgagantccatcttcaaaaaaaaaaaaaaaaaaaaatttcctncgggcccaaagtttntttcccttttagttnagggtttattttttagctttnggcacttggncccttcctttttttaacaacgtncttganttgggggaa

SEQ ID NO: 484582 - DNA, 206 bp, Homo sapiens
agagtccgtaaagaggtatctttactataaaagctatagtgtaagctagtcatattaagtatgtaggctcatggagtttgatagtaacttggagcagtgaagagtagagtagtagaatagtatagttgagcctaagggtagttgttgagtagtaatatagtgcgatagagtacggggaactggagcctaactagaggtgtagaata

SEQ ID NO: 484583 - DNA, 294 bp, Homo sapiens
ccccgggggccccccccaatttttggtttttgggcccgtttttttggggggggggggcccccggggctcccccccctttttttttggggtttcccaaaatggggaggccggccccctttttttcccggggggcccacccttggttgttggggttaggggcacccacgggccccccccaggaaatttggggggcccccccccccgggggggttttgggggggaaatttttttttttttgggggggcccccgggccgggcggtttcattaagggggcggggggcccgtccttgcca

SEQ ID NO: 484584 - DNA, 776 bp, Homo sapiens
acagagttcactataaatggtgtttttttaactagaatataattatcggaagcagtgccttccataattatgacagttatactgtcggttttttttaaataaaagcagcatctgctaataaaacccaacagatactggaagtctcgcatttatggtcaacacttaagggttttacgaaaacagccgtcagccaaatgtaatcgaactaaagttgaagctaagatttagagctgaattaaatctcaactcaggggtcgctaacgaagcgagcactgaccagatacagaatgctcggctctttcctaaatgcacgtgaattcgtgaccaagttataaatcaatgtcacttaaaggctcgtcggtagtactcctgcaaaattctatagctcagtcttatccaaggtgtaactctaattcccatttcgcaaaatttccagtacctttgctccacaatcctaacacattatcgggagcagtgtcttccataactgtataacacgaacaaggtagctccttacctaccacagtgtctgtatcggagacagctgatctccatactgttacactaagggtgctaacgtaatcatcgggaacacgtgtttcccataatttccttcatgcaatgacatcttccaagcttgacacaatcgttagtatcctaacatgtatcccaactcctataattccctatctctagctcttagtcgcagcaacattccgtggtccactaagcattgggtgggctaaatcaaccaacgtaaaatgccttctacaaca

SEQ ID NO: 484585 - DNA, 377 bp, Homo sapiens
tgcgtagcgctgaccttcattgaggtcccattaggaaccagatgtcttgattacatgtacacctatcctctgatgtaagtctcctcaccttgaggggtcatatagtaatgcatctgggtagcatctcaactgcaggtagcatttatctgacttggaaagttggagaagaggcattcctactggagaaaaatgtcagtgttttctctataagctctgtgtatagctattcattatatttgtgctttacagatgttccttcattcatcaactaggggaagtccagatgcgggttatcttgacagaaacaaactgacattctaggcagacagttgtctatgtggtctgagggtcagcagctgttagtctccttcctttgg

SEQ ID NO: 484586 - DNA, 358 bp, Homo sapiens
cctgcaaggagactcttgaggatacccctgcgctgaccttgacgctcggcctcccaaagagctgggattacaggcgtgagccactgtgcctggccacacctagctaatttttaatgtttttcaaatggagactctgtcacccaggctggcgtgcagtggcaccatcttggtttactgcaacctctgcctcccaggctcaagcgaatcttccgccttagcctgccatataggtaggactacaggtgcataccacaacaccgagctaactgttgcattttttgtagcttcttccctggccaagaagcttttttttttttcttgacacggagccttgctctgtcgcccaggctggagagca

SEQ ID NO: 484587 - DNA, 145 bp, Homo sapiens
tttctaatggcgtacatttgcatatcaaagcttgccggtgggggctcttctgctaggcaagaaatgtttcttgagctactttaaaagaaacaaaaacatggcaagacccctttttcgtatcctgccctaaaataaatttcttaat

SEQ ID NO: 484588 - DNA, 371 bp, Homo sapiens
  misc_feature (80)..(80): n is a, c, g, or t
  misc_feature (104)..(104): n is a, c, g, or t
  misc_feature (211)..(211): n is a, c, g, or t
ccgccgcgatctgggtttattttttcattttttaaagatgagtcaatacattacagtatattaaaaattatcactgagancggagggtggggggactcccatcnaaggggagtaatctatatctttacccctttaaatgaagctgggattgggggattcttttatcaacagaatgcagcagaagtaacattgggggatttctaagtctttngctcaaaagaccggggggggtgttgttttattggaacctaaagcaacaatgaaaagccgggtggagagagatccagctgtgccacgtcttctaggggttccagggggggctcatccatgtgagtgagaccaggatggtagatatcaatagccataggact

SEQ ID NO: 484589 - DNA, 379 bp, Homo sapiens
  misc_feature (332)..(332): n is a, c, g, or t
agcactttgggaggccgaggcgggccgattgcttgaggtcaagtgtttgagaccagcctggccaacatggcgaaaccccatctactaaaaatacaaaaattagccaggcatggtggtgggtgcctgtaatcccagctacctgggaggctgaggcaggagaatcgcttgaacccggggggcagaggttgcagtgagctgagtttgcgccactgcactctagcctgggggagaaagtgaactccctctcaaaaaaaagaccactctcagtatctctggatttctgaagatgtacaaaaaaatatagcttcatatatctggaatgagcactgggnccttaaaaggttttccagcaagttgtaacttatttttggctaaaatg

SEQ ID NO: 484590 - DNA, 149 bp, Homo sapiens
cctgcgaccttccgccggggcatatgagctggtatatgcagagtaccgcgacatcggctcatggtcatggacatccgcaatgcttatgctgtgttatagtacatcatccgtgaagaacttcgagaagctcttattgcccaggctggagt

SEQ ID NO: 484591 - DNA, 613 bp, Homo sapiens
  misc_feature (504)..(504): n is a, c, g, or t
gcgcgagagaacttgcatgacgctacttcccctatcatagtaacgatcataacctgtgatggacgctcgctcataagcaacatccatcacttgacaacagagacgcttaatgaatggagacacccggaactatggctgtcaggctgatactaaggctgatggctactaacattcttacgcattccttacagcgcagactgggttaacggtcaagtaccttaccaggatagtaatcgctgagcaatgtcactgaacgcacgcgcacaccgactacggccgtatgagcccaagatcttgcatacttagatcattatatcgagaaccaggcgatctgcgacatctatacgatgacataactgcatgactaactagcgtagcccccattcgtatactatacacataacaagacgtatcgcagtcatgagcttgccccacattctgcttaagaacagatgccatttgcggatcgttaaaccgaaccactagcaccgttacacgagcggnggtatctacggtcaatgctctgatatctgcggagcgaaccacaggtttatgcccatcggcctactaattggactacaagtgttgcaatacggcccgtacttacgctatg

SEQ ID NO: 484592 - DNA, 301 bp, Homo sapiens
taagcataaactgggggacagtgcgttattgctgcactcctttaattccttatacagagcccaaaaaatatagacaaaccctaaaaatgtagcagaagcatgtccgcacactggtgtccagaatctagtgggtgcagaaatgtttccacatagattaaaagagtactcttcagaagaaagaggcgagggctcgtcatttggtcacccttagaacatgctgcaactcttcaaggggtttccattgttggttgattgttataagctgttgacgtacagcgtgctccacaagttgatgctcacg

SEQ ID NO: 484593 - DNA, 128 bp, Homo sapiens
  misc_feature (46)..(46): n is a, c, g, or t
  misc_feature (48)..(48): n is a, c, g, or t
aatacaatcaggagagagtgtgcagtctgaaatttaggcaaccggntnaatttagagaactgggatatgtagagaacagccttgtccatttttctcttcaagaaaaggttaagtgattgttccccgct

SEQ ID NO: 484594 - DNA, 215 bp, Homo sapiens
  misc_feature (182)..(182): n is a, c, g, or t
cttgagcccaggagtttgagaccagcctgggcagcatggtgggaccctgcctgtactaaaaattttaaaaagcattggctgggcatggtggctggtacctgtagtcccaggctgacgtaggaggatggctcgagcctgggaggtggaggttgcagtgaaccatgatagtgccactgcactgnaggcctgggcaacagagcgagaccctgtctcca

SEQ ID NO: 484595 - DNA, 202 bp, Homo sapiens
ctccattaccctcaaagtgcttagcgtttacccagaggtctgggcctccaggtggcactgcagcgggaattcagtggcagcgccttaggccttcctgccatgaaacagaagccaaacctcacatgctcagaaggaatagcaagttacgactcaaaagagtgttcagaacgatagagccataattatgcatgaccacttaagt

SEQ ID NO: 484596 - DNA, 117 bp, Homo sapiens
gaggtcgtgctatgacctcagaaatatttcaacggtgtgtggagggaaaggaggcttgtgagagccgtcagcatcggaaggtccggggcggatgtctctatagctcctagtgacctg

SEQ ID NO: 484597 - DNA, 448 bp, Homo sapiens
cgactctacaggattttggacagacgccacgttgctgcatcaggagagtataaggaggcgcgcaggtcacagggcatgctatctcgtctgtccatgcacatgaagatatcatgtccacgcccagctgctgggagatctcgtcgatgccaagtactggcggtccaagtcacatacgggcaaagagcttcagctggtacctgcaggacagggaggactgtgaggacacggcagatggcagccgggaggctgctggcactgggcactagacttggtgaggactcagtaaagtggcaaagggattaggttaaagatgcgccagctgcaattctgagttagaaaggtgaacggaaaacctgtctgtgataaccagtacttgcaattctccccctcctggctaaggcgcagccaggacaggtcttcatgacgtggcgtctgtccgggtaccgag

SEQ ID NO: 484598 - DNA, 715 bp, Homo sapiens
  misc_feature (177)..(177): n is a, c, g, or t
  misc_feature (254)..(254): n is a, c, g, or t
  misc_feature (273)..(273): n is a, c, g, or t
  misc_feature (416)..(416): n is a, c, g, or t
  misc_feature (461)..(461): n is a, c, g, or t
  misc_feature (526)..(526): n is a, c, g, or t
  misc_feature (679)..(679): n is a, c, g, or t
catctttcctaaagcttgctactccagaaaaagcttcataagtttgagttggcctgtttggccaacctttgcccagagactgctgaggagtccaaggctctaatctccaagcttggagggacggtttgaagatgaggagctgcagcagattcttgatgatatccagacaaagcgcanttacagtattaatctccaaacatcactgctgctcggagaaaccacatccccaggcataacaccaccttcccactgtnctggggctgacttgcacanaaattctattgaagacagttgagaattcctttggagaaaacagcacagcttggcgtggggttaggttgctgtatcaaataactcacaggcccaggtgacatggaatcttggagcagccttgtgcagtggcagccagtggcttnctgaacgtgcctctgcgaagtgtgagatgaggggtcacataaacnacactattagactacctcatcctggttttggctcacatcatctttttcttatattcatgtattanttcaggtgttatacttttaaactagacagaagatagtagacttatagagaagacagtatactagatacaagagataacgctgtattaatctttttttttttaatgagaaggttatatgcagctgagagtcagtgtcatatgtatattacctcnactcaaactgcaagttcaattatattattatagggt

SEQ ID NO: 484599 - DNA, 227 bp, Homo sapiens
  misc_feature (142)..(142): n is a, c, g, or t
ctacccgctgaatgtatatgctggcaagtgcttataaaaaaaatggcataagccagtgtgtggtggctcacaccctgtaatcccaacactttgggagaccgaggcaggcagatcacttgatgccagtgagttcgaaaccagncctggccaactatggtgaaacctcacctctactaaacaaatacaaaaaaacaattcgcccgggtgcggttacgcttataaagggt

SEQ ID NO: 484600 - DNA, 157 bp, Homo sapiens
aaaaaattccccccccccccccccccccccggggttgggttttgggggggggttcccccggcccaaacccggtttttggttttcccctttcaggttttttccccccccccccggggcccccccccttttttaaaattaattggggggcgggggggga

SEQ ID NO: 484601 - DNA, 159 bp, Homo sapiens
tgtgatcagactctacgagtatcccacgtctttactcttacatgcaggaacactcagcacacacatgtatgctaagggccagagaagccagacccagtatgaaaaaatagcctatttactttaaagtaaccaacacattccattttaaatgtggggatt

SEQ ID NO: 484602 - DNA, 344 bp, Homo sapiens
  misc_feature (10)..(10): n is a, c, g, or t
  misc_feature (344)..(344): n is a, c, g, or t
tcctctgaancatcatactttgcttcaccagtatttatgaacatttcccatttcatcacaaaggacattaaaatgattcagattcagatcatgatttttttagattaatactttttactgcctcatcaaggagattcctaagacttttttttttttttaaagagatgtagtcttactctataacccagccgggagtgcaagggggtgatttggggtcacgggagcctcaacctccgggactcaggggatcaccacagttcagcctcctaagtagctgggactacgggcccgcatcaccatgccccgttaacattttgggttgtttcatagagacgaggtctccn

SEQ ID NO: 484603 - DNA, 240 bp, Homo sapiens
tatttccacaggggaaactggaacgtctttcgggacagtcagagagataacaggtttcctgaacatacagtcatgggccaccaaacatgactggacttcagtggttttttctaaacctgggtagacctatgggtgggaatgagtactctaatagtgggcctggtccttgctttattccttcaaggcaaccaggggcattcaccttcttctacaggttccacgtcccttgaagggaaattc

SEQ ID NO: 484604 - DNA, 212 bp, Homo sapiens
cttgcacaggtccctcgaattcttctgaggatccatgctggcttgggagagggcgcagctccatgccccagtgcctctccatacagggaggaactcctctgtgattcgtggcctgacggtccagccgagggtgggtgcgacgaggtcagccgctccatgttccgtgccagcacattccgagattgtcatcgaggctctggctctcgttggag

SEQ ID NO: 484605 - DNA, 775 bp, Homo sapiens
agcggagtggtgtcgcaagcttcatctgttcctggaagatacccgtagcctgccttccttcttgacaggctgatttaggggtgctccccacagaagatcaggactgctgaatagaatgaagaagaacttacttggcctaggatgtggctagagaacggagcgcactttcatgttacctggcaaggtggttctgcaagtttgccacggaagccttcccaggtccgctgctgaccgtcctcgcctaggtgtggagcgttcccgaccaggcatggggagggaatgtcctagctgggagccgtcgaggaccctctttagccgtcttgccctggcttgggtgcagctagcagtctggtactcgcccattctgctcttcttcatctccggattttctctctcacggaagaagaatgccattctcccatcccaggaaggagagtgccctgtgtgcctacgaaagagcccaggacccgactaggacaatatacgtcactggcagaccgtgtcattcgcctagcgccagtcccgatactctgaaatgctccaggcatagggtgccccggtccgagcgctcccagagctgactctttccgtgaacggtcactgcgcaggatcaagctacaatgaggaggagggaggcagtctgcgcgcaccgtcattttctaggaactgggaagtctcaccgacccttaggaagatcatgcctgtggaaccttgcccaggcttaccagcctttgctgaaggttgatctattgtccctccttgtcccatcaaatat

SEQ ID NO: 484606 - DNA, 894 bp, Homo sapiens
gccgcccttattttttttttattcaatggttcagttccctttaatgacccctaatctccctggaagggcaggtgcgggcagctaggtgatggcaagagatgtcacattgaaaatctgtgccctgattgaaggcttggcccacatgcgtggaaggccccctcccaggaaaagtactctcgaaaccagcgtcgtgggtctcctcgcgtgccaggatccagttatccgccagtggtgtatgactcgtagtccaccgtgccaatcgtggactcaggcggaaaggcaagctccgtggcctcggaagaacccaaaactccgaaaaatggcagctgctaattggtgggtctccaaaagaggatgcacactgggcgaaggcatctcttcctcaagcttgtccagtcgctggaactattccagtgatgagattgcagctcagtgaaggtctgagggagttctctcagggaaagcgatactcgtgagtcaccaaagggcaccagccgctccttatcagaagggctcccagaaatacatggccaggtgccacagaaaagtgtgtccctcatgggagtactggcgcttaaattcatccaaacacaagggtactctgggccaggtgaccaaaggggtccttggcctggggctcagcagccagcgcctgctcaactttcatccatctcctcctcaggagcaggggcaagcagcctttttcctacgtccttccgttcaagccgggggcttctggcttctctacccggtgaaccctttactcttcccgtgggtggtgtccttaacaggatgggggcctctggaaacttttaagcttaacgtgggccatcttttcacaagagttcactttccccagagaagccggaacggggctggtaaatgtaggttagg

SEQ ID NO: 484607 - DNA, 276 bp, Homo sapiens
  misc_feature (43)..(43): n is a, c, g, or t
  misc_feature (173)..(173): n is a, c, g, or t
  misc_feature (225)..(225): n is a, c, g, or t
  misc_feature (231)..(231): n is a, c, g, or t
cccctgaagtttaacggttggcaccgtccaggttgccactggnacacgaaacagcgttggtccccatataccggtaaactgaaactgcagcgaagagtttagcagaaccatgtatatcaggtctgtttcgtgtgctgaattgttgacgcatttatttattggtatcgcatganccccatcgtaattaatcggcttcaacggaagctgggctacacttttaatcancagganctgttgcagcaggcattaactcatcgtagtgccagcagtaaacat

SEQ ID NO: 484608 - DNA, 122 bp, Homo sapiens
gaactgggattaagaaatctagtcttcgcctcattctccaatggtcacgggaccattcaagaatccatacagagctccgagtctcttctgtccagccttcatgccagacccttgggactggg

SEQ ID NO: 484609 - DNA, 214 bp, Homo sapiens
tccacaccctcgtggtcgtcccataactgctggaaataacacggtgtgagccactgtgcccggcctccatagttgcttattttcttagataacctgtatgagtcgatagtaagtaactatatactgagcacttaccaggaattggaacccaattaatttcattctaacaataaattcatcagatggctatgctattgaaacttctaaaactagg

SEQ ID NO: 484610 - DNA, 426 bp, Homo sapiens
cccccccaaaaagggacaaaaagtgggggccccccccggggggcccccctttaaaaaaaagggacccccccgggccccagatttgggccggggtacccccccacaaaaaaaaggggttaaacccctttcaaaacccggtaaaccttttggtataaggcccaaaaaaccccccaagtttttttttaaaatttttttttaaaaaacccctttttgaaaaaaaaaggttttgggcccgggggcccttttttatccagggaccaaaatttgggaacctcccggggtttttttttttttttttcaatttcccaggggttcatttgggaaacccctttttaactttgggaaccaaattttttttttttggggggaaaaaggtaaacccctgggttttatttaaaaaaaaaaaatggtttaaattggggccca

SEQ ID NO: 484611 - DNA, 134 bp, Homo sapiens
ccgggaacggtggtgcatcccccaggcagctgacaaaaatggtcactcccgcgcgacttcgtcaaacatcgttgggccggaatatgtcaggcgctgatgcagccagcacctcgcgaacttcctgaggagtaggg

SEQ ID NO: 484612 - DNA, 232 bp, Homo sapiens
gtccgtttcccatgataatactgtcctattcatgcatacaaaacagtatctgtttaactatatatcatcaaaatgagactaataccagaaaaaaaattagacagtaatgagaatcaataacaaaacataacaatgacaactgttcttaagtaatttattttaaaattataagatttacagtgccattgattatgcacaaatagccataatggcaaattaaacccaaatccaa

SEQ ID NO: 484613 - DNA, 388 bp, Homo sapiens
ttcccagcttgcgccgttctgtctggtgtagcccatgaggtggccagacgtgggctaccattttctaccccagaaaactatcggctcgcccttatgacaacataagggtcgaatgtgaatttcagcagtaaactgagagtagcgtgctaagttaaacagggccctgaagcgcgtacacaccgcccgtcacctcctcaagtatacttcaaaggacatttaactaaaacccctacacatatatctagagaagacaagtcgtaacatggtaagtgtactgcacaatgcacttagacgaacaaggctcctctagagcggtatgaagcaccgacaggtccttagagtatcacagctgaggcatcgtaatgctctagcgagcagtatagtagat

SEQ ID NO: 484614 - DNA, 120 bp, Homo sapiens
  misc_feature (13)..(13): n is a, c, g, or t
cgtctgagtgtanacgacggcagtatagctgtttcgtgagtgtacacgacggcgagtatagcggtttctggattgtaaaaggacggcgagtaataccggttgcgtggttataaaaggagg

SEQ ID NO: 484615 - DNA, 213 bp, Homo sapiens
gagcagcgttatctgaattgttatgcgctgtggcaacgtttgctaagattctctgctccaatccaaacacaggagcggtgttatatgaacttccctccaacacacagtgggtgcttcgatattcagtggtgtccccgaaatcctgctagtcttatcagctgcttcgtattgcatgggcgtatccagtgtttattactcatccatgggtaggta

SEQ ID NO: 484616 - DNA, 1214 bp, Homo sapiens
ctttatctccttgtcttatctgtgttcctatttttagtgctactatctcctcctttattctcgccgctcttgtgctgttgtgtcccgtttgttttacaatttatgatgttatttactccctgtgagcttgttgatgtgtttctttgactctagttcgcgccaggtgttctccgtggtttcctcccacgtgtcgtcgtctttgaacccgaccgtgtcggtctagtcatcctcctgttggttctcacttcttacctcatatggtctggctgtttctttttcttgtttgctcttttcatattggtgttcctcttattattgtcatgtgtattgttttcctatttcttgttgtatctcgttcttttttttgtgtctatttttttctctgttccgtgttttgtatgtgatattgcgttcttgtagttatttttgttatgctgtctagtagtgtctcgttttgtgtatgtctctctatgtgttcatcttgttactttccttgtcctctgactattattattgatatgtatggcttgaagtgcgtgtatctttcgatagtatatgtcggtatcaaggacgtctattgaatattgataatgtttcctatctagccatttctaaattggcacaggctcactctacctttattttataatgctcgttctactatgccaagtaaatgacacactatgctggtatttctagaagatggtacctagccaggtccgttatagagccttataacatattttaatggcgatgttgtaaaacttcagacaataaaagcatgaaagacacttcaatacaggtaagtagtttcaagaccatcttccaaaagtaatgaccagtcacacaacgatttacctagtaatagtgctggatgaaacctaactacctacctagctagatcctgctgctacatatactataaatgctgaaggattccatgacatcttgccaaagtcctctagactacctttagactaatatagtagcatagtatagctaaaccatgtcttctcctcatttggatatgtaaaccttatctcagcctgggagatgaatacatcttccactcatggataactcaactcctgggcccatcagtcctcaaatttttcatagcattcatgaacattgaacaataggtaaaggaagtgacaccgaaaaaattgaaagaaaactgtcaaaaaggccactattgatgtatatctcagatg

SEQ ID NO: 484617 - DNA, 955 bp, Homo sapiens
gagagatttgcaaggtcggctgtgttggagcacaccgcgagtacgtcatagtgacaatgctctgccttatcaaatggggaagaaaggacgatgtcttgggagtcttgagccattctgctgctgtcgcgcgtcatctcagaggtacatggaatgtggcggagtacccgtgatgaccatccctagtgacgttacagcgtgactgtttcagccgactttctcacaagaactgtctgtgctgtgagagtgcactggcactgatggagtcccgcagcagattgtgtgaaataggcaagttgtttattaaaatcgggacaagagcaagtaatggcgctctaaggttgggagaacacaagaggttgcttgacatgattgcttggagggaacacaggatggaggggtaggaggaactgaaaatgtgcgctcagcgaacctggataatacgcagtagcatagaacttacttaaaggtagaagaccatcagaggacacagttgtgacccgaagtaactctcatctgcagttttgaaggaaattcagacacgtatctatgggtgaaaaggacgctatgacagggagactagtccatcgtcatggttgccagaacaccaaaagtgtggcactgtgcgtgcatgcatcacaggccaggtgacagcagacagtcccacattcaaaaccgggaccaaaaacacggaggaagaatacacggaaaaggaacatcaagagggtgcggacatgttgacccaacatgagccctgttcacaccgggacatgacacaccgaatggacggaaacaaagtaggatggcggcataaacttaacaacaaggccattagagaatcggaaggacgggacacacaacgccaggaaaccgcgacaaaggaaaccagggagagatagacagaaccacccgagaacaatcacacggggaacccacatgggacacccagagcaataga

SEQ ID NO: 484618 - DNA, 410 bp, Homo sapiens
  misc_feature (220)..(220): n is a, c, g, or t
  misc_feature (376)..(376): n is a, c, g, or t
tatcagcatatttctgaaattctctgttattctatttctactgtctttccccactttactataaatttgatctgttataaaatggctgtgtttagatagatacccgtgatgtttaggaaacaaatgatatagagactcccatttaaatgaatcttatctttataagaaacagccaaactgttttccagactggctataccatcttacattcccaccaggnatgtatgagtgatccagtttctctgcatgctcgccagcatttggtgttgtcactatttcttatttcaaccattctgtttatccttttcagtgaaatatctgttcatatcttttgcccatttgccaattgaggcaggaggatcacttgagcccaggngttcgaggctgcagtgagatatgatcactaaatg

SEQ ID NO: 484619 - DNA, 515 bp, Homo sapiens
atgacagaagagcatttgttagctttgctttgcttttctttcttttttgagacagcctcgctctgttgccaggcaggcttgagtgcggtggcgcgatctcggctcactgcaacctccgcgtcccgggttcgggcgattctcctgcctcagccccccgagtagccggtattgcaggcgcctgccacgacgcccggctaatttttgtatttttagtacagacggggtttcaccgtgttggccaggctggcctcgaactcctgacctcgtgatccacccgcctctgcctcccaaagtgctgggattacaggcgtgagccactacacccggccgttagcttttctttaaacaacataaatctaaaggaaagaaataagcctttgggaagagcaatacttgatgtttttgtaatataattattttgaaaacaagcaagcatggttaaacataagattgtgcaagtgtggatttacagaaattaatctgggccgggcgccgtggatcacgtctctaatacc

SEQ ID NO: 484620 - DNA, 972 bp, Homo sapiens
  misc_feature (694)..(694): n is a, c, g, or t
gctctactcggtcggcacttgatggggtgatgtgtctaccgtactagtgctccgctcccagcatcgatggggtactctcggcgttccgtgcctcggcagagcgacagagagccaggggattgtaggtcaaggatgtagagagacttcccatacagtgattgactcctgtccagatgccggtccaccgtctacattcctgtgcgtggcgatacaaaggacttgggatggacatcacaactcagtgtcggtgaaaagtcgatgaggcgcggtgattgctagagtgacacgagaataggcggtggatggacgctgtgatccactgagtatggagagggcacccatggctgtgtagtgggacattgtgtgcatacggtggaaaactgcgctcgatggcctactggatctgcagtgatttgtctttgctgagcggcatctgtttattagatgcaggggagagccggctctcataaagatctagacactctagtcttagaagagaggccttattccaatgttctgtaaagaaatggtgacggatggggatcgcgccagatgcctgattgaacgtaccgatcatcgattcatgctctgatagcatattacttgtccacacctttatcccgtgttccatttgctctgtaacctaagaagtgcagcccttggctttttcttctttgccgccaagcaatagtanggactcaaagcttgattgtggagatcccaagagtggacaccgaggagcggcacttgttgggccagatgaaaagcttggaagttggggccccggcgagtgaggggcttaagagacaacgcagagtacccgtgtggaactcacacgttgttttgcggcatttgattggacggattggattctgcaatgttcacatcttgggtgggactccatggtgcccacaggtgactaacacatatgggggttccacccaagttcggtttgagcgccacaacccaaga

SEQ ID NO: 484621 - DNA, 455 bp, Homo sapiens
tgacgtgacatttcatgggggtttggattggatttccctaaggaggagtgatgctgagcatcttttcatatgcttacgggtcattggtatgtggtcttgggaaaaatgtctattcaagtccttggactattttaaaaatggggttattagagttatcgtggttgttgactggtaggagtttctttctatattcgggatattaatcccctatcagatatatgattggcaaatatcttctctaataccataaggttactttttcacttggtggatggtgtccttggaggtatagaagtttttagtttggaaatagtctaatttatcggttttaacttgggtggtcggtgctttgggggtcatatccaagaaatcctggccaaatccaacgttataaggtacttttacggtctttgagttgtctaagtctatatttctgtactcacctttctttatcc

SEQ ID NO: 484622 - DNA, 1126 bp, Homo sapiens
  misc_feature (171)..(171): n is a, c, g, or t
  misc_feature (400)..(400): n is a, c, g, or t
  misc_feature (663)..(663): n is a, c, g, or t
ggtcccttgcaacgtgacaggccgatgtgtgctctgtgctggtacgcctcatccctgcagcccaagggcactggctagtctgtctccgacacctgtgcctaatgaagcgtgctcatgatggctggatatcgatgacttgcatacgagcactctaggacctcggggcatacnatcgtgcacacacacttgtgtcgaactatcagccgaaaggacaacacgtgttgaatgccgatcttctaatgaccttacatgctactcgtgacccccagacctcttggaagcgagacttgtattcatcgcatagcgtctgccgctatcatgaagttcacatcgaccacgcgtctcgtctcaagacccgacaagccaacgagtcatcctgtgcaggcaggagcgtctaggngcgtccaaagactcgtgcgatatcaaccagtagtcggttgctgctatagcgacgaatagaattgaaaccgtgacattaaggccgatgcacaagaacacattgacaagaataggaacatgcagacaagatcaatgacaaagggtaacattcaagactgcggtgtgtagtgccagtaacggaggagtcgtgtcggaaacaagaccgaagaagtcaggtttgtcaattagctactgaagcaggtccgggctgaactcccttcgaanactcaagtcacagatgcgtccttggagtgggcttgcaacggaaccactttgaagggagaattcgaacgaatgcacgacggcttcatacgtgcattggctgtgggaacccagggatataccacggctggccgttggcttacgcgggcacagttttcggaaggaacgtgacctgaagcttacctgtgcatgcgttggagacttgcctaagtgacttttcgtggcacagggaacgacaccttgtgttccaggggatgaccgttctgcgtttttcatccagcccagatcagggcgaagaaccgcgggacacccatccttgggcgcttgcgcttactggtaagggacccggggggctctacaccggtgggcgttcaaccaacacccgtggggcagatccatctctccgcgagacggatgggggatccaccttcaccgcagggccggaagtccgggttggtcaagacca

SEQ ID NO: 484623 - DNA, 333 bp, Homo sapiens
tggctgtttcctatgatcaaacaacttccctgaggatcctcaacaattgtcatgctttcaacgtgaagtttgattattctcaggacaaagcagtgctctagggaggacccctggattgcacttactgcttgattcagtttcactttcactgaggttcactatcctggatcaaggttcagagcatactgtgcattaaatgaaatatgctgcagaacttcactatggttgactggaacaccaaatattgggattttgggaaagctgtgtagcaatcttgatggactggccgttctaggtatttatttagaaggttggaaacgctggacccgggcc

SEQ ID NO: 484624 - DNA, 326 bp, Homo sapiens
agtaaagttttagggtgaccccagggggacgtaatgtttccgagaagaaggacagaaaaaagactgggagaccccggaactcgaaaaaaaattgcatacagaaaggctgtacctggaggaaggaagtgcggagccagccttagttgggagaaaagctccaaaaatgtgaaaacagactaatacattgtttccaaaaaaaagaaaagaagaagaaggaactaaaaaagaatttttttggaagcaaaatatttggaagcaaaaaatttgggtcctggctgaaagggttttgatccatgcatacattaataaacccttcagaaccatga

SEQ ID NO: 484625 - DNA, 888 bp, Homo sapiens
gatctctctcggggggaagtcttcggacagacatgtgtgcgcatgcctggggatatcaatcgctaccgtaggagtacaactctagtgggtctgcagtgtccatgatactgcactacgagaacactagaggttctacaaaaccactttgtggagaacgtggccctgtacgatgtgacgaatggcgagcttgagcttccatggatagtcataaatgcacgaatatcgattgcatgaacactcatggggtccacatggaattggcgctaaacaataaacatggtgcgctcgacacatttatggggaccacatacgagtatcaactgcccagggggtcatggtcactggaaaccccattcgctgttgtacttccactgtcaatgtgagagggtgaaagtgatttgtccctgcgcgtgcgagtaaccccgttgatcacgtggcggggggaccactggtgtttccctttccacccctagttcttaagttccccagaagaaagttggtttcgcacttaggacggcgtctggttgttaacttcattacctatccgaaaggaaagggcctaaaaacaggtggaacacgctggagtcaaaagtcacttggccaaggaattgggtgtgcacccatcaaagtttggaaaagatgtccctttaaaaagaagttggggttatcaatcccctctgggtgagggagaccttggtgaaactaaatgtggatgccaaattgtaactcgaacgcgggtgaacaggtttcgagcgcgtcattaaataaaaccggttgctgggggcttctccgggagatgtgtcccattcccatagctgggctcatatgatgaaacctgcgttaaaaaacaaggtcgccgtattgacactcttagaattccaatattgg

SEQ ID NO: 484626 - DNA, 150 bp, Homo sapiens
agaggatcccgagcttacgagattacatcgtcttaatatttctgaagtttaaatacaatctgcatagtaatgttactataaatgtaaactttcagtgttgttttaaatttcaaaatcacactttttatttttgggtctttttgtcttttt

SEQ ID NO: 484627 - DNA, 1093 bp, Homo sapiens
actgagtcgtggggtgatagtgtgtgtggatcttcattttgtgtgatcacttgttgtgctgtgttcttcccgtgggtgacgtgggctcttttccctgggtgtcctctatcattgtgtgctgcttgtaagcggtgcgctgctagtgggtttcacgggtctccaccgtgtttaaccaagtgggacccgtgtgacacccgtgttagatctcactttcttataaaagtccgcaaggcatattttttaaaagggtgccacccttttgaaatccccagttccaagaacttctttccatggacttctgtaaattcccaacttggaattctgctccaacacttttattaggtcacccctgtagttatttaatggttcttctcacagaaacacgtaaatcatatattgtaccacgttaacgccccaaataattgtccaccttaataatcttccagacaccagggtaaaggtattctttagagattatggaattctgtgtaactattcccctatattaagttaaccatctgttataataaatgactttttcccatgggtacacttgtttggaaaatagtccacttgtttccaccctatgttaaatatgctcgcccacgtcaccacctataaatattgctataggaagaagtggttctctttgaacctcaaggctttctcagatttcaccactcccaagatgtgaatatttccatccaccaactataaacttctcggtgatattgaaatatttatattaacaccagctcacccaaagagttaccaaataccctaccagttcttgtatcttaatagagcccatctcttgatgtgtgggtttgcgccaattaatgtgcctcccctttattgagccctatgttaatttctctttagcctgctctcccccttaattgaaatagtgatgtagtaaatattccgaagcgatatttcttttgccatattttacctaacccaggaaacgggcccacaccccctggtttagggatgttcgtgatagcttaccttcccagttttttaagaaatagcttcctgccactgctgtcaacccctgtattgtctttaatgaaccctgttgtatccccca

SEQ ID NO: 484628 - DNA, 234 bp, Homo sapiens
tggctcacggaagtagaataaagagaatcctgggacccactcacccgggcaccagggaccaacaagcaactcgtttgggaccgttcactcctcgcaactatggaccaagaaaaagttataatgggaccttaaagctccaccttctttacttgttatctaaatgatgactggtataactgtctcccatccctttcgcttgtggcaggagatggcttaaataaataacttaaactt

SEQ ID NO: 484629 - DNA, 113 bp, Homo sapiens
tcaaagctacttcataacttcagtctcagtacattattccacaatatttagcttacgtggagctaaaagagcagaaattataccatatacatagagtgacagtcactctccca

SEQ ID NO: 484630 - DNA, 164 bp, Homo sapiens
gcataacgcgtcgattaaagccataacaaatttgatttgatcacatatacacattcacgtcatggcccactgaatctggttgcgggactattaaccagaatgcgaaaaggccagaattaccgaaaatgaatgacatcatgggctaagcgttttcccatcagaaa

SEQ ID NO: 484631 - DNA, 815 bp, Homo sapiens
ataataatgactctaaggcttttattaagaaaacagcagaaagattaaatcttgaattaagtctggggggaaatggccactgcagatggagtttagagtagtaatgaaattctacctagaatgcaaaatgggtatatgaattacatagcatgttgtgggattttttttaatgtgcagaagatcaagctacttggaaggagtgcctataatttgcagtagcagagattaagattattattcttatttattaggagaaataagtttagagtctaaggggagagggtggacagagtggggggggggttgagaagattagggggaccgtgagtagagaacgtttataaacttctttctctttaataaagactgtcttacaccgggctgccatgaaaggcagcgggttctagagtttcaggtcacctaagttgcaacccagcaaaagcaatatgaatatggagatcttcctttacccctcaactttaatctgccaggttataccgtcagtgtgtagcagtactgtgatacctggcacaggccttcgatcttacgatggcctctgtacttgaccggacggaagactaaagagtacctaccctttacgaagtagaattcatagcctggatggtggtccctggtcacatgtccttgtcactaatggtcaagtgccaacggctctgggcgcatgcggtacctagggatagattccacaggcgaaaccgaacagtctaccaaaaccctcacaaccgcaacacagaccctccattggcaccacccggcgccaacacatgcgacggcccgacgccccacacacaacc

SEQ ID NO: 484632 - DNA, 408 bp, Homo sapiens
  misc_feature (273)..(273): n is a, c, g, or t
gcgccccagagcccaattctaatctcgtataggcggccagcgaaaaaacccgctaccctaaacccgcaccatagaaacgacatgggtgggattattcccgtaccggcagttgtgcgggtaatcccaaccacgcttgggccggcttaggggccgcccgggtggcttttgggttgggttcgccgcgtgtgtgtgcctgagcggtggcttgtgccgctattggtatcggcacgccacgtcttcatattcatctgtcacacgcttagggtcgactgngcgagagagcggtaatcgaaagtgagagagtatgatgggtccagtatagaacacatgtgaaacatgatacacccataaagctgtacggcgtgtggcgcgccagggtatgaggggtgaagggggggtaaagagggt

SEQ ID NO: 484633 - DNA, 951 bp, Homo sapiens
agccgagatgctggctggaaaagctggtagaggagtttgagatgaaggaggacgagccgtggtacgaacacctaggacctccagcaagatcttcaacttgctgctgagcttggagaagacattactggatcggaacacagagttggatggactctgtgcagcgagatgtatacaaccaattcaggagcagtctacatggaatatcgaggtatctgacgaagcaagttggaacgttctactggctaggtatgacacgaacaagacagtgcaaatggtttatgacacgaagttacgacgatcagcaggcacagggaactggcaagagaacaaatgtcaacaagctagtttgcgtgacgagcaaggtgcctcaacacgtcgaaacagtattcgtgcagcctggaactgagcaacgagttggaatagccatgccaaaacgcaagcgagttagatcgagcactccaaagaggcctaaaggtgcgatggcaagcattggaaagtcaatctttggccgaatggtgcacgaaaggaagcccgagggaaatgtggtcgacactaagtggaggaagatcctgagctagcctcgagggtcatatgttgcagatgtcagtggacacggaaagaccgattaagggggattggaaacactttagggaaaacgtcagaccccgaattgtccaaaccaggggggacatacaccccgagaagcatacaagaccaaaatagaagaacgagagattcagagtgttcacactgaaggggaagaataatagtggcagatattttgaaaacaattttagtggagaaaaaaagctattttcgcacagaagaagagtattatacgaggggcagatatataggaggaaattttagggatcagacgaaggtaagagaggaacagagagtgatattaagggtggagaaacatagagtgatgagtagaaaaaaagtaag

SEQ ID NO: 484634 - DNA, 287 bp, Homo sapiens
gcatcaacggcgtccatctcagatcttccccgaaccccaacacgcccagccaacagtgggactaccagcatgcaccacacacctggctaattttaaagtttttggtagagatgaggatttgtcgtgttggccaggctggtctcaaactcctgaactcaagtgatccgcctgccttggcctcccaaagtgctgtgactacaggtgtgagccaccgcacccggccccaacaaattcttaacatctacatttattttcttcttttccttttttgtagacaaagggaaaca

SEQ ID NO: 484635 - DNA, 625 bp, Homo sapiens
  misc_feature (409)..(409): n is a, c, g, or t
accttatcctatagatcagtgatctttgatgttatatagaaccaggtgtgccacaaagcatacccatataggatggcacacttaatcaattaatgttgaatgtgttctgactaatccaacaaccagccgtttccctgtctctctccctctcctagggcttccctattccaagacacagtaatactgcaatgaggccaattaataaacctacagtgcacaataagtgttcaagtaaaaggaaaagatgcatgtctctcactttaaatcaaaagctagaaatgattaagcttagtgaagaaggcacaggaaaagccaagataggttgaaagctaagtctctcatactgagcagccaaggtacgaatgcaaaggaaaagttcttgaaggatattaaaaatgccattccaggnaaccacaaatgaaaagaaaggtaaacacccttattgctgatatagaagttttggtggtctgggtagatcaaactagccacaacattcccatgggtgaaagcccaatccagagcaaggccctaattctctccatttctataaaagctgagaaaggtgaggaaactgcaaaagaaaagtcggaagttacaagaggttcgttcatgagattgcggaaga

SEQ ID NO: 484636 - DNA, 499 bp, Homo sapiens
tgtacaaggaaggatggagctgagttcgtcgaagtggcgttgtgtgctgaagattggggaacacacccgctcagccctcgccatcatggaaaatgccaatgttctggcccgttatgccagtatctgccagcagaatggcattgtgcccatcgtggagcctgagatcctccctgatggggaccatgacttgaagcgctgccagtatgtgaccgagaaggtgctggctgctgtctacaaggctctgagtgaccaccacatctacctggaaggcaccttgctgaagcccaacatggtcaccccaggccatgcttgcactcagaagttttctcatgaggagattgccatggcgaccgtcacagcgctgcgccgcacagtgccccccgctgtcactgggatcaccttcctgtctggaggccagagtgaggaggaggcgtccatcaacctcaatgccattaacaagtgccccctgctgaagccctgggccctgaccttctcctgc

SEQ ID NO: 484637 - DNA, 359 bp, Homo sapiens
atgtctaagtaaaaacatgaattagattcaccatacattgaaaacatccaggtactacaggcagaattagttatacaatagtctaagtcctagaaatatcactccctatcccagccctagcaaattctaactttacatttgacatacggcattaacatcaattaaagcctcagtttaataatcagaatttaacatgaagtctcctgaagcacctctcttctgttgtttaaaaaaacacgtctcagactctgggaaaacattcagcacccacttctagctattactgaaataaatgattagaaagttacgttggtgagccgaagtaaaacctaaagctatcccctgaatctttctagcaa

SEQ ID NO: 484638 - DNA, 422 bp, Homo sapiens
ctggcttgaacaagtacatttagtgtgagctgcacacatctgggctctaaatgaattacaggtacagatgtatgctgaggtggagtatgcgtgatagagactgtgagtcacttaattccaactcagtgataaaccactgacattagggttgaatacggagaagttcccttgaatggtagcttcattggttattttaaccttacaggggagttcgtttggacttaagtgagtagcttgtcccctttttgctgacagaaagaagagcaggagaagagagaaacgaagatgaaataaataagttgtgttccacactgtaagggaaatgcagtgctctatttagcctaggcgggacaatacttgaattgaacattgaaactaaggggggactccctaatctttgggtggcttgcctttaaaaaaaa

SEQ ID NO: 484639 - DNA, 343 bp, Homo sapiens
ctcacactgagctccttgctgcacctctgatctctactatggtggatagatctagactaatcctcaggtgacaacgccaatgacgtggttattgactgtgcccaccctgatgggctctctagacctgaggtgttattaccatttcattctgacgtcttatttgtcggacattaatagagcatgtaaatggaatcaccaggcttagcagtacccatttgattagcatgaatgataggcctctgcatctggaagatgtctgcacgctgcaccgtacctgtgagagttgagtgctgaatgatgtcatatgccagaagcccctccataacatctcattgccaatgct

SEQ ID NO: 484640 - DNA, 969 bp, Homo sapiens
gacaacggaaaaagcataaatcgatggattggtggacgtcatgtctcccagtgatgaggcacgacatgtgggaagcacacgtgtgagatacaccaagatatgtcatataggcgtctgagatgagatgaatcgcacgtgtcacttgcccagtgcttggtgcaggtcgtagaccagagaagacagagtttgactttgaacgccaggactgtgtgagaatccgagtcgaggacgcacatcatccaagcccgtctccacaaaaaataaaaaaaattagccaggcatggtggcgcacgccatgtaggtcagctactctgggggctgaggtggggagcgattgcttgagcctgggaggtcgaggctgcagtgagccatgattgcccatgtactccagcctgtggtgaccaagcaagaccctctcttggaagaaatagaccgtttggtacagactggggttgttgactactttggcccacgcaggtcttcaaacccctgggttgcacaaaatcgtcctgacctcaggactgcgcacggcttgggattacaggcatgacaatttgatccgtggccgccatatttttggcaagactagtatggtgagcttgtgaaattcaataaaattcacattgtcccaggttcatcaatagagggtattgttcatgaacccaggaacgccaagtggcttaagttgtaaccccggtatcggttcaaggaagcgaccttattatttaaaggatgtgtactgcggaaagtgaaatataacacgtgagctttgtcaaataagtgcacgccagtgggtgccaatggaatcccacatcggaagcagggtgggtcaccctggatcggttgacccggccaactgtgacacgtttgtaaaaaaataggcgggaccgtaccaggggccgcaatcaacaaagagagagaaaagaggaaggatcacaaaaaaagtcgctgacacggcgtatacaggct

SEQ ID NO: 484641 - DNA, 126 bp, Homo sapiens
cgaaagcagaaatgatgcggcgacagcaggaaggatacaagggaaccttccctgctagcggtatatctaccacatgtagcacgtgatgtaccagtaccagtcctgataaaactacaccatgaatag

SEQ ID NO: 484642 - DNA, 243 bp, Homo sapiens
  misc_feature (171)..(171): n is a, c, g, or t
ccgaacatgacattgaggcagggtcttactgtgtcaccaggcaggcggagtgcagtggcataatcacggctcactgcagcctggacctcctggggctcaggtgattctcttacctcagcctcccaagtagctgggactacaggcatgtgccaccacacccggctaattttngtattttttgtagagacgaggtctcgccatgttggccaggctggtctggcactcctgacctcaggtgatcca

SEQ ID NO: 484643 - DNA, 603 bp, Homo sapiens
  misc_feature (164)..(165): n is a, c, g, or t
  misc_feature (190)..(190): n is a, c, g, or t
gaaaatttgaatttgtattgaattaagaagagagggacatgtgttattgaaggaggccaaacacagtgtaaatatcccagctcctcccccgtgcccccatcccaaatgatcttgagatttcttttaaagaagtaaatttgtccaagggctgtaaactataaacnnctgtaattaagtgcaatttcccctnggtgtcctctcccctctgcccggtatataaaaataaagggtctattagttttttttgtaaaggtcagagtcaaaatttcaaaagtgattggtcccctctcccctcatggagaaacatcctaagtgggaagtgaagccccttgtcctttcccgggggcttggacacttatggggacagcatcccttggattgactaccagctaactccagtttcctgacattaagacacacctttggatccctggggggggttgaatgtagtgggtcagagtaacatgccagcttcctgggggccaggagttcacccgggcactccctaagaaaccccagggcagggaaacgggttgtttgatagcaaaagaaaaagttgcagtttcagaaagccttccattaaaacaatttattttatcccta

SEQ ID NO: 484644 - DNA, 323 bp, Homo sapiens
cgttcccctgcccgccttctccgccaccgccgccgccgccttccgcagccgtttccaccgaggaaaaggaatcgtatcgtatgtccgctatccagaactcactctttcgaccctttgctgatgcagtaagggtgacgacctgcttctgctggcactgaggattatatcatataagatcacagagaacgcagagacctactactgtcaggatcgtgatgattacataaaagaactagtgaaggcttagaaagttgctgcatgtactgtatgagcatcgatatgagagtaattcagctacagggtacaacgagacatatccattc

SEQ ID NO: 484645 - DNA, 152 bp, Homo sapiens
ctactgcattggtaagtatcagaatagaggttatcacgcaaagcccccgtcgtcacaaatccaaagtacttccgataagtatcgtagaatcgcatatcccgtgcactgcgaatacgttggaaggcgaccaaatctggatcgttctcttcacg

SEQ ID NO: 484646 - DNA, 637 bp, Homo sapiens
ttgcggagccatggagggcggcttcggctccgatttcgggggctccggcagcgggaagctggacccaggtctcataatggagcaggtgaaagtgcagatcgcgtggcaacgcgcaggagctgctgcagaggatgactggacaagtgtttccgtgaagtgtatagggaaacctgggggctccctggacaactccgagcagaagtgcatcgccatgtgcatggaccgctacatggacgcctggaacaaccgtgtctcgcgccctaacaactcgcggctgcagcgggaacgagccaacatgtgaccggcgagcgcgggccacccaccctgttcatttccataaacgtgctttgagaggcggggtccgcatgtacgtacgtgcctggccccggggggcttaaggacgggggtgggccacccgggggtgccttgggaaccagcaccgggactggtgtcctcgccaagcgcccggcctgtcccccgtgcagccagtgcagctgtggatctcgggggtggggggcccttgtgccttcctgaagttgctggcaagccaggtggcagctccttcaggcctttgggggtattcccctagtgtgcccaagtcagcctcatattctgggcggacagtgtgtctggactt

SEQ ID NO: 484647 - DNA, 275 bp, Homo sapiens
tgcttatcacacatgcagtcaatgaacccctcacaaatgcaaggttcacatgcagttttcgatgaacacatcgttcgcatccagcagtatgtttgtattggaaaagtccttccatagcccccagtaatgaaaaggaatgtggcggggagcagtactggccagtaaaactaaaaaccccaggaagatcccagtgagatcagcagagccctagaatggcaaatccatgacaaaaaaaatttttgatgaataaaaacgggcctgggtccaggccagca

SEQ ID NO: 484648 - DNA, 928 bp, Homo sapiens
  misc_feature (29)..(29): n is a, c, g, or t
  misc_feature (85)..(85): n is a, c, g, or t
  misc_feature (92)..(92): n is a, c, g, or t
  misc_feature (114)..(114): n is a, c, g, or t
  misc_feature (127)..(127): n is a, c, g, or t
  misc_feature (131)..(131): n is a, c, g, or t
  misc_feature (135)..(135): n is a, c, g, or t
  misc_feature (156)..(156): n is a, c, g, or t
  misc_feature (175)..(175): n is a, c, g, or t
  misc_feature (200)..(200): n is a, c, g, or t
  misc_feature (232)..(232): n is a, c, g, or t
  misc_feature (248)..(248): n is a, c, g, or t
  misc_feature (257)..(257): n is a, c, g, or t
  misc_feature (294)..(294): n is a, c, g, or t
  misc_feature (299)..(299): n is a, c, g, or t
  misc_feature (314)..(314): n is a, c, g, or t
  misc_feature (332)..(332): n is a, c, g, or t
  misc_feature (413)..(413): n is a, c, g, or t
  misc_feature (450)..(450): n is a, c, g, or t
  misc_feature (462)..(462): n is a, c, g, or t
  misc_feature (489)..(489): n is a, c, g, or t
  misc_feature (563)..(563): n is a, c, g, or t
  misc_feature (587)..(587): n is a, c, g, or t
  misc_feature (592)..(592): n is a, c, g, or t
  misc_feature (814)..(814): n is a, c, g, or t
  misc_feature (821)..(821): n is a, c, g, or t
  misc_feature (823)..(823): n is a, c, g, or t
  misc_feature (829)..(829): n is a, c, g, or t
  misc_feature (832)..(833): n is a, c, g, or t
  misc_feature (844)..(845): n is a, c, g, or t
  misc_feature (850)..(852): n is a, c, g, or t
  misc_feature (856)..(856): n is a, c, g, or t
  misc_feature (858)..(858): n is a, c, g, or t
  misc_feature (865)..(865): n is a, c, g, or t
  misc_feature (869)..(869): n is a, c, g, or t
  misc_feature (872)..(873): n is a, c, g, or t
  misc_feature (875)..(875): n is a, c, g, or t
  misc_feature (895)..(896): n is a, c, g, or t
  misc_feature (898)..(898): n is a, c, g, or t
  misc_feature (909)..(909): n is a, c, g, or t
tcaggagcttctggggtgcctgtaggagnaaggccacagggcatggatcagcccaactgcttctcaagtgaactgtatagccaantcttaancttctcacggggcaagcctaanacagacccccttnagangctnaggcatactttttccatcccnattccactcttcggttttnacacgtcccttgcaaagtctccgcnggtgctgtgaagagccttccatggtagagatntctcttaagagtgtgntttctcatngggctagtaagggagattgtatacctgttgtcaacantcttnaggcagctccccagntctctgaaccccaaagtntcatcattggaaagagcagtaactgcgagagatggtggaggccgctaagcatggaagaggctagaggaagtctatcaacangcagttgtgttcccagcaattcctcccatcctgcatngttcacaccaanagaaccttcagatcctaccagcaaccntagcaccttccacccagggactcccagaagccagtaaagagaccaggagccacctcaatcagcagtgtttgcangggaggtgtttctgcctgtccctncctgntgtccctggtggagcaggtactccgggcgggcaagcctctgatttgcacacctgaaaatcgcggaattgagtttcgatagattgatttttaaaacttttttggagtagggggtataggggaatcatttaatttaaatcattaagattcccctgctcaaacccagattcctgtgtacagatgctatttagagggaatcagaaaaatgccaagccttttctctntgaatgngntatttntannactgaacttgnncatannnatananagagacncatnttnntntactaactggataaaaaaanntnaaataaaatgnagtgagataattttaggta

SEQ ID NO: 484649 - DNA, 323 bp, Homo sapiens
aatagcattagaaataagtgattaaaggcctctgctcacaacatggcaagtacagtactttgaattttagcacattgcatagtagtttaagtatgtctaatttaaacgtataatatgtacatcctgagacatcatgtacagaagatttttggtgtaatttgtatatggatatcttttacatattgtttagggaatgaattgaaggtacatgctggatagtgacatgaggcagcacgtgcacaatcatgtgccggcttatctgagttttcggtataaatatgtagataatggattttttttttttagataatgttgtcaagacc

SEQ ID NO: 484650 - DNA, 442 bp, Homo sapiens
ggaattcatgatcaaaaccgcgccgtaggaagggcctcagtgaagatgtgagcatcagcaaattcgttcagatgatcctatgttactggaacttgccaaacaggatgttgtgctcgaatgacccacatgtgagtgcgtggactcctgtgagctcctgctccctacagtgggctgcaactccagtatttgaagctgagacctcatatgacgtggccttcgtgttgtcagagagtgtctggaagatgctggtgccatcttgaagcaacgtgcacctatagcctgctcaagcttcagagccctcagtgagagaggagcatttggcctcgtggcttccttctgtggcctttaccgggctccattcccaaggtaaagagaggtgcttgggctcacagaaagagaaggggatgaacccaaggccctatcttagaatcactggatttta

SEQ ID NO: 484651 - DNA, 227 bp, Homo sapiens
attaaggctgcgattgccgctgttatctttttcaggacattttggtaatatagtattactgatccgtttgctgtgggccctatgttatttacatgtgtcaagtgggtcgtgtgttcgcagcttgaattcaaagatttcctttgcattcagagtaagattcagacagcagtactgtatgccgtgctcatgagccaatttgtacgtattaaagcaatttcggtgtgcat

SEQ ID NO: 484652 - DNA, 432 bp, Homo sapiens
aagatcatgccactgcactccagcctgggtgacagagcaatcctctgtctcaaacaaacaaacaaaacaaatttgtgtgtacctcacaacaaagcttcaaaatacatgaaacaaaaattggcaaaaccaaagagagaaagaggcaaaaccacaatcatagttgaatataacacctctatcactaattgacagaacttgtgaagaaaaaaaacgtcagtaaggatataaaagattggaacaccactatcaaccaacttgatccttggcatttatgaagcactacacatcactacagaatttgaaaaacagcaaaatggcagatgttagtccctccttattagtaattactataagtacaacaggattaatttactaactaaaatgtagacactggcagaatggttaaaaaaaacaagcaaaaattccaatgat

SEQ ID NO: 484653 - DNA, 307 bp, Homo sapiens
ggggggagtttttttttctccccattcccccccccccccctttttttcggggggggggggcggggtcccccccgttttttttccccggcccccttttgttttgtggggaaggggggggtttttttccccccgcccgggggcccccccccggggggggggggtttttttgggggcccccctggtttttttttttggggggggggcgttttttttttttgtttttttttccgccgctttttttgggggcccccccgccccccatttttgcccccgttttttgggccccctttaagggttttttggggga

SEQ ID NO: 484654 - DNA, 288 bp, Homo sapiens
  misc_feature (166)..(166): n is a, c, g, or t
tcgtcagcatcaaaaaaaaaagccctcagaaaatttctcacaaattaagggcaactaatggccggatatctcaaaatcctttacaaaagggagatagttctagtcaaggagtttggggtatgtaacttttttttcttctttttcttttcatcggcctccatcttangtgcaatttcttcagcggtaagagctcccagtttcttaattctgggctttcttaaccttttcctggatgcgggacggaggggtcacggagctcggaaatccggtaaatctatgggtctataa

SEQ ID NO: 484655 - DNA, 215 bp, Homo sapiens
  misc_feature (6)..(6): n is a, c, g, or t
cctacnttcaccttgcttgcccttctgccttccccatgtgaggatacagtgttcctcccctccggaggatgcagcaacatagcaccatcttggaagcagatggcagccctcaccagacaactaaacctgccaacaccttgatcttggacttctcagcctccagaactaaataaaatttagcttatgagaaataaagttccattctttgtaaatta

SEQ ID NO: 484656 - DNA, 672 bp, Homo sapiens
  misc_feature (367)..(367): n is a, c, g, or t
  misc_feature (454)..(454): n is a, c, g, or t
  misc_feature (483)..(483): n is a, c, g, or t
  misc_feature (613)..(613): n is a, c, g, or t
  misc_feature (619)..(619): n is a, c, g, or t
  misc_feature (629)..(629): n is a, c, g, or t
  misc_feature (631)..(631): n is a, c, g, or t
  misc_feature (636)..(636): n is a, c, g, or t
gaaggcgctggcgggcagtgatggcggctggtgatggggacgtgaagctaggcaccctggggagtggcagcgagagcagcaacgacggcggcagcgagagtccaggcgacgcgggagcggcagcggaagggggaggctgggcggcggcggcgttggcgcttctgacggggggcggggaaatgctgctgaacgtggctgctggtggctctggtgctgctgggggcctaccggctgtgggtgcgctgggggcggcggggtctgggggccggggccggggcgggcgaggagagccccgccactctctgcctcgcatgaagaagcgggacttcagcttggagcagctgcgccagtacgacggctcccgaanccgcgcatcctgtcgcggtcaatgggaaagtcttcgacgtgaccaaaggcagcaagttctacggcccggcgggtccatatggaatanttgctggtagggatgcctccagaggactnggccacattttgcctagataaagatgcacttagagatgaatatgatgatctctcagatttgaatgcagtacaaatggagagtgttcgagaatgggaaatgcagtttaaagaaaaatatgattatgtaggnagactncttaaaccangngaagnaccatcagaatatatcagagtgagagagagagtacc

SEQ ID NO: 484657 - DNA, 1185 bp, Homo sapiens
gaaggcgctggcgggcagtgatggcggctggtgatggggacgtgaagctaggcaccctggggagtggcagcgagagcagcaacgacggcggcagcgagagtccaggcgacgcgggagcggcagcggaagggggaggctgggcggcggcggcgttggcgcttctgacggggggcggggaaatgctgctgaacgtggctgctggtggctctggtgctgctgggggcctacctgcctgcgcacctggtggccctggcctgacaggcctgtccaccgcgtgcctggggccgcctgagcttgatgcgcggaagtgtgctgggcaatgatgcctggctggtgtcttggacgatgcatgtgacttgtgtgtcagacaggggcccaagggaccggtgctgctgacaacgcgtagcttgtgctgcttgcaccaggcactgtgcgcaactccgggtgggccctttcgatgagagcaaagttttaaggaatgggagcctgggcccttgaacttggcatgggttgcaagggaacaagccaaatgggagacacaggggaacgccccttctccaaggaaagccacgacaaggtcgacaggtcggggggccgccctaaaggattcaaagcggaggcaggtgccccatggcccgttgggccttgtacccaaccagttccaccatggatgtgggggctccaatgagttcccgcccagttgaacttctccttacgagttccgttctttttatggtggttctctcggcaccatgacagacccccaccgtgcgcttcaaccccttctagttttcccaaaacctgtggacccacgaagcctgcctttagagacggccgggagccgcaaggaaacttggcccaaggtcccccgccccagttggtcgatggccccctttgaaatccctttaggttaaggccagcggaaacagatttttgccatgggcgtggggcccagcttccgatttgctccctccgaacagcaagggaatttgcccaaagagccagagggttttccagcctttctcagcttaaccccaaggggacgggacagcttaaggccagaagccaggtttcccgggccccgcttccttccacggtacgccttccttaattagagacgccagcaactctaaatcggccttcgcgtgttacacccacgaaaagaacgggttggcggtggagcca

SEQ ID NO: 484658 - DNA, 519 bp, Homo sapiens
ggaggataggggcgtgagttaatgacacaggaatgctcgtatggaaattgactacggcagtcatgggtagtgagagctgcagagtaggaagcagatttagttgatgaacaagtatattcaaggggggcaacttgtattttcaaatgcagtgtagagctagatgaaaagcaaatctttgacatctactctgcccttgaggcaaagtcaccttgaacaaagaatcttaagggtttattaagaactctttattttcttcataccctgttctctgcagtgctttctaacagctactgggtgcagattttcttcggcatcctttggcactcagcttatgacaggtaggtagtgcttaagaaaagtcatggaggactaaagcctaagtccttttcacttttcctccatctgaaggtaggtgagttcatcctcttcatagtaatgctgttttaccaagactttatagcagatggacccagaaagaatttctgctattgtgttcactacaacaggatagggacatca

SEQ ID NO: 484659 - DNA, 342 bp, Homo sapiens
tgagcgagatctcagtgctggataatcctggatcgctccgtggcttttctatatacacgacggtgcctggctcctttttcaaggcctggcggctcggagaggcccggacaggcggcatggggtgcggggaagtgcaggacaacaagaccgctcaccaagatggaggttgcgctgacaaacgaaaaatgtgactctaactctacggaatctggaggtaccgccgcctcgacgactgcgtggagaggaaccgcactcaggtaagttccgcgccaggatgcaggacacatttctcaaccaaaacctgactgcctaacgggggcaaaatagataagtaaacggact

SEQ ID NO: 484660 - DNA, 306 bp, Homo sapiens
  misc_feature (34)..(34): n is a, c, g, or t
  misc_feature (132)..(132): n is a, c, g, or t
  misc_feature (136)..(136): n is a, c, g, or t
  misc_feature (186)..(186): n is a, c, g, or t
  misc_feature (230)..(230): n is a, c, g, or t
  misc_feature (238)..(238): n is a, c, g, or t
cgttcgggcaaagcgggcgtagacctgggctatnctcagttaggggttgcgggatccccgacgtgtgggcgggactgggacaccctttggcctctgtttgtccctttccagtcctccaccccacccctgganccanctgggagcgcaaaaccaagaagcggcagaacgcacctccggctcgcgacngcgaccgttgtgcacacagggacgccgcgctatctgcacggganagggacangctagatttcgtgtacaaactgtgtaccctctatatatatgttcatagaatgtatatatgttgggaac

SEQ ID NO: 484661 - DNA, 123 bp, Homo sapiens
gaggtcggatgtagaaaggttcttagagacaaagtcaggtattctgagtgggctagtggtctatactctgtggacatgtattttgtggtgtcttctgcctctagctaataataagtatcacag

SEQ ID NO: 484662 - DNA, 274 bp, Homo sapiens
tcttgcctactccccctgaaaaatctaaaatcatcgaaagatcattcaaggcaaggatgtgcactgactgatcaagcatggacagagcccatttcccatcagcgtcctcggaaagtgaggagtgtctcagcagttaatctgaggacccaaggacagtgcctgactgaatggcaggcgctcatagggtcatgtaaggatcaagaagtagactcaagctttacccaaaactattctttcccataattaccccaaaaagtgtcaaccaaggcctttt

SEQ ID NO: 484663 - DNA, 958 bp, Homo sapiens
ggatcaatggtctgctcaaggaagagaatgtcagagtgcgcggggcaagaggaatacttgctcgtggcgcagtcactatgtaatggaggtactgtaaccctcccgacaatattggaatgttctgagtcttcgaatagggcttataggacacaggtaggtcctgatcagacggatttcgaggtcaatctgcactgggatgaacagagaatgctggtctccaatgtgcggctgagtgagtgtggaggcggagtgtggatgctatggagaataggaacgatatgtgggtgacgtagtgatatcagtgtagttctagagaagcatatttggctgaagatgacagttttcaggcgagtggtctgcggagttcgtataatgacatgaggaaggaggtgctcctagtttgacatgatgggaaagggtggatcgtgtttacctagggtattatcttgattcgtactggaagtgtgaggtctggaaacctttggtagtgatatgaactggaaatggcgaagccaaagtggcattcatgaaaataatgtcatgtctataaaatcatgggtgaggggtcgacgaaggtcaattttggcagcccctgaatattggggtgaattgccgatgtgttggctcagtatggagaatgggtaaggatctgattatgggaagtgcgtgtcagtcaagagtcctgtaggaatttgtagttgtttcgcagtgtgagtaataagtgtagttcaaaagtaaaggatggtgtccagaatctaaaagttggttgaaagttgttggtgttaagccagaatatgtgaagggcattttgactgtgatcggaaaggggttcgaatggatggaaatttacaaaagagtggccaaacttctttggagaatatagagagaggacatcagaactggaggggattgaaatgacgcaaatttggcgggaaacatataaagggggagtgtataa

SEQ ID NO: 484664 - DNA, 727 bp, Homo sapiens
tgcggtggctcacgcctgtaatcccagcacttatgggaggccgaggcaggcagatcatgaggtcaagagatcgagaccatcctggccaacatgatgaaaccctgtctctactaaaaatacaaacaattagctgggcatggtggcatgcgcctatagtcccagctactcgggaggctgaggcaggagaatcacttgaatccgggaggcggaggttgcagtgagccaaaattgcaccattgcactccagcctggacaacagagagagattctgtctcaaaaagaaaaaagatatatatttccatggttacttcccagtactcagtttctggaagggtactagccccattcttcagggctcttacctcccaaagactccacctcatgtcataaacttggggcacttacgcatttcaacataggacatggcttaggggaccacaaaccttcaggcgacagcagaggctgctacatatggaaacacgcgatatctggctctgggagggtagccaaagatgccccgaggctgtggtttacaacccgtaccctctaagctgggaacgtcagaatcgagacctgcaaaaatacactgaccctacaagggaagtccagtcaatccataccagacagaaaataatactgacatggcccaaccctgcgccaaagcccaggctggggaaaaacctgataaagaacaccacaccgggccagactcaaatgcaccacgcac

SEQ ID NO: 484665 - DNA, 787 bp, Homo sapiens
  misc_feature (9)..(9): n is a, c, g, or t
  misc_feature (177)..(179): n is a, c, g, or t
  misc_feature (189)..(189): n is a, c, g, or t
  misc_feature (197)..(197): n is a, c, g, or t
  misc_feature (212)..(212): n is a, c, g, or t
  misc_feature (255)..(255): n is a, c, g, or t
  misc_feature (259)..(265): n is a, c, g, or t
  misc_feature (292)..(292): n is a, c, g, or t
  misc_feature (299)..(299): n is a, c, g, or t
  misc_feature (305)..(305): n is a, c, g, or t
  misc_feature (319)..(319): n is a, c, g, or t
  misc_feature (330)..(330): n is a, c, g, or t
  misc_feature (359)..(359): n is a, c, g, or t
  misc_feature (372)..(372): n is a, c, g, or t
  misc_feature (393)..(393): n is a, c, g, or t
  misc_feature (424)..(424): n is a, c, g, or t
  misc_feature (471)..(471): n is a, c, g, or t
  misc_feature (501)..(501): n is a, c, g, or t
  misc_feature (510)..(510): n is a, c, g, or t
  misc_feature (515)..(515): n is a, c, g, or t
  misc_feature (520)..(520): n is a, c, g, or t
  misc_feature (539)..(539): n is a, c, g, or t
  misc_feature (541)..(541): n is a, c, g, or t
  misc_feature (554)..(554): n is a, c, g, or t
  misc_feature (588)..(588): n is a, c, g, or t
  misc_feature (607)..(607): n is a, c, g, or t
  misc_feature (618)..(618): n is a, c, g, or t
gaggggtcnttacatgaatatgcttcatttaagtacatgctttcgggctgatttaaaaagaaaagttgaattatggtttccagagctttaggagtccatcttcactgtaggtagcaatcaggttctgatgagggtgatgtgcaataccaatcacatccttctcgtgcactgtcaaannnctctccagtntgccagcnactgtactgaaacantagagcacaaagtcctcccctacacagtagatccattcaccangggnnnnnnnggggcagcaaacaaagtccccaccttntcttttnccaganctggggcgttctgncaatctttacngtgccatcagggggtgcactaataatgtnatgtccatcttgngtaaatgttgcttcgttaacnggggggggttggccacgaaattccttcaggnttttcccagattttaaaccatgaattctaattgtctggtcaaaagangccctaaggatctgactgctatccttaganaagcttagncaggnggganccttactgtgtgccctctnanatctccttaaacnttgtccactctggatcttccacaccttggttttncgcatcttgggccccagtngctaacatttntgtatctctgctgaaacacatgcagaggacagcatcatccatcatcataaagttatcttgggcctggtacttaagatcctttctgatttttccagtagtaaagttccatacttcaatgaatccatcaacagacccagtgaccaaatactgggcatctggggaaaatcgg

SEQ ID NO: 484666 - DNA, 406 bp, Homo sapiens
  misc_feature (50)..(50): n is a, c, g, or t
  misc_feature (263)..(263): n is a, c, g, or t
  misc_feature (267)..(267): n is a, c, g, or t
  misc_feature (270)..(270): n is a, c, g, or t
  misc_feature (277)..(277): n is a, c, g, or t
  misc_feature (282)..(282): n is a, c, g, or t
  misc_feature (399)..(399): n is a, c, g, or t
caggcccatcatctcaaggtaacggcacattcttattaccacatgcattngtccatttctgcactgctataaagaatacatggaactgggtaatttataaagaaaagaggtttaattggctgacagttctgcaggctgtacgggaagcataacagcttctgcttctggggagacctcaggaaacttacaatcgtggcggaaagaaaaggggaggtaggcacatcttacatggctgaggcgggagaatctcttgaacccggaangcangangttgcangtganctgagatcgcaccactgcactccagcctgggcaacagagcgagactctgtcacacaaacacacacacacacacaaagaaataccatatcaggcagaaaagatgcctgaggatgtctnaaggacc

SEQ ID NO: 484667 - DNA, 371 bp, Homo sapiens
gacatgtgtccagatcagggctgattggagcgtggaggagcagctggccagcttcgctgcgagatggagcagcagaaccaggaatacaaaatcctgctggatgtgaagacgcggctggagcaggagattgccagctactgctacctgctggagggagaggatgcccacctgactcagtacacgaaagaaccggtgaccaccctgtcgggtgcgtaccacttgtggacagaggtccagtgatggcaatggtcatctcctccgtgcgagcagtgtcacctagaccaccctggtgaggactcagctaccccgtgctgtccacccatggaggcagggaggcagccgcccacatctgccccacagtctcggggcct

SEQ ID NO: 484668 - DNA, 262 bp, Homo sapiens
ttaacagaggattatgatgcgactgtgcagctgctcttcgtagttagagatatgctaggcagaatactaatgatgatctatagcccgtgaccgcgatttatgagaatgactgcgccggtcaagcttcaggcggtttggatgagaactggctgttactaccagggctatgtggctgattgaagagtatgcaatgagcgattttaggtctagtttgtcgtaggcagatcgacgcttgttatatttatgcctccccgggatacag

SEQ ID NO: 484669 - DNA, 286 bp, Homo sapiens
tcttaattgcttcagtgttataataattgcgtcttaaagaaaagactgagatttttgatcagaaatacttgaagaagatggaattaggaagtatcttgaggacagagaccacagatgcagaattcatacactatccttcaacaaaaagaatgacaataaggatcagaaatctagacacacttcagagacatggagaagaagttttaaatagacaccaaatatgaatatacttgcatatatggtggatttttttaattattaaaaattctactgagctaaaaagaaa

SEQ ID NO: 484670 - DNA, 867 bp, Homo sapiens
  misc_feature (566)..(566): n is a, c, g, or t
  misc_feature (568)..(568): n is a, c, g, or t
  misc_feature (574)..(574): n is a, c, g, or t
  misc_feature (594)..(594): n is a, c, g, or t
  misc_feature (625)..(625): n is a, c, g, or t
gctccgtatttgcagttacggttcagattgggagtcccagaaattaaatcggtctcaggaaaaaagatcccagagaagcagagaaaatgatttaaaccagaatggtttggatttcctcttgatgttgtagctaaggggattttaaggccctgcatgaccctcgtttgactctaggcagagttccgggattatcctccagtgctgagacaggccgtctccctggcccgggcgcatccaggaccctctgattgaatttgcccaggtgtgcagttccgatgaagacatcctgtgtctcaagtttcaccccttgcaggagcatgtggtgaaagaggagctgctcaacgccttgtactgtgaatttatcaaccgagtcaatgaggtcggggtcgatgtcaaccgtgccattgcccacccttacagccaggccttgatccagtatgtttgtggcctgggacctcggaaagggacccacctcctgaagatcctgaagcagaacaacacccggctcgagagccggacccagctggtcaccatgtgccacatgggtcccaaagtcttcatgaatngngctggnttcctcaagatcgacacggnctccctgggggacagcactgactcatatatngaagtccttgatggttcccgtgtccaccctgtagacttatgagtgggctaggacagatggctgtggatgccctggagatacgagtgcaatcagtccgaggatggcaatcctgcaggagcccttggaagaaatcttggtgaaaccagagcgactgaaagactgggccttgatgcctgggagaagaagctggagaggcggtatggtgacaaacattcactcttgactcgggagaagggtgcgat

SEQ ID NO: 484671 - DNA, 765 bp, Homo sapiens
  misc_feature (464)..(464): n is a, c, g, or t
  misc_feature (466)..(466): n is a, c, g, or t
  misc_feature (472)..(472): n is a, c, g, or t
  misc_feature (492)..(492): n is a, c, g, or t
  misc_feature (523)..(523): n is a, c, g, or t
ctgtcatctattggggtagagctggttgacaacgagttggccattctctatatgaacagcaagaagtcagaggcagagttccgggattatcctccagtgctgagacaggccgtctccctggcccgggcgcatccaggaccctctgattgaatttgcccaggtgtgcagttccgatgaagacatcctgtgtctcaagtttcaccccttgcaggagcatgtggtgaaagaggagctgctcaacgccttgtactgtgaatttatcaaccgagtcaatgaggtcggggtcgatgtcaaccgtgccattgcccacccttacagccaggccttgatccagtatgtttgtggcctgggacctcggaaagggacccacctcctgaagatcctgaagcagaacaacacccggctcgagagccggacccagctggtcaccatgtgccacatgggtcccaaagtcttcatgaatngngctggnttcctcaagatcgacacggnctccctgggggacagcactgactcatatatngaagtccttgatggttcccgtgtccaccctgtagacttatgagtgggctaggacagatggctgtggatgccctggagatacgagtgcaatcagtccgaggatggcaatcctgcaggagcccttggaagaaatcttggtgaaaccagagcgactgaaagactgggccttgatgcctgggagaagaagctggagaggcggtatggtgacaaacattcactcttgactcgggagaagggtgcgat

SEQ ID NO: 484672 - DNA, 1610 bp, Homo sapiens
  misc_feature (120)..(120): n is a, c, g, or t
ggcgaccaatgtctttcctccccagagaaccacacatatgttagcccacccattggcccgccatttttggggggcgccacccatctgtattggacacacccaacgggtgttgttcgcacncagaaagacacacaccagaaggcgtcgtgtggtgtcaccaccgccgtcccttcccaggagatatttttctccccccgggggtaatatctcttgttgggcagcacgaccacaaacagagacggtgctgcggcagacacaaggacagtgctgccggcggttgttttttccacggggccgacaggagatgatccacaccaccggtggctcctctttttgtggcagacacaccacactgttgtggcgccccccccatcccccgctgcgagtttgtgggcagactcgttgggtctctgtgttagtaaggccccccccccacgcctctgtgttcgctcacaaaataggagagagtgttgtgcacacaagaagaggcggcgcgagtgggtgcgccacaaccacacagaggggggggttcgtagaaacacacaccaacacccgccggcggccccccccccgtagagtgagaaggcctgcccccccaccacgagtaccgtttgtatagtcggccgccccccgcggcggctaaaaacgtcaaccaacaaggaggaggggctgagctccagtcagatattgttagtagccccacaacggcaagccgctacaccagccgctcttctcgtgggggtggtcccaccacatctctccgcgcgcacccaactcttgttgtggtgcgcgtctgttgccgccacaccacaccgcggctgtgtcgggggggagaccacacaccacaccccacaagaggagtgttgtcggctgcgcctccccgccgcgctacgcgccgcgctgttttctctcgaccctcctctcgtagagaggagatcctctccacagcggggtggtgccgccgcgcgacgactctccacacacacaacaaagaaagaggtggtgccgccccaccgcgacgcgacacactctcgcgcgacgactctctctctgctgtggggatactactccacagaagagagagagcgcgcggcgcaccacaacaggctctcacccatcgagagagggcttctctctctctcgcgggcgccacacacacgtgttcacacacggacgctgagagagagagagttcctctctctctctccacacactctctctctctctctctcttctctccacacaggagagacctctctctgcgcgcccccacacacagagagaggagagacacacacactttctctctctgtgagagagagaacactctgataactcctcggcgccccccccaccgcttgtcgcgcgccgcgccggtgctatattcacccctctctcgcggacacctctctatatatataagagagagagagagaaagctctccgggtgctcctctctcctcgagaggagagaaagagaaagatatttctctaacacctctctccgtatgtttctcctttgtgcgccctgcccaaccccccgggttttctggcaaatcgggcgccaaaagagtccacacaggaacccccccaccaccggagatagttta

SEQ ID NO: 484673 - DNA, 763 bp, Homo sapiens
  misc_feature (9)..(9): n is a, c, g, or t
  misc_feature (167)..(167): n is a, c, g, or t
  misc_feature (175)..(175): n is a, c, g, or t
  misc_feature (182)..(182): n is a, c, g, or t
  misc_feature (221)..(221): n is a, c, g, or t
  misc_feature (223)..(231): n is a, c, g, or t
  misc_feature (244)..(244): n is a, c, g, or t
  misc_feature (280)..(281): n is a, c, g, or t
  misc_feature (289)..(289): n is a, c, g, or t
  misc_feature (328)..(328): n is a, c, g, or t
  misc_feature (334)..(334): n is a, c, g, or t
  misc_feature (352)..(352): n is a, c, g, or t
  misc_feature (370)..(370): n is a, c, g, or t
  misc_feature (405)..(405): n is a, c, g, or t
  misc_feature (413)..(413): n is a, c, g, or t
  misc_feature (544)..(544): n is a, c, g, or t
  misc_feature (586)..(586): n is a, c, g, or t
  misc_feature (637)..(637): n is a, c, g, or t
  misc_feature (664)..(664): n is a, c, g, or t
  misc_feature (692)..(692): n is a, c, g, or t
  misc_feature (753)..(753): n is a, c, g, or t
attgaagcngaaaaggtggttttacagttcctcttgcattaacctctaattcttactaccctggccaataaagcattttcacctcctagcgctttccttcctgtgtgcttgtggttggttcttttttctcaggctttttcattcatgatgctgagatagttctgttnacttagcntaacttnaggacattgatacagtggattgttcttgtactttctttncnnnnnnnnncccaccccaatcntcagtccccttcctaggaccatttgctactcctagnnttagaggnctcattgttatatatttggaaatggtccagttttgatanagtccnctggaagactcaattttncgtcaccctcatgatttnctgttaattccactacggctaatgttctaggaagntacccttntctctgggctcagttgggaacaccttccttagactatcctggactatcctgctatttctcagctatgctttcattggtcccactgaattctctagatccccagtagttctcacactctgtagggtcctgcntttaccattaattttacttatccatttgtttaggaatatttnttttcttttttcctttctaaactgggtaatttataatatcgagcaaatttntgtatgtttaaaggattaccatccctngcctgtattgttgttttactgtgagggnatggttgggactgaaaaagtgtttgtgtagctctgtatcttcaatttctaggattgcagtntctcactggg

SEQ ID NO: 484674 - DNA, 230 bp, Homo sapiens
tatgtgatagcgacgtgttgaatcttaccctctcagagtcaccaagatatggcatgctaggccacagacagcagattgaaaatcagcagcagatcttggttgccaagtgaacagtcgtttacatatttctaagagcatcagagagcgccgtcagcagacagtctatttctgagaaatgaacaagcttcacgaaattgagaagaacgatgttgaatgcccgaggagaacaa

SEQ ID NO: 484675 - DNA, 180 bp, Homo sapiens
  misc_feature (22)..(22): n is a, c, g, or t
  misc_feature (42)..(45): n is a, c, g, or t
  misc_feature (47)..(47): n is a, c, g, or t
  misc_feature (53)..(53): n is a, c, g, or t
  misc_feature (55)..(55): n is a, c, g, or t
  misc_feature (57)..(57): n is a, c, g, or t
  misc_feature (60)..(63): n is a, c, g, or t
  misc_feature (124)..(124): n is a, c, g, or t
aaaatgtgctatactgcatacnttttaaatgtaaagatattnnnntntttatntnangannnncacttaggaaatggctttgtgattcaatctgtaaactgtgtattccaagacatgtctgttntacatagatgcttagtccctcatgcaaatcaattactggtccaaaagattgctgaa

SEQ ID NO: 484676 - DNA, 157 bp, Homo sapiens
tattaaggcttgtacgtcctctgaagcattagtcttatggaagaattttggagaacaggagatttctcctggtggattaaactattttgagaacctttctggaatttgttcacatgctctgttgctccctctactctgcttacctggacctgcataa

SEQ ID NO: 484677 - DNA, 492 bp, Homo sapiens
actataggcaaatgagctgtatggccccagtacctatcaagttgatacagctaaaggaattataatatttgttatcacttgatttgttttccaagctagtgctagaatttgctggactgcagaggatcgcttagtggggtactgtgtctcatagacatgcgccatctccacgtgggaacaagggtgaaggtgagggaagcccctcaccttgggtcttttgctgtgcctcctatgtatgtctggtttgctggaagagtgattaatacatctttaatttattaaaaaacaatgtagacctttaaacttcagtcttattggtaataaaagggaacttaattcatacaggtacttgatacagttatacattttccacttacaaaaagaagacaattctgttaaatgaaacctgtatcgtaaaatgtatttttattttacccacgagaatgttgttatttttagcaaatagaactcaatgcagtgcattggttatta

SEQ ID NO: 484678 - DNA, 682 bp, Homo sapiens
  misc_feature (413)..(413): n is a, c, g, or t
  misc_feature (657)..(657): n is a, c, g, or t
gggggcgctttattttattaatccgagcgggggcgagattaccaacaatcacttcacactgaccccccccttaaaactctaccttgtgtaatacctggagatcaaatccgacactatcgacggagcgggactacaatgacctcgggacaacgtgacactatcctgattcgattcaataacaaggtcgagcgggtgtcagataaactacggggccctgtgcaatcacatgctataacagctaccatccttttggaaaataagctatttgggagactatggacatgagactacgcggagtactctacgaatagggactctctgtccattcgcttatccgaacatgcgcctgcgagagtgaaagacacaatatctatacacgtaagaaaaccttttaattggtacaatgtattacnacaattaccggagtagcccgtgtctgtactttaacgaaccaaagtttaagcttgaaaaatttaattgaaaaaccttcaggggggccttaaacacaaactgaggccaaggcgcacattaattgaaccaattcccccttttataagagacgagggtatacccacaaaaggagcggttaaaaacgcccctttgtccccagctttatggttccttgagaacgagatacgcgtttaaatcccccctttncaacaagaaaaaaaggcccgtctta

SEQ ID NO: 484679 - DNA, 288 bp, Homo sapiens
  misc_feature (39)..(39): n is a, c, g, or t
  misc_feature (73)..(73): n is a, c, g, or t
  misc_feature (79)..(79): n is a, c, g, or t
  misc_feature (86)..(86): n is a, c, g, or t
  misc_feature (113)..(113): n is a, c, g, or t
  misc_feature (135)..(135): n is a, c, g, or t
  misc_feature (226)..(226): n is a, c, g, or t
  misc_feature (254)..(254): n is a, c, g, or t
tcgccattctctgtgctggctgtgaataattgaagtcanttatacctttacgggatctcttttctctttattngtaaantcaggangttgttttaaaatagtttggatgattngataaataaatacttcagtgtnctctgctttttcccccccccgggatttcttggagaacacaaaacctagccatctcctttgttccaggggaaaaactgcatgtgcaaaaagncaaggtgtgtgtctgctcccagaaatangtggtatcataaaggaactgatatcctgtaggtg

SEQ ID NO: 484680 - DNA, 195 bp, Homo sapiens
cgtaaatacccgtggccgagtggacaaaagtctttgcccagcccaacctggctgagatgatacagaaaggtagagcagctattcctggagccagagctggtcatcccccaccgacagcaacgaatcttcacggcccccaaatacactgggagcttcctgtcaccctggacaacagcggtcactgatgcctccttc

SEQ ID NO: 484681 - DNA, 223 bp, Homo sapiens
cactgtgctggacattcaggttattagtgcgcgtacatggtcactctgtatattgtataatgcagcaggaggaccaaaatagaacatacacgccagtactcgagtgtgcaaaacaggggctagatgctgaagtacaaatgggcaaactgtgattcttcttgttttcacatcaatccttcgcacacacgcacttgtgatccataccaagcatacttggactact

SEQ ID NO: 484682 - DNA, 350 bp, Homo sapiens
attttaacggtgttggcttcagtaaaccagctatgacaatttatactaaacaaatggacctagaacccattggaataggttctagtcctattggtttagtataaatggtcatagctaggggatcctaattagaaatgtatataatttataatataggcgggtcttccaggatctctcaccatcccggagccctctaaaaacggtaatggaggggggggggatgtatagatatgaaggtgcgagagcagaaaaacggggggcgagaagtgtacctcaataaagctcaaaggggaccaaattggaggttgggggaaagtgggacgggaacgtgtctggtgcgggtaccgagc

SEQ ID NO: 484683 - DNA, 337 bp, Homo sapiens
agctccctatgttggccagcttagtcctgaactactcctggcctcaagcaatcctcctgccttggcctcccaaagtgttggggttacagatgtgaacactgcacctggccctacctttaatttagtccagtttgtcagttttttttattgtgtttaagaaatcttttcctacctcagactcctgagtagctgggactacaggcgtgcaccaccacgcctggctaagttttgtatttttttatagcgacgaggttttgccatgttgccaaggctggtctcaaattactgggctcaagcaatctgccggcctcagcctctcaaattgctggcctcttct

SEQ ID NO: 484684 - DNA, 384 bp, Homo sapiens
cggtggtgggtcatcaaaacagtggacaaaaagggtggtggagctggcgaggtcccccaatttgccccaaaaggtcaggagggtaaatgattattatccctaatacccgcccccccccttttaaacaggggggagagacgggtttcaaacatgtttgtttccattggccctttaagttttggagtaaaagggggggttatggaaacaaagcctcggaacaccctcaaaaggaaaggggaatgttttgggggcccccttggtttttttttttggggggggcgggtttaagtttttagtttttaaaaacaggactttttaaggggaaccacttggcccaaaatttggcccaggattttggggcccctttaaaaaggttaatgggga

SEQ ID NO: 484685 - DNA, 139 bp, Homo sapiens
ccgctgacgcgcagtccgcaacaagctgcagtactccacgccgggccaggcggtgacggaccgcagtatgctgcaggcgttcacagcttcggtagcaaagacgccggtttcgactacctcggcaagctgcaaagcaaca

SEQ ID NO: 484686 - DNA, 110 bp, Homo sapiens
ctctagtaggatccccccgtattttgcgtgcttatctcgacgatcggcggcatttccctggtagggatcaatggatttgtcgtcggaccgatgattgcagcaatgttcat

SEQ ID NO: 484687 - DNA, 324 bp, Homo sapiens
  misc_feature (189)..(189): n is a, c, g, or t
  misc_feature (232)..(232): n is a, c, g, or t
  misc_feature (234)..(234): n is a, c, g, or t
cttttatcaccagaatggatagtaacccagacatctatctaaacgtgtacctgtgtgtttctccaggcttaactttgccccgagaaaacggatctgtgaatttggtgcgccctcgcttactcgacagcggttaatttgaacgggaaggtttctttccgcgccccccaagccaaacccacacccaaccgnaaaaagaaagtttaaaacccccccccccagccagaaaagaacntnacggttggaggcttttgtgatttttgtcctcctctgccccggggaaattttcttggagtaaaatactgaattatttgattacttccaaaa

SEQ ID NO: 484688 - DNA, 810 bp, Homo sapiens
ggaaaggtttggatttctccaaatctgggagaattttcaaaataagaaaataacctttatatgatatactatgactaggctgtgtatttcttttcagggatttttctaccttcagggttggatgtagtttagttactattaccatagccaacctgtagttttacatatacattttcttgtggagcaatagagttctccattttacagaagcattttaaatgtagtttgaatattttccacaagatgctgcaatgtgagttatcacttcatttatcttaaagaaagactaaactggttgtcagttacatctgacagaaaaaaaaaaaaaaatcacgggtgttaaccgggttaagtggtaaaataatccagggcgtcagtcaaaggcattttggctgactttaaatatggattattatttttaaccgggaattttaggaaaattatttacgggaattaaaaattttttcttttttaaacatggaattttccttggcctcggtctagcttaaactattactcaagctggcttaagtccttaagtatggtgtggtattcaccattaaataaggtggcttgggaatccatcagccattattagctttttttaacaggaagattacgttcttacaacggttacctataatctctggaacttcggggatcttacttaaggagttttcaccgcttgtaaaacctaacctttttaaaggcccatgggctaatgtcttaaagagggctttaccgtaaaccttttttcctacttcttcttaaactttttccaaactttctggggaaaaaaatagaaaaagg

SEQ ID NO: 484689 - DNA, 905 bp, Homo sapiens
  misc_feature (85)..(85): n is a, c, g, or t
  misc_feature (348)..(349): n is a, c, g, or t
  misc_feature (351)..(351): n is a, c, g, or t
  misc_feature (356)..(356): n is a, c, g, or t
  misc_feature (886)..(886): n is a, c, g, or t
cttctgcgtggaacatgccaaccctcgtctgctttgactttgcaaaactgcatgagaccgccgggcgcggtggctcacgcctgtnatcccagcacttcaagaggccgaggcagacagatcacctgaggtcaggagcttgaggccagcctggccagcatggtgaaaccccgtctctactaaaaatacaaaaaatcagccagtaatcctagctactcgggaggctgaggcaggagaatcgcttgaacccaggaagcagaggttgcagtgagccgaggtcatgccattgcactccagcctgggctacaagagtgaaactccgtctcaaaaaagaaaaaaaaaaagaaaaanncncttcnttttactccccagtgaagccctccctgattggcctctgcagaaggcagcatgcccgggctttggagtcagacctgcatacaaatccttgttttgccggtgtgaccttgccaagtcttctttcctgcaggacagaaggcggcacagctctccctgaactggcactctggcttctcttgccccagggtctgtttctgctccttggacagcaggcgcatgtgggaactgtgccctcttcagccatgagcccctgttctgcgcacatctagcccatcttccagatggacagacagtctgtggtcgtcgccaaacccctgaatctggccctgcccgcagtcagagggatggcaatttgtaagctacagactattgcgaatcattcacttggagactgaactaagactactggcaccaggctccgtagaccctcgggaagagcatggtctggcaggcagactggatgtggccacagataacatcccctaaggggagagcgtgacctgcaggccagaatgccacactttctcctgtntcgttcagagagagcctgt

SEQ ID NO: 484690 - DNA, 226 bp, Homo sapiens
attgtgcagtagtctctatagtaaatccaacctttctctaatatttaaagttaccaactttatcatatgataaaatatttcatatatgcttgggcttatttctgcatttttaaattctctttaatgtttctgtctgcatacttttttggtagaaccacgatgacaaattattgtcactttaaaatacatgttaataactaatagagaaagctctccaccatggcgg

SEQ ID NO: 484691 - DNA, 307 bp, Homo sapiens
gaagaggagcagtcacatctacatggatggcagcaggcaaagagagagaacttgtgcaggaaaactcctctttttataaaccatcagatctcatgacacttattcactatcaagagaacagcatgggaaagacttgtcccccatgattgaattacctccccccatgtccatcccacaacatgtgggaattcaaggtgagtttagagtggggacacagccaaaccatatcagttagcatacatctccttaaccaaaaatgtaagagcagacagtcacaatggctcatgcctgcaatccaatgctttgg

SEQ ID NO: 484692 - DNA, 335 bp, Homo sapiens
  misc_feature (38)..(38): n is a, c, g, or t
  misc_feature (289)..(289): n is a, c, g, or t
  misc_feature (291)..(291): n is a, c, g, or t
  misc_feature (294)..(294): n is a, c, g, or t
  misc_feature (302)..(302): n is a, c, g, or t
  misc_feature (308)..(308): n is a, c, g, or t
  misc_feature (316)..(316): n is a, c, g, or t
gtgatacaagagacacagtggagaccgtccaatgagtngcatggctgccaggatgccaactgggacactaaagccctggcagtgggggctgcccagcagggctggccactagaaataagagatgcaaattcatcttctatcatagccaaagaagaccaacaaagaccaacagaggccatgtctcgcattcagctccaacagcaggcagtagatttgttacagagactaaaacccaccttattgccaagtgaccctcctctcaccagcctcccctgctgccacccaaatncntgncactgaantactcntcaaaatnaaacacagctgtaaaatgc

SEQ ID NO: 484693 - DNA, 175 bp, Homo sapiens
  misc_feature (14)..(14): n is a, c, g, or t
  misc_feature (46)..(46): n is a, c, g, or t
  misc_feature (49)..(49): n is a, c, g, or t
  misc_feature (118)..(118): n is a, c, g, or t
  misc_feature (173)..(173): n is a, c, g, or t
ctcttggtgcctgntggatccggttcccatggcccagtctgaatgntgnacatgcatatttaacttcccacagcaacattgcgatttgaggctcagcaacagcaaatcctgttccggnattggctgcaagagcctccatgtagccggctcaggccaaggcaggcgccgtgagncc

SEQ ID NO: 484694 - DNA, 496 bp, Homo sapiens
atctctgaatttggggatttcatcagttactcctggaatcaaaatgagtgtggagtcataatatatattttttttgagacaaagtctcactctgtcgcccaggctggagtgcagtggaggttgcagtgagccaagattgtaccaccacactccaggttgggtgacagaatgggattctgtttcccccaccaaaaaaataaatgaaaagaaaatcaaggccaggcgcggtggctcacctgtaatcccagcactttgggaggccgagtcgggcagatcacgaggtcaggagatcaagaccatcctggctaacacggtgaaaccccgtctctactaaaaattacaaaaaattagctgggcgtggtggcaggcacctgtagtcccagctgctcgagagggtgaggcaggagactggcatgaacctgggagtcggaggttacagtgagccgagattgtgccactgcactccagcctgggcaacagagcgagactctgtctc

SEQ ID NO: 484695 - DNA, 141 bp, Homo sapiens
tcggtccagtgtgttattcaggtcactactacagtcagggttctttaacctatttgagtcacagaattgtttttctctacacagtatttttctcttacaggaagtatttgagcagaagctatgtacataatgttagagata

SEQ ID NO: 484696 - DNA, 2320 bp, Homo sapiens
gcggccgcccgaagctgataaatcaggggccgggtcgcggctgcgggctaagttggacgccccgacccgtgcgagggccaggtccgcgcctgccccgccaggcgaagcgaggcgacccgcgtgcggccatggcttcgctgctgggagcctacccttggcccgagggtctcgagtgcccggccctggacgccgagctgtcggatggacaatcgccgccggccgtcccccggcccccgggggacaagggctccgagagccgtatccggcggcccatgaacgccttcatggtttgggccaaggacgagaggaaacggctggcagtgcagaacccggacctgcacaacgccgagctcagcaagatgctgggaaagtcgtggaaggcgctgacgctgtcccagaagaggccgtacgtggacgaggcggagcggctgcgcctgcagcacatgcaggactaccccaactacaagtaccggccgcgcaggaagaagcaggccaagcggctgtgcaagcgcgtggacccgggcttccttctgagctccctctcccgggaccagaacgccctgccggagaagagaagcggcagccggggggcgctgggggagaaggaggacaggggtgagtactcccccggcactgccctgcccagcctccggggctgctaccacgaggggccggctggtggtggcggcggcggcaccccgagcagtgtggacacgtacccgtacgggctgcccacacctcctgaaatgtctcccctggacgtgctggagccggagcagaccttcttcttcctccccctgccaggaggagcatggccatccccgccggattccccaacctgccagggcacccgtactcaccggagtacgccccaagccctctccactgtagccaccccctgggctccctggcccttggccagtcccccggcgtctccatgatgtcccctgtacccggctgtcccccatctcctgcctattactccccggccacctaccacccactccactccaacctccaagcccacctgggccagctttccccgcctcctgagcaccctggcttcgacgccctggatcaactgagccaggtggaactcctgggggacatggatcgcaatgaattcgaccagtatttgaacactcctggccacccagactccgccacaggggccatggccctcagtgggcatgttccggtctcccaggtgacaccaacgggtcccacagagaccagcctcatctccgtcctggctgatgccacggccacgtactacaacagctacagtgtgtcatagagctggaggcgccccgtccggtcagccctcgcgccctctccttcctgtgccttgagtggcagaggagccgtccagccacaccagctttcctcccaccgctcagggcagggaggtctgaactgcggccccagagcctttggcctaagctggactctccttatccgagtgccgcctctatccccttccccacgttccagcccctgcagcccacattttaagtatattccttcaagtgagttttcctccagcccctgagagttgctgtctcccagtggaatgttcactgacgtcttttcttggtagccatcatcgaaactaatggggggacagacttgatagccaaggtcccttctggtccagttttctgatttagggttctctcaagattaataaaggaagatggggaaatttgactcattaatgagctcgctaacctacgatctggtgataattttgtgtgcacagcccaaggaccacgaggctttctgcactttctgcacccccttccaaagtgaccacaaaatttcaaagggactcatacaatttgagaaaaaacagtcaacctgatttgagaaattaaccagtatggctaactatatcacagaaaatgggattgagttaaaactattttattttaaatatacattttaaagcagttcttttttttgttaatttgtttattatacacacacttcaagagaatatgcacagtctaggccgggcacggtggctcacgcctgtaatcccagcactttgggaggccgaggcatgtggatcacctgaggtcaggagtttgagaccagcctagacaacatggtgaaaccttgtctctatgaaaaatacaaaatttgctgggagtggtggtgcatgcctgtaatcccagctacttggaaggctgaggcaggagaatgtcttgaacctaggaggtggaggttgcagtgagctgagattgcaccattgcactccagcctgtgcaacaagagtgaaactccatttcaaggaaacaaacaacaacacaacaag

SEQ ID NO: 484697 - DNA, 572 bp, Homo sapiens
gcggccgcccgaagctgataaatcaggggccgggtcgcggctgcgggctaagttggacgccccgacccgtgcgagggccaggtccgcgcctgccccgccaggcgaagcgaggcgacccgcgtgcggccatggcttcgctgctgggagcctacccttggcccgagggtctcgagtgcccggccctggacgccgagctgtcggatggacaatcgccgccggccgtcccccggcccccgggggacaagggctccgagagccgtatccggcggcccatgaacgccttcatggtttgggccaaggacgagaggaaacggctggcagtgcagaacccggacctgcacaacgccgagctcagcaagatgctgggtgagtgagcgcgcggccgagcgggctgggggccgggggcgggcggcgggcggctggcggcactgcagggcgggtgcgagcgcggagcctgtggaagacccggcacgcgggacgagggccctcttcgtgcccgcgtggctggccatctgcgcgagcgtgggtgctcgcggtgcccaggattcagagcgggggcacttggcgcggtc

SEQ ID NO: 484698 - DNA, 544 bp, Homo sapiens
  misc_feature (34)..(34): n is a, c, g, or t
ccagctatgcttgccagagctcagccctttcgancatcaccgacccgcccttactcacgtggcttccaggtgcaataaagtggccccaaggaaaatgttcacagactctgaatgaggagacgggggtcagggaaagggtggtggctttagactggagaacgcctgcttcaaagtccccctgggtgtcatggtggtcatggtgggcatggacagagggtacccctggtcccaaaatcaagaaatgacctgatcttgaatgaggctgaggcccaaggatgaatgctggattcaccagagaccatggcaaagaagcctgctcctaagaactacatgggatccctgttcctcataacctagacagccctggtcctcctcactgggtcctcatcctgatcacagggccctggtcctgaccagtgggcccgtttaccgatcactgagctctggtcctactacttggtccctgttcctgatcacttaattctagccttgatcactgagccttagtcctgatcactgagtcctactcctgtttttgggcctg

SEQ ID NO: 484699 - DNA, 507 bp, Homo sapiens
  misc_feature (373)..(373): n is a, c, g, or t
  misc_feature (385)..(385): n is a, c, g, or t
  misc_feature (389)..(389): n is a, c, g, or t
  misc_feature (391)..(392): n is a, c, g, or t
  misc_feature (395)..(395): n is a, c, g, or t
  misc_feature (399)..(399): n is a, c, g, or t
  misc_feature (401)..(402): n is a, c, g, or t
  misc_feature (405)..(405): n is a, c, g, or t
  misc_feature (411)..(411): n is a, c, g, or t
  misc_feature (417)..(417): n is a, c, g, or t
  misc_feature (431)..(431): n is a, c, g, or t
  misc_feature (435)..(435): n is a, c, g, or t
  misc_feature (441)..(441): n is a, c, g, or t
  misc_feature (451)..(451): n is a, c, g, or t
  misc_feature (462)..(462): n is a, c, g, or t
  misc_feature (465)..(465): n is a, c, g, or t
  misc_feature (468)..(468): n is a, c, g, or t
  misc_feature (474)..(474): n is a, c, g, or t
  misc_feature (493)..(493): n is a, c, g, or t
gcggccgcccgaagctgataaatcaggggccgggtcgcggctgcgggctaagttggacgccccgacccgtgcgagggccaggtccgcgcctgccccgccaggcgaagcgaggcgacccgcgtgcggccatggcttcgctgctgggagcctacccttggcccgagggtctcgagtgcccggccctggacgccgagctgtcggatggacaatcgccgccggccgtcccccggcccccgggggacaagggctccgagagccgtatccggcggcccatgaacgccttcatggtttgggccaaggacgagaggaaacggctggcagtgcagaacccggacctgcacaacgccgagctcagcaagatgctgggaaagtngtaggaaggggnagantnnttngggntnnatnttggtncaatanttcgatcttgttcnttgntgtggntgactaagcntgcttcgaagnggncgncgcatncggttggtgtgcatcctcntgcttggcctgttg

SEQ ID NO: 484700 - DNA, 363 bp, Homo sapiens
  misc_feature (7)..(7): n is a, c, g, or t
agcgccngtgataccctcttgcaaagtattgagcttcctcctctaaacagtgctaacaatgcacaggactttttacggatggttcaggtacacggttaactaaatttggctcataatgcacagcagaggctcaaagtggcgcttggtgcaagccggaagaagttgagtgagaacatcaaatacagaagatttaattcagacatctttcacagagcagatacgtactatcatcagatatttactggacactttggttaagctgcgttaagcgtttaatggacactctgttcctgcagatttgcagagcacatattatgcccaggcctgtgaagagatctttaaacacttgtgcattagggcccc

SEQ ID NO: 484701 - DNA, 117 bp, Homo sapiens
aaacgtgatcaaaaaaaaaaaggggatggtccaaagagttagagcacagcctggccaccccagccaacaaatgcaaatcgtgccctcgcaaagcactcatcgccagtacatcgccaa

SEQ ID NO: 484702 - DNA, 836 bp, Homo sapiens
acgctgtacgggccgagttttatatgtcgacccagcgctcggactagttctagatcgcgagcggcgcccttttcttttgggatctatttatagcatcatcgatttatggaacataaacattaatggtggggtgtcataatccataattgacatcattctttaggatgctataaattttcccaaattgggaagggattccccttacagggccctccagtgccttgtcgtcttcacattggagcacttccatgcttacgggcataacaaaatcaaccttctcttataggacccctagttcctttaagggggcagtgatatttagaaaccaagatgtggatgctaagtctgctctattctctcgggttctataaaactgttaaactgtggcatttttggtcctgagcctgtatgatattaacctcctttgggagggtgaggatatctttgtaaaaaaatgtgatgcataatgtccatattgggggaatacacttggatattctggaaccctgtgtatcagtgtgtaggtgatcaacatcagggaacactaggatatccataacgccacctcaaacatttatcttaccttatatgggggaacattccaattctcttctagccatttggaactggtgtaactacgtaattggtacaactatacgcctactggtacatatcgaacactagattcaatacctccgggcaagctgtattatatgtacccataaaccaagcctctttaacatccaatacccctataacacttcccagcttctagaaagccccaatcaattcctattccatgagatccatttttaagtcccaaatttgactccgat

SEQ ID NO: 484703 - DNA, 169 bp, Homo sapiens
gtatttattcgtagacgtgggagtttcaccaggttggccaggcgggtctcgagctcctcaggtaatccaccggcctcggcctcccaaagggcggggattataggaatgagccactgcaccccggccccttagcttctgtttatagctaataaacaaagagggtggtctt

SEQ ID NO: 484704 - DNA, 423 bp, Homo sapiens
gcatccattcatcaaccatccatccatccatccacccacctcacccacccattcatccatccatccatccaccatccatccatccacccacctcacccacccattcattcatctatccacccattcatccatccatgcattcatccacccactcaccatccatccatccatccatccatccatccatccatccatccatctatcatcccttcattctcagcaacctgtccaaagcatgccaaacctggacttgatactatcaagctaaactaggaacaaggcggcctccacccttccaggatagagagaggctctctgacccttcactgcttctgtgcctccttggtgtttctgcttttaaatgtaccagtggtgataataattccagttatatttactgagcacttactatatgcccgtctg

SEQ ID NO: 484705 - DNA, 156 bp, Homo sapiens
gaagcgcacgatggcgcgtcctgatgaagccattggagagactcgagtgtgtggaaggtgtggcccatatcatcgaccccaaggccatcagctaagaccacctctacggacacccttggaccccatacaccagggaatggacagatgggctcttca

SEQ ID NO: 484706 - DNA, 165 bp, Homo sapiens
atcgagctcggcacctattgctgggccacaaggggaactcctcctaatgaaatatttaagttgacttacacttcctttgtctcagcaggtcctcccagaagatcgtctccttttcatatcgaaaatcatctttaagtcaaagttctcagatcttgaagcttcaat

SEQ ID NO: 484707 - DNA, 856 bp, Homo sapiens
  misc_feature (29)..(29): n is a, c, g, or t
  misc_feature (61)..(61): n is a, c, g, or t
  misc_feature (72)..(72): n is a, c, g, or t
  misc_feature (108)..(108): n is a, c, g, or t
  misc_feature (128)..(128): n is a, c, g, or t
  misc_feature (136)..(136): n is a, c, g, or t
  misc_feature (145)..(145): n is a, c, g, or t
  misc_feature (152)..(152): n is a, c, g, or t
  misc_feature (157)..(157): n is a, c, g, or t
  misc_feature (215)..(215): n is a, c, g, or t
  misc_feature (225)..(225): n is a, c, g, or t
  misc_feature (256)..(256): n is a, c, g, or t
  misc_feature (262)..(262): n is a, c, g, or t
  misc_feature (264)..(264): n is a, c, g, or t
  misc_feature (280)..(280): n is a, c, g, or t
  misc_feature (298)..(298): n is a, c, g, or t
  misc_feature (379)..(379): n is a, c, g, or t
  misc_feature (393)..(393): n is a, c, g, or t
  misc_feature (443)..(443): n is a, c, g, or t
  misc_feature (446)..(446): n is a, c, g, or t
  misc_feature (456)..(456): n is a, c, g, or t
  misc_feature (515)..(515): n is a, c, g, or t
  misc_feature (592)..(592): n is a, c, g, or t
  misc_feature (594)..(594): n is a, c, g, or t
  misc_feature (635)..(635): n is a, c, g, or t
  misc_feature (641)..(641): n is a, c, g, or t
  misc_feature (661)..(661): n is a, c, g, or t
  misc_feature (709)..(709): n is a, c, g, or t
  misc_feature (712)..(712): n is a, c, g, or t
  misc_feature (736)..(736): n is a, c, g, or t
  misc_feature (745)..(745): n is a, c, g, or t
  misc_feature (752)..(752): n is a, c, g, or t
  misc_feature (769)..(769): n is a, c, g, or t
  misc_feature (814)..(814): n is a, c, g, or t
  misc_feature (825)..(825): n is a, c, g, or t
  misc_feature (842)..(842): n is a, c, g, or t
  misc_feature (851)..(851): n is a, c, g, or t
actatccatcaggtaggcctaaggcaggnaccatgcagcaggagcagggcctgtaaaccanttaatgctgcnccttcatgcaacatggggacagcacggggctgagcnccacaggcgaggggccaggnaggccttnaaagcaganacaaccnctaanaggaaggaaggtcaggctggctttagtgcagggaagggtaatgatgggaggggatgtncacgaagganagtgggtagctgaggcttcaaagggcctccntggganangggtttagggggagtnaagagggacaatgaagtnttgggagtaaagatgggaataaacaggagaaaggaacgaggaggcaggtgccgggatgcagagtccagcagcgctgcacancctgggcagcaggntgagtatgggctcctcactcccacctcctggccttcaaggcctacttgtngcnccagacagcnatctttgtgaacacaggtcttgggaggaagcggctggactccatgtaggcagagatctnctccaagccctcaaatcgggagaagaagttcttcaggtttgggaaggcatccaggcagcggggctcaaatacttggntnctctcaaggacatcataagcgatgaaatccacaaaggtgancttgtncccaagaaaccatggctgcntccccagaaactgtgagtagagcttcagcatttcagggagtgcctgcnggnatgctggtttcagtgtctcaaaanctgggtcanagcagantgtggccagccgcatanggctgtgcataaactggttctccaaaatgtctgcgcgaatatgcnccttttctgantccccgcacaggttgtncttgcgggncatgt

SEQ ID NO: 484708 - DNA, 1630 bp, Homo sapiens
  misc_feature (648)..(648): n is a, c, g, or t
  misc_feature (668)..(668): n is a, c, g, or t
gcagagacttgagtccgctgaaaagtgtcaccctgtttccgggctcgccatgagaaaatcctcaccgcgccttggtgtaggccatcttccatcttcgcttgcctgaccaattgtcctgtgctacgcggaggccgtctcgctagcagagtgtctctatgaggagaagtcgtgtgagcaagtactgctctaatcacgaaggtgactcgtagaggagaactagctgatataggagtgtcgatgagttgaaggataggatgactcgtatggcagacgtcccgcatgcgtgaacatacgtagacgcatggagacactcatatctagatttgcgggtcttgcacaacatggagccgaagggcaagcattgcgctggctagtgcatccgttggaagagccagtcccacgctgtccgaaaacgcacctggccattactcgaagagagaggaaccttcgatgtctaggtagggggcaagggaaggcagacgcattctaataccaccacggcaaagggtaaaaaccagtatggctaggaaatttgtacacacggtggggtacagagacctttttagcacaagaccttgacgcgggttgaccaatttatacgtactctgtggaacatatagggtccgaatactgcacgtctttcgaaantcgccacactgtcactaatnccggctctgaattctacctttcatggctgaggcataaaacacaggaaggtccctgacctaagtttcctaaacaagttctaaataacaccttaacgggctcacattctatctcgccatggggccgggcgttgtttgccattgggaacccttggttcgcagggaccggggcaccgagtcccttgccattttggaaccttcagggtcccttaaccaagcctaacacggggcctttaacgcgccaaagtggagttggcggggccttagagaccgcctttctttcccaagtccgttccaaattccaaaggccatccgtattgggatggggccccggtgagttctttataacttagcgaaaggaaccgggtttctcgaagaaagacttgtggaacccccctggaaactaacccggaagcgaacccattaaccaagggtttccctaaggccttccgaaacgactgagtcgcggacggacctggaaaaagcggcttgacacacggggaaggggggcccccccaagatcccccccacggggggacacagggcggtggcggccaaggttttccggaaccattcggccggagggcgcttgggtgaaaacaaacccccttgtgggtttatcaatgaagccccttgggggtttcggtaaacccctaacttgatacaaatctccgcaagaatatcaaggggagaggcacaggataccgggacatgtacattttccgggggtgtgaaaccaagcctgtcttttggaaaacccccgtgaaacagagacccctcttaaaaaaagaaacgtgggccaagatcatctcccggaggggagcccccacattgtgccctcccgagagtagttagaggaacaccccgtctttgtgtatcacgccctgcaacggcgaaactcagagtgttgaataccacagtcgtcacaaacagacaacacaggcggtagaagtccttcccccgta

SEQ ID NO: 484709 - DNA, 837 bp, Homo sapiens
  misc_feature (40)..(40): n is a, c, g, or t
  misc_feature (50)..(50): n is a, c, g, or t
  misc_feature (100)..(100): n is a, c, g, or t
  misc_feature (125)..(125): n is a, c, g, or t
aaccacaaaatgcacactataagaaaaatggtcaggtganagacacaaanaaagacttaaaaacaggaaaccctgaaaggaaaaacaaactaaagaagcnggttgcagggggttgagtaaggctngactaagcgaaccatgactgaactggctctgtgtttctatctgctgaaggttaaacagaaactcaactggttccacaccatttgggtccctgctgtttttttcttgcagactgtgctattaatttaataacagtttttttggagtggcggtagtaatgtagatggcaccatttgcattttttttctggctatattagaattctgatgtcaaagaccgagcagcgggctgtagagtaggtttattaaactagcaagaattacttaattaagacagtgaatttggctgaagactaaaataaatttctcaaagactgagctggagattatcaacctgaatatattttcttgagtagaccaaatatgctttgttaaagtaactatttcttaagaaagtgaaagtagaagctcacttgctccacactgaactggaaatcagaaagaagcgatgtttaacacagctcttctgtgggaagatgaaaaaaagattatactctattgctcaaatatactgtttggaaatggcgaaaacctaatgccttgcttttattctcaaatacttacacagaaacttaacgttccgccctacaactcctcttagactgaattcaatactagaattccgccgccacgatccatgtaatcctcggttggacgaatggacatcagggcactcgcaatccccaaacatttgaacacctaaaagaagctatcg

SEQ ID NO: 484710 - DNA, 595 bp, Homo sapiens
tttctgtacgcgcctgccaatacatgggtcagaccaaaatcggtggctgaataagagcactaccgaaaaatccccgtgtgattggagccacaaacaacgttccgcgcaggcggagaatctcctcgtgcccccattcacaaggcggatattgcatagtccctcctaactatagcccgtaacaggtacgatctgtccacaagctgaagtgtggatatggtgcgcgacaataatgtttgcggggacaaagaaacaccacgcggatggtgttctgtccaccgccgctgacaaaccaccacctcatctcttatgggacgcaccctcatcccactacagttcaaaaaaccacggcgtatgaccagaagcattctatgccttcatttattacacgcgtgccaaaaacgttgctctactgctccccccccctcttgtgcagcatgaaaaaatagtttttctatcttaatacagacaaagtaaaactctttcacaacattatattagttccaagtattcatatagtgcaatcttatctttcgtcgaccgtacataccctctcctatgcggcccaaataaaaaaaacccccgaaccaaaataaca

SEQ ID NO: 484711 - DNA, 602 bp, Homo sapiens
  misc_feature (26)..(26): n is a, c, g, or t
  misc_feature (150)..(151): n is a, c, g, or t
  misc_feature (165)..(165): n is a, c, g, or t
  misc_feature (167)..(167): n is a, c, g, or t
  misc_feature (171)..(171): n is a, c, g, or t
  misc_feature (208)..(208): n is a, c, g, or t
  misc_feature (210)..(210): n is a, c, g, or t
  misc_feature (214)..(214): n is a, c, g, or t
  misc_feature (219)..(219): n is a, c, g, or t
  misc_feature (227)..(227): n is a, c, g, or t
  misc_feature (231)..(231): n is a, c, g, or t
  misc_feature (243)..(243): n is a, c, g, or t
  misc_feature (274)..(274): n is a, c, g, or t
  misc_feature (280)..(281): n is a, c, g, or t
  misc_feature (303)..(303): n is a, c, g, or t
  misc_feature (332)..(332): n is a, c, g, or t
  misc_feature (341)..(341): n is a, c, g, or t
  misc_feature (350)..(350): n is a, c, g, or t
  misc_feature (353)..(353): n is a, c, g, or t
  misc_feature (365)..(365): n is a, c, g, or t
  misc_feature (369)..(369): n is a, c, g, or t
  misc_feature (393)..(393): n is a, c, g, or t
  misc_feature (402)..(402): n is a, c, g, or t
  misc_feature (404)..(404): n is a, c, g, or t
  misc_feature (423)..(423): n is a, c, g, or t
  misc_feature (476)..(476): n is a, c, g, or t
  misc_feature (508)..(508): n is a, c, g, or t
  misc_feature (601)..(601): n is a, c, g, or t
gccttacagtaattgtgtacatagtntgtttagtcattattgggtcaaaagtttcaggttgttccttttttaatgcattctgctgtgagaaccgtcaatatgcctttgttcctgctgagggatctgccattctggaggtacaaatactgnngatagaatatcacngnaganctacgtcaagttcagagtgttcaggatcatttctatntnagantccanttagctgnactntggcaaaggtcnttgatcatggagcctttcttcatttcattgnatcttnntaagtagaatgccactaccgtnaaatgctgcttatatgtattttattcccntttttgttntgttttttnttntttccctctgtngctntaaatttttcccttcctgtttatntctcttccntncctgttctgcttgtccctntgttccctaaagcctgtattttttctttaaggggatctattttcctttgaaanaattgctgggaagccagcctcagaaaggtaanaggaatgtttttcctgtattttgaaacataaattttccataggaatatccattcattataggacagaaatcaataggaaattagggcatggtna

SEQ ID NO: 484712 - DNA, 356 bp, Homo sapiens
  misc_feature (322)..(322): n is a, c, g, or t
gttcttctcgctagatgcgtttcttctgacgaacataatgatacctgaaggcgtactcccactactataccaaggaccttgctcagcagattactctttgtgacagcgtagctggcctcccctgagtgtttcacgagcagtgcaatgagtcgaacaaaggcatccaggttgtgatagcacttggctcggatcatggtgggattggcagcaggattgtgctgctgctcagcctgagctcggtaactgatttcaacacacatttcagtacacagacgacagaaccttgttatgagatcatcgggcttcagtattccttgctggngcatctgtccaacatatgcagagaaagctttggt

SEQ ID NO: 484713 - DNA, 144 bp, Homo sapiens
ccacaccagtggttcatttttactgtttttggcagcatgcctgcacccagcatgcacaggccatcagcatgccttccatccagctggtcatggcccatccacagcttgggtcccgcagctcgcacttcgtcactccatggtcca

SEQ ID NO: 484714 - DNA, 499 bp, Homo sapiens
tatcgctttgatagccctctctatgacctgtgtattatagcgagtctcaaaggcggcacagacattgtacaggtgccgggggggagtcggtggaaatatgccattcaacaggattctcagaaaaaaaccagctattcctgggcaggatgcctcagtgcacaggtgggaggtgggggctggtgggacctgagcatagtgtgacagagtagaatggcctcccgggtcaagtccaaagcttctgcttcaaatgggcaccactgggccttgaaccaggccctgtgttggcagggctgggtgctgttacatgctgtcacttgccgaagtccgtgggtcctgggtctgctcgcgtgtgtgactccttgattgctggctggtgtccttcatgtcctcagaggcccccggactcctccaggggtggtggcagaattctggggcttgtctcgaggtcttatcccagccccagctctggccctcacaggccctagccccccggtgtgga

SEQ ID NO: 484715 - DNA, 746 bp, Homo sapiens
ggccaggtccggtgttggggtgtccgaattgccgctcggagaggagtggcgcctcgccccgcttgaattttgattcatcatggataatctgtcatcagaagaaattcatagcagagagctcaccagattactgatgagatctcgtggcaaagtacgaggagaatcctgtgcgtttagcccattgagtctcaggatgcaggaatcatagaccatcactatgcctggtatgaacagaaaggaagccaagcataaaccgtcgatagaagaaggcttggaccaagataaatacacgcgacctcagagagacggagacgactttaacagaactcaacaaatgctgtgcgcctttgtgtcgtgcccactgtatatacgaacaaagaactcttcgacgtctggcaagagcttataaggacaacactgggcgagatgcgtggagaaaactcaccttgcaatgtagtatctaaacaggcatgcccggctgacataatggtcagctttcatgctaatcaagcgaaccgggagcagccagtggtggatacatttatacacgcataactaatgattgccatgagaaggatgaactattgccaagagaacctgagtcaagtgggcagataatcctgggaatttctagcccagaccatggccctgaagcataggcacctgccgattgatgcttcacaatgtccaccaaataaccacgaaattcacagacgaaggctgaagccaaccagagaatcgtattg

SEQ ID NO: 484716 - DNA, 1167 bp, Homo sapiens
  misc_feature (1023)..(1023): n is a, c, g, or t
  misc_feature (1052)..(1053): n is a, c, g, or t
  misc_feature (1059)..(1061): n is a, c, g, or t
cttatctcggcttcgtttctggagggccaggaacaaacaggcttcaaagccaagggcttggctggcacacagggggcttggtccttcacctctgtcccctctccctacggacacatataagaccctggtcacacctgggagaggaggagaggagagcatagcacctgcagcaagatggatgtgggcagcaaagaggtcctgatggagagcccgccggactactccgcagctccccggggccgatttggcattccctgctgcccagtgcacctgaaacgccttcttatcgtggtggtggtggtggtcctcatcgtcgtggtgattgtgggagccctgctcatgggtctccacatgagccagaaacacacggagatggttctggagatgagcattggggcgccggaagcccagcaacgcctggccctgagtgagcacctggttaccactgccaccttctccatcggctccactggcctcgtggtgtatgactaccagcagctgctgatcgcctacaagccagcccctggcacctgctgctacatcatgaagatagctccagagagcatccccagtcttgaggctctcactagaaaagtccacaacttccagatggaatgctctctgcaggccaagcccgcagtgcctacgtctaagctgggccaggcagaggggcgagatgcaggctcagcaccctccggaggggacccggccttcctgggcatggccgtgagcaccctgtgtggcgaggtgccgctctactacatctaggacgcctccggtgagcagggtcagtggaagccccaacgggaaaggaaacgccccgggcaaagggtcttttgcagcttttgcagacgggcaagaagctgcttctgcccacaccgcagggacaagccctggagaaatgggagcttggggagaggatgggagtgggcagaggtggcgcccaggggcccgggaactcctgccacaacagaataaagcagcctgattgaaaagcaaaaaaaaaaaaaaacacaaaacganacacgagctgcaccgacgacaacaagaannacaggnnngaaatagaccatcagcacaaagaaaaaaagagggcacaggcggaaagaggagcgcacaagagaaggggcgccaaaaaacaacaggcggcccaacgagcgagcgcac

SEQ ID NO: 484717 - DNA, 981 bp, Homo sapiens
gcgccgattgctggagggaacggcggaggctcctctagagaatggtggtgtgtggcgactcgtgggagccggagctttggaacgaggagtggcgcccattaagcgtcaatacctcaccaccaaggagcagtttcaccaattcctggaagccaaagggcaggagaagacttgcctgggaaacctgaggtagtgagaccctgctgtgcaatgagctggcttgagcctgagtgctaaggcgtgatccgactggatggatgggacatgacgtgcgtgactggggcatggacggagtgagtgcatgctagatgccctgggtgatgcagctacatgactcacgaagagtgtgccctgtgttggacaaaacaatggtgcctggccccagtgtgaatgcccactgaactacgacaatgaacagtgctgtgtccctccctaatccatgtgatgtctggctgctaaggtgtttcttcggtgatctgcttgcctgctttctgcactgactgtggtgggctgctacctggagaccaatgcctggccgacctgggccccctgctgcgtgctcttcgagaccttctggccggtgcccctacggcgttgacctgccgcttctgcttggggcccatctgggggcccgatgggacagaacctggtgcatggaggaggtaggctggacctgcgggacccagtccgctgtccaatcctgcaactgtcctgggacaaatgcccttgcatgcaagcagctgccggaagcgcgaaggtccgcttcgagcgagctgagcaggcccttgcgcctgtttcaaggcaaagggtcccctacaacccacgtgtgccggatgtaccccgaaggggcaacgtgaaagcctgaggggccgcttacaaggtcaggaaaaacttgtaggttgggcaagcatgggtcccacgacatggactaggagcactagcaaaccgtcacaagaaaaccttagttggacctaggggccctag

SEQ ID NO: 484718 - DNA, 156 bp, Homo sapiens
  misc_feature (1)..(1): n is a, c, g, or t
ntcgggtatatggccatcataggaggcttcattcactgatgtcgcctattctcaggctacaccctagacgaaacctacgccaaaatccatttcactatcatattcatcggcgtagatctaactttcttcccacaacactttcttggccttatcgag

SEQ ID NO: 484719 - DNA, 993 bp, Homo sapiens
cttatctcggcttcgtttctggagggccaggaacaaacaggcttcaaagccaagggcttggctggcacacagggggcttggtccttcacctctgtcccctctccctacggacacatataagaccctggtcacacctgggagaggaggagaggagagcatagcacctgcagcaagatggatgtgggcagcaaagaggtcctgatggagagcccgccggactactccgcagctccccggggccgatttggcattccctgctgcccagtgcacctgaaacgccttcttatcgtggtggtggtggtggtcctcatcgtcgtggtgattgtgggagccctgctcatgggtctccacatgagccagaaacacacggagatggttctggagatgagcattggggcgccggaagcccagcaacgcctggccctgagtgagcacctggttaccactgccaccttctccatcggctccactggcctcgtggtgtatgactaccagcagctgctgatcgcctacaagccagcccctggcacctgctgctacatcatgaagatagctccagagagcatccccagtcttgaggctctcactagaaaagtccacaacttccagatggaatgctctctgcaggccaagcccgcagtgcctacgtctaagctgggccaggcagaggggcgagatgcaggctcagcaccctccggaggggacccggccttcctgggcatggccgtgagcaccctgtgtggcgaggtgccgctctactacatctaggacgcctccggtgagcagggtcagtggaagccccaacgggaaaggaaacgccccgggcaaagggtcttttgcagcttttgcagacgggcaagaagctgcttctgcccacaccgcagggacaagccctggagaaatgggagcttggggagaggatgggagtgggcagaggtggcccaggggcccggaatcgggccagagagaaagacacggataaacagaaaaaca

SEQ ID NO: 484720 - DNA, 937 bp, Homo sapiens
  misc_feature (793)..(793): n is a, c, g, or t
  misc_feature (822)..(823): n is a, c, g, or t
  misc_feature (829)..(831): n is a, c, g, or t
tgcaagaagcaaatcatatgacctgcggcaaccatgaatgtggtcgagcataggatcgtactgtagtggacataccgcagatggcatgtatctactgacatgattcgccctgggggtcgtatattgaggactttaccatggctgcgcgcaggtgacacctgtgaaatgctgttataattgtggatggtaggtgcgtgagtgcctactatacgtgcgattctagtacttgctagggagtccccatggcttcaatgtgcgtctactcacaatgaacccaccagaacactgcggagcatggttctggagatgagcattggggcgccggaagcccagcaacgcctggccctgagtgagcacctggttaccactgccaccttctccatcggctccactggcctcgtggtgtatgactaccagcagctgctgatcgcctacaagccagcccctggcacctgctgctacatcatgaagatagctccagagagcatccccagtcttgagcaccctgtgtggcgaggtgccgctctactacatctaggacgcctccggtgagcagggtcagtggaagccccaacgggaaaggaaacgccccgggcaaagggtcttttgcagcttttgcagacgggcaagaagctgcttctgcccacaccgcagggacaagccctggagaaatgggagcttggggagaggatgggagtgggcagaggtggcgcccaggggcccgggaactcctgccacaacagaataaagcagcctgattgaaaagcaaaaaaaaaaaaaaacacaaaacganacacgagctgcaccgacgacaacaagaannacaggnnngaaatagaccatcagcacaaagaaaaaaagagggcacaggcggaaagaggagcgcacaagagaaggggcgccaaaaaacaacaggcggcccaacgagcgagcgcac

SEQ ID NO: 484721 - DNA, 134 bp, Homo sapiens
gaggatcgcattttcttggtttctccacattggtgggcagatctttaactctagactcaggtgatcagcccaccttggctaccaaagtgctgggattacaggcataaaccaccgggcctggccttgacctactc

SEQ ID NO: 484722 - DNA, 220 bp, Homo sapiens
  misc_feature (1)..(1): n is a, c, g, or t
  misc_feature (28)..(28): n is a, c, g, or t
  misc_feature (33)..(33): n is a, c, g, or t
nctatatatcacgcgctactgatcaacnccgcngactgcatccaacgccgctgactgcatccaacgccgctgactgcatccaacgccgctgactgcatccaacgccgctgactgcatccaacgccgctgactgcatccaacgccgctgactgcatccaacgccgctgactgcatccaacgccgccctgactgcatcctactgcgggatcctctagatcac

SEQ ID NO: 484723 - DNA, 390 bp, Homo sapiens
  misc_feature (1)..(1): n is a, c, g, or t
  misc_feature (28)..(28): n is a, c, g, or t
  misc_feature (33)..(33): n is a, c, g, or t
nctatatatcacgcgctactgatcaacnccgcngactgcatccaacgccgctgactgcatccaacgccgctgactgcatccaacgccgctgactgcatccaacgccgctgactgcatccaacgccgctgactgcatccaacgccgctgactgcatccaacgccgctgactgcatccaacgccgcccatctatctgctgagagccacctccagcattcaataaaaccttgcactcattctctaagcccacacatgatacaatttttctggtgcactagcgcaagaacccgggatacagaaagccctctgcccattgtgataacgcagagggtctaactgagtgatgaacacaactgccgcagatagcaagctgaaggcgcactcagtgtgc

SEQ ID NO: 484724 - DNA, 124 bp, Homo sapiens
actagacgtagacacacgagctatttcaccatcctaccacacattcgaagaacccgtatacataaaatctagacaaggtagagccgagagacaaggtagagccgagtgacaaggtagagccgag

SEQ ID NO: 484725 - DNA, 311 bp, Homo sapiens
  misc_feature (1)..(1): n is a, c, g, or t
  misc_feature (28)..(28): n is a, c, g, or t
  misc_feature (33)..(33): n is a, c, g, or t
nctatatatcacgcgctactgatcaacnccgcngactgcatccaacgccgctgactgcatccaacgccgctgactgcatccaacgccgctgactgcatccaacgccgctgactgcatccaacgccgctgactgcatccaacgccgctgactgcatccaacgccgctgactgcatccaacgccgcccccgcccctcacctctctggcccctcctcgatgcttttagcgtgagtccaccgcgagagcccgcagcgtttaacgttcgaatatatagagtggttcatacccgactccgatccacgctgtctattc

SEQ ID NO: 484726 - DNA, 1001 bp, Homo sapiens
aagaacactcaacctatacagttatttcaacagtatgtccccaattgaccctgattgaaatcactgactgaccgaggagtgagaggacagggctttgcctttgtaagcctttgatgaccatgattccgggccatagattgtcattcagaacactaccatactgtgaactggccacaattgtcaagtcagaaaagtcctgtctcatcaagagatggcttagtgcttccatcctcgtccatcatgatggtctgaatgtgtgttcttgtggaaacctttggtgagtggtctgtggccgcgtgggtttcggctcgtggaatgaccacttccggtcttggaggtgacattgcaggtggtcgtggtggctttggtggcagaccgtggtggtgcgtggtatatggtggcggctcggcggactggcctcatatggatttgggtaatgctggaagccatttttcgggagggtggtggcactgcgtacaatgcctttcgcgcgaattacaagaatcagtcgttcaaattttggacccatgacgggaggaaattttggaggcagaagctctggcccctatggctggtggaggccaatactttgcaaaaccacgaaaccaaagtggctatgtgcggttccagcagcagcagtagctatggccagtggcgaagatttaattaggaaacaagcttagcagagaggggaggccagagaagtgacacgggaaggttacggttacaacagatttgttgaactcatgccagcccagtggtggccagctagctgtacaaaaaagccatgttttggaccacatatcctgtgttttggcaaaactcccgactgtttttgtgccctgggtacccgtttttggttctgtcttggacaggttcaccttcccccaagcttaggcaaaattttgccccagttagacagaacacatgccgcgaccaaaaggtaaaggggaagacgcaacaaggacccgcgagaaacgagaggcaataacacggaaaga

SEQ ID NO: 484727 - DNA, 275 bp, Homo sapiens
  misc_feature (1)..(1): n is a, c, g, or t
  misc_feature (28)..(28): n is a, c, g, or t
  misc_feature (33)..(33): n is a, c, g, or t
  misc_feature (256)..(256): n is a, c, g, or t
nctatatatcacgcgctactgatcaacnccgcngactgcatccaacgccgctgactgcatccaacgccgctgactgcatccaacgccgctgactgcatccaacgccgctgactgcatccaacgccgctgactgcatccaacgccgctgactgcatccaacgccgctgactgcatccaacgccgcccgtgtgggagatcccagatgggggcctgatgctgcccctgcgggaacccgtcgtcacctggagggccacanccagcggcgttgatgcagt

SEQ ID NO: 484728 - DNA, 1146 bp, Homo sapiens
  misc_feature (1002)..(1002): n is a, c, g, or t
  misc_feature (1031)..(1032): n is a, c, g, or t
  misc_feature (1038)..(1040): n is a, c, g, or t
cttatctcggcttcgtttctggagggccaggaacaaacaggcttcaaagccaagggcttggctggcacacagggggcttggtccttcacctctgtcccctctccctacggacacatataagaccctggtcacacctgggagaggaggagaggagagcatagcacctgcagcaagatggatgtgggcagcaaagaggtcctgatggagagcccgccggactactccgcagctccccggggccgatttggcattccctgctgcccagtgcacctgaaacgccttcttatcgtggtggtggtggtggtcctcatcgtcgtggtgattgtgggagccctgctcatgggtctccacatgagccagaaacacacggagatggttctggagatgagcattggggcgccggaagcccagcaacgcctggccctgagtgagcacctggttaccactgccaccttctccatcggctccactggcctcgtggtgtatgactaccagcagctgctgatcgcctacaagccagcccctggcacctgctgctacatcatgaagatagctccagagagcatccccagtcttgaggctctcactagaaaagtccacaaccaggccaagcccgcagtgcctacgtctaagctgggccaggcagaggggcgagatgcaggctcagcaccctccggaggggacccggccttcctgggcatggccgtgagcaccctgtgtggcgaggtgccgctctactacatctaggacgcctccggtgagcagggtcagtggaagccccaacgggaaaggaaacgccccgggcaaagggtcttttgcagcttttgcagacgggcaagaagctgcttctgcccacaccgcagggacaagccctggagaaatgggagcttggggagaggatgggagtgggcagaggtggcgcccaggggcccgggaactcctgccacaacagaataaagcagcctgattgaaaagcaaaaaaaaaaaaaaacacaaaacganacacgagctgcaccgacgacaacaagaannacaggnnngaaatagaccatcagcacaaagaaaaaaagagggcacaggcggaaagaggagcgcacaagagaaggggcgccaaaaaacaacaggcggcccaacgagcgagcgcac

SEQ ID NO: 484729 - DNA, 809 bp, Homo sapiens
  misc_feature (32)..(32): n is a, c, g, or t
  misc_feature (183)..(183): n is a, c, g, or t
  misc_feature (191)..(192): n is a, c, g, or t
  misc_feature (214)..(214): n is a, c, g, or t
  misc_feature (217)..(217): n is a, c, g, or t
  misc_feature (227)..(227): n is a, c, g, or t
  misc_feature (234)..(234): n is a, c, g, or t
  misc_feature (269)..(269): n is a, c, g, or t
  misc_feature (309)..(310): n is a, c, g, or t
  misc_feature (312)..(313): n is a, c, g, or t
  misc_feature (328)..(328): n is a, c, g, or t
  misc_feature (345)..(345): n is a, c, g, or t
  misc_feature (359)..(359): n is a, c, g, or t
  misc_feature (361)..(361): n is a, c, g, or t
  misc_feature (423)..(423): n is a, c, g, or t
  misc_feature (445)..(445): n is a, c, g, or t
  misc_feature (449)..(449): n is a, c, g, or t
  misc_feature (455)..(455): n is a, c, g, or t
  misc_feature (458)..(458): n is a, c, g, or t
  misc_feature (479)..(479): n is a, c, g, or t
  misc_feature (483)..(483): n is a, c, g, or t
  misc_feature (485)..(485): n is a, c, g, or t
  misc_feature (488)..(488): n is a, c, g, or t
  misc_feature (506)..(506): n is a, c, g, or t
  misc_feature (510)..(510): n is a, c, g, or t
  misc_feature (513)..(513): n is a, c, g, or t
  misc_feature (518)..(519): n is a, c, g, or t
  misc_feature (527)..(527): n is a, c, g, or t
  misc_feature (529)..(529): n is a, c, g, or t
  misc_feature (534)..(534): n is a, c, g, or t
  misc_feature (538)..(538): n is a, c, g, or t
  misc_feature (546)..(546): n is a, c, g, or t
  misc_feature (720)..(720): n is a, c, g, or t
  misc_feature (805)..(805): n is a, c, g, or t
ctgttagcgcgggggttgcagtagtgcttaangcgtgttacgcaatgttttgtttctgctcgtgtgggcatttgcgggtttagggattattccaaaggccgggccacatcccatcttcaccttctgagatggattatatataacatgtcctaaagggaaggggatggggcttgtgggggggtntattttgnncagtctagttcaacaggcagcnggnggcccttggngggggcntacggggggttctcggctgggggtacaaaattggntataatatagtctatccgggtatactttgggtcaggcttnncnntttttaacttttacngtatttgcctatatccnaaatataacactcncncccttctggtcccccaaagtaagacaacctactttaaaaaataagttggaaatggttttatnggcggtattaacaaaatggggnggtngggggnccntccaaattaagaccccccccnaatncnccncccggggcggcccctccncccntgngttgnnggggatgngnttatntcanaacagggncctacggggtaggcgatcggcgaaggcgctttggggggggcggcgacgttttgctttcccatttttgacttccagaaacacttttaattccttaaaaagtattctagttctgaaaatcctaaaaagctttgctacatattctactcacacaattaagctccatcaaagtatgcnagttgtgttttttacttatgcttgaaagttgatgctgcgagtgaaaatacttcatgttgacagttaacactctgacctgattcanggcc

SEQ ID NO: 484730 - DNA, 1239 bp, Homo sapiens
  misc_feature (1)..(1): n is a, c, g, or t
  misc_feature (28)..(28): n is a, c, g, or t
  misc_feature (33)..(33): n is a, c, g, or t
  misc_feature (1095)..(1095): n is a, c, g, or t
  misc_feature (1124)..(1125): n is a, c, g, or t
  misc_feature (1131)..(1133): n is a, c, g, or t
nctatatatcacgcgctactgatcaacnccgcngactgcatccaacgccgctgactgcatccaacgccgctgactgcatccaacgccgctgactgcatccaacgccgctgactgcatccaacgccgctgactgcatccaacgccgctgactgcatccaacgccgctgactgcatccaacgccgcccctatagttttcctgcccaaggttttcagcagatctcactgtgtcctttaggaggagaggagagcatagcacctgcagcaagatggatgtgggcagcaaagaggtcctgatggagagcccgccggactactccgcagctccccggggccgatttggcattccctgctgcccagtgcacctgaaacgccttcttatcgtggtggtggtggtggtcctcatcgtcgtggtgattgtgggagccctgctcatgggtctccacatgagccagaaacacacggagatggttctggagatgagcattggggcgccggaagcccagcaacgcctggccctgagtgagcacctggttaccactgccaccttctccatcggctccactggcctcgtggtgtatgactaccagcagctgctgatcgcctacaagccagcccctggcacctgctgctacatcatgaagatagctccagagagcatccccagtcttgaggctctcactagaaaagtccacaaccaggccaagcccgcagtgcctacgtctaagctgggccaggcagaggggcgagatgcaggctcagcaccctccggaggggacccggccttcctgggcatggccgtgagcaccctgtgtggcgaggtgccgctctactacatctaggacgcctccggtgagcagggtcagtggaagccccaacgggaaaggaaacgccccgggcaaagggtcttttgcagcttttgcagacgggcaagaagctgcttctgcccacaccgcagggacaagccctggagaaatgggagcttggggagaggatgggagtgggcagaggtggcgcccaggggcccgggaactcctgccacaacagaataaagcagcctgattgaaaagcaaaaaaaaaaaaaaacacaaaacganacacgagctgcaccgacgacaacaagaannacaggnnngaaatagaccatcagcacaaagaaaaaaagagggcacaggcggaaagaggagcgcacaagagaaggggcgccaaaaaacaacaggcggcccaacgagcgagcgcac

SEQ ID NO: 484731 - DNA, 904 bp, Homo sapiens
  misc_feature (760)..(760): n is a, c, g, or t
  misc_feature (789)..(790): n is a, c, g, or t
  misc_feature (796)..(798): n is a, c, g, or t
atcagctcgctaccttaacttagaagttgtggtggtggtggtcctcatcgtcgtggtgattgtgggagccctgctcatgggtctccacatgagccagaaacacacggagatggttctggagatgagcattggggcgccggaagcccagcaacgcctggccctgagtgagcacctggttaccactgccaccttctccatcggctccactggcctcgtggtgtatgactaccagcagctgctgatcgcctacaagccagcccctggcacctgctgctacatcatgaagatagctccagagagcatccccagtcttgaggctctcactagaaaagtccacaacttccagatggaatgctctctgcaggccaagcccgcagtgcctacgtctaagctgggccaggcagaggggcgagatgcaggctcagcaccctccggaggggacccggccttcctgggcatggccgtgagcaccctgtgtggcgaggtgccgctctactacatctaggacgcctccggtgagcagggtcagtggaagccccaacgggaaaggaaacgccccgggcaaagggtcttttgcagcttttgcagacgggcaagaagctgcttctgcccacaccgcagggacaagccctggagaaatgggagcttggggagaggatgggagtgggcagaggtggcgcccaggggcccgggaactcctgccacaacagaataaagcagcctgattgaaaagcaaaaaaaaaaaaaaacacaaaacganacacgagctgcaccgacgacaacaagaannacaggnnngaaatagaccatcagcacaaagaaaaaaagagggcacaggcggaaagaggagcgcacaagagaaggggcgccaaaaaacaacaggcggcccaacgagcgagcgcac

SEQ ID NO: 484732 - DNA, 109 bp, Homo sapiens
ctgtgcgtcattaccatgtgccttcacatctgtctcctacttactggtatccttctctaaatctgtattttcattcctggtgcctactgctctcactggggatcctcta

SEQ ID NO: 484733 - DNA, 143 bp, Homo sapiens
tatgctgcgactgagcggttcaaagtgctaggattccaggtgtgagccatggcgcctgacactcatgtctctttgtgcctgataagtttttgcatacctcagtgtaccctcaggactgcgtcttgagttttttttgtttacat

SEQ ID NO: 484734 - DNA, 593 bp, Homo sapiens
ggacgggatcatgtttcatgactgaaatgcatacttgtgctataccaaataaacagtgaatatctggctgtacatggacttccaaacatagcatgcagtactcaaatattcaaaagtagagaaaggataaataaatcacagtgtacccattctataaagcagtgagaatggacaatatacaactacatgtaacaatatggataaggaaaccagatgagtatacatgataattccattcatatcatttaaataataatacataagaggcaaaagtaatatatactatttggaagtcacgacttttgggggatcagtgattgaaagggagcagaaagggcctttccggggtcatgataatgttgacctttgatcggggtgtattcagtttatggaagtgcattgatctatacaccaatgataaatgtgctatgctacatgtatattttacttcagtaaagttaaaatttgagaaaccactctgccaaattttgtagtgcgaaagtggatacagtttagagcacgtgaatggctactgcagtctatgaggccaaggaaatgtctgagagtttggacttgacaagtcctggcagagg

SEQ ID NO: 484735 - DNA, 475 bp, Homo sapiens
  misc_feature (2)..(2): n is a, c, g, or t
  misc_feature (42)..(42): n is a, c, g, or t
  misc_feature (65)..(65): n is a, c, g, or t
tnttggtagccccattaggccccaggtgcggctcccttcaangcccgcgagcccaagcagcaacncctccgtcttcggcagaaatgccagcgttctctcagcatcagcaccaccctttgggcagggtcttgggttgtggagttaaagtttgccttggtcctgttggcaggaccgtggtgggtagggcaggaaggggtcttgtgtcctcataggcagcacagcaccagaactactcacacagagtagaaagtctgtgcagtagcccggaggtacagtcagattctgacggtagttttcttccccttaatactgcgcagcccctcagcgaccatgtccttgtgactgtatttgcagcgggcacggtcagtgatgaggggctgtgggaagatgggcactcgctgcctctggggaaggcgggggccttggtatcctgggagttcaagctccacagccgtatcgagtagagagaggtacg

SEQ ID NO: 484736 - DNA, 410 bp, Homo sapiens
ctgaggaccccccccacccacagcccactgaatcaaatgttaatctcctttggcattatcctcatagacacatccaggatcaatactttgggtccttcaatccaatcaagttgacactcagtattaaccatcatactagctattgtaaaaggggttgagttcttgatttgattctgtgcttggttgctgttggtgtatagaaaacctactgattggtgtacattaattttgtatccggaaactttgctgaattcttttatcagtcttaggagctttttggaaaagattttagggtttacaaggtagacaatcatattatcagtagacagcgacagtttgactccctctttaccaatttgaatgccttttatttctttctcttggttcattgctctggctaggactttcag

SEQ ID NO: 484737 - DNA, 105 bp, Homo sapiens
acccccagacacgacggtgaaaaacgcccctgtgtaaaagttttttcccccccccccgcgccgggggggaaaaaaactccctcgggaaagggggttttaatacac

SEQ ID NO: 484738 - DNA, 128 bp, Homo sapiens
taaaaaaaaaaaaaaaaaaaaaggttcctttttaatggtgggagaaaaaactttaaaccttaattttttaccccggccaaaaattttttccgaaatgaagggcggaggataaaaaaattttttctgga

SEQ ID NO: 484739 - DNA, 144 bp, Homo sapiens
tcccaagtatgagaaattgacgcagggcatggagtggatcctgctgcatccatcatgcttgtgagctccatccatcatgcctgctgtggcaggaaaaggctcagagctgctgggtagtgtatcttccaaggtccctttcagttc

SEQ ID NO: 484740 - DNA, 386 bp, Homo sapiens
caaaggggcttattgcagccgcagacagtgcttaatcccgtcctttatatgcaatggccttatgcatggctatcatgcgtgcctcgttgtgaggcgatacttgcatgctgacgttgttagaacttctgaaagatggccgattccactctggagaggcgctgggggctgccctgggcgtcagtcgcagtgctgtttggaagcagctccagcatcttgagtctgaattgaacctgcccattcataaagtccgtggcagggggtatcagcttgcgtcgccgttggtttttctgagcgctaaagaaattgaagcgaatgctgcttctttggtgtggcccgtttacatctcggattccattgactccaccaatgccgaagctttgcgtctt

SEQ ID NO: 484741 - DNA, 146 bp, Homo sapiens
ggtgactttttgtttaatttttgtagagatgaggtcttgctaatgttgcccaggcgtggtcttgaacgtcctgggctcaagcaatcggggacctaaatggcaaataagatgctaatctggggttgcaagccccagtcctcttgaat

SEQ ID NO: 484742 - DNA, 208 bp, Homo sapiens
  misc_feature (134)..(134): n is a, c, g, or t
  misc_feature (198)..(198): n is a, c, g, or t
aatcctgggggggctttaattctggctcctttcttcctcagaacatctctattctgaagaccctctgcatgcaggcacgcccattccaagctgagtcgtgcggctgggcacaggggaatttttccagagctgangctgacgtctgctctgaagaatgttagaaggttcccagacaccagagccagatgtcccccaccnacggtcagga

SEQ ID NO: 484743 - DNA, 204 bp, Homo sapiens
  misc_feature (78)..(79): n is a, c, g, or t
  misc_feature (89)..(89): n is a, c, g, or t
  misc_feature (114)..(114): n is a, c, g, or t
ggtgactactacgagcacagcttaaacttcaaggactgggtgttcatatcctctagaggagctgttctgtatcgatannaccgatcaanctcacacctcttgctcagctatatnacgcgatcttcagcaaaccctgatgaaggctacaaagtaagcgcaagtacccacgtaaagacgttaggtctacctgggggtaccgagctc

SEQ ID NO: 484744 - DNA, 1931 bp, Homo sapiens
  misc_feature (1)..(1): n is a, c, g, or t
  misc_feature (865)..(865): n is a, c, g, or t
  misc_feature (916)..(916): n is a, c, g, or t
  misc_feature (1417)..(1417): n is a, c, g, or t
ntcttgtggtgtgtgtttgttctgttgctgtgttcgtcgttcggttgactgttgatgtgagttgcgttgcttctttgttctatcttatgatgtaaggttgtaattatgtaagtgcttactagtgtctgttgtgcagtagtagttttgttgtgccgtgcttgttgttcatcatcaagatggagtcgtcgttcttttgtttactaccaactctcctctgctggtttgtgagagcagctacgtctgtttgtcctcggaccttgtgagtgagcaagctcctctttggtggccctcttagtgtcgcatccctgcggggggtggtacacccaggtggttgtgtgtccccagccgctttttgccagactagtttgtcttctttcctccgtttctgtagttgtagcccccctgctcttactttggggtaccctgtcccaccctggcggtgggcacccacactgtgtgggttgctcctccagacgtgttttttttgctgtgaggttcctcactccctcaccgcgtgtggtttaaggttgaaatggtgggttttcttccttcccctcaccacgaaggagcccacacagagttgtgcccactctttttcaagaggctttcttgtgaggaattggtaacacccctggctgcgccccttttttggaggaatttcttctcacaccaatctggggggcaaaacacacgcacctcacgagaggtcgatacttatctttttgtgggccgaccttattccacaccagggaaagagtgtctggctcctgtcagattgggttgggccgcagttttttctctcttttgttgggtgacctcatacccgtgggctcaaagagattgtgttctcgtctctttagggganattctttccttcggtgagtgatagtttggttctagaccagcgcattccctnacataagaccgttatagatggggatagtagatattaaaacccacctagggagttgttgttgtgtgcgccgccaagaatataacaacacatggtgtccaccacagagtgattgttatagtagaccacccacattcgcagagaattggggggtggttttcttttagggtggttccccacgccggtttttttctggtcctctcttactactaggcgtctatgcgcattaccctctctttattctcattctgggtgctctcccaacttgttggtgccctttgttggggcacaccacaaaccactggtggttcccaaaggagtttatagtgtaacaccacacttgtggctctgatacatttgtgcctcaacagacgtttgtgatagggcccctacgcgccacaatttgggcgcacacacacacagagcggcttattctctgggtacacaccgcgttgacgctggttctgtctctctccaagaaatgggtgatctcaccctctctgngtgcgcttatctttgtgaagagccccacagagtgattggctctcagagccacatagattttataggagcatttttctctcaccgataggcgcaactacacaccctgttcacacaccgcgttagatatatggtcggggcacacatctcatctcatacacgccccctgttggcgttctcaaccacttgttaccacgcgtgtacactggcgcatttggtggcgttgcgcaacacaaggcgcctccagcgcattccaatatttcgggatattagaagaggaaagaatccattgttagaatgtcactgtaaccccagaaagatttatccagttacccagccagcctaggccagaacaccacccccagtgccacctccactggcctggtttgctgatggcccagaacatctgtttgctggctacccggaccacctggtgcgaatgttggccggtgacccattggcacccccttgaaagatttttggcagagcctttaccaaattaaaaaaaaactggcca

SEQ ID NO: 484745 - DNA, 633 bp, Homo sapiens
  misc_feature (468)..(468): n is a, c, g, or t
tggggggattcccaaatgatttaatggaggtaactttccccaatttaatacttttttgcatttatatatacttagaaacgctaaacagggtcctaaggccctgggaatggtgcccagacaagttatcctctaatataatacaactctaattagaccaaaattgggcttttaaaataccacaaataccagtaaagggaataaaaaaggggactacatagtctttctttcgggttaacaataggggaactacacggtcacatatgggtgtgtatactgggtagatatttatccccacatactataattacaagtacagacataaaaacaacacaagagcagaacaccggtcagtgtccacctcaggtgctaaccgctcccagttattacacacctcaacagacaatatataccccggcgggtgtctacactcgcggctagaaaactagaaacacacctccgcggggaaanactcaaaaccaggccatcacagccacagcccgtgaatacagtgaccagcggtttccccagtgggtcactcccttcaaccgtgacaggggcgcaactcaccaaaagatgggcatatagcccgtgaatctaaagctcccgggttcccccgacaaaacacaacacacg

SEQ ID NO: 484746 - DNA, 227 bp, Homo sapiens
acatgatacgactcgagtgtcggaccatgctcatccctcctggtcaatctcagctcacggcaacttctgcctcctgagtttaggcagcttcttatgcctcaatccccgaatagctgggactacaggtgcttgttaccatgcccagctaatttttgaatttttagtagagacagggtttcaccatgttggccagactggtctcaaaactgctcacctcaaattatcca

SEQ ID NO: 484747 - DNA, 473 bp, Homo sapiens
gtctgagtatcaggggtctgggctctcttcctgcatgtcgtttaggggcgagtggtgagctgctcctcgaagtaatgaacgggtgcccctcgcgttggtgcctcccacttttcctcctctctcctttggcgtggtgactgaatgggggtgggtccatgagttggactcagttgctgacgacagttgagggtgatacccgcagacagaggctgtcgccccctaggaatggacatggcaaaacacgatggcgacaacagaggacagacagcggggtcaggcaggaaaacggtcataaaagtatccaagtcaggaaaagggaaagctgggtaaggctgcaagccctcggacaagggcggcccatgcaggccttccggtgcagttccgggggctgcgtattctcttccgggtgaggtcgcggctgggaggggaaaagctgggacgaggtaaggggcctgggctcattggttccgatg

SEQ ID NO: 484748 - DNA, 216 bp, Homo sapiens
ctgtatatatatctgggtatcaatatccttatccaataagtatgatttctaagtattatctcccattctatgagatgtctttttacattcttttatttatttttccttttggaaacacagtctgtgctcggtggtccaggtgtaattgcagaagtaccttctcatgtcccttgaacctctccatggcgagggattaaattagaatctccagatgga

SEQ ID NO: 484749 - DNA, 114 bp, Homo sapiens
ctcggggatagcttatggcagttgatgaagagagaatggatagagtatatcaaatgacaagtaaagaggcagctgcttttggagatgttattttagaagatacaaatgattcaa

SEQ ID NO: 484750 - DNA, 559 bp, Homo sapiens
  misc_feature (268)..(268): n is a, c, g, or t
cttcattaagattatttttcattcagcatttatggaatattcatcaagtgttattgatatgccagtatacctagtgacaagaatatttgggggcactagtaaatactcatgagccaccttttacataataagccaccttttcaagtttttactccaaaaagtatgtgtccatttttcttcatactgtcttaagtgtctacatttttttttcctgataattgtaaacctgttacaaataacaacatagctaaccagctttgacctatantgatttaggagggaatgagaaaagacttgaatactacagtgatggaggccacctgaccccatattttttaaaaaatgaatgagaaatgtgatgctagtggaaaagtttttaatgcctctatcataatttcaataactttatgctctttattttaaaaataatctgggagataaagatatgacatgttttcatactaaagacctaatcaacaatgcaaacaaataatactgtgaatacaggtttcccagaattaaaaagtgatgtttacagctatcttggtagtgaaaaata

SEQ ID NO: 484751 - DNA, 310 bp, Homo sapiens
  misc_feature (283)..(283): n is a, c, g, or t
atgaggtaaggacagaaggagaacttgggctttcttgggtcaggtggtggggcttggagcacttgttggtgggggccaaaggtcaggtctggaactgcatgttattatgccaaaaccatcagagtgctctttagcttcaggcttcatgaatggctttaaactactcaggtagagcattttgacgtaggctataaaagtaacgttcatttttttctataggtcagcatttaacctagggagggcatatactatgggcggggacggactatgagccaggataaanaaattaccctcttccccaggccaggtc

SEQ ID NO: 484752 - DNA, 113 bp, Homo sapiens
ctccttagagcactctctaatcagatgtcctgagtcgtcccaattcttagaccttttatacctgtttttctccttctcttattccatttagtttattcaattcatacaaaact

SEQ ID NO: 484753 - DNA, 668 bp, Homo sapiens
  misc_feature (482)..(482): n is a, c, g, or t
  misc_feature (543)..(543): n is a, c, g, or t
  misc_feature (551)..(551): n is a, c, g, or t
  misc_feature (574)..(574): n is a, c, g, or t
  misc_feature (588)..(588): n is a, c, g, or t
  misc_feature (668)..(668): n is a, c, g, or t
cagaactttacaaatactgtgttttttacaaattgaaggtttgtggtaaccctgaatcaaacaaatctatcagcaacaatttttccaacagcatatgcttagttcatgtttctgtgtcacattttggtaattcttggaatatttcaaacaattattatatctgttatgttgatctgcaatcagtgatctttgatgttactattgtagttgttttggagttccacaaattgcactaatataagatggcaaatttaatccataaattttgtcagttctgactcctgccacaacaggcagttccctcatctcctccttttctcaggcctccctcttccctgagacacagtaatactgaaattaggccaattaataaccctaaaatggcctctaatgttcaatgaaagaaagagttgtacgtatcttaccttagatcaaaagctagaaatgattaagcttagtgagaaagccatgttgaaagctgngatagaccataagctagaccttttgtgccaaacagttaagttgtgaatgcacggtacgttnttaaaganaattacaagtgccactccagtanacacatacgggacnaatacatagccttagttgctgatgtgaagaaaggtttagtagtctagatagacgatcctgctttcattcctgcagagctn

SEQ ID NO: 484754 - DNA, 535 bp, Homo sapiens
tatcagctcggtacctgctgagtttcgtatctttttattcataatcaacatcattttgagaccaagctaagcttgcactgtattcaaacttatgagagtataaaggatctggaggttggggatatgactgacaaggcaaaggctgtggccacctcgatgaccctgttccctgttttattaaatgcggacacactgtggccgcacgatccgtgactggcccgctgggccagtacgtgatgtggcccagggagggggtcgagggggccaaatcagagaaggggactgacagtgggctacactcacatcccactggctgctgttctgaaagcatctgattggctttctgaggtttggctgggtggggactgcgcatttggtcactctgcagattggacttgcccgcgttcctgaagcgctctcgagctgtgctgtaaatagctggtgctaacatcccatggcgctccctcctcacgatgcaaccaccggcctgagggcccgtcctatgaatggatgtggggatggtcgcttagtaatg

SEQ ID NO: 484755 - DNA, 161 bp, Homo sapiens
tcccccggggggccctgggggggccccttttttttttttccgggggttttccccgggggggggtttttttttccggggggttttggggggggccccttttgggggcccttttgggcccccgggggggggatttttttggaaaaaaaccccctttttttcta

SEQ ID NO: 484756 - DNA, 191 bp, Homo sapiens
taaaatatatgagatgcttacttacatctggtgctggtctcagagtaagtaagcatctcatatatttcagccaaataaatgggccagggggaaaaattatatatatatagacaggactagagaaaacctatttttgtaatgatgtttcttggatactgtctagtcacccagaaaaatgtatggatgaattt

SEQ ID NO: 484757 - DNA, 1165 bp, Homo sapiens
  misc_feature (20)..(20): n is a, c, g, or t
  misc_feature (106)..(106): n is a, c, g, or t
  misc_feature (137)..(137): n is a, c, g, or t
  misc_feature (144)..(144): n is a, c, g, or t
  misc_feature (181)..(181): n is a, c, g, or t
  misc_feature (199)..(199): n is a, c, g, or t
  misc_feature (234)..(234): n is a, c, g, or t
  misc_feature (236)..(236): n is a, c, g, or t
  misc_feature (252)..(252): n is a, c, g, or t
  misc_feature (301)..(301): n is a, c, g, or t
  misc_feature (324)..(324): n is a, c, g, or t
  misc_feature (329)..(330): n is a, c, g, or t
  misc_feature (336)..(336): n is a, c, g, or t
  misc_feature (346)..(346): n is a, c, g, or t
  misc_feature (350)..(350): n is a, c, g, or t
cggggaaccgcagtagccgnctgctagtggcgctgctagccggccggcgcaggctgccgagcgggtgagcgcgcaggccaggccaaagccctggtacccgcgcggngcgggcctcagtctgcggccatgggggcgtncgcgcgnctgctgcgagcggtgatcatgggggccccgggctcgngcaagggcaccgtgtcgncgcgcatcactacacacttcgagctgaagcacctntncagcggggacctgctncgggacaacatgctgcggggcacagaaattggcgtgttagccaaggctntcattgaccaagggaaactcatnccagnngatgtnatgactcggntggnccttcatgagctgaaaaattctcacccagtatagctggctgtgggatggttttccaagggacactttccacaggcagaagccctagataggagcttatcagatcgaccacagctgattaacccgtgaatttgtgcccttttgagggtcatttaaaccaacgccttactgcctcgctggatttcatcccgccagttggccgagtctataccattgaatttccaaccctcccaaaaacttgtgggcatttgattgacctgactggggagccctcttcattcagcgtgaggattgattaaccagagacggttatcaagagactaaagggcttatgaagaccaaaacaaaggccggtcctggaactattaccatgaaaaaaagggggttgctgggacaacattctccgggaaccagaaaccaacaacgattttgggcctagtggtatatgcctttccttacaaaccttaaatgttccaacaaaagaaggccagaatggcttccagttacctcccagtgagggagcacactggttgtgtacctcattactagtttaacgcatggcgcaaaaccccctccctaaatacctttgccattttacgaacgcctcgcttttttcccttaagaccatcctagctactgtatattgcaactccctctttgcgccacactatcattatttaacttctcactttccctacccgcgactttactttctgcgatacacaacaggattgttcgcacattactctccggatactaaaatcacactcccttgacaccactctaatgtcgtcatatctgccactattccttctca

SEQ ID NO: 484758 - DNA, 821 bp, Homo sapiens
  misc_feature (30)..(30): n is a, c, g, or t
  misc_feature (65)..(65): n is a, c, g, or t
  misc_feature (72)..(72): n is a, c, g, or t
  misc_feature (99)..(99): n is a, c, g, or t
  misc_feature (169)..(169): n is a, c, g, or t
  misc_feature (299)..(299): n is a, c, g, or t
  misc_feature (411)..(411): n is a, c, g, or t
  misc_feature (443)..(443): n is a, c, g, or t
  misc_feature (586)..(586): n is a, c, g, or t
  misc_feature (590)..(590): n is a, c, g, or t
  misc_feature (601)..(601): n is a, c, g, or t
  misc_feature (621)..(621): n is a, c, g, or t
  misc_feature (625)..(625): n is a, c, g, or t
  misc_feature (635)..(635): n is a, c, g, or t
  misc_feature (644)..(644): n is a, c, g, or t
  misc_feature (655)..(655): n is a, c, g, or t
  misc_feature (664)..(664): n is a, c, g, or t
  misc_feature (666)..(666): n is a, c, g, or t
  misc_feature (693)..(693): n is a, c, g, or t
  misc_feature (700)..(700): n is a, c, g, or t
  misc_feature (703)..(703): n is a, c, g, or t
  misc_feature (705)..(705): n is a, c, g, or t
  misc_feature (707)..(707): n is a, c, g, or t
  misc_feature (710)..(710): n is a, c, g, or t
  misc_feature (729)..(729): n is a, c, g, or t
  misc_feature (732)..(732): n is a, c, g, or t
  misc_feature (745)..(745): n is a, c, g, or t
  misc_feature (749)..(749): n is a, c, g, or t
  misc_feature (761)..(761): n is a, c, g, or t
  misc_feature (763)..(763): n is a, c, g, or t
  misc_feature (771)..(771): n is a, c, g, or t
  misc_feature (774)..(774): n is a, c, g, or t
agttcagggtaactgcatgaaaaaacattncaggaggaatttacaattaccagcttaaagaactngcgcacnaacataaccaatttatgaaagtgaatncattaaaaggtatagaacctcttgtggggcatgaaggcaagggacaaagctacaacttggcctgtgcctntggaagcggaggcaggaggaccatctgagcacaggagcttgaaaccagcttgggcaacaaagagaatccgtttaaacaaaaaaaaaattttagccaggggtgcggtaagcggtagtcccagcgacaaggngggaggattgcttaggcctgggtgattaaggatgcaatgagctgtaattttccaaccacattccagcttgggcaataaagcaagattgttttaaaaaaaaaaaaaaaaaccnaaaaaaactaaagaatgtaatgaatgaaaacnaatgtgcctttcctagaaaaagtggcaaaaaatatttttgggatctcctgaccatgtcccctgaaaaataaggaaagcttgtttttacacccagtttggaggcaagtaagttttcagaatccaaactgaggggagcaactggncctngggactaaaancctctgggaatataaccttntttngggctgaaangctgccgcnagccctaaaanagccctttntnctaaaaacctcaggggagggtcctggntccaatnctnancngcnaaaaatgaggctgattctncangaatttccaaccnagtnctttggggtttncncacccccnctntgggcgggggaaccgggtcccggccttcgcagattccaggttctggc

SEQ ID NO: 484759 - DNA, 2275 bp, Homo sapiens
  misc_feature (11)..(14): n is a, c, g, or t
  misc_feature (47)..(48): n is a, c, g, or t
  misc_feature (66)..(67): n is a, c, g, or t
  misc_feature (69)..(69): n is a, c, g, or t
  misc_feature (193)..(193): n is a, c, g, or t
  misc_feature (1478)..(1488): n is a, c, g, or t
  misc_feature (1490)..(1494): n is a, c, g, or t
  misc_feature (1497)..(1503): n is a, c, g, or t
  misc_feature (1505)..(1507): n is a, c, g, or t
  misc_feature (1509)..(1509): n is a, c, g, or t
  misc_feature (1512)..(1513): n is a, c, g, or t
  misc_feature (1516)..(1523): n is a, c, g, or t
  misc_feature (1525)..(1527): n is a, c, g, or t
  misc_feature (1529)..(1537): n is a, c, g, or t
  misc_feature (1539)..(1539): n is a, c, g, or t
  misc_feature (1541)..(1551): n is a, c, g, or t
  misc_feature (1554)..(1554): n is a, c, g, or t
  misc_feature (1556)..(1558): n is a, c, g, or t
  misc_feature (1560)..(1560): n is a, c, g, or t
  misc_feature (1564)..(1567): n is a, c, g, or t
  misc_feature (1569)..(1569): n is a, c, g, or t
  misc_feature (1572)..(1576): n is a, c, g, or t
  misc_feature (1578)..(1579): n is a, c, g, or t
  misc_feature (1581)..(1588): n is a, c, g, or t
  misc_feature (1590)..(1591): n is a, c, g, or t
  misc_feature (1593)..(1595): n is a, c, g, or t
  misc_feature (1598)..(1598): n is a, c, g, or t
  misc_feature (1600)..(1600): n is a, c, g, or t
  misc_feature (1602)..(1609): n is a, c, g, or t
  misc_feature (1612)..(1612): n is a, c, g, or t
  misc_feature (1614)..(1615): n is a, c, g, or t
  misc_feature (1618)..(1624): n is a, c, g, or t
  misc_feature (1626)..(1627): n is a, c, g, or t
  misc_feature (1629)..(1629): n is a, c, g, or t
  misc_feature (1632)..(1632): n is a, c, g, or t
  misc_feature (1635)..(1636): n is a, c, g, or t
  misc_feature (1638)..(1639): n is a, c, g, or t
  misc_feature (1642)..(1642): n is a, c, g, or t
  misc_feature (1644)..(1649): n is a, c, g, or t
  misc_feature (1653)..(1653): n is a, c, g, or t
  misc_feature (1655)..(1658): n is a, c, g, or t
  misc_feature (1688)..(1688): n is a, c, g, or t
  misc_feature (2055)..(2055): n is a, c, g, or t
  misc_feature (2087)..(2087): n is a, c, g, or t
  misc_feature (2168)..(2168): n is a, c, g, or t
  misc_feature (2206)..(2206): n is a, c, g, or t
  misc_feature (2217)..(2217): n is a, c, g, or t
  misc_feature (2231)..(2231): n is a, c, g, or t
  misc_feature (2258)..(2258): n is a, c, g, or t
gattcgggagnnnnttctcttttcccccctggactgtgaagctggannccgaaccgcagaggtggnnanagttctcctttctttttgacacagcgcactgcagtgcttccaaggaacaacttctgccttggtgtggaagacaccgtggacaagctcaagatgctggaaggccgcaagaccagcatccgcaagncagtgcaggtggcctatgaccgtgcgatgatccacctgagcagagtccgggggccccactccttcgtcacttccagctacctgtaagggcagggctggcctgcatccgcttgccctgcctccatcccgcaggggacagagaagcctcttctgcccctgccagatgtatggccggcagcttccccctctcatggtaggccagggactgggctttctccccactaagggcaagggcccagttttgaccaatcgcatggttctcctggcaggcctgctgtgtgccaaaaactcccacccaagtcctcaggggatatttcactgaagaaccagttagaagtagaaacagctgtggggcttgggcccagcttaggagattgcccagatggcaagaggtcctgggctccttcttgaggggctgcctggcccgctccatcctactcccactaactacacctcagggcgggtgaggttccgacactgatcccagagatgccgtggatacgccagggtcccagggggaatctccccaagctcacactctctcccgcttatcgcctattctcacacctcttctcggtcccatcttctgcacccattgcccagtcttgctttctctttcccatattccttttctttttctcttgtgccaaactgacagaaaccgtcaccacactggtctttttctttaatgtctcattccccttgaaggcagctgctatgccaggtggtgtctctgccaagctcctcaggcccagacagaagccagccacaacctatgaaccccttcccagaaaccactccaccacagacttcctttagctgtgacacaacttcccagctctgcgagtgtgccccctggatcaaggcggtcccttcttgtttttttctttgctgccacgaggtggtccaagcttcagggtgggctcctatcaggctgggtgtgcgagtgtccatctgtccacatggatgtcgagggtggtttgtgtggagctgtgctcgtcagctgggtctgccctcttcccccttttctccttctttctcctcctcatggactttttctgcaattgcagtcttaagcttcactctccaccacctggatggcatggcgcctgccaccaaacatcttcctggcctgcgctctgccctgccctgcctagcctctgctactcccacttcccaactccagggaatgcattacttttatttcaaaccctctgcctccttccttctttctcttcaaccccctccccaccttcaccttctcaaaaatggaaggaaaaaaaaannnnnnnnnnngnnnnntgnnnnnnnannnancannacnnnnnnnngnnncnnnnnnnnntntnnnnnnnnnnnttntnnncncctnnnnancannnnngnngnnnnnnnngnngnnngcngntnnnnnnnntgntnnttnnnnnnntnntnttnttnntnnttntnnnnnnttcntnnnngagttttggacaaaacagtcactggggagntcactgccatttttacacacttgactttttaaaaatacaaccaaccaaccaccacaacttcttatacatttgggacatgagccagagtttaaaagggaaccaacaaaacactataacttaaaaggatggggttttggattttgtataataataaaaacaatacagcatatggctagggaaggacatggtgtatataattgtaaaatactgttctaaattattcaggcctatagtttccattactggagtcctccattgtgtggccacacagtgtcgttgatttaaaggagccagtgcttcccctctccccaggtagttgggtcagctgtggactctgtggacctttgtctaaacctgtgttgtaagntcttggggacttcctctctttctatgtctatnctcttccccccaacactttctcttcttagtctctctctttatttttcaatctctgaatattttagtttcctctctgagtcncattttttaaaatggctcttttagaacggggaaacggntcagatcctgntgtggcacgggggnctatggtgtctctggtcgcgtctggcngtggaagaacatggatg

SEQ ID NO: 484760 - DNA, 653 bp, Homo sapiens
  misc_feature (20)..(20): n is a, c, g, or t
  misc_feature (106)..(106): n is a, c, g, or t
  misc_feature (137)..(137): n is a, c, g, or t
  misc_feature (144)..(144): n is a, c, g, or t
  misc_feature (181)..(181): n is a, c, g, or t
  misc_feature (199)..(199): n is a, c, g, or t
  misc_feature (234)..(234): n is a, c, g, or t
  misc_feature (236)..(236): n is a, c, g, or t
  misc_feature (252)..(252): n is a, c, g, or t
  misc_feature (301)..(301): n is a, c, g, or t
  misc_feature (324)..(324): n is a, c, g, or t
  misc_feature (329)..(330): n is a, c, g, or t
  misc_feature (336)..(336): n is a, c, g, or t
  misc_feature (346)..(346): n is a, c, g, or t
  misc_feature (350)..(350): n is a, c, g, or t
cggggaaccgcagtagccgnctgctagtggcgctgctagccggccggcgcaggctgccgagcgggtgagcgcgcaggccaggccaaagccctggtacccgcgcggngcgggcctcagtctgcggccatgggggcgtncgcgcgnctgctgcgagcggtgatcatgggggccccgggctcgngcaagggcaccgtgtcgncgcgcatcactacacacttcgagctgaagcacctntncagcggggacctgctncgggacaacatgctgcggggcacagaaattggcgtgttagccaaggctntcattgaccaagggaaactcatnccagnngatgtnatgactcggntggnccttggtgggcggaaggcggaagccctagatagagcttatcagatcgacacagggattaacctggatggtgggctttgagggcgttaaacaacggcttactgctcgctggattcatgccgtcgggggcgagcgtatacatgggattaactctcccagactggggcagtgatgacctgactgggaagccgttgattggcgttgagatgataaacccgagcggtgtcagggactgagggctataagacggacggaggcgtcctgggatgtggggggaggggtcttggaacgttgtgcgacggggg

SEQ ID NO: 484761 - DNA, 664 bp, Homo sapiens
  misc_feature (649)..(649): n is a, c, g, or t
aagcttgcggccgccaacaggcaagaactgggcctgaggtggccaggctgaggcaagagcttggaaaaagcaatggtaccagcgcggtctttaaccccagcgtcttgcactaccaacatgctctgttcatggcgaggcttatttcaggacgatttgggcctgcagaagccattatcaggaggcagtagcctggcctatagaggctgcgaaaatttaaattcttgacctgcagaggccatgatcacgtaacatctaggcctggagggtccactgtcaggcagcggcgcatcctgaaggggcctacaacaggcaggatctcggcctgtggagaggcatcccctgatcctaaagaggccagtgtgagtgatcacatggcccacagaagcaagtgtcaggccagatcgtcgcttggagagtctgagaaaggcatgagatggacctaaacagaccattgcgattcagcacctgggcctatagaggccagtgtgaggcaggagcttgacctggagaggctggaagacgtatgagcttgtcctaaactgtccagtgtgaaggaagaagttggtctgtcaaggccgtcgggtaacaggctgtaacgtggactgggaaagcaactgtgaggcaaggggctgggcctcgggagggctgnggaaggcaagacctt

SEQ ID NO: 484762 - DNA, 121 bp, Homo sapiens
  misc_feature (39)..(39): n is a, c, g, or t
  misc_feature (70)..(70): n is a, c, g, or t
  misc_feature (88)..(88): n is a, c, g, or t
  misc_feature (90)..(90): n is a, c, g, or t
gcttggttccgcgttccctgcacaaaatgcccggcgaanaccaagaaaccgtccctgctacagagcaggngttgccgcagccccaggntnagacagggtctggaacagaattttgacagtt

SEQ ID NO: 484763 - DNA, 926 bp, Homo sapiens
  misc_feature (1)..(1): n is a, c, g, or t
  misc_feature (198)..(198): n is a, c, g, or t
  misc_feature (263)..(265): n is a, c, g, or t
  misc_feature (330)..(330): n is a, c, g, or t
  misc_feature (385)..(385): n is a, c, g, or t
  misc_feature (397)..(397): n is a, c, g, or t
  misc_feature (736)..(736): n is a, c, g, or t
ncttggtggagactcacacaggtgtcggtttggaggagctcacgctgcacgcccaactgttatgactggattggaacttcttcccggctgtggcctcaccttcagaggagttgcattcagctcatctcgcttccatgtgaggtgggaatgcggcacggcctccatctctgctggcggcccccgtcttgctgcgcgttnccccgtctcggttggttaagtggtaaaacacaagaacaaaaattgcctgattaaagacgccgggnnngtcggctgccgccccctccgtcctctcctcctcttgctcgctactggccttcttgccttggctgnctgtcgggtgggccccccgcccccctctctatggccgctcgctccgcctccggtngagcgtccgctngtcgggcgtcgttttggcgcgtagtatgcaacccccccccctcccgcgctcttcgctctcccgcctcatgcgcctcccggtcgccggcagccgtgtcttcccccgcgcccacccctctctcactcacctgccttccccgcaccctcccctctctcccgcctcttacgccccacccgccccccacgcctgcggcgctctctgtgctggtcggctgtgccctgccccacgcggcgcttgccgttggcgctcgccctccacgcccggctctagagtctcccgcgcccgccccctcgcctccgcggccccgtctctatctgccaccgccgccgcccgcctccntccggccacggctccgcggcgccctacgcgcgttccctccgccccatcgctccgccccgcgccgctgcggacgcctgcagcgctcgccgctctcccccgccctcgcccccacccgtcgtccccacccacccgcctggcgcccacgccggccgccccccgccccaacccccgacccacccgcaacacaaga

SEQ ID NO: 484764 - DNA, 221 bp, Homo sapiens
tgggcagcattttccagcaaaatgtaccccattttttgcctttttttcgtaaagttttataccaaaaaaaaaaaagcatgtctttcctttaaaaactcttgatccaaaatttgggtgggaaaaaaaaaaatgggttatcaagggttattttaaattttttccacccttaaaactggcccttaataaaaataagtaataataaaaaaatttttacccttcca

SEQ ID NO: 484765 - DNA, 181 bp, Homo sapiens
ctgtggctgagcccagcctgcgctacatacgtgagaccccactctctaccacaatatgcaaaaattagctgggtgtaggtgtctcatgtctgtagtctcagctacttaggatgctgaagtgggaggatggcttgagctggggaggtcagggctgtaagttatctgagggtctcttggccag

SEQ ID NO: 484766 - DNA, 386 bp, Homo sapiens
ggtcggtacccatcttgcgtccatcagaggtccagaggcctaagcgggaaaatggtttcatgggccaggcccaggcccagctgctctgtgcagccttgggattcagtgccctgcctcccagctgctctagctccagccatggctaaaaggggccgtggtacagctccggctgttgcttcagagagtgcaagccccaagccttggcagctgccacatggtattgggcctgtgggtatgcagaagatgagagttgaggcttggcagcaaccacctagatttcagaggatgtatggaaacacctggatgttcaggcagaggtctgcggcaggggcgaagccctcatggaaaacttctactagggcaatgctgatggtagcaagactgcg

SEQ ID NO: 484767 - DNA, 527 bp, Homo sapiens
tgcccctgagcacatccaagcagacaggaaaagaggagtcagacatgggccagtcacatccgtgagctgctcctggctgataaccacgatggagcccgtgtattgtcctgccatctggcactgtcactgagtgtggcacgaggcaccgtcgctgcttgatctctacatacacagtttcttaaggttaggacagttcttggcttccgttgtagacagggtgaggagaactggggcactagagaggtgcatgtcatctgcctggtgctcaatcagcgtatgcaaggtgatggagtcccagagttgtcaaaccaaagggggattacgatccagggagctggaggttcccacgtcacctgatgctagtagatgccatactgggccagccattagactccagacgcgtgttaccgaccaccggtttaccaccagcacacgacgatgggacttatgcaaagttgaaacgggaaacgaggaaggtcagagggccgtgggccgagccccgagggccagggtcccctatggtcgaa

SEQ ID NO: 484768 - DNA, 437 bp, Homo sapiens
ttggggctcattcaggttggggcttcagtggctaaaaagggggtttggttttggttttggtttggtttttttcctatccaggcggcctgggacggggaaaaaaaatttaggtccatgggacaaatatcaaataatagtcacaaattattatctccaaaatcctggcccccaaatacaaacaaagatagcatgaatacttaataatcagagtacttaatcaaaagcaagttaggactggacagcttgggttggggcagacggtcccggcagagtagtctgggacagatccctcatttaacctatggaagttagaggttcggaacccaaaaaaaaaaagggtggtcttaacccccataaaggggagctaccctacaaagaattatggccaaatccaggagtaatcggggactcggatccagaatgtacctggttaccac

SEQ ID NO: 484769 - DNA, 410 bp, Homo sapiens
gactatgtcgctccactgatactccagatccgacactagtaccgtctgctctcctctggtgacggagcaatggatctgtcatccctgtacgatgacttgaggctcttaaagtcccccgaggtcctgtcacattggacgcgcccactacaacgaagtgccgagtgccctttacgcgcctcgcctgcctccagcactactgccagggtcatcacaaagcagtacaacaacccagctggcctctactcttctgagaatatctccaagttcaagaatgccctggagtcaaagactgctggcagcggggtggaggcgaacagcagacccttagaccatgctcagcctccaagcagccttgtcatcgacaaagaatctgaagtttacaagatgcttcaggagaaacaggagttgaa

SEQ ID NO: 484770 - DNA, 370 bp, Homo sapiens
tgagacggactctcgctctgtcgcccaggctggagtgctggagccttgacctcctgggctcagctcaagtgttcctctcacctcagtctgccaagtagctgggactacaggcatgcaccatcattcccaactaattttttaaaattttttgtagagatgggggtttcatcatgttgccaggctggtctcgaactcttgggctcaagcaatctgcccacctcgtcctcccgaagtacagggttataggcatgagccactgtccccagccaggaattacctttaaaattttaggtgtgataaatatgttgtggttaattttttaaagagttggttttttttttaaacaggttcattctgaaatatttactgg

SEQ ID NO: 484771 - DNA, 673 bp, Homo sapiens
ggacgcgtgggtcaaacagtttaggtctcacaggttaccattgttggggatgtctgagctgttttcagatctaggaatagcacagtgttgtcttgtctttggcagtctcatatggctctgtttctatgcaccaccagcgtgttcattaccacttaacatatatagctacagcatgtggaacaacagagtggtgcaagacactgtagattaacggtcagaggcagaaattgtgcccttagtgttaacaagtgtgccttttgttctgaatgccatgttgtagggcatgcatatttaggcctctttaactcttcgacattctagtcagtaagcacatggcaacccatctctgcaaagcatacatctgtcttaacatatctagttcacaggccttcaatagacaaccatcaaggcatgcactcatcttcaggcactgcaacaaacagataaccatctagcgtcagtgtcacaccaaggacttcctatatttcacaggggttaaccgcatggtccctgtcgtatcttcaacctccagacgtgcatacttcaccatgtacatccctgcgtcatgctcaacactagcaccaagaaatcacctgcattgcgtccacacattaccttccaaacccatccattcacatcacgtgactaatccccagggcctagggtccatcac

SEQ ID NO: 484772 - DNA, 592 bp, Homo sapiens
ttcctctcttggtagctgagtctctccactcagggggaagctcaaaaaaaacagaagcttcaaacaaacaaccaaccaaaaaaaaaaaaaaaactgtgggttcatcagaggtggtagggaagacaaaaacatgggaggagcagctgggattacgggcttgacccacaacatccagccccttttctcattattctttacccttttcttttccttattttctctttatcccatttttctttctcccttccctttctttcttttcgtttcctaacttatttaagggagtagatggaatttcaaaggtcttatatgtgtgtcaggtttttggttttccaacaaaataatttcttaaaaaccaaccatttgaaacgtaattggtaaccactgggccccttgttctccacctccacaccttaaaaagccccaaatccagatgtgtccattaaaatcagtccaaatcttctttaccaagccactagaatgtcatattaatttcacagcagaaatagggaagcccatgccggaagctgaaaacctgcaacaacaaaaaagcttctaaatactgcaaaaaaagaatactaacaaaaaagcg

SEQ ID NO: 484773 - DNA, 113 bp, Homo sapiens
ctcatggtgtggctgtcacatgtggctccagtgtcctcatccccgcatgcatactcgtagagtgtccactggtgcccagtggtgagggcacctcgaagaagggcctctgggcc

SEQ ID NO: 484774 - DNA, 1035 bp, Homo sapiens
cccacgcgtccggatggacgaggagacgcatcatctccgctgctcgccgctcctacgtctccgtcagggtgagatgatggtggggggctcgtggcgtcctggtcgcgcctgtcttggtgttcctggcgacccgccgtcatcgccttgggtccgagtgccccctctcactcgccgcacctctgggttggtatttgtccctgtgtctggggcactcgaatgctggcttcaaggagacccgggccagtgagcgggcagagatgatggagctcaagtgaccgctttgccatgctacatcgagaaggttcgcttcctggaacaggaaaacaaggcgctggctgctgagctgaaccagcatgcgggccaaggagcccaccaagctggcagacgtctaccaggctgagctgcgagagctgcggctgcggctcgatcaactcaccgccaacagcgcccggctggaggtcgagagggacaatctggcacaggacctggccactgtgaggcagaagctccaggatgaaaccaaactgaggctggacgccgagaacaagctggctgcctatagacaggaagcagatgaagccaccctggcccgtctggatctggagaggacgatggagtcgctggaggaggagatccggttcttgacggaaagatccacgaggcaggagggtcgggaactccaggacgcagctgggcccgacagcaaggtccatgtggagacttgacggtggccaagcaagacctcacgcaggccctggaagagaaaatccgggacgcaaggatgaaggcatggcagaccaagccaacatgcctgggaaggccgcaccagtggggcacaggcaccaaggtgatggcagaaccctgacagaaaggagtgcggggcacggaaacagacgacagacacagcacgggcaagcgacacaaaccaaaaaaaaccggggccacatgccggccctagaaccggcgaacgggggaggattcgtagacgagcgagaagaaacccaggcgacaacgaaaagcacaacagagcaagcc

SEQ ID NO: 484775 - DNA, 276 bp, Homo sapiens
aaagttgagaacaataatgaacaattattgtatgaacaattgttagaaacagctaatcacaaacaacctgcgggcacaatgacctcattccacacgtagcacccttcagcaggaccctataaaactttcctccagcccttacctctttgcaggtagccccttctctgctgagctgcccactgcaacatattttcacaatttctctaataaatctgcccttctttacctacaactatcttggtaaatggctttaccacctgcaaaactgaccctagg

SEQ ID NO: 484776 - DNA, 1427 bp, Homo sapiens
ccacgcgtcgtccgggcctgccatagagagggagcaccagggccatcgatgggcatcagtgagggcttgtgacacttcctagctcaccgctagaagcctagagagtgtggatgcgatagagcgagtctgagcccgagcattcgctgcagtcccacaggctggtccatcaggcacccacgtgcacgtgacagggacacgtgaggccacaagcagcgcgaagagaacccagagagaacccacacgcacgagagctacaatgagacagaagaggacatgaaacaccgagagaccagaccatgcaacagcaaaccgaacaacaaagacagcatacaggcaccaagacgtggcgaaacacaccaggaacaagaggagcaccgagagacatagagaacacaaaacgaacgcacaaaacatacacgaaaagaaagatgcaagacaaggaagagaccaccactagcagacacgacaaccgacacgaacacacacacagagccacacacacgaaacgcccacaggaggtagaacaccacacaaagcaaaacaaacaccaatggataacacagggactacgcaaaacaaaggacccatgaacaacagacacaccaacacacgaacacaaatggcgaccagaggaactaaggcaaaaccacagagcacgaaagccacgcaacagtcacacaggaaaaagaccacaccatagcaaccgccaaacactacaataacacaccgacacgaggaggagacagcacaggacaaagcaaggacaagagagacagcacaactacaatcacgagatgagcaacaacaccccagaagacgagacgaaaagccaaacagcagaagcagcaacaaaagacaggaaaagcacccataccaagagcaaaaacccaaacgaacaacgcatagagcgaaacgaccacaggcgaacaaaccaacgagaacagacaacacaagcaagccacacaaagcgagagctgacgtggataacaacacgcgaacaataagcaaacaaccaagcggaaaccaaacagacaacagacagaacacaacaccaaacacgacaacacaccaccagaaaaaaaacaacaaaaacgacaaacaaagacaacaacacgacaaaccacaaacaaaagagcaagcaagagtacgacgaggcaacaccacgaagaagcaagaagacagacacgacacaacaacgacacaaagaacaacagacacacgccgacagataagcatcaaaacgcagcaagaagatatggaagggacacacaccacaaacacaaaaagacagaggaaacaaacaagacataacaaaaatcaaacaaaaaagcacaaccacgcaaaatacacagaaacaagaaagaacacgaaacagccaggacgaaagacagcaaacgcaaacaacgaacaagaagagagaagcaaca

SEQ ID NO: 484777 - DNA, 768 bp, Homo sapiens
gggatcttatctttttagcctctctgggcttcagagctctcatctacattaagtttttcattcattctgtcattcaataaatatttatggaatgcttagcatgtgccactagtctagcaactgtggatactgaagtacgcaaggcagaatagtacttgctatctgaagcacacggtttaattggggtggggaaagagttggtggggagggtctcattaaacatataagccaaataaaccaaaattacaggtagagttaaggccatggcagagcaactgaaggtgatgaattcagagaggccaggaagggaccctctgaagcgatcatatctgaactgagtttttgagtcaactaaatgagatagtgtctgtgaatgtcttagaatcatgtctggcatgtaataagtgtcataaatgataagtattactatttataaaaacttgtcaaaaaatgaaccaaaaatacaagcagcttgtctttcacatattactatagttgcaacatgtatatgtctttgtatagtgagaaagcatattgtatgtatattatatttcatttgagtaagttattttttaactgaaggaatcttctattttggatctgaaatagtaactgtccttttaagtagtctcatttatccttgagagtgattaattacccacagcatctgtttaacattgtacttacagagaaatacaggcgaatgccacaatggttgttcctaagtagattcaatgttttctaggacttcatcctgtagttcttact

SEQ ID NO: 484778 - DNA, 207 bp, Homo sapiens
tagtggaccaagcgcggggcacatgcctgtatagcagcactttggcaggctgaggcgggcagatcacgaggtcaggagttcgagaccagcctgaccaacatagattctggccagatgcagtggcccatgcctgtaatcccagtactgtgggaggccaaggtaggcggatcgcttgagtccacatttttgcgcttgagtccacatttt

SEQ ID NO: 484779 - DNA, 575 bp, Homo sapiens
gtgacgtggaacggaaaagggaggagccaaaagaacaaagatccaagacaatatgcacttcatattgtaatacaatcaccagactagggccatcttatttccacatgcccagaccaggaaggcacaggtgccgtggggaatccagagggattcctactacaagtatttaacaggctgagacagctgataacaacaagggaaacagagaagccagagaggagcctgctgggtgtgacctactgactccaatgagccactctcagtttgccttctctgtgtatttgggtcttccaaccagttgccctcacagagggcttaggaaacactgcagctgctgcccggaactgcttatgacgcctgcaagcctggtgggtgtcaagggatggcagaccagagtggcacagaactgtcatcgtatgggcccttgcatgttccctatgtttggaatctggggtaggctcttggaaagcctacattctttttattgagattttcttgagatggagtttctctcttgttgcccaggctggagtgcaatggcacgatctcgactcattgccatttccacttctggg

SEQ ID NO: 484780 - DNA, 210 bp, Homo sapiens
  misc_feature (23)..(23): n is a, c, g, or t
  misc_feature (154)..(154): n is a, c, g, or t
aagatgagggagcctactctatnagttctggaaggatagggaagatgaaagccacccccatggcacccaagcaagcaatgaagcagtatatgcaaaagctaatcagctttgaacaccatgagattttcagctaccctgaaatacatttctttgngtccaaggcaaagaagcaccaaggcaggcccaacaacagtagctatgatgatgacc

SEQ ID NO: 484781 - DNA, 173 bp, Homo sapiens
  misc_feature (79)..(79): n is a, c, g, or t
cgggtgcgttgccgagcgcgcgcacaaatgggctgcatgatgccttgcgtgcggatcgactcgtgccagctcgcccaangcgccctcgtccatgcgagtgcgcggctggtacttgccggctcgcatcttcgaaacaggcaaggtggacggcagaccctcgggcttggccggag

SEQ ID NO: 484782 - DNA, 336 bp, Homo sapiens
  misc_feature (315)..(315): n is a, c, g, or t
  misc_feature (328)..(328): n is a, c, g, or t
cacgaggggtcgtcaccgtgaccccctacgaggacccggccgaggcgatccgcatcgccaacgactccgactacggtctggccgcgatgatcaccggctccgactctctgaaggcggtcgagatcgcccgtcagctacgcacgggcaacgtctggatcaatgcgggcggcaacatcggcaacgcgccgttcggcggcttcaagctgtccggcatcggccgcgagggcggcgtctggggcatgcacgagttcaccgaggtgcagcacatcgtctggcgcagctgaggcgacggcccctcgccgcgacgcggccgtnggccgcgacgatnactccgcg

SEQ ID NO: 484783 - DNA, 763 bp, Homo sapiens
aacggagatgtacaggcgttcaccgtgtttatttcattcacgggcctgggcctttcgttttacattacattgtcctcgtctgtacaatattgacctggcattctcaagaaccagctaggaaagcctgcagaggcgtgtagaacacgaagtcaacagtaggagtgggccaggatggctcgctgttgtcctccccgaatcctcaacggagatatcctaggctagaactatagtggtaggccaaactagaggagcatcacgcagtaacttggcagctatacagctagtaggagacacctaggcgactagaccatactatagacgagctacagcgcatatagctagtgcccaacgtaggagcaacgacatataaagaggactcatattgcacgtatagctaacagcaacgggagcccagacatagctactagagtagccataggaaagaggcaggatgagcagctcacgccttcaggtggagacactttatctggattccccagctgtcatccatttgctatctccaactttcctgccaccttcatccttgcctcccttcctgcagattgtggacagtagttcctcagcctgcaccctggattccttcttccccttcctagctccatgggactcgccccaagactgtggcttcaaggaccaccagccccttactcttcaagccctgactgtggagtcaggtagatgctctgatcctccagtattctctctggcaatgtaccacggcttctccttctggagctgctca

SEQ ID NO: 484784 - DNA, 1061 bp, Homo sapiens
ggctgggcaaggtgacacgtgcctgtaagtgtcagctactggggaggctgaggcaggaggatgcttgagtcaaggagttcaaaaccagcccaggcagcatacgtaaggacccacaatcatcaaaacaaacaagaaagaaacagaaagaacaaaaaagaacaaattggtgctgcggcaccgcgcctgggcgcactcggagaaaaagcttgttacaaccacacaggcggttgggcgccgcgcggagcgcccacagaaagtgtaacggcgaacccatgggccaataacggggcgtccccacaaagagagaagacccgtggaccgcagacaaaacggtgggcttgggagcttaacacacaataaaaaaacgcgcccagggggaaaaccgggacgtgtctaagaacaaataccaaagaggggagaactcacggaggaggaaaaaaaacggggagactatataacagaagaggagagtacgcaaaggacgagactccagaatagtcaaaaatattcccgcccgggccatggggagaaacaaacaaaaatcaacaaaaccacagagtcagcgaagcacaacacaagagtagacggaaagatgcacaacgaacaagacaagagagaacaaggagacgtaaaagacgtgagaccgaagacagcggaaggacagtcatacagcaaccagatgagaaagacagaagacggcagccaaagaaaacaagagccaccgacgagaacgcaaacagcagagagacgagacacaccgaggaacacaccagacgaaacgcgcaggacagcctgcagagcaaccacacacgataacctcacctagacataagaccagacaggacaaacacaagagaacggaagaagcacgaacaggagcaagcagcacaggacactaccgcacagacgaacagaagagtacaaggaagcagagcagcacgagcgagcagaaacagaaccgacgacgaagacagcaaactagacaaaacgaaggacaacagaagctacacgaaaaaaagagaaaacccagtagggagaacgagcagaagaagaacaagaga

SEQ ID NO: 484785 - DNA, 355 bp, Homo sapiens
ctataatcccagcctttgggaggccaaggcagaacggattgcttgacgcccaggagttcgagaccagcctgggcaacagggcaaaaacctgtctctatcaaaagcacaaaataagctgggcattatagtgcacacctgaaagtcacgagctactcacggaggctgacgatgggaggatggttatgagcccggagaggcagcaggctgtattgagcatgagatcataccactgcaacttcagcctgggatgacgagccagacccgtctcaaaaaaaaataaaacataaaaataaataactacataaatagttttctttttggccggttgcggtggctgatgcctgcaatcccatcc

SEQ ID NO: 484786 - DNA, 148 bp, Homo sapiens
ttcttagagcatttatcgccttctattatgtttaaaattttacttatctggtggctggctggctccccttactagagtatatgctgcctttgtgtgtgtgtgcgtgagtgtgtgtgtgtctgggtgtgtgtgtgtgtttctttttttc

SEQ ID NO: 484787 - DNA, 414 bp, Homo sapiens
gaactccctgtcagatggttgggccttttgggatagattctgtgagtcccttctttcctacctttgcttgtagataagactttcccttgaatcccaaacacacacactctctctgctttttaaaaaattagttttggggctggatgtagtggcttacacctgtagtccccaggcactttgggaggccgaggcaggcagatcgcttgaggtcaggagttccagaccagcctggccaacgtggtgaaaccctgtctctactaaaaatacaaaaagtagctgaatgtggtggtgtgcacctgtagtcccggctgctcaggaggctgaggcaggagactggcttgaacccgggtggcagaggttgcagtgagccgaaatcacaccactgtactccagcctggtgacagagccagactc

SEQ ID NO: 484788 - DNA, 743 bp, Homo sapiens
ccgtcttaaaaaaacaaaaaaaaagaacgcccttttactgtcctcatcatcccagtttgaggcagtgctggagttggggaaggccgtcttagaccatagaggttggaagacgctgagagatcatccagcccagcccctttgatgttccagagctagaagaacagatgcccaaacaggagaaaggcacttgcccacggtcatacggcaggttgccacaaaaccaagatggcagcccttcctcagcgtgcctcactgccactcccagaagccagggagcccctataaaacccactatcatgtcttaaagagttatatctgggctccttgaaccagcaatcggccctgggaagccaccaaggtggggacaaagcgcctctggccagaagtcccaggcctttgggattgacagaacagctttgcccgaacacttcgggccccacttcaaggcatgtagggccattttctggcccctgtgaccccttcccgtggcattgggagcgtggggacggggctggcctttgggaaggagcggcaggggcattcaccttccttctgcgtgcttctcccgtgtttcttaccctcaggggcctgggggcttgcccagcttgcctctagtgcccttcggggggatctcagcccatgtgctgacacttcgtgcaatccagagaaagcactaaataaagcaatacggtgtttggccaaaaacaaacaaaaaaaaagggggggccgcctcaagagagtac

SEQ ID NO: 484789 - DNA, 422 bp, Homo sapiens
agggacccctgctggaaaccagacgctaaagcttgcagctgtgagctaggggatcatctgttttccacttgagagcaacccgggcacgcgagaacagcccgatttcggtgcaggggtgcgtcccgaagaacgggggactgttactgcgcggacaggcggacccggcaggaagaccgaggccacgctaggtccgcagccccgaggtgtccacaagagctccgctcgcgcagagggccgatgcgaggcgtgcccgcgggaccggcctgcggacgagtcggccaacgagtggataaagaaaatgtgatatatatgcactatggaatactaagccataagaaggaatgaaataatggcatttgcagcaacctagatggagttggagaccattattctaagtgaagtaactcaagaatggaaaacca

SEQ ID NO: 484790 - DNA, 164 bp, Homo sapiens
  misc_feature (85)..(85): n is a, c, g, or t
tcaactagtgcatttcacaaaagacaatatagctatgcatttatttattcattcaaatagataatattgtcctattctttcaccnctttcatttcattttgagtcttacacttgtattgctccaaattttaaggacaaaatgaaatgaagggtgaaagaaaagg

SEQ ID NO: 484791 - DNA, 460 bp, Homo sapiens
  misc_feature (330)..(330): n is a, c, g, or t
aagtatatcatagcatgattcctaacccactcaaacgcatgagatcttcaacaaatctttatactaaacaatgaatgcccaaacataccattaatcggcctactccatagctgcagcagtgaaaatcagctcaatatcggactacattccctgatatgccctacagcaatagcaaggcccacactcccgatatcagacattactacactccatgtacaatcagtagtagcaggggatatttcatactcatcctgcttctacccctttaatagacaactaacgaaactagttcaaacatataacacatatgcctaggtagctatcaccacncttatttacagcactatgtgcaatcacacaaaatgatatcaaaaaaatcgtagccttctcaacttcaagccaactaggcttgataatagtgacaatcggcatcaaccaaccccaccatctaatcggaaag

SEQ ID NO: 484792 - DNA, 376 bp, Homo sapiens
  misc_feature (6)..(6): n is a, c, g, or t
  misc_feature (25)..(25): n is a, c, g, or t
  misc_feature (51)..(51): n is a, c, g, or t
  misc_feature (115)..(115): n is a, c, g, or t
  misc_feature (117)..(117): n is a, c, g, or t
  misc_feature (189)..(189): n is a, c, g, or t
  misc_feature (336)..(336): n is a, c, g, or t
  misc_feature (351)..(351): n is a, c, g, or t
ttttanacacgtgggtctgtttttngggtccaacctcctcacttgggtcantccctgtcattgaacagccccagaggaaaaccaaactaaaagaacagcaaggcccaggcgtggntntcacgcctgtaatcctagcactttgggaggctgaggcaggtggatcacctgaggtcagaatttcgagactancctggtcaacatggtgaaaccccgtctctactaaaaatacaaaaattagccgggcatcgtggtgtgtgcctgtaatcccagctactccggaggctgaggcaggagaattgctggaacccagttggcagaggctgcagtgagccaagntcacgccactgcacnccaggctgggtgatagagcggactc

SEQ ID NO: 484793 - DNA, 137 bp, Homo sapiens
  misc_feature (89)..(89): n is a, c, g, or t
caggagctcaatacaataaatacacacaataacaattggccttaaaaggtgactgcactatatactaaaaagacttaatagaaggtccngcagattattgagattgttgatgcagtagatgaataatggcaaaaaaa

SEQ ID NO: 484794 - DNA, 540 bp, Homo sapiens
ctgcgctaggatgttggctcacagagtagagggcaactgagaccagagaggaaaaatgggatctggccacttacttattttctaggcttagggagagtacagaaggaggcacaaaagattccaactagtttaactagtccagttccccagagggatatgagacaggaactcaggacagagcctctgtaaggtggtgaattgaaaagctttcactgttgctgttctgtgcaggaaagcacgaggctggagcaacttactcccgtatccagcactactgtactagcccacctgggacactgaataacatcagagaaaaggctacaaacctaaaaaaagggaggctccaatccattcaagccatcaaggtcatcttggagccaggtgtttgcagatagggggctatatttgataaatccggtttataaaaacacagggcagctccaattaaccacatttcagtccaggttaatccatatatacttgttctcttcttggatgtagggcctgtgcggacactgaggtatgaagaaactgggactc

SEQ ID NO: 484795 - DNA, 127 bp, Homo sapiens
taggctacacacataacttgctagtataatgcatttgttcttggaacatgtgtgttttgcacactttggtttccacctgctttttgggagatgtactatatgatgcataaaagatccggagctagct

SEQ ID NO: 484796 - DNA, 148 bp, Homo sapiens
ttagacacctatgcagatcaataatgggagcaggttacaatgttacttcatcccacagtttatttctatacttgagttctataatgtacagaagatagaccttgaattaaatgcgcatagtatatatatcattttcgtggcgagtccg

SEQ ID NO: 484797 - DNA, 112 bp, Homo sapiens
ccccccccccccccgggaaatttgggggaacaggttaatttttcccccgccctagggaccggttttggggtttcccccccccgggttattaaaaaaattaggttttttccca

SEQ ID NO: 484798 - DNA, 250 bp, Homo sapiens
tgcccccccccaattttgggtggggggcccccccccccccgttgtttttcccccccttttgggaccccggggggccggttccccccccccggtttttttcccttggcccgggggggggtttccttttttcccccgggccccgcttttccccttgggccctttttggggccccttttgccccggttttttcccaaacccggggggggcccggtccggttttcccggggtttttttcccccccggggcccga

SEQ ID NO: 484799 - DNA, 253 bp, Homo sapiens
  misc_feature (35)..(35): n is a, c, g, or t
  misc_feature (168)..(168): n is a, c, g, or t
  misc_feature (212)..(212): n is a, c, g, or t
  misc_feature (249)..(249): n is a, c, g, or t
ccaagcttacacctccagtcctggttctggctgtncaccctgggcctaggggacgccagagggacaccccaggctaagggttcttcccaccttcaacatttccctgggccacagcaccaatctcggcccagaatgtacacaacgctagctgcccctttccaccctgtncaccccgaatctgcccctatccccttctctgcttcctgcactgnacacctgctaagtcccagacccctccccccaagcttnccca

SEQ ID NO: 484800 - DNA, 352 bp, Homo sapiens
  misc_feature (20)..(20): n is a, c, g, or t
  misc_feature (54)..(54): n is a, c, g, or t
  misc_feature (65)..(65): n is a, c, g, or t
  misc_feature (283)..(283): n is a, c, g, or t
ccattaaaattccaactggnggtgaaataaaccatatccccacacctaccccancccaattggcnttatgccttttccagaaatggtgtgtcagtagaaagatgtgtgtcccatacccagaactggctactgatattttatcctagggtatagatctttctcatgttataaaatatcaataagaattgatgaattctgcacacattcatcagcatcagaatattcttttaattccatttaaaaatagagttggaatagaatgaagaaaggctactatttgggnaaatacatttctgaacatttggaaagctgttatatgttttccatagtcttttttgttttagattatttg

SEQ ID NO: 484801 - DNA, 305 bp, Homo sapiens
tttgctcttaattcaaaaaattaattctgacacactcaactccactttcctaacacagagcagtttgttgttaactttctttcaattcaaaaatacatataacataaaatttcccatcttaaccatttttaagagcacagtttggccgggctcgatggctcacgcctgtaatcccagcactttgggaggccgaggtaggcggatcatgaggtcaggagatcgagcccctcttggctaacccagtgaaacccaaaataaactaaaaacacaaaaaaaaaattagctgggcgtggtgacacgcaccg

SEQ ID NO: 484802 - DNA, 302 bp, Homo sapiens
tcccggattgactggctgtggctggaatttggttcaaaacatgggtcagggctgggcgtggtggctcatgcctgtaatcccagcactttgggaggccgaggcgggcggatcatctgaggtcaggagttcaagaccagcctgaccaatatggagaaaccctgtctctactaaaaatacaaaattagccaggcatggtggtgcacgcctgtaatcccagctactcgggaggctgaggcaggaaaagcgcttgaacccaggaggcggaggttgccatgagccgagatcgagccattgcactccgg

SEQ ID NO: 484803 - DNA, 243 bp, Homo sapiens
aatttagatttaggtttccttcctgcttcccccccccttcgaataaggaaacgtctttggggccccctttatggaataaataagctgagctgtatttcaagtaaaatagttataaattaccaatgtagcagttattgataaagaaatttagaaaactgaaacgtgcccggagtattggaaataacgtagtacatcccctagcccaatgacccaaagtaggggctcaataaatttatgcttata

SEQ ID NO: 484804 - DNA, 153 bp, Homo sapiens
actacccatgatacagtatagggaaaccacccccatgattcaattatctcccaccaggtccctcccacaacatgtgggaattgtgggagctacaattcaagatgagatttgggtgggaacacagccaaaccatatcacaccctgcctcttaaa

SEQ ID NO: 484805 - DNA, 240 bp, Homo sapiens
tacatttcccaaaaggctttgctccaggagtccaggaaaaacaaggccccttggccccggggcctgctgggacttgtagttgcctaaacagggcccccccctgcacttccggacccccccctggaggccccgttaggcgttggtgtttcctggatgctactagccccaaccccggggctttgcatggggcccaggggaggccttagcttggatttaccctgtaataaaaactcctgtgga

SEQ ID NO: 484806 - DNA, 875 bp, Homo sapiens
  misc_feature (875)..(875): n is a, c, g, or t
aatataataaatgtatagtgttatagaataaaaaaaagatacccggccgcatccgagtttattatgaatagatagacttttcagaatttacaatacgcccacattgttcattccaaagatagcttttgaatagaagcaatcacccacatccttctgtttacaatacatgcaatggaagactttaatttgctcttcttataattaagcttccattacaattaccaattttaagcagacatttgaaaacaccaagccaaatatatccttcttcagtttaattaacatggcctattgtcttacaggaaaaaatacaaaattaagattaattattataaggaactcacctcaacctcaggattatatgactagagatagtgtcagcaaaaataactatacacattgaaaaccatctatggcactataaatcttatattatgtttggcgaatcataatcttaaaacaaggataataccctattctactcttagaagccttgtgttaatcatatgctgcaatctgtacaacagaacatgggatacgtgcatcccaaatccgaataaaagatgtgcgcgaagaaacgtacatttttatttcaaaacctacccacacgaaacaacccctatgtatattattaaagtgtaggctccaccaaccggagcaaaatgtgtaaagaataatatttaagaagctgcaccgaaaaaggttgagttgacaataaatgcatataaaaagggcaagtaaataacccttagcgtgtaagaagggtgggcacactactccaatggagccgcctaaaataataggagaaacaaaaattagatgccccaacacagggatcaaagattgtgttatctccatggtttttaccacagttn

SEQ ID NO: 484807 - DNA, 326 bp, Homo sapiens
ctactactactaaattcgcggccgcgtcgacgacctttctattttgaaataatttcatacttaagaaaagtttgcgcctgtaatcctagcactttgggaggccgaggcatgagcccaggggtttgagaccagcctgggcaacatggcaaaaccctgtctttacctaaaatacaaaaattagctgggcgtggtggtgtgcccttgtagtcccagctacttgggaggctgaggtacgagaattgcttgagcctgggaggccaaggctgcagtgagccgagatctcaccattgcactcctgcctgggtgacagagtaagaccctgtctc

SEQ ID NO: 484808 - DNA, 310 bp, Homo sapiens
ccccccccccccccaaaaaatgggccccgggcaaagccccccccagggttcccccgggggggggggcccccccttttttcccccggcccccagggaggggcccccccaccccccccggggcccccctggggggctggggcccttttaacccaaatggggggacccccttcccccccttttttttttcaaggggggccccgggcccccctggggggggggggttgggccccctgggtttccctttatttttttaccttttttttttttttaggggggggttttataaaggaaaaaacccttttttttttta

SEQ ID NO: 484809 - DNA, 392 bp, Homo sapiens
attttctaattagaaaattaggtctgtcattttgagttaaattttgtgtatggtgtgaggtaggggtccaaattcatcctctttgcacatggatattcatttgcttcagcaccacttgttgaacagactttttttcctattgaagtgtcttgtcactttttttcaaaaatcagtatttcatggatgtttgggtttatttctggactttctatttcattgatctacttgtcacttcttatgccagtacgacactgtctcaattactatagctttgtagtgagttttgaaatcaggaagtgtgagaccttcaactttgtttttttcccaaggttatttggctgcgtcttttgtatttccataagaattttaggatcagcttgtcaattgttgcc

SEQ ID NO: 484810 - DNA, 413 bp, Homo sapiens
aagccctgctgaccttgttgagtgctcttaggatctagcagctaactggttaaagtctgtatcccatgactagctctaattatgggcttcataccgtaccatgtttgcagcactcgtcaattttgcaaacagtgaaatttatccaggaatctaatattctcttgaatctgatcttaagtggttaacctctcattagcattaaacactacttttgatagtatgtccacattaaatgctccatacagaagtgttacttagagacaacatggacgatttctttaagaaaggaaccatgctttcctctccagcgcagccaatgggctgaaggcctgtttccattctccattcttccagcataaatctacaactcacttggcacacaaacctgattttaacaggcaccctcatccaga

SEQ ID NO: 484811 - DNA, 1872 bp, Homo sapiens
gcggtcggttgtgtgcaatcagcctcatactcagttgtcgtagtagacggcgtctgcatatacacgcgtcgtgctgtccgtttgagcacgctcgtgaatcgccgcgcgactctcgcgttgcaggatcctgcatctgttcgctttgctgtttacactcagatgtcccgcgctgctcggtcatggtggtgcgtcgacagagaggatatgtcggtgtaggagtgagggtctcgcgtagtgcttcttctgtagttgtatgcttgtggatgtgtgggatgagagtaggaggtagtggtggagtcgacagatgtattgcggagggtgggtataatcatctgtgagttgttgaagagacgtatgttagtagaggattaggacttatcatttgagactaagttaatgggaggtagaaataccgtagtattatattgtttttggcagatatttcattatgaaaactttcgctccctatctgggctttccgttgtggcttgattgtcttcccttttcttctgtctttctgttcttctgttgctttgcctcctctgcgcgttgtgttgacgtcgtcctctattcttgtgtgtatggcgcgctttctgccggttgtctcacttctctggttcgtgtctggctttttgtgggtatggtggtttttactgtttagttgaagttgtgtttgggtgtttgttatcgtttgttttgttgatcgttgaggtgcttgtgtatttgtgcgtatgtggggtggtgagtaagacacggtggttggggagtgttattagaatatgatgatgagtgtgtgcgtggagtgtttgtagtgttgtttgtgggtagtgggggagaggacaaggttgttagagtctcttgtgtgttgtaaggtagggttgtatgtggttggacagaggcttgtagggtggggagatccgttattggtgggagttggtggtagggggagagtgtgtgttagatgtagcgagaagtggacacgatttggcgttggggtaacggttatgagtgggtgttttcttattagtggaatgaggttggttggatgaggtgagtgagagttgtggcattgtggagtattgtgttggatgaaatacggtgtggtagggtgtgtatgaggttgtaggtgatgtgatgggagtgtgggggccgttgtgagagtttcggtgtagtctggtatcgtgggttgtatcggcggactgggtcggcgccctagatggcaagtgcgcacgcatgtgtcggcggggcgagtgctgtgcaagattcgcgtgtggctccgtgtggggtgcggtgggcctgtgctattgggccgtcaatggatttgcgtgttggcgtgaatggttagcgagtataggatggagatggcttttgcattgggtctgccttgcctgtttataactgcggcgcttagtgttttagctctcatcgtctctttaaattattggcaccgggttcatgtgagccaggtgttcgtgagtcatctgtagtgattccgtgtgcacgttgtccgcgtggtaagcctgtactgctgctagcgtgcgctgcaaggccgtccctagacgccgcgtggtaatccctagccacgcgtgtccctgagctggagtaagtgaacatcaagatatgtgtcttagattgtgcagggtgctaaacttagcaagttggagccccatgaggaacaggggcaatctctgggctgagcctactgtctccttcccacatgtcctttctccaggccacgtcagatggcacagttcacgggatgggcgtgactgcggagtcgggtatcgccacctgccagcccacagtgctcagttgtacttatttattaagctgtaatatctattttgtatacatccgggggctttattcctg

SEQ ID NO: 484812 - DNA, 182 bp, Homo sapiens
ccggcccagcctcccaagtagttgggactacatggcaggcaccaccacaccgtggacctaattattctgtagatgacgggtcttgctgtgttgtccaggctggtcttgaactcctgagctaaagccatttacctgcctccgactcccggagtgctgggtattacagagtgtgagctaccaca

SEQ ID NO: 484813 - DNA, 768 bp, Homo sapiens
cgcaaggcctgaatgatgtgagctgagcccaggcgccacactgatgccacctcaggagggtgggaccttggagcctgcggggtgcctcgcgcccctccagtccccggtgccggactctctgctggctctcgctccaccaactcaagtgttagcacatgccccatgatatgctgcccggtgctgccctgatgggtcggactgtcttgtgtgtctggggtctctggcgttccaactccaaggcctataccagtctgtgtacagtgccatctctctgtgcttctgttgcccctcactcaccaaagcacgtgtatttatagcaaagaaaaaaaaaaacaatcaacaacaaagcaagatagaaagaaagataatagaacaaacatagataaagcaaacaagaacacacacaggaaagaacatgacacacaaaaacaaatgacaaagcaagggaatcaccgaatgacagatacatccaagagagataagagtaggaagaaaggtgaaatgaaggggctgtcgggatagatattcaagaacatcttgaagaagcatgaaatgcaaatggatcaaggaaagccataacaagactcaggaactgaggaggtgaacattaagtgagaggccaagaacacaaaagcctttaaaaatgacgggtagtgatgcaacaaaaaagacatctgggcaaaactaggaattccatgacttaacagaaaaaaggcaggacccaatctcctaacagaaacagactcctaggtggacgtaaaatgtcca

SEQ ID NO: 484814 - DNA, 255 bp, Homo sapiens
ccccttttaaaaaaaccccttggaaacccccctgcccaaaattaccccgggtggcccttatagggaacgggattgattccggattttaaaggttcccggttgtgtttttaaaaaaccgaagggttttttttttagggccccctttttggttaccggtaaaggtttaaaaacttaactgtttgggggggtttttgtgggtttttttcccagggaaatttgaaggattccgaaatttaaatatttttttttttttta

SEQ ID NO: 484815 - DNA, 690 bp, Homo sapiens
ctgaggcccacaagggccacagggagccccctttctgcgtcagcctggcgccacacgaggttacccgttgtcgtctggagttgaaatttatagcggcacagtactcgccaatgagaggagcacacctcttcatgtgggcagctgcgcaataatgttctcgggaggcacctttgataaaggagcggctgggtcccctgtggtaaactcacgaggtatctgcttccctcgagagagaactcacctcagagccttcactgaagctgcacaatctcactcacctggagattgttccacgcgagctggagaccaagctgaggagagaaatgcctcttgccacgtgtcactcctcttttgggaccacagccatagcacgctccacattttctggagatctgggtctttccgacggccacggaggcttgcctttccgcctgaggtccacgaattggcacggtggagactacgagtgcaataacaccactggcggagaaactggagtcctggcacgcgaaggaggaacccacgaacgctggtttgagagtacttttcctgggagggggccttccagcatgtgggccaagccttcaatcagggcaagatcttcaagtgaacatctcttgccatcacctagctgcctgcacctgccctttcagggagatgggggtcacttaaaggaaactgaacatttga

SEQ ID NO: 484816 - DNA, 369 bp, Homo sapiens
ctcggtaccattggtcagagagaattagctgaaccaggcccttttggacttcatgccctgtgtgttctgcccgcacggacccccatctctgttgacttcctgtgagactcacttcctatgattaggcattgatcgctttactcagtgacgagttgttgaccacctgaccaacctccacaggctgggtggcccggaggctgggctgggcgagtatctcttcgaaaggctcactctcaagcacgactaagagccttctgagcccagcgacttctgaagggccccttgcaaagtaatagggcttctgcctaagcctctccctccagccaataggcagctttcttaactatcctaatttctctcggaccaatg

SEQ ID NO: 484817 - DNA, 311 bp, Homo sapiens
actcggtttggctcctgcctttctattagctcttagttcgattacacattcagctccccgttccagtgagttctccctctaaatcaccacgatcgctagggactagcatcaggcacgcagcagatgcagctcagaacgcttagcctagtcctcacccccactagaacagtctgtattctccttcagtcaataacgaaagttaactaagctatactaaccccagggttggtccattgcgtgccagccaccgcggtcacacgattaacccgagtcagtagaggctaccgggtgggaagatttatgagttgagg

SEQ ID NO: 484818 - DNA, 599 bp, Homo sapiens
  misc_feature (58)..(58): n is a, c, g, or t
  misc_feature (62)..(62): n is a, c, g, or t
  misc_feature (97)..(97): n is a, c, g, or t
  misc_feature (109)..(109): n is a, c, g, or t
  misc_feature (111)..(111): n is a, c, g, or t
  misc_feature (124)..(124): n is a, c, g, or t
  misc_feature (135)..(135): n is a, c, g, or t
  misc_feature (138)..(138): n is a, c, g, or t
  misc_feature (159)..(159): n is a, c, g, or t
  misc_feature (167)..(167): n is a, c, g, or t
  misc_feature (210)..(210): n is a, c, g, or t
  misc_feature (223)..(224): n is a, c, g, or t
  misc_feature (265)..(266): n is a, c, g, or t
  misc_feature (349)..(349): n is a, c, g, or t
  misc_feature (520)..(520): n is a, c, g, or t
  misc_feature (522)..(522): n is a, c, g, or t
  misc_feature (565)..(565): n is a, c, g, or t
ctatctgctcattgtttttcagttgtctcatactcttttttttttttcctggaaattnaaanagaaaagctttactaaatattgacatttatttttnctccaaattttncntttagtgaaattngattatctctngtngctccgttatcatcatcaganggcttcanaaggtgtttctgataatggcgggcgaaatttcttttttttgtnggcaattacttannctgggaatttggctttttgcttaattggtcatgtgggtganncctccccattgcggttaggtttccggtatctggctttttttttttttttggcgatggcattaacagggttttgccgggttttnagggtgggggctttcttgggggttactttttgtttccgggttgggtggcggggcgcccgtgggcccatctgggggtggatggctgtgtctcccagtcctgggccgggttgctgggacggctcacacccggatgagaggcctttttggtgttgtgtccaggtgggcagaagnancttgatccaactacagagatattgttgttatgaaggtagacancctggatgtacttatgctctgccagcccaccagg

SEQ ID NO: 484819 - DNA, 322 bp, Homo sapiens
ctgatcaccagcacagccgcgcatccaccgctgctagcaaggtcgagcaagcagcacagagatggctgctgccttctcctccaccgtcggtgccccggcttctacgccgaccaacttcctcgggaagaagctcaagaagcaggtgacctcggccgtgaactaccatggcaagagctccaaggccaacaggttcacggtcatggcagcggaaaacatcgacgagaagaggaacaccgacaagtggaagggtcttgcgtacgatatctccgacgaccagcaggacatcaccagagggaagggcatcgtggactccctcttccag

SEQ ID NO: 484820 - DNA, 454 bp, Homo sapiens
cacaactttgctgttcatacccttaccttcttactacttttggtttggaggagggtatcaccactagaaagtgtgcctccttaagatttcttaaaggaaagttagtttcagtatttcacagcaagttggactacaaaatctagagttgatctgctttttaaaccttcatttaaaagcaaacttggaagaaatttgaaactgatgtttttaatatatgtctgtgttgcctaggttttctttttttaaagaggtatgtaattaaaacctttgtaaaatttgccaactaatattagggccgcgctccccatatgggcaacatttttaaagccgacagtatttcacacttcttcttaaaaaagaaggagtgagtgcctccagttccaactttttataaagaagctactccctttttagggggcacactttttacagcgagtcataaaaggtttactcc

SEQ ID NO: 484821 - DNA, 405 bp, Homo sapiens
tcatgttatgtttgcggaggaaccgtaacaggagatcaatggccataggaagcccgagaattagttcccacagacccagttcctgatgaattcccagcccaaaagaaccaccctgacaatttttaggttctaaaagtctcaattattagacagtattgcacagctattgaaggaaaacaattcactcattctatagggcggcttagttgtcttgggcaaaagctgtataatggtaccacaaaaacagttacatggtgggagttccaattacacagaaagaaatccattcagtaaatttccaaagttgcagactgtttagggcccacccaggaattccaccagggactgggacagcccccaccaggttatactgggatatgtgggacacagagcttatttttaagg

SEQ ID NO: 484822 - DNA, 211 bp, Homo sapiens
acggtcggtcagtagggctcaaacatccagcatctgcccagtcatcacagcaggtagtgctctaaatgctgtgctagcctgccttcatcctccagatccatgcaggcaggagacaccccacggacaccagagggctcctccttactttagatctggttagcaccaaggtcatgcactgtaagacgtgaatgttctgggcaacacaccaaca

SEQ ID NO: 484823 - DNA, 112 bp, Homo sapiens
aggacccctctctaccaccgaacaggcctctacacctactacaacgacagaaggacaagctgcaaatcgtgtagatgcccccgagcccacaacgcactccagacctcatcat

SEQ ID NO: 484824 - DNA, 560 bp, Homo sapiens
  misc_feature (12)..(12): n is a, c, g, or t
  misc_feature (30)..(30): n is a, c, g, or t
  misc_feature (53)..(53): n is a, c, g, or t
  misc_feature (58)..(58): n is a, c, g, or t
  misc_feature (79)..(79): n is a, c, g, or t
  misc_feature (116)..(116): n is a, c, g, or t
  misc_feature (183)..(183): n is a, c, g, or t
  misc_feature (313)..(313): n is a, c, g, or t
  misc_feature (360)..(360): n is a, c, g, or t
  misc_feature (382)..(382): n is a, c, g, or t
  misc_feature (404)..(404): n is a, c, g, or t
  misc_feature (410)..(410): n is a, c, g, or t
  misc_feature (487)..(487): n is a, c, g, or t
  misc_feature (517)..(517): n is a, c, g, or t
  misc_feature (526)..(526): n is a, c, g, or t
ggcaagcaattnaagccagggccggaaccnggaagagaacctccacccaaacnccttngggtgaagtgagacttgtccngctaaacaacatctctactctcctgcaagtctggcancctccccactctctcctcagctcaatcccaaataaacaccttaagccaaaccttgattcaagtgtcnggctcaagtttgtgctctgggagagcccaggctacaatagcactgctcaacttcttaattttgccaatccactgtgcagaaaatggcatctcattgtattaattttcatttcactgctccctaataattnggaacacttattaatataaatgtgggtggtcagtgatccctccctcngaattaattggtatagcaattnctaagatttttgggcattcctnaatatnccttgattccttgatcatcctatataagtttttttgttttgttttgttttgttttgagatggagtctcgctatgtcnccaggatgaagagcagtggcgcaatctcgntcatcgaantctgctgccgggttcacgtcattctcctcctcag

SEQ ID NO: 484825 - DNA, 335 bp, Homo sapiens
  misc_feature (13)..(13): n is a, c, g, or t
gctatgcttttanaacacaccccttcccccacccccaaccccccggcaattaccgcccctattcccccgtaactgtagttttgcccttttccgagaatatccatataaataatcatgtattatgtaacattcctgagacaggcttctttcaccccagcataatgccctttgagattcatcccagatcgttgtgtgtatcagtagtttgtttttattactgggttatagttcattgtatggatataccacagtttctttagccattcacccactgaaagtcatttgggttgtttctaggctttggtgattatgaataaagctgctatcaacatcca

SEQ ID NO: 484826 - DNA, 104 bp, Homo sapiens
cattgacaatgatcacgaattcccctttttgtgtgaaaatcgtacccaaatcatactaccgagctcgaaaccgagctctagtcagagctgtttgctagaggtga

SEQ ID NO: 484827 - DNA, 693 bp, Homo sapiens
ccctcccctataataaaaaatttttcccctttaatgtccgcccccaaaaaccatttccttaaaggcctccaagccgggaagcccctttccaaacccctcccaccaaacctatttaatctaacctttcaagacgtcagggaaatagaaccggtgttaactatcgggcccgcatcaatctaagtcctattggccttccaatccataagaatccttacaataacaaaaaaggtcaaggatccctccctacccatcaaatcatttggccaccaatggtactgaacctacaagtaccccgactacgggggaataattttcaactcctacatacttcccccccatgtcatagatgggtccagggctgatcacatatctcgttctccatgaagtagcgctctcagtgtacagggcctctgtgaccattaatcctgtgacagacagttctggattccaatcgagtcccgtcaagaggccagtaatccaaagccattcgggatttttgtttccttgatacttttattttactggttgtgaggacagggcaggtcagtgccctcaaccttgtgcatctgtccccagtttcacccccatcgtcctagaatgcatgcgcagagtttgccttcccatggccaccgtttttcccggatagccccccgtaagccccctctttagcaattcagctggttcctccaaaaa

SEQ ID NO: 484828 - DNA, 219 bp, Homo sapiens
gacattgcgcaccgagtggccctgccgcatttggtctttgaggactgcggtaagtaatccgagcatgtagttgattgagcgcggcgaccacggtttgcgcgccttccctgtcggggaagacaggccgccgttgcggagttttgtcacgaggtcgtcgatgctgcgtttggtgagcttgtgcacctcgatctcgcccagttcggcgatggctgccgcgag

SEQ ID NO: 484829 - DNA, 651 bp, Homo sapiens
tacgttgacctgtaccgtaagaaatgttgtatcctgaagaagtgctaacaagttacaggtctgcattagccggagatccaagttaatgccctaaggtcgtacattttgggggtgcatattgcaaacaatgacccagcaagaatggtctagctcgaaagccttgcagcaggtccggtctcaatgtctacttctgcagaatagggtgcagtgcagtgatgtgccgcgggtcctttaatcaagtgccagaattttcagggctgttccacgtgcttgtacacccatctcagtgctgtaacgctgttctcctagtacactgccgtaactgtatgcattagtaccttattgcatactcaccctgaacaaagcccagctagctttgagcaattatgatcataagatcggtcatacaggtatctggtcacccattggtgacacactatcagcggctcagattgataagccaatatcaggacgtcatctgttagtcaggatgtagactttgcgcgtgagtcgcgacagctcagtgcgcagttcgcgcaggtggtagtgcaactgctgttacaggtcatattcgtcggcgttcgcatcctacctgagatacaggtactgcagcacgtcctttgactcacaggcactcactgtcacactctc

SEQ ID NO: 484830 - DNA, 211 bp, Homo sapiens
ccaccggatgccgaagcgcccaagcagcagccgccggagcccgagttggatcggggacggagagagcacgaccccatcagacaaagtggtgaagaaggggaagaaggacaagaagatcaaaaaaacgttcttggaagagctggcagtaaaagataaccgggctgggaaagaagagaaagtgctcaaggagaaggagcagcagcagcagcaa

SEQ ID NO: 484831 - DNA, 197 bp, Homo sapiens
gcatatgggctgtagctaaatgtatccagtactctcttttttcctttttttttttaattttatggagacggaatcttgctctgtagcccaggctgaagtgcagtgatagtagtctcagctcactgcaacgtccacttcccgggttcaagcaattgtcctgcctcagcttcccaagtaactggaactacaggtgtgca

SEQ ID NO: 484832 - DNA, 315 bp, Homo sapiens
atattgatcgaactggcgttgcgcgagtgcgtgctgtcgtagtacacgcccaggcaccgccgacgtcgatgtggtacaccggcaggccgaggttgcgcagttcgccgtagtaacgaatggcttccttgaacccgtgctggtagtcggccaggttggcaatcggcgagcccatatggaagtgcagcaggcggatgccctggtccaggccggatgcgcggaagcgctcgaccactgacagcaactgggctgacgacagcccagaatttggatttctcgcctacggtgtccgaccacttgctcgatgcctgggacgac

SEQ ID NO: 484833 - DNA, 383 bp, Homo sapiens
gctgctagctaacaagaatgatgtaactgaggaagacagaagaggaatgctcctcaccaggcctggtgttttcgccagtgagagtccatgggtgactgatgactaagtgtgtaacttcctcagacacagacaagccattaccccagcaagaaggaagctcttacatccagaacctcagaacacaggatttgaggggaaaatgaagtcttaaactgaaatttgaatggatattggggaaaatgtaattacctttattctttttgattggttaccaccaacacaaccaaaacttaagaaaatggtaattgtggcctattgtaaactctgtcatacaaataacagcaaagttaggtcaataaatgtgatcgtcagtgaaaaaaaaa

SEQ ID NO: 484834 - DNA, 324 bp, Homo sapiens
tctttacttttctctctcataccctacagaaaaccctattgggtctcccttcaaaatatacccagaatgtaaccatttctcaccatgttccttgcttctacactgtccaagcctctgttattgccatctagattatagcagtagactcctaatgggtattctcacgtccaaccttgtcattatctagtctattctcaacacagcggcagagagatcagtgacaactttggatcatgtcacatctctcttaaaaattgccatgttggcgaatgagccaaagtacttttgaagctctactgggttccagttacctgggcctctgat

SEQ ID NO: 484835 - DNA, 340 bp, Homo sapiens
tccctcccccttccggggaaaaagcccccttactccccctccccgccaggttggggcccccccccctcattgaattttggggcccccccccctcattgcattttgggaaccttccccctgcaaggggttttctattttcaacccctgggcgaaacttcacccctgaaaaagggggcgggtcaaggttgcgtggtaatggggtttcccccccccccccctcccgggcaaggctggaactggacaaaaaccagtccctttaattcatttttttcaaaaccctttggggtccgaaggctgtgcgggtttcctcctgccaataaaccctacccggttttcccca

SEQ ID NO: 484836 - DNA, 968 bp, Homo sapiens
tcttctttcgcgtctgccagtcgagtcacatcgctgagacaccatgtggaaggtgataggtcggagtcaacgtctttggtcgtgataggggcgcctggtcgccaggtgtgttatcaagtctggtaaagatgtgcatgaattgtagcgatcattgaccccttcattgacctcaactacgaatggtctatacatagttgccaatactgtagttcccaacccatgggtaccaattccattggcaccgttccaatggctgcacgaacggggacaggcattgatcgttcaagtggttgaatcccaatcgagcaatcttctccaatggacgctatactcccgtccagaaactaactcgggcgactgcgtgggcgctgagtgtacggtcgctggagtccaacttgggcgtcttcaccgcgccagtcgtgacgaacgagcctaggggctcaattgctgcgaagggtgggagatgccgaaagaggggtcagtcatctcggggtccccatctttgcttgaccccccctagttgtacgtccactcgagtggtgtcgaaccatggagttagtaggtatcgataggacgaagcctttaagagaatcatcatcaaaattagtctcctctgcaacctagccaacctgcattaaaccacacccttggggggtcaaaaggctcattgcgatagaacagacattctggagtatccagatggaaagggtactcgatggaccgagagtcccatgaccaatagaattgactgaccccagaaatgacctgttccatgaagcacctgcgcgtgatgagaactgttgcgcgttgatgggcggcgggggctctccgaaagagaggatcatcccctgaacttttatctggtggctgccaaatgtggtctgggcaagggctcgttcgcctgaggttgaacggggaagctcgcatggggatggcctttggggtccccaacggcgaacggacagcga

SEQ ID NO: 484837 - DNA, 309 bp, Homo sapiens
cccatgcacttgtcaacagctgttgcatttcaatagagacctggaagcctctgtggaaacgtcataacagaactcgcccaggcccctgcgcacaacttagtgccaggaacttggagcttaaaggcagcctgctcctgtctggattcctgcagtttcaccaacagcgggagtaaggctgacagaatgccggattccagcatgtgcttagtcctgaagctgcatatgctcttggcattttgtttttggtcaaagatgtcaagatgcataattaagtgtctgtgccaattaaattcaagtctgcattttgat

SEQ ID NO: 484838 - DNA, 352 bp, Homo sapiens
gcaacttacaagtgttttctcccactgacgagcaagctggactcaatacgttctgcagctaaaatcaaacaagcgctctctccccagaccctcgtaacataaccaccgcaatactaattaatgtacagacgtccacaactgtaagttctccccccataaatatctccaaatcagtgctacctgctaccccgtatattagactataactcccaatggagtctgactctgaaaacaactcatatctaataaatttaagcttaagcgacatatatgctattccgcactcaggaacgtggcttccagatgtttcttccaccccaagcatcctcgcagagaccatggggccaggtgg

SEQ ID NO: 484839 - DNA, 332 bp, Homo sapiens
atcagctcggtccgtgcttacccaggtcttggtgagtgaagcagaaaccaacaaacacagtgaaggtccagagagctgagaagagcaggtcaccaatgaccagtgtacttgctggtcagtgtgctgttgctgatctgggtgtgaaatacgctgtcgaccaccaatgaagaaagcctgaggccagtgaatgtgccatgcacaaccctgtggaccacgcacaacgtgacatgcacaacactggtgaccatgcacagacctgtggggtgatccatctacgagtctgaccttgcagtgcattgcaatgcttgtgcacttggcctgtctgttttaca

SEQ ID NO: 484840 - DNA, 106 bp, Homo sapiens
tcaatttctacactgccagtgtcatccagttatgtgaacttgggaaaagttcggtttttcttcaaaaggtccctcatacatatgttagtgtgtagaacattgaact

SEQ ID NO: 484841 - DNA, 1721 bp, Homo sapiens
  misc_feature (860)..(860): n is a, c, g, or t
ggcggctcgggatctgcggtacctgttgtagtcacgagggacgggcggcggcctggtcggcagtagagtagccgtgcaacatacgggcgggggttacgagtgacgatttactcccatcaatcgccagagaccatttccgtcagatggagctatgcaggcaaagcccagtgcatggtgaacacttaagctggggcacagtggtagtacgaagggcctcatactgagttagtccgtgggtagaatggagctaagcactggaaatcactaggcagcttgtgtcgacaaagtaactacgtagagggagagtatcactaagaataggaaaggcattccgttcgtgggaaacaatcatgtgtgttgaaggttttatcataatagatggttagttaatcacattcgctccgttattaatattcatgaggagctggtggtagagggaacggacgggaggggacatgactgggggggtaaacattggaggcagtagattaggggagtgcttggtgtcgctagggagcggcattggttgttggggagtaactaggtaatctatacgtgaaggatgaactcattatcgtactttgggctttgtagtttattgctacgaaagcgtgtggacaaacaccacccatgatgagagaaggggaggacctggacatagatagagagacccccctgagaacgcgtttcccaaagtagcgttcgcgtgaggagcgtgcagagccacgaaaaacgtgggacgcgtttgcacatgacacatgccgttgcttataccccagaaggatcaaatttccagaggcgacggtacacaacatctggtggcgagccaccccaaggaacactctcaaaggatggggtcngcccaacgcttggacagatgtttgggaggcacactttttccttgcagtgggagaagactccccccttgatctgatttcgagaaaggcaaacggtaggagtcgaaaggaaatgtgcggccaaggatagcaccccccgcggtggcgcccccatggggttggctatctctccaggcattggggtcagcacttacacacattggtattccgggggggcccattgaggggaccccagggaaaggcgggcgctgtaatggttcgataatggggccccaattggttcaacaccctaccgtagggaaccaacgcgcgtggaggacccccacgagaggaggccacatgggaacgactctaggggagaccaaccatcacccaagtgacgggggcgccccttggagtcagccaggttgagtgctctccccttgggctaattttaatggcttaaaggcgcacaaacgggcccaatattaacgaaggggggcttagtagaattgaagttggaaaccacacaacgcaagcaccgccacatcacaataagcatcacacaacaaaacgctcacaggcggcgacacaaagtaagcaggggagcgaggcagacaacaggaaagcagacaagacaaacacgggaaaacaacagcgacaacagcacaagcaaagtcaaacagaacaaacacaaagcaatcggacgctgccacacaagggaggcgtacaaccccgagcgagtgcacccaaaaagcaagacagaagaaacaaacgatagaagacaccagcggatacgcgtaacgcacacaacggcaacgacaagcaaggcactcaacacaaaacgacagcaacaagaagaaaaaaaactaacccaaagactga

SEQ ID NO: 484842 - DNA, 143 bp, Homo sapiens
gtttgtattggctccacgtggggttcagctgtctcttacttttaaccagtgaaatttgaccttcccgtgaagaggcgggcatgacacagcaagtacgagtaaggccctatggagactttaatttatttaatggcaaacagtta

SEQ ID NO: 484843 - DNA, 563 bp, Homo sapiens
gcaagacccttcatcccattctcagtcagataataattcttgactcatgatcgtccacattgaaaacatgcatgctcagaaatgggggtcttctcggtgtactcctttcccagtgacaggaactcgtcgtgactcgaacagacgcttgactgcaaatctcatcagtttcactttgggaaggtctttaattcctcgattcattttcattaaacgcctgattatggaatcacagttatctccttgcctgatttcaattttggttgagaagtggccattggatggctggggattcaccagagaaacggacacaccaggttctattctaaaaacattaagtggtttcccaggacagcagtcttccctgattttatcttctgcttcggaggcaaacttgacttctatgtgttctagctcaagcgaattagtcagatagactatattctccataagcacagccttttcatcaaattctaattgcaaatccagaatacgaggccccatcttctccagattttccttaatcatggcaacaaatggcatgactttcttcatgtatttcttca

SEQ ID NO: 484844 - DNA, 769 bp, Homo sapiens
gattctaggtggacattacagagttgaattcctcactaccccctcccgctgtcatttgttttattggaaaacttcatgttaactagagtgtacaaaaagtctgtttcctgctgagccaatagtgattgtttgcatatcacctaatgtgaaaagtgctcatctgtgaactctatagcaaattatattttagaaaatacttgtgaggccgggcatggtggcagagcgagactccgtctcaaaaaaaaaggaaaagaaaagaaaatataaggatgtaaaagaagcaattgctggcacatctgaatatccttctttgtgtctccattttcactctgtgaaaactgaaagcaattgtgacttttatttcgtttttctaaagaacagctaggtgaaaaggaggttaagctgatggtcactctgcctgccattacctatccccaccatggtgtttcatgaaaatccccaccatctgaaggtgatctttgtaatcctgtgttgatagtaaatgcatgtgataattaacaggaaaaaccatgtcttttaaataatctacaaatgagaacccaaatggtagtgtttctgtttgacagaagtcaatcaaatattatggtttaacttctacttgcaaaaatttcaggaccagttaattgttggggttccttaacctaaagagggtttttcttataataacgggaacgaagggtgtgggttccaacgaacatttagagacaaaactttcgggtacattattgctgaaaatttttaaattggg

SEQ ID NO: 484845 - DNA, 95 bp, Homo sapiens
catgaggagcaggagcaggaagaagaagatgaagatgaggaggaagaggatgaagatgaagacatcacaatggctatcctatcactgatgcgtgt

SEQ ID NO: 484846 - DNA, 1469 bp, Homo sapiens
gacagggtctgctgcaggagcagcggcccgaacccgctccagcggcccgccgccgccagcggctcccgcgtcgcgtgtgtacccccgcgcacttgaaggaggtccaccagccctcaccagcccccgcggaccggtgcaatggcccagcgtaagattgccaaagagcagcggaacagcagcagcaggggcttccggcaaggcggtagcacgagtgcggcagcaagcaagccccggggccccgaagaagagacaaagcattgggaggacacaagattgggaggaaaggcgagactctcaggacacttcattccttccacggtgggtaatggcgggatgggcagtggcttggccgtctggacatctgtagctgtcgtggataagatctggtggacctatgaggaagttctaggaaaacctaggaatctatgatgctgatggtgatgagaattggatgtggatgatgccaaagttttataggacttacagagagatctacttcagagccaggagtcccgccagaaagaggttgagcacacatggagcccgagagcaggtccctgtgggaggcagatcccaaatatcgaagatgaagcaagaaccatcaggccctctccaggaagggtacgccacatgtggcggaaactggccagaatggcccgggaccccagaggttgcgtctcgccagggaaaacatagaccgaacggttttaaacgagtcacggaagaccagacgaaaattgcgacatatggtctctctgtgccgttgtagtacaaccaagtatttctgggcggatcgctgaacgatcaaggacacgtcaatacagtcacacgcggcgcaatgagacacgcgccacgaggacgcgaccagtagcgattacctgtcaacacgcagcctgagcgcacgagtcacgagacgaagcaagcaccatcggcacagctatacactaacgacacatgccagacgacagagaagaaggaccgagggagaccaacgggacgaccaaaggaggcgaagaccacaaggagaccagaaccaggagaaaaggaaacacaacgcggcagacgaccaacgagccgaccagggaagagcgagccgggcggcaagagagggcagacgggagagagggagacgagaaaggcacgacagcacgcggggcaccaacaaacacacaaggcgagcgcagacaaacgggcagaagcaaaaaccagaaaagaagagacaaagggaaaaagaaaaaacgaaagaaaagcacccagaagaacacaacagaacccaaagaaaaaccgacacgaaaggccagccagcaccgacacccagagaagcagaagcacaaacgcacagacagaagaagaacaacacaagaggaggagaagaaaaggaacgagagaagaagaacacaaaaaagagaggcgggagacgaaggacacaacgaacagaaccgcaagaacacagaaaaaaacaagcaaaa

SEQ ID NO: 484847 - DNA, 121 bp, Homo sapiens
agaccagacttcgctcgtactcgtgcgcctcgcttcgctttttcctccgcaaccatgttcttacaaaacccgatatggctgagatcgagaattcgatatgtcgactcaggagacagacgcg

SEQ ID NO: 484848 - DNA, 239 bp, Homo sapiens
  misc_feature (144)..(144): n is a, c, g, or t
  misc_feature (198)..(198): n is a, c, g, or t
ggacgaagggtaacgggatgaaggcccgagctcccgagagcagcgtcaggcacgatgcagtgcattcgcagcccgggtagaagcgggcagtggggatgagcttgatacagccaatgatgacttgggcaagggggtagaccaagnggcgtggagggcttccgctggggcccgcatgtgctcatggacccggcaccatanggaagaggcagtgcacatactgccagttgtacacagactgg

SEQ ID NO: 484849 - DNA, 234 bp, Homo sapiens
cgctggcgctgtgacgtgagatcgccacctaccgcaagctgctggagggctgaggagtgcaggctgaatggctgaagggcgttggacaagccaccatctctgtggtgcagtacaccgtatccagtggctatatgtggtgcagctggtgtcggcagcaggctataggcctgaggtggaggacagcagctacatcctactggcaagatggtctttgtgcgtatggcaggatggctt

SEQ ID NO: 484850 - DNA, 420 bp, Homo sapiens
ccaggaggcccacactgacctggaaagggtccgcgccatctggatctggatctgccatcacatagagtatgacattgcagctgctcaggagaaggaccgccaagccttcaaacccactgacatcctgcggacccagaagaccaactgtgatggctatgctggcctcttcgagagaatgtgcaggtggctctgagcagaggacaagcatcagtgggcagcatgtccagaggtccacagcgccgctaaatcagttcaccttaatgcaaaacgagccattctccaagccccattgttcccaggactccccttatccctccacatcatcctagaaagtgatatgcacagacgttctaggcagcaatggaaagtaatttcctgaagaatataattttaagtagtatttatggctttttttccaat

SEQ ID NO: 484851 - DNA, 519 bp, Homo sapiens
gcaacattctttctactgcattaaaaaccctccaaaaatgaatacaaacatgaggatttattattacaaattctaaatttggtattcattgcatctcagtcattaggagaagttttagtttgtatgatgtgattttcagggagttgcatcttcttttttagtaaattcagagttaatgttatgcatctgtcatttaaaggttttgaataacagatgcatttgtcatttaaaggttttattttttcatgcatgacagtaatttttaattttatatttttaaagtccaagcagctttccctcaaattgatgaggaaattttaagtttaaattttattgcaggcatttttttagttacatgcagcatgcatgtttacgcagagagtatgtgtgtatgtgtgtgtacacatttgtggttgaaattctattaataatttaaatttgctcctaagcaatatccctcaagtacaatttcaactgataattggcattttgttgaggaagacattttcttctcttttt

SEQ ID NO: 484852 - DNA, 247 bp, Homo sapiens
  misc_feature (107)..(107): n is a, c, g, or t
  misc_feature (216)..(216): n is a, c, g, or t
tttgttgtgtccttgttaggttttggtatcagggtaatgctgattttgtagaatgagtttagaagaattctttcctctttattttttaaaaataatttgagaagaantcgtattagtttcgctttgaatatttggtagggtgttgttgttacgccagtaccccagcactttgggaggctgaggcagaacttcaagaggccaggagtttgaggtcancctggacaacatggtgagaccttgtttctac

SEQ ID NO: 484853 - DNA, 1021 bp, Homo sapiens
accaaaaaaaaaaaaaaaaaaaatctgtcgagcacttaccatatgaccagggaactgtgactgggcttgggaatagaatcaggagcccagagccacggagtggaggatgcacaaataatagcatcaattaaacgtgttattgcaagagaaggtaagtgctctgaaggaaagggtcaaggttctgtgagagtatgtaacaaaggaatgctaagagtttcttgcaataactcttagttacaataatttgtggcgcattcttgtaaaattacagcttatacttctgtagcacttgcactttataaagcactttcatccgtattatttcacttgctttggctgcgcaatagatatttattatgatgatgtcctcttacagacacagaggcttggagaaattaagaaactgggtaagttctttacagtagcggcagacagatttaaacctaaggtctgtcaattccctacccctaactcccattttgggcaagattttaaaacaaatattcattcacacggaaagtagaggataatataactctccaggttaagaacaactcacctatacatttgaaagccggtatatcccttcctgagggcatttccctccttcctttctcagaggtcaccactttgctgactttggtatttatcaatcccatgcctattttaatactttacatacagcatatatccagaaaggaaattagtatagttttgcatgccttatattggccgggcacagtggttcagcctcttgagtaactgggactatagatatacactaccatgcaccaccacacctggctaatttttatttttgtagagatggggtctcattatattgcccaggatttggagaccagcctgggcaacatagaccctgtctctacaaaaaaataaaataaaatttagatgagcatggtggaacatgcctgagtcccagctactcaggatcctcctggctcagactcccaaagtgctaggagtataggcataagccaccatgcctgtccaactcccc

SEQ ID NO: 484854 - DNA, 127 bp, Homo sapiens
tagacatcaggccatccacagcatcgggagccagcagaaagggctgggtcaggccatgtggacagggacaacggacagtacagggccagaggtccctatatcagggacctagacatgctgccgtact

SEQ ID NO: 484855 - DNA, 402 bp, Homo sapiens
cgacgagctcctgacctctatatcggccttattctgtaataccagagcgctgcgagtatagtcgtgagtttataagcgcaggcatagttcattattttaagctgtacaattgagtgatttttattacgttcacaaagttacgttaccattaccacttttgaattgcagaacaatttcatcactccaaaaagaaatctcataacaattagcagttattttccatcgctacttccttgattccaaggcaatcagcagtctgctttctatctctacctgtttgcctattctggacatttcatatgcagtggagtagataatacatggccttttgtgactggctttcacttagcataatgttctagaggttcatttatgttattgcaaaaatcagtacttcatttc

SEQ ID NO: 484856 - DNA, 1552 bp, Homo sapiens
  misc_feature (942)..(942): n is a, c, g, or t
  misc_feature (1281)..(1281): n is a, c, g, or t
gcccccccgcccacggctgcggttgtggctgatgtaatttatcaacaaaggacttctgtttttgatgggcaccccgctcctcagagtattctcccgctcttggtgtaggaaactcgcgctctaccatccccgcacccgtgtgttgtttgtggaccccgcccccgccgatgatggggagaagagacaccccccgggggggctccctgtgaatagcctccagagctcctttctccggtgaatacttttttatacggctctttttagtagccgcgctcccgcggcgggtcgcccgtgggtgatagcacccacaaaagtgttgccggaaccacaccacggggataaccctacgcttttattgtcacaccaccttttagcggtcccatcatatttttataagggcgtggaccacacagcattaatgttatgggaaccacaaagaggtgtttgggtcaaccgccagagaaaaagagcgccaacggggcccgtgtgtgggtacaccccgggggttctcccggggagagttctcctcccccgggagggattaattatcgcgtggtcggagacccccacaacgtccgtttttcccgcggtggccacaacatgttgcccctcttcgcggttgctgtttcccccggcaaatattcccgccggggtttttcctacttcccgggaagacacatcccacggccccgcgctgctgtgcttcaacacacaactaggtgcgccgcgccggccagtaagagtgtttcggagccccctcccctcactccggcacgggattgtctccaaaacaggtctcgggatatactcccctgaagagggtgggccaccccccgggagagggggtgaaaaaatttctcgggtgggcaccacacctttcttggcgccccactgggccgcccccacaaagagatcctcgcccgcccccctgggggtgctctngtgtctttcccccacaaaaaaaaaaggtttgggggtgagaatgaaacacatttggcccacaaggggcacaacgcgggggtgatcactgtgagaagggggcccttgaaaggagattacacacgggtgagagaacgtgagacccacattctacgagacaacagacacacgggccccacgagatttgagagcgtgtgtcgcctctttgtggcctcctgggccctggagatcactccaaggcccctccaaaggggatccacccccaagaggagccacgagaagagataccacgagaaaacacactttgaagacaccacgcgtgggagaataatcacctctttngagatgaggagattgttcaaacacattggctcgaacaagaatgcggcacccgagtccttatgccacgagaaacttctctggagaccacttaaagaggagtcctggggagctgcccacgtcacgtggggctgttataatgttgaatggcccccacatcctcactgaacactcactcgagtgacaatcaacacgtggtgctgtggaaagccccagacccagttaagccaccaagggaaaccatttccaataaaggatcatttgacaactggga

SEQ ID NO: 484857 - DNA, 393 bp, Homo sapiens
  misc_feature (9)..(9): n is a, c, g, or t
  misc_feature (35)..(35): n is a, c, g, or t
  misc_feature (38)..(38): n is a, c, g, or t
caccaccanggggcatggccacagactgacaatgnctncggcacttttaagggagggatgagctgcaacatggcctcggggctgtttatgataaataggtcaggcatcctatgcatcttactccccacaacaggttctgggtgaagaaaggagcacttgtttaaagaggcatcttttggaaatggcaggtgagtgaaaacaggaaaaagctcacgtaacatttgtgatctgttcagaggtctcctccatggataaggaaatgggaaccaccgctcaggaaagcagcgccaccacttggcgaaaaacccttcagagaagccttctgtcgcctcagggtactggcacaaaaaatgctgaatctcctcctccaacaggggctatcccgtcttgatc

SEQ ID NO: 484858 - DNA, 690 bp, Homo sapiens
gaatccattcaggtatatacacatggaggtagtcacactctgggacagatctccagaagtatgctggggtcagctcgttactcaactccagttgacatttggagtataggcaccatatttgctgaactagccacttgaggaaccccttttccctggggattcagagaagtgatcaactcttcaggattttcagagctttgggcactccccataatgaagtgtggcccgaagtgggatctttacaggactataaggatacctttccccaatgggaacccggaagcctagcatcccctgtccaaaacttggatgaaaatggcttggatttgctctcgaaaatgttaatctatgatcccgcccacggatttctggccaaatggcacctgagatcactccactattttaatgatttggaccatcacgatttagaagatgtagctttctgaccaaaagtttccacctatgttatgtccacagatagttgtgtttttattgttaactcttgtctatttttgtcttatatatatttctttgttatccaacttcagctgtacttcgtcttctaatttccaaaatataacttaaaatgtaatattctatatggattttaatataattctgtaaaagtgtgtaggtctccctgtaaccactatttgttactataattaaactattatattgatgtcagga

SEQ ID NO: 484859 - DNA, 181 bp, Homo sapiens
gcacagcatacataccccaggcagagcaagaaccccttacttcagacgtgtgggcacctcgacggtagggaacattgcgctcctatgcaccttcctgttggtgagacccaaacactgccattgtcctgtgtaactggcctgcttccaacaagctaccacagacctaaggaaattcatccca

SEQ ID NO: 484860 - DNA, 1147 bp, Homo sapiens
gacagagccgactgtccggccgcctggacagctgcgcgcggtggggcagctgctcgtccccccggtgcccccgtgccggacacttggtgggtgccacgaggacccgcagcagcacgtgcggtcccccggctgtcctgggcgtgtacggccgcctgtgcgcgaaccctcggggggagttggggcgtggggtggcgccggagggttgggggcaggacagcccggggttgctgcacttggtgcccaccactttggccaatggcgggctcgaaaggttggaccttgagcaccttccaccggatgtggaagggagggcgaaaatcattttctggagggggcctgacttgacaaagcaatgcgggagcgcaccattaccttttcttgccaagggactttggaccagggctggacagaaagactccccgacattggaaagcgacgatggccgaacaagggggtggccttgctgacagcgtgcggaggaaccccatgtgtactacacacaggggcacaagccagtgtcaatggagggaaaatcttccttgtgttccggaagggacaattcaccaaggctggatggtgggacggccatctggtacaaacggctggccaacaaaggttcacttggatccggcagagggaggctaggccttgagaacgggttggaattccatccggggccgggcggcccccctggattaaccgacgaatgtgcttggaacctggagaacctttgaaaaactgggcaatgcgccaagaacacggggggagcaatcgcgtccgggccaagtgtctgcttccaccacgggtggccatctgcttatggggccacgcgcacaagtgtgagagcagcgaagaattacagtgatctgtcgcagagagatgcacatccggggtccgcatcaacggtgagacacgagggccaacggatgtttctgtgttgtatatccttttttttgctactactgtgcctctgcatttcgcagccccgccacaataatagagtcgaacgagacctcatcacagactcgcagaaagatacgacgacgagcgaacatgaagaacacaagtgacagtcacgagaagtcagaagcaaaacgacacacgaacaacagacagacgagaacgacaagaacgacacaaaacagca

SEQ ID NO: 484861 - DNA, 457 bp, Homo sapiens
ttgaggaaatatctcaagcagacatgtagaggtatgaagaacggcagaggtgcgggcatggtctgtgagggcacgggtattaagcgatgagagagagccgtgggtctgcctttacttacccgggtctgctctagccctagccctcgggagtcagggaaggggaattgcctaagtaacaaagggggcttttgggtggggttcccacccaagttcgagaggaggagcagacatctgtgctactggagagcagtgtggccaggccagtcgggggctggcttaagccgtcgctgggcaggaaacccgtgcatgcctgcgtgtacccttggttgtgttttgtcctggttatcagcggtttcttaggaaagttccttgtcaaagctccaagtttcgcttggctgatccaagggaaaaagagacttagccgcagttgggtggggaaaccagagtgttcagaggc

SEQ ID NO: 484862 - DNA, 289 bp, Homo sapiens
cggggggccttaaattgggggggggcccccccccttgttttttggccccccagggggggggggcccgccgtttcccttcgggagagggggggggggggtggcccccggggcaagcccctttgtttttggggccccccgttctggttttttccctaggggggggcccccgggggttttttttcccgggggggttttttccccttttgccggggggggggttgggtttttcccttttttccccccccgggaagggtttttctttaaggtttccccccctttggccccccta

SEQ ID NO: 484863 - DNA, 389 bp, Homo sapiens
aaagcaagtgtatctggaaaaaaagccggagggaaaatcctttttttaaatccccgttttgtcactttttcggataaaagagggccatattcccccttttcggccccatgtatctcagtcccccatggggcggggctaagtaaataggatttggtttcaccctgaggcaattagacactttggaagagggcataacctgtctccccgggacttaagcatctggctctaattcacagtgctcttttcccctcactgtatccaggttccctcccgggggggcccccagttcccagggggggcacccagtccctcttctccccagctgactaaactttttttctgtcccagttaatttttccaactactaatagaataaaggcggttttcta

SEQ ID NO: 484864 - DNA, 582 bp, Homo sapiens
tagtagctggggggcaagagcaaataaagagctcgagcttctgtggtctctggggagatgttcccgggaagcctgtctagagggcggagggcagctgttgagatggcgtggctccccgtgctcctgcgccctgcgtggctttctgcggcgggctgctgctgtgccctggtatttggacatgcctgtgcagggcagctgctgtgtggcctgaatcctggctgcctgtggcttgagtgctcatgtgatcactactttttgtgtgtagtggccacatcttgccagatgcctaggatgtcttgcgaatggcctggtgacccgtgttccccggcccacagtgtgggtgtgtgcaaaccctgagagaacttgggtaagtttggggtctggcttgcaggttttggggtaccccgagggcggtgtacgtcggtaagattgtaacagtattacttgtgaggacttattccgacttgtcctgatgatacttgtaataggaagtgccgtcagaagcgataactgacgacgtctaatgtctatctgaccgcagtcgctgaaacctctacaacttagttgaccgtaactgccaga

SEQ ID NO: 484865 - DNA, 265 bp, Homo sapiens
catggtccccagcttctcctaggatcccagtggcatttatcagtggccagctacctgccaggcccgggctggggcacggtcctgcgccatgaggccaggccgcctcccgcacccctaccccgtggcagcagcatacctctgcatttctggaatgtgtgtccaccactgatctttgtatactcgacgcatttacaaatctatctccgctacgaggccaaatgaacactgcatcttgatcttaaaacacgacaagcaagacaaaaaa

SEQ ID NO: 484866 - DNA, 131 bp, Homo sapiens
actctcgactaccgtaaaagaaaaaagataaattaaaccttaaaagtatgtttttatctttctaatttccctatcttctctattcttatcttcgccttcccgtacttcacggaagtcgatagtgggtaccg

SEQ ID NO: 484867 - DNA, 686 bp, Homo sapiens
gatcccccgggctgcaggattcggcacgagcttttacccattggcgtgagtatttttcctcagcttccctctttctccgtattctgctcctcctcagtcccatcctccacgctttggaagctactgccttactgcccggagcgccgccgtccccgaacctcccctgcttctccctttccttctgttccggtttctggtcgtaactcaagagcaaaccaccgtactgcaaaggaaccagatattgtgctcgcggttccaaaccgggcatgggcaccgaatgcttctcgataaatccccttatggcctctgagccttaaagaaagcatgggaggaaaacatgcgcccaagctcgttcgcaggaacatgttcgcgtgtctgcgcctgtgtgcgcagccagttatctggctgaggatcgctcgccaacttcagacatgacccgcccaggacccggtgccacactcacccaaaatacgaaacttcacaggagccagaagaaggagtccttttctccgtcggctcggcaccgaaacgggatgcaagtcccctgatttagtaccttctgagaaaagtggacaagaaaccctagacctggattcaaaagcccctttggtcgggtcttaaggtaggccctaagaaaccctgtttacgccactgccaccctaatttttggaaccgtctactccccg

SEQ ID NO: 484868 - DNA, 484 bp, Homo sapiens
gacttatccgtagcccttttgtggaaaatacttggaaaatcaaatttatcaacctgagaatcattggaggaagttcccttgctcctgaatcagtactgaagccatctgtaacatttgaaccaagtgatctggaggccttttataacgtaatcaccttgtgtaatagccctgaagtaagacctaacgtaaggcagataatagatagtggcactggagaccaggttttacatagtggagatgaggcattgttgaacaaaagggaaatgaatttgctaacccctctaaagcattgagcactgtacctctgcttgaagaagctgcagaaacaacactgaccatctatctctaagccactgccgatgtgagaattgacatattttagttgaaatacctttttggactacagactaatgtgaatacttgcctatttctacctgagttacagcaaatgttctgagaacttattgcggtccaccaaataaat

SEQ ID NO: 484869 - DNA, 1898 bp, Homo sapiens
gcctcgcggaggcgggactctggccgcctgttttttttgcatgccgcgctgcgcgcaccgcgggctccgggctcagaagtgcggacgcccggctcccggcgtggacgccatggtgctgtgcccggtgattgggaagctgctgcacaagcgcgtggtgctggccagcgcctccccacgccgtcaggagatcctcagcaacgcgggtctcaggtttgaggtggtcccctccaagtttaaagagaagctggacaaagcctccttcgctactccgtatgggtacgccatggagaccgccaagcagaaggccctggaggtggccaaccggctgtaccagaaagacctgcgggcccccgacgtggtcattggagcggacacgatcgtgacagtcggggggctgattctggagaagccggtggacaagcaggacgcctacaggatgctgtcccggttgagtgggagagaacacagcgtgttcacaggtgtcgcgatcgtccactgctccagcaaagaccatcagctggacaccagggtctcggaattctacgaggaaacgaaggtgaagttctcggagctgtccgaggagctgctctgggaatacgtccacagcggggagcccatggacaaagctggcggctacgggatccaggccctgggcggcatgctggtggagtccgtacacggggactttctgaacgtggtgggattcccgctgaaccacttctgcaagcagctggtgaagctctactacccgccccgcccggaggacctgcggcggagtgtcaagcacgactccatcccggccgcggacaccttcgaagacctcagtgacgtggaggggggtggctcggagcccactcagagggacgcgggcagccgcgatgagaaggccgaggcgggagaggcgggacaggccacggcagaggctgagtgtcacaggactcgggagaccctgcctccgttcccgacacgcctcctggagctgattgagggctttatgctatccaagggcctgctcaccgcttgcaaactgaaggtgttcgatttgttaaaagatgaagcaccccagaaggctgcggatattgccagcaaagtggacgcctctgcgtgtggaatggagaggcttctggacatctgtgctgccatggggctcctggagaagacagagcaaggttacagtaacacagagacagcgaacgtctacctggcatcggatggcgaatactctctgcacggcttcatcatgcacaataatgacctcacatggaacctctttacatacctggagtttgccatccgagagggaacaaaccagcaccacagggcgttggggaagaaggcggaagatctgttccaggatgcgtactaccagagcccggagacgcggctgaggttcatgcgggccatgcacggcatgacgaagctgactgcgtgccaggtggccacggccttcaatctgtcccgcttctcctccgcctgcgacgtgggaggctgcaccggtgcactggcccgagagctggcccgtgagtaccctcgtatgcaggtgactgtgtttgacctcccagacattatcgagctggccgcccacttccaaccccccggaccgcaggcagtcactgaacatgctggtgcagactgaaggcaaggagcggagcctgggcgagtatcagtgcttgctggagctgcacggcttccaccaggtgcaggtggtgcacttggggggtgtcctggatgccatcttggccaccaaagtggccccctgaagcccaggcagcatgttcattatagggatgtcctcccccaggctgcaggtggaccgcccggtccccaagtaccataggacagtcacataggagcgtgtagtcgtgactgaataaagaaagcaaaagcctgaaaaaaaa

SEQ ID NO: 484870 - DNA, 1470 bp, Homo sapiens
gcctcgcggaggcgggactctggccgcctgttttttttgcatgccgcgctgcgcgcaccgcgggctccgggctcagaagtgcggacgcccggctcccggcgtggacgccatggtgctgtgcccggtgattgggaagctgctgcacaagcgcgtggtgctggccagcgcctccccacgccgtcaggagatcctcagcaacgcgggtctcaggtttgaggtggtcccctccaagtttaaagagaagctggacaaagcctccttcgctactccgtatgggtacgccatggagaccgccaagcagaaggccctggaggtggccaaccggctgtaccagaaagacctgcgggcccccgacgtggtcattggagcggacacgatcgtgacagtcggggggctgattctggagaagccggtggacaagcaggacgcctacaggatgctgtcccggttgagtgggagagaacacagcgtgttcacaggtgtcgcgatcgtccactgctccagcaaagaccatcagctggacaccagggtctcggaattctacgaggaaacgaaggtgaagttctcggagctgtccgaggagctgctctgggaatacgtccacagcggggagcccatggacaaagctggcggctacgggatccaggccctgggcggcatgctggtggagtccgtacacggggactttctgaacgtggtgggattcccgctgaaccacttctgcaagcagctggtgaagctctactacccgccccgcccggaggacctgcggcggagtgtcaagcacgactccatcccggccgcggacaccttcgaagacctcagtgacgtggaggggggtggctcggagcccactcagagggacgcgggcagccgcgatgagaaggccgaggcgggagaggcgggacaggccacggcagaggctgagtgtcacaggactcgggagaccctgcctccgttcccgacacgcctcctggagctgattgagggctttatgctatccaagggcctgctcaccgcttgcaaactgaaggtgttcgatttgttaaaagatgaagcaccccagaaggctgcggatattgccagcaaagtggacgcctctgcgtgtggaatggagaggcttctggacatctgtgctgccatggggctcctggagaagacagagcaaggttacaggacccagcgggttttgctctgaggatctttgcaggtggaagtcactgagggaaggtgacctggagcctgggcagagcaaggaaggagggccacaccttctgtccctctgccctcaggaatgctgcttttcccgaaagggtgagaagcagagggtgaatgacagagagggaacagtggcagccgcgagcacataggagaagcgtgacctccttatgggctctagtctcaaaggggctgtatcagtccatgttctcctgagaaacagaacccaatacggtgtacacagacaaaaaa

SEQ ID NO: 484871 - DNA, 427 bp, Homo sapiens
cgatacctgagatcaatgatttgagcgtaaaaggtagtgaaatggacagcgagagacttcagtatgaaagaaagcggagatcaaccaaagtaggtttttctcacaggttaacatcttcaaacaaatggcatcactattcatctatgcccaataatataaataagatgttttctacttaatgtatgataaagaaggtattttaaaagtaaatgaagatttccccccaagctggaaaccttgaatttaaacaccactgatctgaatttaaaaacaaggcttaactcatccgacagaacataacctgccctttctctgagttgtatctaacctcctttataaactgatactgttttctcggttatttagcttggctttttctatctggaggtttctttcactcctctgtctctctaccagtctttaatgg

SEQ ID NO: 484872 - DNA, 151 bp, Homo sapiens
catctcaccactacaatcttcctgggaacaacatattacgcactctcccctgaactctacactacatattttgtcaccgagaccctacttcttacctccctgttcttttgaattcgaacagcatacccccaattctcagacggggtgtcca

SEQ ID NO: 484873 - DNA, 706 bp, Homo sapiens
gcctcgcggaggcgggactctggccgcctgttttttttgcatgccgcgctgcgcgcaccgcgggctccgggctcagaagtgcggacgcccggctcccggcgtggacgccatggtgctgtgcccggtgattgggaagctgctgcacaagcgcgtggtgctggccagcgcctccccacgccgtcaggagatcctcagcaacgcgggtctcaggtttgaggtggtcccctccaagtttaaagagaagctggacaaagcctccttcgctactccgtatgggtacgccatggagaccgccaagcagaaggccctggaggtggccaaccggctgtaccagaaagacctgcgggcccccgacgtggtcattggagcggacacgatcgtgacagtcggggggctgattctggagaagccggtggacaagcaggacgcctacaggatgctgtcccggttgagtgggagagaacacagcgtgttcacaggtgtcgcgatcgtccactgctccagcaaagaccatcagctggacaccagggtctcggaattctacgaggaaacgaaggtgaagttctcggagctgtccgaggagctgctctgggaatacgtccacagcggggagcccatgtgagtctcgggggcggtggggggacgggggacacgtgtggaagctggctccctcacacgtggggtgtccacccagcctttggaaaga

SEQ ID NO: 484874 - DNA, 418 bp, Homo sapiens
taaagatacaaaattggccgggcctgttgggcgtgtatgcctgtagtcccagctactcggggggctgaggcaggagaattgcttgaacctgggaggcggaggttgccgtgagccgggatcgggccgttgcattccagcctgggcaacaagagtgaaactctgactcaaaaaaaagaaaaaaaaaaaaaaaaaaaaacaacaccaaaaggtatatagtataacaggtattaaaatctatttcaaagaaaggaacttgttgattacgacactggtaatttacagaagagcaagcatttgaatccagccctctgattccagtgtaacctacaatgtaagtgctttcctcaagcataccttacagagtctgcacatcagggagagtgttcctgcagaggtgatgtcatctggtattttcacc

SEQ ID NO: 484875 - DNA, 700 bp, Homo sapiens
gcctcgcggaggcgggactctggccgcctgttttttttgcatgccgcgctgcgcgcaccgcgggctccgggctcagaagtgcggacgcccggctcccggcgtggacgccatggtgctgtgcccggtgattgggaagctgctgcacaagcgcgtggtgctggccagcgcctccccacgccgtcaggagatcctcagcaacgcgggtctcaggtttgaggtggtcccctccaagtttaaagagaagctggacaaagcctccttcgctactccgtatgggtacgccatggagaccgccaagcagaaggccctggaggtggccaaccggctgtaccaggcaaggggcccctgcccttcggcccttatgaaaattcctttgctgtgatgaggggatttgcgggtggtaaatatacatgatacaaataaacgtcattcaaaagatgcagttggtggcacagcttagctattgctatgttataatgtaatgcactattgcagtaacctaataataccattaatgatacagaattaatggagcttatctgttactgtgtgttataatattctcttgcaattgatacagtatcattgatgatatacaattaatgtagcttatctgttactatgtgttataataatttctcgcaattgatacagtatcatttatgatatacaattaatgtagcttatctattactatgtg

SEQ ID NO: 484876 - DNA, 1570 bp, Homo sapiens
  misc_feature (581)..(583): n is a, c, g, or t
  misc_feature (600)..(600): n is a, c, g, or t
  misc_feature (684)..(684): n is a, c, g, or t
  misc_feature (702)..(702): n is a, c, g, or t
  misc_feature (1248)..(1248): n is a, c, g, or t
attggacccccagagtttgaatgctctctcggagtatgccgccatctgaatttcttccaaggcccctgttaaagaaggcttgcaaaagtgctgccagaagggacaccgtccttttgcgggttggcacatgtccaccggattgcttcaccatgttcctgctcaagcatctagcacctcggatgaaccgtaccgggtgctcctttctttggaagatctctcgacaagctggtatcttttgcatgtccccatccagagcagatgatgcggtacactaggcatgccccagctgtgcacagtccctgcccgtagccttccggtggctatcttgtccccaacttttgtacactggcagtctgggcatcgcggatgttcacaatgtccacctgaggctgcgtcctcctatggaggggttgccaggatcttctgttttcgctctggatctgcgctgtagatctcctggatgatctgctcagccatagtttttggggaggggcttcccatgcccagactccttgatcattctacccccgtgatccctcggcccttgaaggtcttggcaatgatggctgttggctggtgcnnngcctggccaaaggcctngcacagctcctccacgctgtgtccatccacgatgatggcatgccaaccgaaggcctcgcaccgcttctggtagatgtccatctnggtgctgcagtggggccnccccgcctggctggccaggactccagctctctgctgtctccctcaggggccggcctgctgctggtggagacgctcctcctagcaggcagacggctgctgtgacggtgccgtctaccaggcagggtctcagtccttctccgcactccagcctgcatcttcccatcttctgcacgatttccagtgtgtttcctccatgggacgccatcgctgccgctcacccctggatgcccacaggctatggagtggcagttctctgggcggcttccatctctcctgccttggtgcagagactgtcacgagcgggacctccccagcccctgctgcggggctgaaatgcgtctgtaaacaccccccaccccgagcccaggcaggccagactcacacccaccccgtgaggccctcctgggcacatgctcactgcggttgtagggagctcagcgcatccacgtttcccccgtgctccgctcccagctgctgttcccggcctgtgtcccgaccctcagacctcagttcaccctctggtgcccacacagccccctttcctcnctggcccctccaccagggaatggctgggccaacctggggctgggctggggtgagccctttaactcacagccttgaccttagaggcactgaggttcaggaggcatctgcaaagcgagaaccggagcaggcctaggtgctgttttcacggcgcgtgcacccagcttacctgttcctgggctgggcgtcagtctcctatatttcagctgttttcctttttctgagacagactctggagtttagctcttcttacccagactggagtacaataatgcaatctcggctcactgcaacccagcctgggcgacagagtgagactccgtct

SEQ ID NO: 484877 - DNA, 108 bp, Homo sapiens
taatacaagattcatcttccgcagtatgaatgtgctaaaatattttgatttatggagctgtgaaagattacgtgctcgctgccttttgactcagaaataatacaagag

SEQ ID NO: 484878 - DNA, 952 bp, Homo sapiens
  misc_feature (630)..(630): n is a, c, g, or t
tgccagatctgcaaaaacagaaatgctgaagtttatttatgtttgaacggggtttcgctttgtcacccaggctggaggatccccgcctggctggccaggactccagctctctgctgtctcccttgcaagccaggggccggcctgctgctggtggagaccctcctagcaggcagacggctgctgtgacggtgccgtctaccaggcagggtctcagtccttctccgcactccagcctgcatcttcccatcttctgcacgatttccagtgtgtttcctccatgggacgccatcgctgccgctcacccctggatgcccacaggctatggagtggcagttctctgggcggcttccatctctcctgccttggtgcagagactgtcacgagcgggacctccccagcccctgctgcggggctgaaatgcgtctgtaaacaccccccaccccgagcccaggcaggccagactcacacccaccccgtgaggccctcctgggcacatgctcactgcggttgtagggagctcagcgcatccacgtttcccccgtgctccgctcccagctgctgttcccggcctgtgtcccgaccctcagacctcagttcaccctctggtgcccacacagccccctttcctcnctggcccctccaccagggaatggctgggccaacctggggctgggctggggtgagccctttaactcacagccttgaccttagaggcactgaggttcaggaggcatctgcaaagcgagaaccggagcaggcctaggtgctgttttcacggcgcgtgcacccagcttacctgttcctgggctgggcgtcagtctcctatatttcagctgttttcctttttctgagacagactctggagtttagctcttcttacccagactggagtacaataatgcaatctcggctcactgcaacccagcctgggcgacagagtgagactccgtct

SEQ ID NO: 484879 - DNA, 1097 bp, Homo sapiens
ggtgagcgtgttcactacagtgttgggctggatccccggtgctcgttcaccagcacgttcgcacagatgttaaggagacccttgcactgtactgctactgagggacggacgatgtgctccagtgccttggcacgcacgatacccacttaggtggcaccacgtctgtgaagctttgccagactgcgtacactatatatcaagtcctgattaaaagaaggggaaaacaggtggactcgaggccatcgtaatagttgactacacaatcatccatagcacgagaccgtgagtaccaaaagcgtctccgtgcatgcgacaacgcgtcgatgactcaattgctggcacactcgtaaaacctcctgtatgattgtcctgtgttcaatatccttccatagaaatacatggccagtagaagtgcttgtgtcttgaagaacgtcttgctgacatcatgtgtagtcaatccaatttgctgaccagttgcaaaacctggcagaagctaatcattaaacccagatgccaggaccagcacctttccggggagcccaagtgctttcttgctggatattggagccccacggactggatgcatcgcagctgctgcagcagcgggagggccgaatctgatggtgtgaagcccttaacctttcacattgtggctgtgataatgatcaagaattcttccttctgcgctatgtgggaacattgtgcatcccatgcaaaaaatgaagggcaaattcgctcagtgtgggtttttggatgtggtggggatcgcgggctcggcggaaagtacctggcgcatgcggtggtgccattacccccgtgaacaccccatgcggaagggtctgtgcctgctctcgaactttctacggagggtccttcatcgatgtagtgaaacacaaccatgcgctgcttgcttaataaagacgtgacccggggaatttccctaaatcgggtggtcccctcctgatttccagggtactcccctgttgtgggggaccggtttcgacgttgtcaagtgccccggcctcctcttaagttcctacttgaacattgcggctcgcctgggaatggttgcagccccgccgcctttgcggctggcc

SEQ ID NO: 484880 - DNA, 836 bp, Homo sapiens
  misc_feature (658)..(658): n is a, c, g, or t
  misc_feature (836)..(836): n is a, c, g, or t
gcctcgcggaggcgggactctggccgcctgttttttttgcatgccgcgctgcgcgcaccgcgggctccgggctcagaagtgcggacgcccggctcccggcgtggacgccatggtgctgtgcccggtgattgggaagctgctgcacaagcgcgtggtgctggccagcgcctccccacgccgtcaggagatcctcagcaacgcgggtctcaggtttgaggtggtcccctccaatgtttaaaggatgaaaatgctttgggacaaaaattgccttcccttctgctactccgtatgtgtgtactgccatgtgaagacctgccaatgcagaatgggccctgtgatggttggccaacctgtgcttgttaccatgaaaatgaccttgctgtgtggccccctgactgttgtgtcaatttgggatgctgtgacactgatctgttgaccagtctgtggggggggtggcctttgaatttttacctttgtggaaggaaaaatggccccttggggttggtggaaccaaaaaggtccatgggactgccgtaaacgatgggatagcttggtacacacgtgtggtattgaaaagttgtgtcgaagcagggacaacaacaagtctggttgtttcccaacaatcgggttggttcctggcgagaagtacctggtaccngcaaagctatgacgtttaccccaaaagggcctaaaataaaatggaacgcccaattaccaaatgtcctatggggtagacaaccccgataggtggggttacaattcccgggtggcaacaattttcccttaaacccggaaagagggggaaaaaacacctcggacacaatgggggtttggcn

SEQ ID NO: 484881 - DNA, 710 bp, Homo sapiens
  misc_feature (114)..(114): n is a, c, g, or t
  misc_feature (185)..(186): n is a, c, g, or t
  misc_feature (596)..(596): n is a, c, g, or t
ttttttctttggggttaaaagatggttgtagcatttaaaagggaaaatttcctccttggttggctagtatctggggtgtattctctgtaagtgtagctcaaataggtcatcatnaaaggttaaaaaagcgagggtggccatgttatgctgggtggttaaggccagggcctcctccaaccactgtnntgccactgacttgctgtgttgcacccgtgggcaagttcacttatacacttaatatagggtgcccctcaagttttctcctctctctgtgtgttaacaatgtgggggcattacatataatatactgtgcacctataacctctcagagaggcgacagtttgtgagaggcgcaatgtgaactataatgtgcgtttttataaaacacagccattttgtggggggaatactcccctctcaaggcacacgagagaaatatctcctcaaagagacacccgtggagtatctatattcttatataaatatgaagggagaaatttgttcaccaccaatgtgacagcactttgtggatatcacggtctccccgggtgtgtgtctccccccgaagaatgtggtctgtgtctccaatatgaggnctccactatatttgttggtgttctccctcccaacgagaaaacagtgttggaatgtgagaatctcccactgtgtggggaaaaaaaaggcgggggtgaggatataaaccataggcc

SEQ ID NO: 484882 - DNA, 713 bp, Homo sapiens
  misc_feature (114)..(114): n is a, c, g, or t
  misc_feature (185)..(186): n is a, c, g, or t
ttttttctttggggttaaaagatggttgtagcatttaaaagggaaaatttcctccttggttggctagtatctggggtgtattctctgtaagtgtagctcaaataggtcatcatnaaaggttaaaaaagcgagggtggccatgttatgctgggtggttaaggccagggcctcctccaaccactgtnntgccactgacttgctgtgttgcacccgtgggcaagttcacttaactattaagggtgccctcagtttcccttcgtgttaaaagtggggataataattactgacctacctcaaagggcagttttgaggcatgactaatgctttttagaaagcatttggggactccttcagcacaggaattctcaagaccgtgagtattttttataataggaatgtccaccatgaacttgatacgtccgtgttgtcccagatgctgctcattagtctatatggttctcctccaaaaaactgaatgaatccatgggagaagcgggggataactagccagacaaatttggagaatacttaaacaacgctttggcacggaaacatacagaggatgcctttctggtgatggggggggatttttccccttttacaggtggggatatagtagtactgtgtgacagaataattgggaataatcctattatatcactctgaagctatggactatctgaaatgggtgtcctataaagtgaatgattctg

SEQ ID NO: 484883 - DNA, 416 bp, Homo sapiens
accccgctcggatccggagaaacggccgccagtgtggtggaattccagaaatgcatcaaacagaactaatgcctgggcatgagggagtactgactaaacaacaattaaaataaataagcggccaagcagctgggaccacaagcgaacgccatcatgcccagctaatttttgaagccccagcagagatggggttttgccatggcggccaggctggctcgaactccggacctcaagcgaaccacctgcctgggccttccaaagcgcggggataacaggcgtgaaccaccgagcccggtcccttggtcctaaagggattcgaagacttgtgaacgaagtggaaacattgcatagaatataatacacaaacggctggatttaaataatacgttggactgatgttaagtatttttgggcta

SEQ ID NO: 484884 - DNA, 189 bp, Homo sapiens
atacccattcgagctcggcacccatttttctactctcttttccttttctctctattttttcttttctctaaatcacatgattaatgataagtaaagcgaatgtgcacgcacaggagatatattactgtgagggcgagcacactataaatttgcgcgccctctatttttaccaattttacattaacttat

SEQ ID NO: 484885 - DNA, 701 bp, Homo sapiens
  misc_feature (173)..(173): n is a, c, g, or t
  misc_feature (194)..(194): n is a, c, g, or t
  misc_feature (211)..(211): n is a, c, g, or t
  misc_feature (236)..(236): n is a, c, g, or t
  misc_feature (250)..(250): n is a, c, g, or t
  misc_feature (252)..(252): n is a, c, g, or t
  misc_feature (307)..(307): n is a, c, g, or t
  misc_feature (424)..(425): n is a, c, g, or t
  misc_feature (431)..(431): n is a, c, g, or t
  misc_feature (663)..(664): n is a, c, g, or t
gctctagaacgagctggaggattctgcctaccgatacagagccttcgagtcgtcctggggcctgccattacaatccacctccatccgcttggaaatggccttcgtcccggcctatgactggtcccagcgggcagtacagaccccctagaagcccctggagctcccctttttcngtggcccctgcccaatcctcngtgagtctatccacccncctctactcctgccctcaagaggantttcaaagatggangngctggcggctccctaaaccacttttctgtgttcatccgcctccatcctgagatcngaaactggtgacctcgtcggcccctgtagggtgccctgacacagaagagggaatcccttgcagaccaacatgctgggctatattgacgacggtgtctgagatcggggaccgatcttnngaagangtcagtccctccttagttgcccgcctcagctgaggcctgccgccatttttcttgctgtccgacgtactgcagagcgcgccaagctgcccggagctctccgagaggcccaaagagactgcttacgtgccggccaggcagggggtagtcgcctggaggcccagaggaacggcctcccccaacttagcgggttatgctgaccgggacggtgaggggaacgaggccacccggactnncgcggtgatgtcatcgcagtccttgcgcccaatctga

SEQ ID NO: 484886 - DNA, 730 bp, Homo sapiens
  misc_feature (496)..(496): n is a, c, g, or t
  misc_feature (675)..(675): n is a, c, g, or t
cttgtctgaggagaagaagcatctgattaccttgaattggatacaattaacaatctcgtcaaaaaatattcacagttcataaactttcctatttatgtatggagcagcaagactgaaactgtcgaggagcccatggacgaagaagaatcagccagagaatagaatgaagaatctgatgatgaagctgcagcagaggaagaagaagatgaacagacaccaaagactaaaaaagttgaactgtctgggactgagaacttatgattgatatcaaaccaatatggcagagaccatcataagacgttgaagatgatgaatacaaagctgtctacatatcatgttcaaaggaaagcgatgaccccatggcttatattaactctactgctgaaggggaagttaccttcatatcaattgtatttgtacccacatttgctccacgtggtctgtttgacgaatatggatctataaagagcgattacattaagctctatgtgcgccncgtattcatcacagacgacttccatgatatgatgcctaattacctcaattttgtcaaggatgtggcggactcagatgatctccccttgaatgtttcccgcgagactcttcagcagcatctgcttaaggtgattaggaagaagcttgttcgttggaagaatgtggaccaacatcaagctnggtgtgattgaagacactcgatcgaacacgcttgctctgctatgatcagactctt

SEQ ID NO: 484887 - DNA, 244 bp, Homo sapiens
gcgatactagaggatccccgtagcccacctgatatgaaaaccaacagtagttttccacgattctgcttgtcccctagagttctgtaaacgtgccatcccaatattccaggagtcagcaagctctttctgtaaaggggccagagagtaaatattttaggcttggcagatcatatatggtctctgttacaactgctcaactctgcctttgtaacagaaaagaacccataatctcacacccagaggt

SEQ ID NO: 484888 - DNA, 823 bp, Homo sapiens
cactgtatttaactaactttaaaaaagaaaaaaaaatgtatacagtgttctccaaatagtcccgaattgtcgacctttgcttacaagaagtagtctggtctgcataggatgtgatagctatctctgttcattttacaagtgtggggcaaagttactgtttctagacaacccaactgctttccctgtgcagcgtttgtagcaacggacattggcacagtgacattctgcggcggggatttacttaatggactctttacaattgactaacgtggtttccctatcggggaaaaaactggccaactagaatccttgtcactgataagcaaaggaaatcctgatatagtagtaaattatgtgagacgaagtggtagatggattttatataatgaattacaattatacgtgtacaatcaaatcttagtctcagaggagttaatttatgtaaagttgtgtaaaaatttaatacttacaacaatgacaatgataaaaacgttgatagaaaaaaagcacaaaaaaaaatgaacatagacaatgttaagaggccgccattcaggcgtccactagaagcatgatgaaaaaaaaatatgatagaggacacgagagccaataaaaagtataaaaaaaaaagacatgtggcaccaagagatactagtctggacaagaatagagaaactcgcacggtgccaatgcgaacaaaagacggacacaggagacaactagcaccagcagacaagtataaaaaaaaactgcctaccgcgaggtggcaggaaaaaagctgaaaagctgtagtacctacaagatcaacaaggcatcacgatgaagg

SEQ ID NO: 484889 - DNA, 149 bp, Homo sapiens
taacgacccttacacttgaaacgtaagacggggctagatattgggagaacaaagtggaagatgctttctacaaaggtgaactcaggctgaatgaggaaaaattatggaagaaaagcagaacggtgaaagtgggagatacattggatctt

SEQ ID NO: 484890 - DNA, 422 bp, Homo sapiens
accgcgacactcaaggtaaagcttctaaggtgagaaacggtatcttgttatatgaacagagctccctttttttttgagacagtcttgctctgtcgcccagggaggagagatcagactgttactgtgtctgtgtagaaagaagtagacataagagactccattttgttctgtactaagaaaaattattctgccttgagatgctgttaatctgtaaccctacccccaaccctgtgctcactgaaacatgtgctgtgtcaactcagggttaaatggattaagggctgtgcaggatgtgctttgttaaacaaatgcttgaaggcagcatgctccttaagagccatcaccactccctaatctcaagtacctagagacacaacacactacagaaggccgcagggacctctgcctaggaaagccaggta

SEQ ID NO: 484891 - DNA, 1105 bp, Homo sapiens
  misc_feature (788)..(788): n is a, c, g, or t
cacacccttcaatcaagtgccttctgtagtgtgaagaaactgaaaatagagccgagttccaactgggacatgactgggtacggctcccacagcaaagtgtatagccagagcaagaacatccccctgtcgcagccagccaccacaaccgtcagcacctccttgccggtcccaaacccaagcctaccttacgagcagaccatcgtcttcccaggaagcaccgggcacatcgtggtcacctcagcaagcagcacttctgtcaccgggcaagtcctcggcggaccacacaacctaatgcgtcgaagcactgtgagcctccttgatacctaccaaaaatgtggactcaagcgtaagagcgaggagatcgagaacacaagcagcgtgcagatcatcgaggagcatccacccatgattcagaataatgcaagcggggccactgtcgccactgccaccacgtctactgccacctccaaaaacagcggctccaacagcgagggcgactatcagctggtgcagcatgaggtgctgtgctccatgaccaacacctacgaggtcttagagttcttgggccgagggacgtttgggcaagtggtcaagtgctggaaacggggcaccaatgagatcgtagccatcaagatcctgaagaaccacccatcctatgcccgacaaggtcagattgaagtgagcatcctggcccggttgagcacggagagtgccgatgactataacttcgtccgggcctacgaatgcttccagcacaagaaccacacgtgcttggtcttcgagatgtnggagcagaacctctatgactttctgaagcaaaacaagtttagccccttgcctctcaaatacattcgcccagttctccagcaggtagccacagccctgatgaaactcaaaagcctaggtcttatccacgctgacctcaaaccagaaaacatcatgctggtggatccatctagacaaccatacagagtcaaggtcatcgacttcgcgttcagccagccacgtctccaaggctgtgtgctccaactacttgcagtccagcatattacagaggccctggagaataatcatgtaggatacacatatgtggaggcgaatggct

SEQ ID NO: 484892 - DNA, 454 bp, Homo sapiens
  misc_feature (351)..(351): n is a, c, g, or t
  misc_feature (361)..(361): n is a, c, g, or t
  misc_feature (450)..(450): n is a, c, g, or t
attttaagagcttttcagcttttgaatatgtcatgtaaacaactgtgttgtctgtgactaactagagatatgtttacttttccagtccctatgctttggtagttgttttacttacctcaattcacagcctaggacctgaattacaatgttaaatagaagtggtaatagtgagtaccttgtcacctgatcttaggaggtaaggttttaataattcaccaaaaagtatgatgtttactgtaggtattttatagatcccaacaccaaattaatgttatattctgtttctactttgctgaaaaaattttataatgaatttcaaatgcttttctggcacctattgagaagaatgtnttgtatttcncatttcttctattgtggtaaattacattgtttggttttctaatgtggaacaatcttgcattcctggaataaattcaacttgattgtggngtat

SEQ ID NO: 484893 - DNA, 144 bp, Homo sapiens
  misc_feature (55)..(55): n is a, c, g, or t
tattggggaataaggaatgtttgcacctccacatttttattgtgctttctgtggnatgtgttgaaatctcatgtgttaatttattttctgcgtgttattattaaaggtgccattactttttaattaaaggaaaagtgtacatta

SEQ ID NO: 484894 - DNA, 185 bp, Homo sapiens
tgggcgaatccgccctatagtgacagatcatccagttaaacatatttagtgaataagaaatacattaatccaatgaagactgtagaaaaagaatttttagcatctattaaggaatcttcagctcagtttacacccaatccacattcatagttatatgattgacgaccactaggaatataacaagt

SEQ ID NO: 484895 - DNA, 315 bp, Homo sapiens
ctgcatccaacgccgccactccggcattctgcgggatctgcagccctactccctttcgatcggacgagggtacggaggccatcggccgtcccttcggatacggcgctcgcccatctctcaggaccgactgacccatgttccactgctgtccacgtggaacccttctccacttcggccttcaaagttctcgtgcgaatattggctacgtaccaccaagatctgaaactgagaaggatccacccgtgcccgcgccctaggcttcaaggctcactcgtagaggtcctcataatcgtcgcggagtttggatgcagtcat

SEQ ID NO: 484896 - DNA, 405 bp, Homo sapiens
  misc_feature (2)..(2): n is a, c, g, or t
cncccagtgtaggtgcagaaaaggaattaagaaatattcatgcagccaaaaaaagaataagattgtcttttgtggtaacatgaatggaactggaggccattattcttagcaaactaacacaggaacagaaaaccaaatactgcatgttctcacctataagtggaagctataaatgataagaatttattaacacaaagaaggaaacaacagacactggggtctacctgagggtggagggtgggaggagggaaaggagcaaaaaaataaccattgggtcctgggcttaatacctgggtgatgaaataatacgtacaacaaaccttggtgacatatgtttacctatgtaacaaaccttcatgtgtacccctgaacctaaaataatagttaaaaaaagtatttaaatta

SEQ ID NO: 484897 - DNA, 401 bp, Homo sapiens
aacaggcattgcatcttggatgtctgtgagctacacagtatgcatctcagccacacgttccagtaaattctctttttttgcttgagctggtttctgaccccaccccccgccccggccaaaaaatcctgactctgctgagggcagcaataactgggacatcagacactccctctagaatcaggacagaagtgacaaggctagccaatcaggggcaagaggagaaagacacatgcattggcacacacaggctcacacaccagcagggaacagagaaaacagcaagtcccagggtgggccaagtctggtccatgtgtttcctgacacaaggtctaagtgggtctctgtcttcatctggggttccccagaaaaagactctgaggccaggatgtacattcaaggag

SEQ ID NO: 484898 - DNA, 219 bp, Homo sapiens
tagtcagctcgggcccggatagagcggtctagcggtctcagcctttctctactctgagatttgttattctaaaacatcctcaaatatctaaagttcatgtactcaacccagaaatcaggtccattcccctagagtctgcaactccattctaaagaaaaacccgcctctgtatttttaccaggcatcacatgacttagggctagttttgacttaggcagg

SEQ ID NO: 484899 - DNA, 1665 bp, Homo sapiens
ggtctgtggccggagggtgatcaggtgttctagacacagatcagacattgtggtaatgatgccttgaaataaacactaaaccacctcgacagggcagccaggttcaactccttggcagagatgtgtatccttatggcctgcacacgtgcacaataaaaatgggagcttgagacgcaagaagaatggtcacctgaacgagaaacattgagaacggattactggcatcgagcttttagctgtcttctaattcaacaccgaaaataagctatctgtacagccaaagatcagatgctaagattaccttatccaggtggttaacgaatacggtgtggtagtcatccattaagcaatccagccgagcttgaggaaagtgacgcccttggcagtgaggcgagacagcacagagacggtgaaagctgagcctaggaattcccttgtcagaggttctccagaagaactacttatttaacacgaatcactacaagctcagctgatggtatctggggtgaccatgcaaatggactaccattgggtggggaggcaagaatgtaacttggaaacccagaatcccaagagaattacaagccattggctatgtgtccacaggaaagacctacacgaacttttggaaatagccggccggtgtggcaattagaacacgcccggttcaaactttgcgcgacctatctcttcaggggggactacacatgacacggtcagcccaacatgcagtcttcatgctagatacacattcgttaactacagcggatactccactactatttctctcctgccttctctttttttttctctctacattctacttcatcaccttgtccacaccgatccaagacacacaaaacgaacagacatacacaacaacaaacacacaacacgcacacacacgaacacacacaccggccatcacacgacagcgcccgacactacacccacaaacacccaaaacagagaaacagagccgcagagaaaggaagagaaaaaaacaaagacaagacacaaacagagcgagagaggaggcagaacagagaggcacacagaagcacggagaaaaaacaaaagagaaggaaagaaaacgaagaacagaaggagagaaggaggagaggacaaaggagaaggagaaagaagagaccaaagaagacacgacgaacgaaaagacgaaggcggaacacaccaggaacaacacaaaggaaaggagaagacagcgaaacaacagacaggaaagaaaggaacaagccaaagcaagagaaaaggagagagagatcagtacgaagaaacaagagaagacacgaaaacagaagcgagacaagcagcgcaagaaagaaaagacaaaaacagcacaacaaaggaagacacaaaaagaaaaagagaacgagaaaagggcagggcagaggaaagatgagaaacaaagaacagaaagagctaaggacaggaagagacagaaagacggaagacaacaggaagcagaaacaaacgaagagacgagaaagcagagaagacacacagacagaccgcaaaaagggcaaaagaaagacggcaaagacacggagacacaaggcagagaggcgcgaaaacaacggaaccaaaaaagagaaagcagaggagagagaaggacagagaggacgtaagccggcagaggaagaggag

SEQ ID NO: 484900 - DNA, 439 bp, Homo sapiens
  misc_feature (357)..(357): n is a, c, g, or t
  misc_feature (429)..(429): n is a, c, g, or t
caggggtgggggatggtctgtgggccctgccttttgagtggccatgagcatggcggtgccagtaacagaagtgggggaatcaaggaaagctggcctggctgtgtggctgcagggtaccagcagtgtaaaggaggggacagtgcagttgaggatgtgagcactagaagtgctcttgctatcttcaaggacagctgtgtggatggcagctggaaatgtggcctggagattaaggcagaggcttggactggagacagaaatttgagtcttctacaatgagatgagatctgaagccttgtgaatagagaaggcagcctaagaaggaactcagataaggaagaaaagccagagacaggccgngtgcggtggctcacacctgtaatcccagtaactttgggaggccaagggaggtggatcacttgagctcaggangtcgagacca

SEQ ID NO: 484901 - DNA, 364 bp, Homo sapiens
gtgggtccaacccctttccccctttggaaacttccatccctcgggaagaacttgagaccctctgtcagctggaaaaatacccattggggaaactggaggccccatttggaggctccacctggttaataaaaaatggaattggggacccacttaaaaagagcagtttggccatgctctcatagggcagatctgattgtgttggggttctgcttctgcccctggtcagtttaggctctccaaaacctgaaagctggaatcgctaagtcccgcaaacaggaaagatggtggcccacccttccctctggtaactctgacccagataattttcaaatcgctgacagccagaggacaggggcaagggagg

SEQ ID NO: 484902 - DNA, 383 bp, Homo sapiens
acttacactgccttaccatatgaggcgtgaatacgagaatgcttgacaatacttgccactacgagttagccctcaatacaatttcggcctgtcactgtcattatagcaccttcacactgttgctccgtgtccatctagtacatcgccggttcacagatatttctcttgtcatgatagctccatactttcaagatgcgtctttgtagtatttcgtatccatttagtcattcattcactgagtctgtatctatcagacacctacttatggaccaggaactgttgattattatctttctgttcaggtcatgatgagctgttcatttcttagtgcttgccactataatattcagagctacagttcgctgagcacctgtctcaataga

SEQ ID NO: 484903 - DNA, 1024 bp, Homo sapiens
tactatttgttaaccaaatcaacaacaacctatatagctgttccccaaccttttcctccgagcccctaaaaacccccctcctatatactagactacctgaatcctacccctgcatcgagtcactggcgagaggtccaatcgcctacatgtatccaagggagactcgagggtatcgagctgaatagaagagacttgctaggctctcgtatacctatatctctccataaccagaattctcctttaatttattagactagttcgatcgggccgacaagaaggtaagtcgagtaattggtagtatccttccttcggagataccagagcttttttaccgcgatccttgtgcttttcatcgaccgcgatgaggcgagacagccaggaagcgcgctgatgcgcgggctcattactgtcctattcgtacaccctaggttagagggggcccttcccgctattgcatcggcgactgaatgttacatcgtcagcaaggatcctagggggtcactaaaacattgcctagcatagatcacttcctcagtgcccagagaagctagtgcagaactcctagaagcgaacagactgtattattgactaagctttgcacattgagctttttatgtgtagagagatgaacctctttagcggactccacttatagagtcccgctaaagcccatgtttgaagcccccatcgatggctcaatgagtacttgcccggagtactccttacaactaggcggtaaggtataatacgctcaaaatcattctcaacccctgagaaaagatagctaccctttcttgtactatcctatgaagcatattttacaagtccatctggttgaaaagagactaaatcgttcatggtttcttaatagccatagcctcggtaagatttttcaaacccgaattacgggcgattcttatgccggggaacctctatgttgcgaaccaaaaggccggggtatctctcgggactccctattttggtgagggccctccaacagaggggcgtacaagagccagcggac

SEQ ID NO: 484904 - DNA, 448 bp, Homo sapiens
  misc_feature (352)..(352): n is a, c, g, or t
  misc_feature (414)..(414): n is a, c, g, or t
ggcgataataaactaactaaaccacggactgcgttcccaccatatgctcccgctaagcataagccccattacccacaaaaggcaggaaagataatagctaggactcttgaatagcaagacttttattgctgcataaatgaaacaatgaaatggataagcacgagacccatgccaatataaaaattctaggatcgacacccagacacaccatattatggctcccctcctataatacaaactctcaagggggacctactcccaaggataaaatcagacctgcaaggggaaagattgactcacgaaaagaggctcttatcagccctattagcggaagaaaccaacaactcaagcnaaagctgcgagagaccccagctcagcccgggaaatcgaccagcaaacctcttatcaaacgancgccttaagccatatcactcaaactccacaaacc

SEQ ID NO: 484905 - DNA, 1165 bp, Homo sapiens
ggggcgcctcactagttgcctcccttagttatgtgcctcgcttttcctatgtcttccttcgttcaatagtccccctttccgtgggcgccttgttgcgtgaatggatggtgatactttttgctccacttgggctatcgtggtactgtcgtctctttctgggcacccatcttctcggccgtagtacaatgacttgcgtttttcgtgtcttcttgatttactctcctactttgacccgtgcctgtctccctatgtttatcttctgtctcgtgactcgcgcgtgtcacttttgtgtcttattgtcggcggcttatttacgggggcggcttcccgtcttttgattcgtcgtagtgaaatcgcgttttgtgactatccttaatgggtctgccatgtagttatgtgcaatttttttgtcgtgtttttgtctcttttttggtgatttatgtgtttgtgtatatgtagttgactgttgaactctgtgtggtaagttcgttttgtatgttgtatttaagatttatttatgtgacgtttgtctatgtttgattggtcgttatcgtgatgtggctggacgcgaagactcgctttgcagccctcagggtccgcgggcaacgtcagagctgtgttgataggacatacttttcaggttcctgacagtcactgacgctactacgcaataactaaagttgcgtgattcgcgtgtggaaagccagtgtcgtgtcacttgaccagcttccttttgcctgtccaccgtgccctctgctctgtctacctccgtttcgcgtatttcttcagtgcatgttagcaggtcttgctggaatttcccttcgtccctcgcatgttcaactgctagcatgatttgttacatttgtccacagcgtgctattattcatgtgctttgacatttttgtacaaagtcacgtttaaatgcgtgcgtgcagaaagaattaagagcacctagccctttggactggaactctctgcaggcgtgtggctgtccctggcccacttattaattctttggagatggctcttcgtgtgtaaatcagctgctgggtgcgttcggtcacacttcgtaggccagcgtagtttgtactcagcagaacagtagtggactcgactcaggttcgtaagccttatatttcacagacaaacaatctgggctgactgt

SEQ ID NO: 484906 - DNA, 116 bp, Homo sapiens
ctcaagagggagctttgccatccgtcggcccaagcgagtgagcagaccctcgtcatccagggcccccagtgtgtacagcggctccatggctgtgatcaaagtttccataggtggcg

SEQ ID NO: 484907 - DNA, 264 bp, Homo sapiens
ggtgggacccatggccatcatggagctgggattccacctgatgttctacaaatgaccttgtcctgccctggcccttcctgtcctggcctccagtgggcaccatgatctccacccatgttgcgtgaccacccctcaccccaccaatccctcagcgagattctagcagaggggagagagccatggggcctgtgggtccccatggtttgagaaatggggctggcagatgagcatgggtgtccacccatgggtcagtgttcagtgcct

SEQ ID NO: 484908 - DNA, 466 bp, Homo sapiens
  misc_feature (35)..(35): n is a, c, g, or t
  misc_feature (161)..(161): n is a, c, g, or t
  misc_feature (166)..(166): n is a, c, g, or t
  misc_feature (347)..(347): n is a, c, g, or t
  misc_feature (373)..(373): n is a, c, g, or t
  misc_feature (410)..(410): n is a, c, g, or t
  misc_feature (447)..(447): n is a, c, g, or t
cggactgcagtttctacacagcaaaggcattattnacaggtattgttggtgccggggactgtggggagggacttctgggaaggctgttgcttagcctgaccacaggcccagcacagctgagactggggcaggaaactcactgtccttactcagtgctgttngaaanggggcagcgcaggcaggtacagtgcctccatacgtgatgttcatctttctcactccaaagaccccagctgagcaatctaagatttcaccactaggcactggttccttaagtctttatccagtacgttaggctccaccctatggcggatcaacacactcaccagaagggttgaggctgtacnctgtgtgtcataggatatctgcatcngggtatatgtgagatgatactaaactatccggcaganactaccctgtggagccaagttgtggctttacacctcngtaatcccagcattgggaa

SEQ ID NO: 484909 - DNA, 1132 bp, Homo sapiens
aagttctggctagttctgagtcctgggtgttaattcggccgatgggtgtccctccccgcccggctggatggctgctccgtgaccgggatgcagagtttgcgtgacccgtgctgccgatgtgcggccaccctgagactgcgttgcgcactgttcctgtgcctgctgcagcccgtgccctggccatggctgtgcccccctgcccgtctcctcgctgatctccgtttcggtctcggctcctggctttttactgcccctgcatgaacgaatgttctggccctgtgtgttggccccaatatgcccaaatgtgaattcccttcctggccctggggacatgctgatgccgtccccctgtgcaccctggggcccatgctgctgcacagatgtggcctgggtgggctgatgattccccctgcctgacccacgctgggaataaaactattacatcatcatgtctctctccacacataccacacttgaattgtgaggaataggctgaacagaatagacaacatagggatagctctttgagtgaatttgtttgcactttaaagcttgaacgacacaaactacagcgacagatgaatactaaaagaaaatcaaggtattaccacatcattatgcagagttatgaaagtagatatacaaaaaaaccataaaacattatacagagataacagtatcaacaaataacgttaaaaacaaaaaattataacatatcataccacaaaaaaacatcacatatagaatacaaaacactctcaacacaacaaaaaatcaaacaaacaatacaaagtatacacacaaaataactatgtaactacgtcaaacaacctacatatatccatagcacacacagacaagactacaaataaaaaataaaccaagaaaacatataaaaataaaacatcaagcaacaataccaacacacaattgaacaactctacaaccaaccaaatacacaaaaaaaaataaaacaaccaacaacaaagaactacaacacaaatacaagcaaaacacagaaacacacttaacacaatacaacaacaatcaaagaacaacaaataacaaaaagtacaactaagaaaaacgataaaaaataaaaacagtctccttcctctccctactaaatatc

SEQ ID NO: 484910 - DNA, 393 bp, Homo sapiens
ctgaaggccttccagtgggacaagatgtagaagggaagacagtgatattgaagatcctgagtaggcctaggctaatgtgtgtgtttctgtcttagtgtttaagggaaaaaaaagttttaaaagaaaaattaatagaaaaaagcttacagaatgagtataaagaaaataatttttatgcagctgtacaatgtatttgtgttgtgttaattacaaaagagtcaaaagttaaaatgtaaaagtctgtaaaactcatgaacagtggcatgcacctgtggtcccagctactcgggaggctgaggaggcaggatcacttgaggtcaggagttcgaggctgcagtgagctatgattacacctgtggatagccccactgggcaacatagactctgtcccta

SEQ ID NO: 484911 - DNA, 128 bp, Homo sapiens
gagataaatccctcaagattttcaatcctgcagaaattgagaagtatgtagctgaaattgaaacaagcaaaagaagaaaacgaaaagaagaaacaaaagaaagcatcatgatgaatcaaatgtcttag

SEQ ID NO: 484912 - DNA, 115 bp, Homo sapiens
aggcatctctgatacatcatcccagctgttctcctcccactgactgcgattcacaacattggtccagacaccatgcgtgtcacctgggctcacccccatccattgatttaaccaa

SEQ ID NO: 484913 - DNA, 797 bp, Homo sapiens
cgaattctaggctttagttttttaacaagaaaaggacgtccagctcttgctttggcgcctgggagggctggtccccaaggttgcattgaaaggcggtttgtccattcccagccgcccggtggagggtcaatggatggcaatttgaaaactaactgttacacaaatgtttcctgttggagctcgtaatttctagtttcctggcctaaataggttcacgttcctcctcccgggtcagtttccagccacctcgcacatttctgagcaatttaaaactcaggcttatccctaccaaggcttttcgtaaaccctctttctgctttgagctcctaaagctgtttcatagaaggtatggccttattttttaataaagagggccgttaagaatcagtgaatgggcatgacccataatgctttttttgccaggcccaatgataataactagcattgtgaagtcctggctatctttggactcataggaggtgcacaccagagacagaggtctgcattcagtaaagtgcagttccccttcttcaggtgggagattttttttttttcttcttcggaatactgcagtgatatatctgcctgccagcttcatttagaagcttttaccagttaaggccaccatgtcatggccatccatggccgggctgcctgttggatttatggaaattcccatgcatggtctctccttagaataacgatgcaactttttctggatgtcttggttcagagtttcaggccagtccctggcaacggggttgcatttcaagtttgcctctacctggggcctaacc

SEQ ID NO: 484914 - DNA, 154 bp, Homo sapiens
actccagttaccatctccgagctagaacataccacactccccacgcagcgtgtggagggctagacataaagttaacaattccaactaaaaatcaccctgcttctggcttatctgaatcccttacccaccccaccccacacccagtgcttcaggc

SEQ ID NO: 484915 - DNA, 301 bp, Homo sapiens
gcgagagagaaccaggagcacggtgacgccgggagcaggtaccccgacgaccgttgtcgctgcgcagagttcgaataagctgccttggatgtagaggttctggattcttttctcagctttatcccacatatctttcgccccttcctggccatccgtaagggctgtgaccgtgcagctgtggaaactcctcccgatactgtgcaaccggacttgactgttcgtcttgtcgtccaggccctgcgggctagttggccctgctgtcgcccagcttgagacacgcgacggggactcctctagacgt

SEQ ID NO: 484916 - DNA, 642 bp, Homo sapiens
ttatgtgtatcactgtgtcatccagcaaggatgcctcttcgtacccagagaagttatccaggaactatatcgacagtgaactggcttcccaagcacattcggagttcgagaaggcaatgaaggagttggcttaaggaaaaaaccccacctggtgaagcagttccaaaagctctcagaggctgcagggagagtgggcagtgatatgacctcccaacaagaattcacttcttgcctaaaggaaacactaagtggattagccaaaaatgccactgaccttcagaactccagcatgtcggaagaagagctgaccaagggcattggaggggctaggcatggacgaagggggatggggaagggaacatcctccccatcatgcagagtattatgcagaacctactctccaagggatgtgctgtacccatcactgaaggagatcacagaaaagtatccagaatggttgcagagtcatcgggaatctctacctccagagcagtttgaaaaatatcaggagcagcacagcgtcatgtgcgaaatatgtgagcagtttgaggcagagacccccacagagagtgaaacactcaaaaggtcgtttgagatgggctggtcttatgagcagtacaagattttggcacctccaaagag

SEQ ID NO: 484917 - DNA, 296 bp, Homo sapiens
gctaccgttggaggctgcagtgcagcataaaaatctaacagagtaagaacgtgcccaggcttggtggctcatgcctataatcccagcactttgggaggccaaggcaagtggattgcctaagctcaggagtttgagaccagcctgggcaacatggcaaaacctggcctctacaaaaatacaaaaaattagctaggtgtggtggcatgcacctgtggtcccagctacttgggaggctgagctgggaagatcacttgaacctgggaggtggaggttgcagttagccaagatcgtaccag

SEQ ID NO: 484918 - DNA, 124 bp, Homo sapiens
cggttaagagatagcgttgagaaagtacttaatgtgtcatgtacattattcgggtgatgggtacactaaaagcccagacttcaccattactgcaatatatccatataacataactgtacttgcg

SEQ ID NO: 484919 - DNA, 90 bp, Homo sapiens
ccacgcgtcgcccacgcgtcgtgcccccatcttacctccccttcttctcgtcccctcatcctgagccccagacatccgagctgcctgccg

SEQ ID NO: 484920 - DNA, 250 bp, Homo sapiens
tcgactctacaggatcttacgctctcacccaccccctacttaggcaagtatggtggtcccccgctaccgggaggtcaccaatattgatgccgaacttagtgcggacacccgatcggcatagcgcactacagcccagaactcctggactcaagcgatcctccagcctcagcctcccgagtagctgggactacaggcacgcgccaccgcgcccggcggggtgggtggagagcggggggtgggtggagagcgg

SEQ ID NO: 484921 - DNA, 115 bp, Homo sapiens
ggcgctgacactcatggcgctgtcaggatacacaagggacaatagccaaagagttacaaaaaataaactcccatgcattctttaacacgaagtgtgccaacccacaacacacaca

SEQ ID NO: 484922 - DNA, 372 bp, Homo sapiens
gagatacgcgtgatattttatagatactcaattcatatctgacgtcaatataatttagggtatatgtttttccaaccttgaaagccctgtacacattccagcactcatttaagtaatgtcatggtgcactgaaaagtacctctaatgtactaccaatttgattttatatatactcttgaaaagtgatgaccttcatgatttttagccaccataataaatatacacatccagtcttagacatgtcagccagtcccataacacaggccaaggtaaagttaacacatgaaaaaacaaactgctttacatagatttgtagagcaagtggaaagggtaatttgagaaagagacagaatatattaatctcgattttct

SEQ ID NO: 484923 - DNA, 928 bp, Homo sapiens
gaaaaagagagatactggtggttatcaatgacccatgtataaagttgtttttattatgtaagctgtcgttcacaaatgtcttcttatgtatgatcattagaactgttctgtatactatactctgtaaaatttccacattatcgagacattactttcagccagtgaagtaagtccttttgtaactgccacttaatgaattcaataaaatcatagattctatggtatcttggctagtaagtacaactatggatgactatctgatgacaactttgcttgccactatgacattctaactggcttcatattctcgcaaactctcgatttcctgctattcctggtggcctattttgtacacttttcccagcccttcaaacatactagatgcagctcatctctccggtaggtcagggcacaaatccattacaaacttagaccagctctcgttccccatagcttaacataaactcctggccatatcggattccacgctgcccgtgggaagccaagggaggctaacacttccacggcagggcgatacctgcaaggccaaacaatttcgcagaagcacccaaacggccagcccattacgcacactcacagcggcatacacgaaggcaacccacaaattcctgcttacacctcattcaccagcccctactcgcgagcaacttccagggctcctctctgccccaactcttgcccataaacccccttgtcgacaacacacccttgtacagcccacacgacttcaaccccaaacccgttgtcgacccttgcgcgcgccattacagacgcttctccccctttaacttcctggctcacccccctgcctaccaaccacacctggacacctcactctacaccttccgccacaacgccacacttgcacccaccctaacctgtacccctctccacgacccacccctct

SEQ ID NO: 484924 - DNA, 446 bp, Homo sapiens
tcccctcgctatcatcggcaccaacgaatggcaagttaaacatacagtcgcctctgacaagccacgtatgcactacagtggttcgggtgatcttcagccttcaccgagtatgtcttgctactcaagttgggccacgtgtctctacctgtatcattgctataaagccacttgagatctgttctttctctagacgtgctcattgcttctagcacaaatcaaaatagatctggaaacacctacacgagacagcctctgcctcccacattgatctgtttggaatatttatatcaagagtggatgtcaggcagggtttactcctaaagcacaattttgtgtgaagtctatataaccatctcagcagtttctgaggtcttggcttgaggctttcccatcgatcataccatgtcggtttgcccttgtatttaagcatgtactcgtctgtctct

SEQ ID NO: 484925 - DNA, 103 bp, Homo sapiens
ctggtcgaatctagagcgatccccttacaccccacgatcactatctttcctagcctccctgatcttgccaagcatagtattgtggtgtgttgaattcaatacg

SEQ ID NO: 484926 - DNA, 273 bp, Homo sapiens
gttacgctctgaatccggccgagcagcggggtgaattccacggacgttcagcttgccgagcatcatggcttcaaacgcgcccttcacgccgtcgatcgagatgatggtgatgtccttgcccggcttgagccctgcctcttcaatggcctggatggcaccgatcgccatgtcgtcgttgtgcgcgtacagcacgttgatcttcttaccctcggccttcaggaaggcttccatcacttccttgcccttggcgcgggtgaagtcgccggtttgcga

SEQ ID NO: 484927 - DNA, 191 bp, Homo sapiens
agccaaatgccagggctcaagtcatcttcttgcctcagcctcccaagtggctgggattacagctgcgtggttaatttttaattctgtggacactgggtctcgccatgttgcacaggccggtctcaaactcttgggcttaaacaatcctcctgcctcggcctcccaaagggctgggattgcagcaggcatga

SEQ ID NO: 484928 - DNA, 85 bp, Homo sapiens
gggatggacaaatatctttatttacagcaacagatagaacagaccctccctcccttcccttcctttccccttctgtcgtcttctc

SEQ ID NO: 484929 - DNA, 430 bp, Homo sapiens
tgaatttttgtggggacaataattccaacccctcccacacataattacccaatttctgaatgtctttcctggttaagttgccataaaaacgtttatctacttgaactcctaggatgatagttaaaaaaaaaaatgttggcccaggcgcagtgatggatgcatatgatcccagcactttgggaggccgaggtgggcagattgcttgagttcaggagttcaagaccagcctggcaacatggtgaaatcctgtgtctacaaaaaatgcaaaaattagctggacatgatggcatgtgcctttggttccagctacttaggaggctgaggtaggaggatggcttgagcccaggaggcggaggttgcagtgagccaaaaatcggccaccgcactctagcctgggcaacagagccagaccatatctcaaaaaaaaaaa

SEQ ID NO: 484930 - DNA, 354 bp, Homo sapiens
acagaggctgaatggttcattcttgtacattctgtgtgtttggacaaatgtataatggcatgtatccaccattatactaccataatacttcaccgccccacagttctctgccagttcatatcttcctgcaaatcccctgacaattgtgagtctacggtttccatagtttttccctttttcagaatgtcatatagttggaatcacagtaggtagcctttttttttagatcggcttctttcacttagtaatacgcatttccatttcctccacatcttttcatggcttgatagcttatttctctttagtgctgagtaatattccattgtctggttgtaccacagtttatccattcag

SEQ ID NO: 484931 - DNA, 223 bp, Homo sapiens
tggcatgtaagggataagtgcttatattattaagagcgggtggagttcttaaatatcaaccagggcactttctccggaccccttccctaggggatgtcaggatagagaaatttttccatcgagcctttttaaaatggtaggactgtgttccggtgggcttcagtgatgggatagtacatacacttcactcagaggcattggcatctttaaataatttcttaaa

SEQ ID NO: 484932 - DNA, 80 bp, Homo sapiens
cctggatgttgttccagttatgctggattccacagtgaaatcatttaaaaccatctaaataaaccactatatattttatg

SEQ ID NO: 484933 - DNA, 167 bp, Homo sapiens
aagcttacgagggtctaaacttcctacctcccatcatccaaacatagtaatactttttgcctgtggctggatatgaagaaatatgagttctataatgaaatgcccatattcttttatttccgactgcatcctcccattccctgaccagatggcctggctgcctcgtt

SEQ ID NO: 484934 - DNA, 351 bp, Homo sapiens
ttatcgcccatgatggggttagagacccacagttgctcaaaagcagtttttgtttttcttgatagctggatttgggttatctctcaggaagcggttagcagtctttagggcaacctaattgcatttctttgtttacaaagcacttaacttcatccctctcaggcgcacaccagcactgtctatcactaatactggcagttctagggtgaggtgtacagttgctcttagtcagaaactcaatttgctgttttccactagattcccagatagagaaggacagttgtttcaggcaagcttaagaccctgtaacatttcttgccctttttgatttgaactcccatctccctagct

SEQ ID NO: 484935 - DNA, 133 bp, Homo sapiens
tgatgatatgactggaatagtactggtgatattgctagggtggcgctccaattaggtgcatgagtaggtggcctgcaggaatgtagcggttaggcgtacgtgcagtgctattggttgaatgagtaggctgatg

SEQ ID NO: 484936 - DNA, 174 bp, Homo sapiens
ctcaataaatgtggtcattgatgcattgtgtctatttgcactactgtgctgttgtcgaagcacacactttcgttcatcattcatgctagaggtgcggtgtcagacgtcgccaacaatgatggagatgcgcaatggttgcgctcatgatcaatgaccaacaatttattgaggatc

SEQ ID NO: 484937 - DNA, 381 bp, Homo sapiens
  misc_feature (42)..(42): n is a, c, g, or t
aaaaaggggatgtcctcctggaaaactggggagtttctctgnccctgggatgggtttgttattaaaaaaatttggatgcctgtggttccaaaattgaaccttaaaccccaaattaactggggggggggaaaggaaaaaagaaaggatccagtggtggggaactgggttccgtggggtttccccaggaagtccatttttggggctcccccagggggggggaactggtccgggggttataacctttttccttttttttgggaacagaccccgggttttttgggcccaatcccaaaaaacccatagctggtaccccgcggggggtggctagaaaggtctggatactttttatttaaaaaagctttgccttttttcccgggccat

SEQ ID NO: 484938 - DNA, 780 bp, Homo sapiens
tcccgaaagaaccgaagagggttcaaaggggaattttccgcccccagtcttaccctcggagggtttctggagctgtggtgttgttggggcacgcgcaaccctcttctggtcttgggtgtcccgccatgccgttgtcccgggtaaacctttttatcaggggcgcggggcgcctctcggtggtgggagtcttcccactctgtttgtccgggctctctaaggtgcgaaagggacagaacgctgggggggccccatgggcccgggtgtgtgggggcacactctaacaggtcttggggataaattaatgtggggttggagatacgttacaacgaaaagacacaggtgatggaggaatatctctggggactctttggtaaatctttttacatcttgagatctggtggaacttgtaaaaggagacctgcgggggagatctatctcttctgagaaaggtctccacggggttcatatcccgtggagaaaaagtgtccacagggggacaggtttttctggtagattttgtggggggaacatattggggtctggaccgggagccaatgagaacattcctcctcccagtgaaggaataccctattttggagaaaacctcttctaatcaccggtaggctcaaacgggggttattcatcaagaaatgtccagaaaatgttctggggcttttctagtggcacaattaagggcacctttgggtatgagctatatgagactctgtgagtggaactcccccgtgggaaagaagattgggctctacaaaatgggtttca

SEQ ID NO: 484939 - DNA, 170 bp, Homo sapiens
tggtccatggtgctgcgtacagtgataggtggagtcgtaaacttgttgatctgtgttctggaaggactaaggagaattgggaaaaagcccatgaattattcaatgatatccaccataacccagggaaaggaagaaaatccttctgccttcctcagagcggctacaagagg

SEQ ID NO: 484940 - DNA, 309 bp, Homo sapiens
ccagtggggttggcagatgccccattctgacatgtagatcgacaggacagctctgcaaataggaggtgatgtccatgcttccattttctaaacaatcactcctcaggaaaccctccaacatgtatccactgtacacagtgactaggtcatcatgtctccttattgattatgttcgcctcgagcaattgcattttctacgtgagctgatggaccacattagattttttcccgtttggcgcttgtctgtgtccacggtctcgtcgggttcgccggtcatgatgcccagcctcatctgcgggcggatcctct

SEQ ID NO: 484941 - DNA, 681 bp, Homo sapiens
  misc_feature (1)..(1): n is a, c, g, or t
  misc_feature (134)..(134): n is a, c, g, or t
  misc_feature (174)..(174): n is a, c, g, or t
  misc_feature (182)..(182): n is a, c, g, or t
  misc_feature (200)..(200): n is a, c, g, or t
  misc_feature (203)..(203): n is a, c, g, or t
  misc_feature (208)..(209): n is a, c, g, or t
  misc_feature (223)..(223): n is a, c, g, or t
  misc_feature (230)..(231): n is a, c, g, or t
  misc_feature (235)..(235): n is a, c, g, or t
  misc_feature (253)..(253): n is a, c, g, or t
  misc_feature (272)..(272): n is a, c, g, or t
  misc_feature (275)..(275): n is a, c, g, or t
  misc_feature (318)..(318): n is a, c, g, or t
  misc_feature (407)..(407): n is a, c, g, or t
  misc_feature (452)..(452): n is a, c, g, or t
  misc_feature (459)..(459): n is a, c, g, or t
  misc_feature (465)..(465): n is a, c, g, or t
  misc_feature (507)..(507): n is a, c, g, or t
  misc_feature (543)..(543): n is a, c, g, or t
  misc_feature (555)..(556): n is a, c, g, or t
  misc_feature (562)..(562): n is a, c, g, or t
  misc_feature (569)..(569): n is a, c, g, or t
  misc_feature (572)..(572): n is a, c, g, or t
  misc_feature (585)..(585): n is a, c, g, or t
  misc_feature (589)..(589): n is a, c, g, or t
  misc_feature (595)..(595): n is a, c, g, or t
  misc_feature (603)..(603): n is a, c, g, or t
  misc_feature (612)..(612): n is a, c, g, or t
  misc_feature (617)..(617): n is a, c, g, or t
  misc_feature (666)..(666): n is a, c, g, or t
naaacctgtttgttttatacaaaagaatataccctaacacagtagagtctcataatgccttggcgaacaccaatttgatgctttaagattttaatgtattgttaacaaattttcaaactcaggcaagtttaganatgtcttcatattgaattccttcaactctgcgtccttttncggggccngtctccttggcgattgtngcngaaanngtcttctcattggngggttcnngggngccttcatttcctctgtngcctccatttaaaactagnatnctttttcctggtgctggaattactgtctctaaatgagtctggncaagtttcagcttgtctcccgaatcaatcatcttcacaacagctgtatatttgtcaattacttccttaacaatagcctttttcttatgntatttctctcccagtttcttggttataattttcacaataatttcnggccgtngccagnagtctgttcgggcggttcttttcttttcctcttcggtctccntgatttcatccagtgcagatttctttttcaaaatanctttaaaaaaanntgagcncaggggnggntcttttcgtttcnctgntgctgnacttcctntcgtcttcngtgcnctcggtcccagagtacttgacttggaagatgttgctccggatgagctanatgctccttttttca

SEQ ID NO: 484942 - DNA, 452 bp, Homo sapiens
  misc_feature (417)..(417): n is a, c, g, or t
  misc_feature (421)..(421): n is a, c, g, or t
accgatcagccacagatgccgatgaggacaacagtggttggttaggggttgggaaggatgacgctgatcactccaagccaggcgcctggcgcccaggcccttcacccctgatcaatcaatacagcctaacagtgggactggatttgacgccacacgacactaagtctctgcttaagtgtgtggaatcgctgtccttcatcgtgcgtgatgctgcccacatcacacctgacaactttgagctctgcgtcaagactctacggatctttgtgcaggccagtctgaatggcggatgcaagtcccaggagaaacgtggcaagagtcacaaatatgacagcaaagggaaccgcttcaagaagaaatccaaagagggatcaatgcttcgccggcctcgaacctccagccaacatgcctctcggngcgngcagagtgatgatgatgaggacgaaggcgag

SEQ ID NO: 484943 - DNA, 880 bp, Homo sapiens
gaacgacattcattatctgcaaattaagactcatccttcactttccaacacatagctgagggttgttggcgttgttgtagctgaccaccaagaagcagtcactgcaaatctttctaattcttccctatcaccttttgtattctaatgcaattattttggtccagaactgacctgtattcttctgtattgtacacaaaagctaagtaagtttctgtgtactttgtgtatttcattttgggaggttgtagtagtgatcttcaacttgagtattaaataatttgcctagattaagcctacaatgactgaccagctaattaaatgagagatatttctcgaatctggattctgtagcctaaagttgagtacattcttagctaagaagaaaattgggaaatccatcatctatattaggcaacagattctcaggagtaagattgttaacttctatgatttatgagtaatcaagctggacttggatcactacaaggttagtctctagtaatcgtattggaccagaaatgtaaacttcatgggctcagatttgagaagcattcatgctcacaagtttagggacagtgaatgcataatgaaatcatcttggatttctaaaataaactttcggacattgaacaagaaatgcatctgtcttagaaacctggcagattatccgatgtagggtaaaccatgtacttggcactctggcacattaggtatcacgtaaattcgacaacttgagatactcaccgacaacacacgaattcttctcacaactttcagatcatcttttcttataagaagcacccttgaactgtacacacatgtgggtccagcatccatgctatttcggcacccctagaatggcatcctgtttgttgaccca

SEQ ID NO: 484944 - DNA, 840 bp, Homo sapiens
agcgggtattgtccgtccctccgggctttgtaaaatcgtcgccggcgttacctggccgtgggcgcgtcctggccgcgtgacagtcccggagcagggttgccagaccgccggcgccgccgccatggatgtccccgggtcactgtggtgagagagtgaaggaccctagactggtgtccgttcttgctagggccacctgcggtgttttttgtgctctggcgtgccctcgatctagccctatcgttgtgtcagctccctcatcaagtgcctgctctatcttctgcctctggctcttccttctggcccatggcctgggattcctgctgggtccgccccgagacgcttcacccgcatctttgatgcggggcttgtcttcgtctgctagtaggtgactgccttcctcatctggcatggaccaatggatacttcgtgcatggtctgctgatgtttgcttgtgacgccacattgttctacgcctcggcctttggcatgcagccactggctcttcggacaggtctggttgatggcacgcgcgtgtcgggcctgtgctatgccctccgtctacccatgcctctcaggtgccttcacctacctggtggggggtctactgtggcccttatcggcttctgtggcgctggcgagctatggcgaagtctgcggctggccgggtgcagactggcgctggacagagctggcagctggccagtggtgcactcttctttatcatctcagacctgaccatcgcctcacaaatactgtattcctgtgccctactctcgggcgcttattcatggtccacctactatgtgggcacaaattaaaaaaaagtaacttttccgggct

SEQ ID NO: 484945 - DNA, 212 bp, Homo sapiens
attggagtatctgcagcagaatggattgtgccatctgtggagctgagatctccctgatggggaccatgattgaagcgctgccagtatgtgacgcgaaggtgtggctgtgtctacaaggctctgagtgacaccacatcttactggaaggcgacttggttgaaagccaaaatgtgtcacccagggcatgcttgcactcagaagttttctcatga

SEQ ID NO: 484946 - DNA, 142 bp, Homo sapiens
gtagagaagagttttcgccttgttgcccaggctggtctagaacttctgcgctcaaacaatctgtccacctcagcctcacaaagtgctgggactacaggcgtgagtcaccatgcttggttgactgcccttctgtcgtcttctc

SEQ ID NO: 484947 - DNA, 423 bp, Homo sapiens
ggcatgtgtgtaggcagcgtgctctcctgagtgcggaagtcgctgagcaccaatgcgatgcccccgtggggatggggaccatgctgcgtgaggacctggtgctgagcaagcccagccgttaacacgcgcagcacacattcactcagaagcagacgtggcagcgtttccgttcactagttatttcgtatcgtaattcgtttattactaattaacagtatcatctcagtttactagttattacgtattgtaatcaacttattactaattaatatcatctcggttcactagttatttagttattatgtattgtaattaacttattactaattaacaaggtcagggcagtgttttgtcttcaccttccctcgtgagatacaggttccaagaactcagcctatggcacacgctggcctacagcacatg

SEQ ID NO: 484948 - DNA, 806 bp, Homo sapiens
ggcggctgctgtaggaccggtatgctccgagcgtcggttgcccgacaatgtgagtgccatatccttggggacattctgccactgcagccctcagagcctgctgcatgtggaagaacgagcttgacaaatatattgttgtacctggttccagtcaagcaaaattaattcagcaccagttcctcatgccatgcacctgctgtcacccagaatgaccaccctattataaggggtacagccgttgtacaattggagagttacaaagacctaagccttgatgactttaaggggaaatatatggtgctataagcttctatcctatgggatttaacctttgtagtgtcctacagaaaattgtatgctataaaggtgacaagagctaacagaatttaccacgatgtgacactgtgaaggttgtcgaccagtctacagtgggattcccacttaagccatcttgcctggataaatacaaccaagcaaagcaatggtggtattgggccacattgacacatcgaactcttgtcagacatataactaagacagatttcccgagactacccggtggttgcatgttacgaaaggtcctggatcttgcaactaagaggtctctatcataatttgcacccaatggaagtcctcaagcattaaagaacgtaacagaatatcccattgagaccaacaagtggagaaaactacgattggaagaaagcaatccaagttgacgaaacaatggaacaactgaaccgtgatgacacgggaacaaagaaaagaaagcacgtggccacaaagaatcaaaagaaaaaaaaaac

SEQ ID NO: 484949 - DNA, 290 bp, Homo sapiens
aaaaaaaattttttttaaaaaagggacccccccccccttttcccaaaaggggggtctttttttaaaaaggggggggggatcttctcgggggggggggccccttaaaaggccacaggggggttaaaaattcctcggagggggggggttaaaccaaaaattttccccccccccgttttttggccccaaaaaaaaaaaatttttccccttgttttgggcccaaaagggggccaaaaaattttttttggggtttttggttgggggtaaaaacaaaaaaaaacccccctttttga

SEQ ID NO: 484950 - DNA, 373 bp, Homo sapiens
  misc_feature (18)..(19): n is a, c, g, or t
  misc_feature (22)..(22): n is a, c, g, or t
  misc_feature (24)..(24): n is a, c, g, or t
  misc_feature (27)..(28): n is a, c, g, or t
  misc_feature (45)..(45): n is a, c, g, or t
  misc_feature (49)..(49): n is a, c, g, or t
  misc_feature (51)..(51): n is a, c, g, or t
  misc_feature (56)..(57): n is a, c, g, or t
  misc_feature (61)..(61): n is a, c, g, or t
  misc_feature (74)..(76): n is a, c, g, or t
  misc_feature (82)..(82): n is a, c, g, or t
  misc_feature (86)..(86): n is a, c, g, or t
  misc_feature (102)..(102): n is a, c, g, or t
  misc_feature (110)..(110): n is a, c, g, or t
  misc_feature (116)..(116): n is a, c, g, or t
  misc_feature (120)..(120): n is a, c, g, or t
  misc_feature (146)..(146): n is a, c, g, or t
  misc_feature (148)..(149): n is a, c, g, or t
  misc_feature (152)..(153): n is a, c, g, or t
  misc_feature (157)..(157): n is a, c, g, or t
  misc_feature (165)..(165): n is a, c, g, or t
  misc_feature (179)..(179): n is a, c, g, or t
  misc_feature (182)..(183): n is a, c, g, or t
  misc_feature (187)..(188): n is a, c, g, or t
  misc_feature (193)..(193): n is a, c, g, or t
  misc_feature (197)..(198): n is a, c, g, or t
  misc_feature (235)..(235): n is a, c, g, or t
  misc_feature (242)..(242): n is a, c, g, or t
  misc_feature (271)..(271): n is a, c, g, or t
  misc_feature (276)..(276): n is a, c, g, or t
  misc_feature (292)..(292): n is a, c, g, or t
  misc_feature (372)..(372): n is a, c, g, or t
ccatccaggccacccccnngcncnagnntgccacaacaaaacgcncgcngnccccnncccngaactcccgcggnnncccagntcanctggcgcgcgcccccncccccccngctccncccnccccccccccccccatagccaacgcncnnccnncccngccccatncccagactatagcnagnncccnnccccncccnnccccctgaatgtgtgctagctcaggtgccccactctntttcctnaaatccttgggagccggatctccccatcnccccnactcactcttcccttntcttctctcagtgttgtctgaataaagtgtgaaatcttttgtgttttctaaattgacattttcaatgaaaaaaagaatcnc

SEQ ID NO: 484951 - DNA, 163 bp, Homo sapiens
tctagagtgatccccactagtccacggttgctaggaggggtgaaccggcccaggtcggaaacggagcaggtcaaaactcccgtgctgatcagttagtgggatctgcgcctgtgaatatgccactgcatctagcctatccgtgtgacttggtgtggtacctgat

SEQ ID NO: 484952 - DNA, 1220 bp, Homo sapiens
agcggaagacgtacaggtgcaataatgcgaaaggtactgcatttatcgcgtgctccgaatgatgaattgtgcactcgccaactagcaggcccgtggcgccctcgagcttgtcatggaggggtgtcgtcggagtggtagacatgtactgatatgagataggcatcctacgcgagccgtctcaagtcgtccgtacggtatggaagggatccgagcacgcgtaccaagcagatgcgtacgacaggatagtgcggacgggagtgacttcgagggcactgtcagtgcgacttcgaaagagcccctcgaatctccgtggcgccacgcccgatgcatcaaggctatagaggtcacgcatcgaacgctgacttccacgcccaaaggcaacgaactagcttcgagaccacgacggctcgtgtcatatggtgacgcattccacttgtgtgcccttgtgtgggacctaatgtctgagggtctcggggaccccaagcacaaacttcccaaaaagctcgctgggacgtgcgtgcgaagggtccaaggcacctactcgcaagactttcgtcgccgacgccggaactgcatacagtggcttctcgaggatgtagaatgcaggtgttcgacatatgcattggggtctttgcgttgttaattgaaccaattcgtataaaagttctcttagcaatgcttaaaaagctttgggaaagaaggaccttggttgaactacaggaagaggaaataaggtccttattgcggaaggggaaggggagggatggaattaaacctgtgtgtgagtcgatcagttgacgcgtttggtcgagggctatgagtttggtgtggatttccttctggagaggacgaattgaacgggaaattgagagggtgacagagcacaaagagggggttatttcgcaggggggtcccgattagcatgattaaacacggaaagagagcttgaaaaaaggataatttgagaaaagggggaataaatcgttgtgtgaggaaggagggtatatggccaggaacttgcacattgttaaagtccccgcgaggaagtgcatgtaagagtttcggggtgaagataagtttgatggctgtaacaagggtagtatagccccatcggggtaggcaaagaaaaaggtggccctgattcattacgtcaggataaataacttggagttggagtatatcccagggtggacattccgagtgaaaaggcagatgattta

SEQ ID NO: 484953 - DNA, 483 bp, Homo sapiens
aataattctttcaatccatgaacacaggataactttccatttatttggctcttcagtttctttcatcagtgttttatagttttcatcctagagatttttcaccatggttaagtgtatttctagatatatatatatatatttttttttaattgtattgtaaatgggattttcttgatttctttttcatatagttcaccattaatgtatagaaatgatactggtttatggctgtaatcccagcactttgggaggccaaggcaggtgagttgcttgagctcgcgagtttgccaccagcctgagcaacatggcaaaaccctttctctacaaaataatacaaaagttagccaggtgtggtggtcccaactacttgggaggctgaggtgggaggattggttgagcccagggagttgaggctgcagtgagctgtgattgcaacactgcacttcagcgtgggcaacagagtgagatcttgtctcaaaaaaa

SEQ ID NO: 484954 - DNA, 156 bp, Homo sapiens
gacgtcgccacacgcagtgctagctgccgcagccttagtgcttgtagcccaaagcacagtcacagctgctcagtaaagaataataggaataatagtgtaagtgattattaacaggtaatgaaaggcattctagcatagactgaacggctctcctga

SEQ ID NO: 484955 - DNA, 164 bp, Homo sapiens
ttcagaaatgctggtaatcaatggctagagagaacaggtcttatgttagaacatttaaaaatatacatgtttgtcttacttctgcaatgtgttcttggttcctgggcatattgagtcattcctcctatctgtgactagggcaggttcgacagagcatccaaagc

SEQ ID NO: 484956 - DNA, 348 bp, Homo sapiens
  misc_feature (1)..(1): n is a, c, g, or t
ntgtgacctctacctgtaatttcattgcttcttgtgtatgtttccacctcttgttctgtgcgcctagccaaatcagggtgcttaactaatttctcctcagggttgccaaacttctttccagatcagggccctgcccttcttcctccaaatcgaggtgctccatgccctcggtcacgtccgcggtatcggtcactcgaatagcccgacatggcgtcaatggttgcggttgacggggatcgtagtatatagaagagcgtgcgtcaagtcgctggaaatggcctcgatgacggcgaagccttgcgtgggcgtcagcggagaaagagcaccgatgactacagccgaagctgc

SEQ ID NO: 484957 - DNA, 267 bp, Homo sapiens
gaggatccccgggccagtacggcatgtgggtgggcagatatgggaataaaagccaggccactgagcccagcagcggcaacctgccgggtcaccttcccacgccgtggaacgtttgtgtttcactcttcgcaataaattttgttgctgctcactgtttgggtctgcgtcacctttatgagctgttacactccacacaccaacaggtctgccagcttcactcctgcaagcccagcgcagcacggggcaacccccacagagcagcagcgt

SEQ ID NO: 484958 - DNA, 393 bp, Homo sapiens
aatgttgtttttttactgttaagtacttatgtgtgaataagtgaaaatgattgttaatttgtagcatataaattcaaagtcaggaataaggatgatgtcaaacaaccacagattgtccacatgagtggctgagataatgacacctttgccatctgacgattcagtgtacccacttatgtttcatgcgcattattaaaatagtgtattaaatgagcttcaggcggtgtgaataaggtaaatacaaaacataagtgctctttgtgtttagtcttgggtctcatatctcattatgtatatgcaaatgtttcaaaatcccccaaaatcccaaatccaaaactcttctgatcctatgtatttagaaaaacgcaaactcaaattgtgttaataaatgag

SEQ ID NO: 484959 - DNA, 367 bp, Homo sapiens
tgggtagggaggtgtcgtgtggcccaccgacttacacatgggtcagtaggagattctatgagtcgcagctgggatatatatatttgtgatgcagagaattatctcaaagtgttgcacttgttgagccttctcattagcgcaacagtgtttcgtgtatcttgggccactgccctcccatcgggcacaggctttgaagggtggaatggccggccagggacaatccaggcattctgccggtagtctttgcagcgctctttctcaaacgtatgttctggtgggaaagcacaatcttctgtgtgactctcccatagttctcaacaggtggcggcatggatccgcgtagagagagcagccaataagaggttct

SEQ ID NO: 484960 - DNA, 574 bp, Homo sapiens
  misc_feature (467)..(468): n is a, c, g, or t
  misc_feature (490)..(492): n is a, c, g, or t
  misc_feature (499)..(499): n is a, c, g, or t
  misc_feature (525)..(525): n is a, c, g, or t
  misc_feature (551)..(551): n is a, c, g, or t
  misc_feature (569)..(569): n is a, c, g, or t
tcccccgggctgcaggattcggcacgagcttttgacagataacatttaatagtaataaataagtggtaataagtaataaataataattgagtgcttttcacattccaggtgctgagctgttttgcatttcacgcccctcatcttcatttatattgttgttcttaattatccccattttaccgatgaggaaagggagattgtaaccaccccgaggctgcacagctaatacccagagagcagaatttcgccacatgcgaagattctagctaatcctgcattatctggtacccaccatttgtatcccggcatcatttatcttctccctaccttgttgccaaggcacgtgtgggtccctaacggctggcaccaattattcaagacaccctaagggagaccagaaggaaagcgatatttaagaaatgcaggcacagatttaagcattttagactcattctccatcagcaggnnggtctttgaagaggctgctttnnnacagcantagtctgactctagattcagcgctcnatgagtatagagacgcgtgacgcccntgtgtgccatggccgcangctgc

SEQ ID NO: 484961 - DNA, 628 bp, Homo sapiens
  misc_feature (277)..(277): n is a, c, g, or t
  misc_feature (521)..(522): n is a, c, g, or t
  misc_feature (544)..(546): n is a, c, g, or t
  misc_feature (553)..(553): n is a, c, g, or t
  misc_feature (579)..(579): n is a, c, g, or t
  misc_feature (605)..(605): n is a, c, g, or t
  misc_feature (623)..(623): n is a, c, g, or t
tcccccgggctgcaggattcggcacgagcttttgacagataacatttaatagtaataaataagtggtaataagtaataaataataattgagtgcttttcacattccaggtgctgagctgttttgcatttcacgcccctcatcttcatttatattgttgttcttaattatccccattttaccgatgaggaaagggagattgtaaccaccccgaggctgcacagctaatacccagagagcagaatttcgccacatgcgaagattctagctaatcctaanatctgtttttcaccagacgacgccggcccttccggcttgtcgtgcagcacggcattatctggtacccaccatttgtatcccggcatcatttatcttctccctaccttgttgccaaggcacgtgtgggtccctaacggctggcaccaattattcaagacaccctaagggagaccagaaggaaagcgatatttaagaaatgcaggcacagatttaagcattttagactcattctccatcagcaggnnggtctttgaagaggctgctttnnnacagcantagtctgactctagattcagcgctcnatgagtatagagacgcgtgacgcccntgtgtgccatggccgcangctgc

SEQ ID NO: 484962 - DNA, 148 bp, Homo sapiens
agacaatgataacttagcaacaatataaattaacaattagatttctaagaattaaaactcaaatttctaacccatataagattggcttccagtgcatagaaaatctgactgaataattctaactgcagtgctttggcttacccatcaa

SEQ ID NO: 484963 - DNA, 125 bp, Homo sapiens
cagaaaacagaactttattccaagggccagagcgtcactcataatctatatacactccttggtcatcgtcgtcagtggctagggtccaggttatcatagatatagagcccttctgtcgtcttctc

SEQ ID NO: 484964 - DNA, 953 bp, Homo sapiens
  misc_feature (62)..(62): n is a, c, g, or t
  misc_feature (66)..(66): n is a, c, g, or t
  misc_feature (295)..(295): n is a, c, g, or t
  misc_feature (301)..(301): n is a, c, g, or t
  misc_feature (349)..(349): n is a, c, g, or t
  misc_feature (428)..(428): n is a, c, g, or t
  misc_feature (465)..(465): n is a, c, g, or t
  misc_feature (493)..(493): n is a, c, g, or t
  misc_feature (508)..(508): n is a, c, g, or t
  misc_feature (547)..(547): n is a, c, g, or t
gagcggtcagggatcatgagggagagtgcgttggagccggggctgtgcccgaggcgccggcngggnggtcccgtgcacgccgtgacggtggtgaccctgctggagaagctggcctccatgctggagactctgcgggagcggcagggaggcctggctcgaaggcagggaggcctggcagggtccgtgcgccgcatccagagcggcctgggcgctctgagtcgcagccacgacaccaccagcaacaccttggcgcagctgctggccaaggcggagcgcgttgagctcgcacgccaancgccgncccaagagcgcgcggtgcgccgcgcagccccaggtgcagcggctgganggccaaccacgggctgctggtggcgcgcgggaagctccacgttctgctcttcaaggaggagggtgaagtcccagccagncgctttccagaaggcaccagagcccttgggccccggnggaccagtccgagctgggcccagagcanccggaggccgaagtnggagagagctcggacgaaggagccggtggagtccagggncccagcaggctgtcggcagcaccggattgcaggaaggtacagagcctccgaagggccctttcgggccggaaaggccctgaagcgccaacgatccactcccggtcagagccgcgtcgccttgggcctggcccggagcgcaaaaagcccaggcggaatgcccagacctgcgcttggagcccacgctggagccagagcctccgaaggacgaccgaggaagatcccgggagaactggggctgccgaaaaagctcttggtccaattggacgagtgttagccttgaagggctggatgtttggcctgactacccttgtgcttgtgcctttgtaccaaaataaatctttccgaccgtacaatcacgcctattagggagggaatccaatcaacaaggggggggctctggactacc

SEQ ID NO: 484965 - DNA, 322 bp, Homo sapiens
  misc_feature (17)..(17): n is a, c, g, or t
  misc_feature (86)..(86): n is a, c, g, or t
  misc_feature (91)..(91): n is a, c, g, or t
  misc_feature (130)..(130): n is a, c, g, or t
gaattatatagtatgtnatctttgaaactggattctttagtttgcataatgttttcaaggttcatccacattgtagcatgtcaganccttnttcctttttatgtgcgatggtatggatatagcacatttnatgtaagcttattcatcagtagatgggcacgttgtttcctctttttggctgcttgaataatgctgctgtgaacatgtgtgtaggtttttgtgagggcgtaggtttccagttctcttggggatatacctaggagtgggattgcagggtcatattaattccgtgtttaagtgtttgaggaaatgccgaactgtt

SEQ ID NO: 484966 - DNA, 501 bp, Homo sapiens
  misc_feature (37)..(37): n is a, c, g, or t
  misc_feature (279)..(279): n is a, c, g, or t
  misc_feature (404)..(404): n is a, c, g, or t
  misc_feature (467)..(467): n is a, c, g, or t
acttgagatatccgtttgacatggtcggccgcttggnagcaacccgaagttgggtgtcagccttgcccgcgtcgcaggatcctcgacgacgcggtccaggtaacgccgatacccggcattgcaccacgcgtcgaacctgtccatgagtggatgcacgatgctgcgcgggcccttgatgattccccgcaacaccaagtcgatgacgactagtgcgctgccgtgaagggccggttgcacgcccggcacgccagtatcgtcttgagccaagggggcacccgnaagtccggcttgggaatcgaccacaccggcgtgcgctgaaaagacggtcagcgtgccgacctcgggtgcgatggacggaatgatctgcaccgcactggctcccgttgccgattgattgccaactntttgggcccttcatgttcgttagttcgtggttcccagtcggtttggggcggtgttatttttgncctttgaacgaattttggggccagaaattccctt

SEQ ID NO: 484967 - DNA, 134 bp, Homo sapiens
cagatatgttggcggcaggataatagcagcattagtgcacggcttccgaaagtgtgcatgtgacagtaggaacaggcgttatttccttgtggtcacttttgcttccaatgtttaagggctctcggctcctcact

SEQ ID NO: 484968 - DNA, 136 bp, Homo sapiens
aaccaattttgaaccttgatataaaatgaaggagggagatgacggactagaagactgtaaataggatacccaaggatccacctttgtcatgctctccccctcccccgtcttcaataccgggtattcatttgtcaaa

SEQ ID NO: 484969 - DNA, 252 bp, Homo sapiens
ctttttgtatgtagcgtaaaatatgtactatattaacaagaatactgaataatgatgcagtgatcattgtacctgtattactcaacgtccctccaggaagaatagaaagtgatttcagtgtattcattatcataaggaaattttaagcaggaaatctggttatatagagttatagagcgaactatcacaggttatgtaacattagacaattagagacagcatgcagtcactagtcattccctaggcctagta

SEQ ID NO: 484970 - DNA, 335 bp, Homo sapiens
aagaatacattaaagagcacattatgatagatctatcatagagattaatggacccgagccctgacttcagatgagcttacaggatgtctcttctttttatcttcgagatggagtcgcaccctgtcgcccaggctggagaatgcagtggcgcgatcttggctcactgcaacctccgcctcccgggttcaagcaattctcctgcctcagtctccagagtagctgggagtacagtcatgtgccaccatgtccggctaattttttgtatctttagtagagacggggttttaccatgttggcccggctgactccagacctcgcgatctgcccgcctctgg

SEQ ID NO: 484971 - DNA, 157 bp, Homo sapiens
  misc_feature (4)..(5): n is a, c, g, or t
  misc_feature (102)..(102): n is a, c, g, or t
taanncgagtgcatcatgggaagtgtggacggtcaaggtgagccgagattgcgccattgcactccagcctgtgcaacaagagcctgtgcaacaagagcgatnactccatctcaaaaaaaaaagagagtttcacaattgtttgcccagtgtacaggtt

SEQ ID NO: 484972 - DNA, 700 bp, Homo sapiens
  misc_feature (700)..(700): n is a, c, g, or t
cccttgacggagcccactcgattatttgagcggcgctaggcccctcgtgcgggacatggccatgctcagggtccagccagaggcccaagccaaggtggatgtggttcgtgaagacctctgtaccaagacagataacctgctcgggagctatatccccaagaagatttctgagctggatgcatttgtaaaggagccagctctgaatgaagccaacttgagcaatatgaaggacccattggacatgccactgcctgatccagtcaaggtgaaagagaaagacgagcgtaagaaacagcacgagaaggaagacaaggatggaataagggggaggatgaagacaaaggtcctacatgcggcccggtgtactgccatgaaatgatcgtggtccttctggatcgctagaagcctgagatcaatgatgtgattgagcagataaacctggtcactacctgctagcagttgcagatacctggtatagaggatggcaacaactttcgagaggctgagcaagagaaggtgtttgagctgatgaccagtctatacaccatgctagaaggattacacactcagatatgtaagtatatctctgagcgtggtgaagcatggactggagcctagccatcccatgtgggtgataatcagtagatggttcagcgagctgttgtaagcagaatacccgggactcggctgatggtctttn

SEQ ID NO: 484973 - DNA, 228 bp, Homo sapiens
ggatttgctggtgcagtacaactaggcttaatagggacatgtgttgtttaacaacagggatatgttctgagaaatgtgttgttaggcaatttcatcattgtgcaaacatcatagggtgtacttacaccaacctagatggtataggcttctacccacctgtaggctgtatggtatagcctattaccctaggctataaacctgtatagcatgctcataaggaaaggttaa

SEQ ID NO: 484974 - DNA, 132 bp, Homo sapiens
  misc_feature (80)..(80): n is a, c, g, or t
cacgctctcgaagcaccagaacgtgcagctgccccgcgaagccaggaggaccagggcctgaccaaggactacggcaactnacccctgcaccggttcaagaaggcggggctccaagaacttccagaacatatt

SEQ ID NO: 484975 - DNA, 176 bp, Homo sapiens
gctgagtcactctagagatcccattgatagcggataggggtatactcctaaggcatcgctccaggtgcatagctgcagcttttctgtgtcttcgcaggacatggtaggtcggatcttggtgtgtctgctgtgaggaaccagcgtcccagtctgtaaaacactgcccatctttcgtc

SEQ ID NO: 484976 - DNA, 145 bp, Homo sapiens
aagtacgagcttcgtcatcctcattgtctccatctacttccctcttcctgagatgcatgctctcccattttctctttactagcagtaggtcgccaaatcattgtcatcctcactgtcatagtcatccatgtcattacagctcttc

SEQ ID NO: 484977 - DNA, 96 bp, Homo sapiens
agcgctcattaaggatgcctaaatcaaaggacttgtttcttcaagctcttctggcagtgattctgacactgaggttgacacaaagttaaagaggaa

SEQ ID NO: 484978 - DNA, 146 bp, Homo sapiens
gcagacttgaacttgaacagatagtcttcaagatgacaaacttgggcggaggcgcaaaatgtggagcctgttaaagacgtctacatgcagagactccagtgcattggaggagttacacagacgtgtttacactgcttgactgcagg

SEQ ID NO: 484979 - DNA, 471 bp, Homo sapiens
aggaaaggctttagaccaacacgccgagtttacagagatcccagtgccgctcctagccactgtctccggtggctcaatcaggtacaacatggcaaaaacttacgatcataccgtgactagatgagttgcattgagaccctgattggtgtgtttcaaaagcatgctgaaaaggaagagtgtaaatactctctttccacgacagagcacctacgcttcatgtatacggacctagctgacttaacagagaacctgtatgaccctgttgaccaagtaccgatgatgaagaaactggacaccatctgcgttgcgtatctagattgccaagaattgactattttatttgatgtgctagctaagggttgacatgaatccatcctgtaggctttaccttcacagacgcgccaccaaagacctcctgatcatgacgttgacacttagcacaataagcatttgaagcagcccctgacctct

SEQ ID NO: 484980 - DNA, 595 bp, Homo sapiens
  misc_feature (22)..(22): n is a, c, g, or t
  misc_feature (26)..(26): n is a, c, g, or t
  misc_feature (28)..(29): n is a, c, g, or t
  misc_feature (32)..(32): n is a, c, g, or t
  misc_feature (366)..(366): n is a, c, g, or t
cggtacctgcgtactgggggtntggngnncanccacacccccaggtgagcatctgatggtttgcagcaacaccgacacccacaggtgagcatctgacagcctggaacagaacccacacgcccaggtgagcatctgacagcctggaacagcagcctgcaccaccaggtgcgcatgtgacagcctggaacggcaccaacacccccaggcgagcatctgacggcctggaacagcacccacacccccaggtgagcatctgacagcctggaacaacacccatacccacaggtgagcatctgacggagcagcaccgacaaccccaggtgagcatctgagagcctggaacagcacccacaaccccaggtgagnatctgacagcctggaagagcaccccacatcaccgggtgagcatctgacagaaaattaacaaagatattcaggacctgaactcagctctggatcaagtggacctgatagatatctacagaactctccatcccaaaacaacagaatatacattcttctcatcacatggcactctaaaatgatcacataattggaagtaaacacccccgcataagtgggaccgagctcgatt

SEQ ID NO: 484981 - DNA, 485 bp, Homo sapiens
tcgctgttcaatctagcacaatcaaatgaaaatacaatagtccccgcttgtctgaaggagatgcgtccaagaccccagcggatgctgaaaccccagacagtaccaaaccctatatatactatgttttctcctatacatacatacctacgataaagtttaatttacaggctgggcgtggtggctcatgcctgtaatcccagcactttgggaggccgaagcgggtagatcacctgaggtcaggcgttcgaaacctgcctggccaacatggtgaaaccccatctcttctaaaaatacaaaaattagctgggcgtgttggtacgcacctgtaatcccagctacttgggaggctgaggcaggataatcacttgaacctgggaggcagaggttgcagtgggccgagaccacgccattgcactccagcctgggcaacaagagcgaaactctatctcaaaaaaaatgaatcagcaaggtaacttcttgcatta

SEQ ID NO: 484982 - DNA, 705 bp, Homo sapiens
  misc_feature (538)..(538): n is a, c, g, or t
  misc_feature (595)..(595): n is a, c, g, or t
  misc_feature (601)..(601): n is a, c, g, or t
  misc_feature (640)..(640): n is a, c, g, or t
  misc_feature (648)..(648): n is a, c, g, or t
  misc_feature (657)..(657): n is a, c, g, or t
  misc_feature (660)..(660): n is a, c, g, or t
  misc_feature (665)..(665): n is a, c, g, or t
gcaccttcaccccgaggtgggcatctggcagcataaaacagcacccctactggcagatgagcatatgacagcctggaacagcacccacacccacaggtgagcatctgacagcctggagcagcacccacacccccaggtgagcatctgacagcctggaacagcacccacacccccaggtgagcattgaggaacagcaccccacgcccccaggtgagcatctgacagtctggaacagcaccccacacccctagatgagcatctgacagcctggagcagaaccccacacccccaggtgagcatcggagagtctggagcagcacccacatcccaaggtgagcatctgacaacctggagcagcacccacacctcgaggtgagcatctgtcctcccggagcaggacccatacctccaggcgagcatctgaacccatggagcagcacacacgcccccaggcgagcatctgaccgaacggagcagcaccgacaaccccaggtgagcatctgagagcctggaacagcacccacaaccccaggtgagnatctgacagcctggaagagcaccccacatcaccgggtgagcatctgacagcctggancagcanccataccctcaggtaagcatctgacagactggaacagcncccacacncccaggtgngcntctgncagctgctcagcctgcctgctgctagccggaccagctcat

SEQ ID NO: 484983 - DNA, 874 bp, Homo sapiens
cggccctgcaggcggtatgcgtaccccgtcgttaccctcttgctcttcccgacgcgtgagttaggccagtaatgccttgcgtgtgctctcagaccccaagctggttgcccggcgtgatagcgaaatcgtccgcggcctctcaaggttagcactactttgctccacacggtgctcacttctcgcatggtggtccccttgtgatgtgacccataggtatggtcttctagtgcgatcccgtgggttcaggcatgacccattctccttgtgtgtgggccttctcgcatccaccagaccctctgtgctccgccggattatcgttcgtataccggctgctcctggaagaaggggtgggcccagtgtgttctctaccggtgaggtcatttgggtgacagccgtacaatgacctgcgagatgagaaaagtgtgccatcccgccagaggggctgtcttccaagttactcggactccgaagtttggggcaattatcacacgttaagtgacaatggtgtcgtgcacagcagagtagctactagtctgctgtgcagggcgtgagagcttgctcccgagaactatatcgacggaaggcatgttctatgtgaacaaattctttacagtcagactgcctcttaggagaggtaactgtttcgaaatacttctggggcgatctgtgtctgaaagtcctgtttgcaaagacaagacgaaggataaggagaataattctcgtagggtgtcctctatcgcgagcaattaatctgatgaacataagcttaattcagtgacaactgaatcagcttcctggcaggcggatctgccatgggatcgtatgcagaatttggggtcaatatatgaccgaggtgtgaaccagaccgtatggg

SEQ ID NO: 484984 - DNA, 865 bp, Homo sapiens
  misc_feature (22)..(22): n is a, c, g, or t
  misc_feature (26)..(26): n is a, c, g, or t
  misc_feature (28)..(29): n is a, c, g, or t
  misc_feature (32)..(32): n is a, c, g, or t
  misc_feature (698)..(698): n is a, c, g, or t
  misc_feature (755)..(755): n is a, c, g, or t
  misc_feature (761)..(761): n is a, c, g, or t
  misc_feature (800)..(800): n is a, c, g, or t
  misc_feature (808)..(808): n is a, c, g, or t
  misc_feature (817)..(817): n is a, c, g, or t
  misc_feature (820)..(820): n is a, c, g, or t
  misc_feature (825)..(825): n is a, c, g, or t
cggtacctgcgtactgggggtntggngnncanccacacccccaggtgagcatctgatggtttgcagcaacaccgacacccacaggtgagcatctgacagcctggaacagaacccacacgcccaggtgagcatctgacagcctggaacagcagcctgcaccaccaggtgcgcatgtgacagcctggaacggcaccaacacccccaggcgagcatctgacggcctggaacagcacccacacccccaggtgagcatctgacagcctggaacaacacccatacccacaggtgagcatctgacatcgtggagcagcaccccacacccacaggtgagcatctgacagcctggagcagcacccacacccccaggtgagcatctgacagcctggaacagcacccacacccccaggtgagcattgaaatctgattgtctggagcatcacacacaaccacaggtgagcatcggagagtctggagcagcacccacatcccaaggtgagcatctgacaacctggagcagcacccacacctcgaggtgagcatctgtcctcccggagcaggacccatacctccaggcgagcatctgaacccatggagcagcacacacgcccccaggcgagcatctgaccgaacggagcagcaccgacaaccccaggtgagcatctgagagcctggaacagcacccacaaccccaggtgagnatctgacagcctggaagagcaccccacatcaccgggtgagcatctgacagcctggancagcanccataccctcaggtaagcatctgacagactggaacagcncccacacncccaggtgngcntctgncagctgctcagcctgcctgctgctagccggaccagctcat

SEQ ID NO: 484985 - DNA, 448 bp, Homo sapiens
caggactctgtgggctggagagctgagcctgaaattggagaaggagaagagccgggtgatgtaactgtgaagaagagttggcagctgagagaaagagaggcttgcatgactgaggcccaggttgatgaagcagttatcatagtttgacatcgaaagggaactactgagagcaaaactgaaccgagaagagaaccggaccataaccctgaaagaagaaatggaaagtgtaaagaagattgtgaaggaactagaggcttcccaccagcacagtagccctgatgagcaatttaagaaaccagtaacccgtgtccaaaggcacagcaaatgagcctctcatgctaatgtctgtgttttgccaaacagagggttttctagcagaaagaacccatgtgagccacatagtctagatgacaaacactgggctgcctggtcctagcaatcctgctta

SEQ ID NO: 484986 - DNA, 652 bp, Homo sapiens
  misc_feature (22)..(22): n is a, c, g, or t
  misc_feature (26)..(26): n is a, c, g, or t
  misc_feature (28)..(29): n is a, c, g, or t
  misc_feature (32)..(32): n is a, c, g, or t
  misc_feature (485)..(485): n is a, c, g, or t
  misc_feature (542)..(542): n is a, c, g, or t
  misc_feature (548)..(548): n is a, c, g, or t
  misc_feature (587)..(587): n is a, c, g, or t
  misc_feature (595)..(595): n is a, c, g, or t
  misc_feature (604)..(604): n is a, c, g, or t
  misc_feature (607)..(607): n is a, c, g, or t
  misc_feature (612)..(612): n is a, c, g, or t
cggtacctgcgtactgggggtntggngnncanccacacccccaggtgagcatctgatggtttgcagcaacaccgacacccacaggtgagcatctgacagcctggaacagaacccacacgcccaggtgagcatctgacagcctggaacagcagcctgcaccaccaggtgcgcatgtgacagcctggaacggcaccaacacccccaggcgagcatctgacggcctggaacagcacccacacccccaggtgagcatctgacagcctggaacaacacccatacccacaggtgagcatctgacatcgtggagcagcaccccacacccacaggtgagcatctgacagcctggagcagcacccacacccccaggtgagcatctgacagcctggaacagcacccacacccccaggtgagcattgaggagcagcaccgacaaccccaggtgagcatctgagagcctggaacagcacccacaaccccaggtgagnatctgacagcctggaagagcaccccacatcaccgggtgagcatctgacagcctggancagcanccataccctcaggtaagcatctgacagactggaacagcncccacacncccaggtgngcntctgncagctgctcagcctgcctgctgctagccggaccagctcat

SEQ ID NO: 484987 - DNA, 735 bp, Homo sapiens
  misc_feature (22)..(22): n is a, c, g, or t
  misc_feature (26)..(26): n is a, c, g, or t
  misc_feature (28)..(29): n is a, c, g, or t
  misc_feature (32)..(32): n is a, c, g, or t
  misc_feature (568)..(568): n is a, c, g, or t
  misc_feature (625)..(625): n is a, c, g, or t
  misc_feature (631)..(631): n is a, c, g, or t
  misc_feature (670)..(670): n is a, c, g, or t
  misc_feature (678)..(678): n is a, c, g, or t
  misc_feature (687)..(687): n is a, c, g, or t
  misc_feature (690)..(690): n is a, c, g, or t
  misc_feature (695)..(695): n is a, c, g, or t
cggtacctgcgtactgggggtntggngnncanccacacccccaggtgagcatctgatggtttgcagcaacaccgacacccacaggtgagcatctgacagcctggaacagaacccacacgcccaggtgagcatctgacagcctggaacagcagcctgcaccaccaggtgcgcatgtgacagcctggaacggcaccaacacccccaggcgagcatctgacggcctggaacagcacccacacccccaggtgagcatctgacagcctggaacaacacccatacccacaggtgagcatctgacatcgtggagcagcaccccacacaggtgagcatcggagagtctggagcagcacccacatcccaaggtgagcatctgacaacctggagcagcacccacacctcgaggtgagcatctgtcctcccggagcaggacccatacctccaggcgagcatctgaacccatggagcagcacacacgcccccaggcgagcatctgaccgaacggagcagcaccgacaaccccaggtgagcatctgagagcctggaacagcacccacaaccccaggtgagnatctgacagcctggaagagcaccccacatcaccgggtgagcatctgacagcctggancagcanccataccctcaggtaagcatctgacagactggaacagcncccacacncccaggtgngcntctgncagctgctcagcctgcctgctgctagccggaccagctcat

SEQ ID NO: 484988 - DNA, 499 bp, Homo sapiens
  misc_feature (27)..(27): n is a, c, g, or t
  misc_feature (49)..(49): n is a, c, g, or t
  misc_feature (58)..(58): n is a, c, g, or t
  misc_feature (200)..(200): n is a, c, g, or t
  misc_feature (283)..(283): n is a, c, g, or t
  misc_feature (299)..(299): n is a, c, g, or t
  misc_feature (430)..(430): n is a, c, g, or t
cccaaccgtttaaactgttgcttgcanaatccagcagggcttgaacgtncggttatcnctatcacccgcatcttcttcgctcgccatcgctattttcgcttcgtccggtgattaatacatccatgttgacgatggcgtcacttactggtttcagcgtgaagctgtcgttaacggcaggcgttcctgtaaacgtcaactcncagacccatcaaatgccactttaccgttggcaatccggcgtcaccgtaaaagtggtattgcgtggcaaggcgggtgacctgtncacacgagattattancgaacgagattttgtaatctgtcgccagtaccgcggaggcatcagttaccgtggcaccgatcgcaacgtcacctttgtttttcgtgttttgcagaaccgcgggcttaccgatagcaaagaaatcttcgacngcatcgccgttagcatcaaatccggctttgtgttgggtgttgaaagcctcggcaaatgccagcgccgag

SEQ ID NO: 484989 - DNA, 118 bp, Homo sapiens
tgtttcttgttaatttacttgctgggcttcggcctttaggttctgtcaatcgtttttagcttacctcaaaggcgggcaatcgggttttccctatatcaggggatacccctgtgaaacc

SEQ ID NO: 484990 - DNA, 271 bp, Homo sapiens
catctgtcagacgcaaagagcgtgggatcacgtttcgatgagtgtgctgcccctttcacgatcaacagaactactgacaacgtaggccgcgcctgcctttcccatctgtctatctatctggctggcagggaaggaaagaacttgcatgtcggtgaaggacgaagtggggtggacgaagtggggtgggacgacagtgaaatctagagtaaaaccaagctggcccacggtgtcctgcaggctgtaatgcagtttaatcagagtgccatttata

SEQ ID NO: 484991 - DNA, 467 bp, Homo sapiens
taggagcttagagaaaatacaagttagcgtatcctacaggttcatccgtgtgttgcaaatgacagaatttatttcttttttagaggctgaatagtactccattgtgtatatgtaccatgctatctttatccattcatccatcaatggacacttaggtcattccatatcttgactattgtgaataaagccgcaatgaacacgagaatgcaactgtctattctacgtactaatttcaattgctttggatatatacccagaaatggaactgacagataatatggtagtcctatttttattttgcaagggacctcgatatcgttttccataatggctgcactaatttatattcccattagcaatgtataagagtttcctttttgtgatgaatatgttaagtagtttgatttaatcattccacattgtatacctttatcaaaaaatcaccttgtgctccaaagcctgttagg

SEQ ID NO: 484992 - DNA, 264 bp, Homo sapiens
gtgtggtagtatctgctttccgctatatacgccgttttttcttggcaaggggttggagctggaggagtctgcaataacatgcaagagtagcggagattcagcatagtgcaatgacttgcagaagtgtagaggatatgactgatggttggtgactgttaaaacccttgcgaggtatctcaggtggaggagtatacagggctgtgtgtgacacagaagagacggcaggcacctgatgggcactggtaacactgccctggagcgctg

SEQ ID NO: 484993 - DNA, 1084 bp, Homo sapiens
  misc_feature (1)..(1): n is a, c, g, or t
  misc_feature (67)..(67): n is a, c, g, or t
  misc_feature (77)..(77): n is a, c, g, or t
  misc_feature (106)..(106): n is a, c, g, or t
  misc_feature (115)..(116): n is a, c, g, or t
  misc_feature (122)..(122): n is a, c, g, or t
  misc_feature (146)..(146): n is a, c, g, or t
  misc_feature (169)..(169): n is a, c, g, or t
  misc_feature (174)..(174): n is a, c, g, or t
  misc_feature (188)..(188): n is a, c, g, or t
  misc_feature (197)..(197): n is a, c, g, or t
  misc_feature (214)..(214): n is a, c, g, or t
  misc_feature (222)..(222): n is a, c, g, or t
  misc_feature (242)..(242): n is a, c, g, or t
  misc_feature (300)..(300): n is a, c, g, or t
  misc_feature (389)..(389): n is a, c, g, or t
  misc_feature (392)..(393): n is a, c, g, or t
  misc_feature (396)..(396): n is a, c, g, or t
  misc_feature (404)..(406): n is a, c, g, or t
  misc_feature (477)..(477): n is a, c, g, or t
  misc_feature (650)..(650): n is a, c, g, or t
  misc_feature (800)..(800): n is a, c, g, or t
  misc_feature (926)..(926): n is a, c, g, or t
  misc_feature (948)..(949): n is a, c, g, or t
  misc_feature (996)..(996): n is a, c, g, or t
  misc_feature (1000)..(1000): n is a, c, g, or t
  misc_feature (1076)..(1076): n is a, c, g, or t
naggcataatctcataatatgatattttcacccctcgtgtcttttttagctctactcccattagtcnagaggaagcnagccaagtgttcactgatggagggacagngtgtggtannctcatnttacggaacattccattatatgtnttatacaggaaggtaatcctgtnacctnacacaacatggatnatccttgangacattatgctaagtgnaataagcnagttactaaaaagacaagtnactgtttgattcctcttatatgagatactgagaatagtcaaaaccagagagacagagngctgaatggtggctgcgggggctgggaggtgtgggaattactgtttaatgggtacagtttccatttttcaagctgagaagcctatgganttnntcngcggtttnnntttcatagctttttgaatgttttaacagtcaacgttactgaactgtgcacttaaaaatggtgaagacagtntgttttatgagtgttttacgacaatttaaaaattaaaagaaaaaaaaccagaacacactaagggttataggcacaaattctccttatgcccaccaccatctcagctggtagtatgacgggtgtagacaccattagaggcaatggtgaatctatggggaccacccaggaaagtnaccatccaaatgtccacatccctgcttggcaattaaaacgaagacacttttcttcagcacctggtgaagatgtttagtttctagtgctttccaagatccacctcaggagaagtcaatttgtccacaggaagcgtagtttccaaagctgtntacggtgaacctctgagagatgtgaattgaattcagctttagggagccaaagtagaagttctcaaacaactttaaaatatttcggccatcaaatgattctctttccttgaagatatatttgccttncgctgtgtagagattgtacctnnaaaaagcattggggtctttcctgaatagtgtattcataactgtagcntgcngtgtcacactattccactctttcactattagtccagatgcctgaaaccgttccgccctcgatcactaattcttgtngctgtggg

SEQ ID NO: 484994 - DNA, 126 bp, Homo sapiens
tctctgctcctgggattaagcgcattgagaaattgagatcattagagtggaaaacctatacccaataaaatgtccccaatgaagtaactagcttgaagagtattggtcaaaggacacaaccaaaac

SEQ ID NO: 484995 - DNA, 117 bp, Homo sapiens
ctagcagatccttagctcagtgatctcccgcctcagcctttggagaagctgggattacaggcacgcaccaccatgcccagctaattcgccatgttgcccaggctattgcccaattcc

SEQ ID NO: 484996 - DNA, 141 bp, Homo sapiens
attagtgttatgtataatggtttctgtatgctattagtgattcagtatgaaatatggtctctgtggttatagaatactcgcatgacacagctgagaggctgtctgttgtattcattgtggtcatagcacctaacaacattg

SEQ ID NO: 484997 - DNA, 325 bp, Homo sapiens
atactaaaatatattaacgcataataaaaagtaacaagtcaaaatataaaacatactgatcaaaatgggactacacatgccattcaaacaccagatggtcatagtcaagaaggaacaactcgctgaacatagggcacaccttccagtgactttcaacatgttcatcaaatttgctctgatcatagaaaggagaaaacattaactcacagaggagacacttcttgtgaacatcagagctggaatcaaagcaaaagcatatcccatgcacacataaatgatgacttggaagatcaggagcagtaggcacaaactcatcttcattagc

SEQ ID NO: 484998 - DNA, 1146 bp, Homo sapiens
agcggggggagcgcggcgcaccgactacgcaggccggagcggcttccccttccctcacgtgctctccgtccgtggtctgcgtcatcacacgccatcctggtggtcccgctgaccttccgtggatctgtcgcactggaagctgccctcgtcggcttcacgacgtcacgcaccacggtggtgacaggcctggcgagcagagctgatctgaccgatggggcccggcactcacggtgcggatggacgagaatagggactgctcatggtgtgtacacgcgggcgtgaccgtgcggtgcgagtgagaaccggtacctggcaccagacgcacctgaggtcggaccattgtgccgcaagagacggatctaggcgtggctacaacttcgcatggcctatggtgttggcattctgatatatgtaccttctccacaaggcccagcgaaagcgggtgtatcgggacatgcaggctaaacatctggattcacaatctggtacacgcggaacaggaagtactgggcttctccacctctgagcacacggatcactgcaccaccacgaaagggcagcggactggtaactctctggtagcaccccacgaagctggcctattccaacaccgcaaacggaacttagaactccgcccacggcagaggactcacgcgtgtcgaacaagggtaggttcaagcgaacggcaattcgtcgcagggacgcaatcctcgctggtggcaacgccatctggacttggtggtcggctaacgcaccacggcgtacggcatacaccacgcgggttagcctgagacaagagccaaagcccataattgggttcccaacgctgggttcccatgggaccgcgttgggtttcacccaaagttttccagcagggccgccgccttgacacttacattgcccacgcacacgaagaccggtctaccaccccaaactgtccacttggcgaccggaccctaggtccccgacgcgaatcccgctaaatttgagcggcttcgcatactacagccaccccatctcccacccggacgccggcaacaacaagtcttaccccccagctccacatccctggtggaccgcaaacctcatggggcgcgggacaccaacccatagaactccggactgatcgacttgggggaaaccagg

SEQ ID NO: 484999 - DNA, 501 bp, Homo sapiens
ctgcacgagagcgccagagcacacatgtggcgagaactacacctataagcgcacaatgtgagaggagaagactcatataaacatatggcggattggacacgtgtgatatcgggcaagtgcaccactatctgggcatctgagactataaaagccgtggcattgacaaaagaaccattggaaaatttgagaaggaagcttgtgagaagggaaagggcttctttaagaatgcctgggtcttggatataaccggaagcttagcgtgaacgcgggattaccattgagatcttcttgtggaaaattgagacccggaagtgctctgtgactatcaatgagggcccaggacacagagactttatcacacgagttccgggacatctcaagctgactgtgctctcctgagatggtgctgctcgggttggcgaatatgaagctgggatcttccttattggccgtggtacacaagggggttcactggacccactatagaccggagattggggg

SEQ ID NO: 485000 - DNA, 362 bp, Homo sapiens
ctgctctcatcatgccccccaggtgtctctgaggtggggagggagcccagagccaggactcccagccccgggcctgtgagggatgtgtagcaatctctgcggcatcaatgagggcagaggcagaggcagatgcatagacatgccatgagcacaaggaggcctcagaacctttcctgagaggacgtgtggtttggtgccgttacacacgtgtcaatccacacattagtcaatgttggccgggcgtggtggctcacacttgtaatcccagcactttgggaggctgaggtagaaggatctcttgagtccaggagttcaagaccagcctggacaacacagtgaggccccatctctacaaaaaaaaa

SEQ ID NO: 485001 - DNA, 218 bp, Homo sapiens
tggatttatagtggcacaagtaagccatgaggttaaagctgttgctaacagtttattgtttcgatgaatggtttaaaataatggtaatagagttatcaacagaaaggccaaattcaagttattgttgagtccatagcaacatgcatttcaaaacatgtccgtttcctgctgaacaaaagtattagatacttgactatagttcagataatttttttggc

SEQ ID NO: 485002 - DNA, 188 bp, Homo sapiens
acctgggtgttaagcagatctgtctcaaaacaaaggccaggtacagtggctcacgcctgtaatcccatcactttgggaggccaaggtgggtggaccatgaggtcaggagtttgagaccagcctgaccaacatggtgaaaccctgtctctacgaaaaatacaaaaattagccggggagtgatgctttga

SEQ ID NO: 485003 - DNA, 257 bp, Homo sapiens
  misc_feature (50)..(50): n is a, c, g, or t
  misc_feature (165)..(165): n is a, c, g, or t
  misc_feature (186)..(186): n is a, c, g, or t
  misc_feature (221)..(221): n is a, c, g, or t
  misc_feature (250)..(250): n is a, c, g, or t
gccatttaatagggggcagtgaatattgaggagcgtcttctgcatgaggncattccatggttcatcgcgtgtgtacttgtagcatctcaccaagctcagctcactagcgattgagtagtcctgtcagactcaacaccatcaggttctgccttcctgtgagctggngggtgatcaagagtaagcgantgttccaattcctggaagactcagcatcctcctcncagcatcccacctccctgctgcagctcantttgtgg

SEQ ID NO: 485004 - DNA, 436 bp, Homo sapiens
  misc_feature (1)..(1): n is a, c, g, or t
  misc_feature (6)..(6): n is a, c, g, or t
  misc_feature (423)..(423): n is a, c, g, or t
  misc_feature (426)..(426): n is a, c, g, or t
  misc_feature (434)..(434): n is a, c, g, or t
natcgnctgacggccaaggttgtcgagttcgccgacgacgatcagcgtcatattgttcggcgcgtaccaggtcttgcgcaccttctccagttgctgctgggtcaggtgcccgacctcaagccgttgcgggcatttcaggcccaagcttcccacccagctgattgctggcggtgtggcccaggtctggcggtcgagaaaacgttgcagacgcgtgtaatggccaccgtcctcgcgctcgaccacgcgtttggcggcgttgatcgcattgtcgtcaatgcgggtctgggtcagcagaccgagcagcaggtcgagcactttgcgctgattcttcgccggggcttcgatgacgaacgtggtgtcggcgttgctggtgaacgcgttccactcaccgcccaacgcctcatgcgctcctcaaggccaccnttnccaagtgngt

SEQ ID NO: 485005 - DNA, 124 bp, Homo sapiens
ttataaaagagtgatgtatcagtaaggtatcaataatcccagcccagtcaaagcaccgccaccggtaggcttctggtctcagggtaataactggggccgggcctcggtaagccggtgtatgtta

SEQ ID NO: 485006 - DNA, 180 bp, Homo sapiens
acaagagaagagacgagtatgggaaagttgctgagacaagaaagcctagtgtgacaactttagtgctagatacaaaattcacgacatgtgaaaggcactggactcatgtgtgtgagactgtggaaatgtcctcagaccatatcagcaccatgcaggactgagctctatctatagtttgat

SEQ ID NO: 485007 - DNA, 278 bp, Homo sapiens
ttaaaagaaaaaagggggctattttcccccttttttcccccccccccccgggggggcaaaagtttttattttaacccctcccctgtgaattttccccaatccacccttggccccttttttaataaaactgttttgttggaaccccgttttttattaaagtctctataatgttgatttttccccgattcccttttccccccttgaaaccccccctttaatttgttccccccttgcctttttttttaatcccatggataaaaaataaattggccttgtta

SEQ ID NO: 485008 - DNA, 143 bp, Homo sapiens
  misc_feature (36)..(36): n is a, c, g, or t
atgaggaacatggtcgtgcaaaatgggcgcggcagntcagcctattcgctgcactaactgtgcccgatgcgtgcccaagggcgaggccattaagaaattcgtcattcgaagacatagtggaggccgcagcagtcagtggacat

SEQ ID NO: 485009 - DNA, 731 bp, Homo sapiens
tgtttggagaacagtctcactctatggctgaggctggagtgcaggggcgcgatctgggctcacggaaaccgtctgccgccggggtttaagcaattctccgtgcctcaacctcccgagtagctgggattacaggcgcatgccatcaagcccagctaatttttggttatctttactagaagagggggtttcaccattctgggctaggcgggctcgttgaacgtccgtgacctcatgatccacccacttgggcctcccaaagtgtgcgtgggatcacagggtgtgagccacccgcgccgggccagcatagtattttctatgttataacggtgaaaaaatgtgaaaacagattatttcgactagcaaattttggaccccagagtttagaaaagatcttttatggcagcccaaaccagtaacttttaaggctcatattatacacgtgattgtggggcggccaacctgagaatgcagaccacacccagtggtgggcggtgcagcaagcaggactgtgcagggagccttccttgcctcacaaggtcttcagagcaagcgcagggttcttcccagtcactggtcaggaaatcatcattctgccagggcacgcagtggtttcttcaaaccatatctttagtaaatggctatgtccagatggtccccgaattattcttcaacaaagtggcgggtatctaaagctggtggttgagccccttagatataataaggtttttcca

SEQ ID NO: 485010 - DNA, 233 bp, Homo sapiens
acgtcagagatacgtcgtcatgcccagccacttcagccgaggctccaagagtgttgccgccggtctctcctaagcctggaggggccgaaaatggtgtaaaaggacctagttggcggtcgctaactgacacctcagtgacaaagatatctggacagaatcgcctgacaggtgcagctgccatcaagatgcattagatcaaaccatgtctgggttaataatttgtcctcattcta

SEQ ID NO: 485011 - DNA, 831 bp, Homo sapiens
ggaagtttaggagttgaggaaagaagattaaagagcgcgaggagacaaataaaaagaagtgttaagaattgcctttgggactctgaaggctgaagaattgatgaattgcaagtttgtgccccatagctgcacagactgcctgaagttacatttagagactgaaatcactgcaccttaaaaacaaaagatgagctgcactgtattcctggaaagcacctaccaaggcttcctattacctatttcacagcataagcctacagggtacgaagaatgaactctgagaatgttggagaatgtttcatcattactaacaggatatccctcatgacattgctgtctgattcagaggatacatgtgcaggcttgttacctgggtatatgtgtgatgctgaggttggggtatgtatgatcccatcacccaagtactgagcatgtactgaacagttagttggtaagtgtaggagtgtgtagagatggagtctcattttgtcacccaggctggattgcagtggtgcaatctgggtcactgaactcgtcccccggtcaagtgattctggtgcattagctccaagtagctgggattaccgatgcgcgcatcataccagtaattgtattttagtagagacggtttcccagttgtccatggtgttcaattctgctcaggtgacacttcctgctccaagtcgggtcgatggagaccggccggcttaaaatggttccgccatttggaaaggtgggcagggacacacttgactggacctggacaaaggttgggagtaccggaaacgtttaaagcgggggaatcccacgggttagagagaccttttttca

SEQ ID NO: 485012 - DNA, 391 bp, Homo sapiens
  misc_feature (15)..(15): n is a, c, g, or t
gtatcggcggaattncaggctggagtgcagtagcatgatctcagctcactgcaacctggccctcctgggttcaagcgattctcctccctcagcctcctgaatagctggtattacaggtgcccaacagcacacctggctaattgttgtattttgagtagagatggggtttcttcatgttggccaggctggtctcgtactcctgacctcaggtgattcccccacctcagcctccaaaagtgctaggattacaggcgtgaaccactgcgcccagtcggaagtaatagttattaaccaatgtgatggccgggtgtagggacctcgcctgaattcccagcactttgggaggccaaggagggaggattgttggagaccaagagttttgagaccaacc

SEQ ID NO: 485013 - DNA, 253 bp, Homo sapiens
tcttctcctgacacaaaagaatattacttattgcaaaccaaaaccacaatgagataccacttcacgcctactcaaatggctataatgaaaaagacagacgttaacaagtgttgatgaggatatggaaaaactggaaccctcacacagtgctcgtgggaataaaatggtatagcaatgttggaaaagtgcctgacggctcctcaaacaattaaacacagttaccatatgacccagcaattccatctctaaaata

SEQ ID NO: 485014 - DNA, 166 bp, Homo sapiens
cagagtggtcttgatggggtttggatccttttgctctcaccacaaagatggcacagtctttatgtttttgaagactccttaaaattattttatgtctgactcccctgatgaaagttggatgcttctattgtcaccccaaagatattaaagtctttataagtcttca

SEQ ID NO: 485015 - DNA, 198 bp, Homo sapiens
atagataaggtcttgctactttgcccagaccggtcttgaactcctggcctcaagagatcctcctgcctctgactcccaaagtgctgggattacaggtgtgagccaagcactcagcctcgtcttcttgtacagtacagttatagttgcttagaatgtgtcatcctcaatatgatgaaatacctaacaatttatcattgg

SEQ ID NO: 485016 - DNA, 337 bp, Homo sapiens
tggcgtagaatacgttgatcctacaatcccactctctcggtatccaaaataattgagagcaggctctttgcatatccattgttccatagcagcattattcataatagccaagaggtgaaaggaacccaaatgtccatagacagatgaatggattaacaaaatgtggtgtatatatacaatggaatattattcagtttttttactgtagctttttttttggtctttttttttttgttttttttgagatggagtctcgctctgttgcccaggccggaatgcagtggcacaatctcagctcaccgaaacctccgcctcctgggttcaagcgataatcttg

SEQ ID NO: 485017 - DNA, 1067 bp, Homo sapiens
ggcgcgcacttggccccgacccccggcagcggctgtgcgtgcagcctcttcgtcctccgcgcggcgtgcacttgctcccggcccctgcgccgggcggcggcggggcagcgcgcaggcgcggccggattccgggcagtgacgcgacggcgggccgcgcggcgcatttccgcctctggcgaatggctcgtctgtagtgcacgccgcgggcccagctgcgaccccggcccgcccccgggaccccggccatggacgaactgttccccctcatcttcccggcagagccagcccaggcctctggcccctatgtggagatcattgagcagcccaagcagcggggcatgcgcttccgctacaagtgcgaggggcgctccgcgggcagcatcccaggcgagaggagcacagataccaccaagacccaccccaccatcaagatcaatggctacacaggaccagggacagtgcgcatctccctggtcaccaaggaccctcctcaccggcctcacccccacgagcttgtaggaaaggactgccgggatggcttctatgaggctgagctctgcccggaccgctgcatccacagtttccagaacctgggaatccagtgtgtgaagaagcgggacctggagcaggctatcagtcagcgcatccagaccaacaacaaccccttccaagttcctatagaagagcagcgtggggactacgacctgaatgctgtgcggctctgcttccaggtgacagtgcgggacccatcaggcaggccctccgcctgcgctgtcctttctcatcccatctttgaaatcgtgccccaacactgcgagctcagatctgccgagtgaacgaactctggcagtgctccgtggggagaaatctccttcgggtggaggggcgaaaggcatgcgggttttcggacaggtggaaccggacctttcggaaggtgcccaattggatttttcgacctcatcgacacctgggctgtttctactctgtcccagagattacacgattcgtccaacagtcgggagaagcacactaagtaatttcaaccgcacattattttcccccgattc

SEQ ID NO: 485018 - DNA, 633 bp, Homo sapiens
ggcgcgcacttggccccgacccccggcagcggctgtgcgtgcagcctcttcgtcctccgcgcggcgtgcacttgctcccggcccctgcgccgggcggcggcggggcagcgcgcaggcgcggccggattccgggcagtgacgcgacggcgggccgcgcggcgcatttccgcctctggcgaatggctcgtctgtagtgcacgccgcgggcccagctgcgaccccggcccgcccccgggaccccggccatggacgaactgttccccctcatcttcccggcagagccagcccaggcctctggcccctatgtggagatcattgagcagcccaagcagcggggcatgcgcttccgctacaagtgcgaggggcgctccgcgggcagcatcccaggcgagaggagcacagataccaccaagacccaccccaccatcaagatcaatggctacacaggaccagggacagtgcgcatctccctggtcaccaaggaccctcctcaccggccttccgagcgggagctcaggtgagcccatggaaattccagtacctgcccagatacagacgatcgtccaccggattgcaggaagaaagcgtaagaaggacactcatgagacctctcaagagccatcattgacggaa

SEQ ID NO: 485019 - DNA, 105 bp, Homo sapiens
aatgtaaaaagaacaccatgaacagagtgaaagacactttaagttacaacatcatttttatgtgagcattagtaattctggccttctagatcgcgagcggccgct

SEQ ID NO: 485020 - DNA, 109 bp, Homo sapiens
cgagtctctcccatcagtctgctgctctgcagcctcattatcccatttgttagtagctgggcctggagtcccacacaggttagaaccacccagggggaatgttatgttg

SEQ ID NO: 485021 - DNA, 950 bp, Homo sapiens
gggtgcgtgcacatgtgtgagcggtatgtgtgcccaggtgtatgagtgtgtggataggtgcatgtgtgggatgtgtgcatggagtgtctgcacatgtgtgagtgtgtgtgcgcccacgtggatgagtgtgtggatgggtgtgtgtgggctgtgcatggggtgtgtgcacatgtgtaactagatgtatgatgtagtacatgtgcacatgtgctgcgtgtcactgtatccacattatgtgagtttagtgtgcacagaggctactgcctccacagtgtgtcttttcccacatgcgtcagccgtgaacctgccagagactcacagattccaccgcgtctggccggcgggacttactagtctttatctgctggtattaatgagtatgactccttataagagaacacatctttcttatttgtgccaagtgtgtagtatgggcacctgctgtgaaccccaccaggggtcacttacaccaaggtcgtcccttcccgccttcccatccgtgtatccctgtggctaaggtttcacttccaggtcagcaggggatatgacagctgtcctgtctctagtgattgagtcgtaagctgggggtgaacaggaagacacatatatcactggagtcggactcccaaagagtgcaggggaacacagggctcaacacgaggcggctctaacgcaccgcgcagggacaacacccgtcataccccacggggtttccaggaacgaccggcccgacggaacaagggcagatgccgcatgaagaccgcagcgaaccacgagacgtgccaatggaaggcaacggcccccacgacaaccccacacgcccccccacccatagcagagacaagcccaagcactacgggaggtgacacaaccacacagacaaagagcacaccaacgaaaagggaaaacgagaaccgcgaacacgcaccaacacagccacgcgaacacac

SEQ ID NO: 485022 - DNA, 557 bp, Homo sapiens
  misc_feature (332)..(332): n is a, c, g, or t
tggtatagcctcctgagattggatgaaaggcaaaaattaggaaatcttggagggagtcctcaagttgtattgctttgctgtgcttttggaagaagggacgacctggaggacacaggctcatgtgtgggtcttcatcctgcctgaccggcagatcttcctctacaccttggttaaagggggggcgaagatggtttcttagctctccatttgccatgattttcctcccattcatcatgagggagtttctcaaaccaggagtttatatttattttttagccccagtctctgcacctgggattcagctcaaggattcagcgtcttcatttttacanaagttcccccaagaaatcagcaaccagcctctgtttcatctgggagcccctcccttgcccccctgggtttgggggtgctgccctactgggaacagcagggttaatgcacccgtttgtagccgaccccccttagtggaaatcagggaaagcctccctttcttggccttcccttagtcaattaacatttcaaaggcatatgtcctcatgccgactgccatttacaca

SEQ ID NO: 485023 - DNA, 442 bp, Homo sapiens
cgtgtggtggagtactttgttctggatccctgttgatgtggatgttatgatgggaacgtttacagagagttttgctgcttctgcaggatatattgcaggcaacaaggagccgacagactacctgcgaacacattctcatagcgcagtgcatgccgcgtcattgccaccttctgtagcgcagcagatcattacctccatgtagagcatccatgcgtacgatggcaccagcctcgctatagagtgcttccaccagctagctgctctcacccctcctttcagcacactcctcgcccacatgccctctatcacctactctgaccactctttagcactgcctatgatgctctacatccctgcctcttgtcctcttcgcacgtcacgatgcttcatcgtcccactgttatcgactctgatactttctctcccccctcctctttcctcg

SEQ ID NO: 485024 - DNA, 245 bp, Homo sapiens
aacagacagaaggattaaaggatggaaaatacagcccaggcctagccaatggtttggacaacaagtccgtgaagacctggagcgactaaaaaaaattcgggcccataaagggctgggtcacttttggggcctttgtgtccaaggccagcacaccaaaacccctggcccccgtggccgccccgtgggtgtgtccaaaaaaaaataagtctgtaggccttgtctgttaataaatagtttatatccca

SEQ ID NO: 485025 - DNA, 470 bp, Homo sapiens
  misc_feature (135)..(135): n is a, c, g, or t
  misc_feature (419)..(419): n is a, c, g, or t
aacactggaccactcgaaagatgggcattgacagcggaagggggcacacttgggcctagggaggggctcgaagttcgcgggtcatcaggaaacttctggggcctatccccagaaagcctcatctttctagcatanaagtcaaaataagccctctcctgttggaaacgggtccaagccccaggaaaacctttgtgcaagcaagaagggagggatgattaggtggccctttcattgatttaattcttcaatgtaattttctcccaaaccaagggaaaccctttttaaatccttggaattttggccaccagggagcccctcaaaagcttaagatggtaatttccacttaaatatttcagccccaaggtaaaaagagttttgcaggtggtggaaaaggagggaggggggtagggtgctgctcntgtgactaggttgaaaaacctcctggctttctactcccatagcacagttta

SEQ ID NO: 485026 - DNA, 525 bp, Homo sapiens
  misc_feature (91)..(91): n is a, c, g, or t
atccggccaggggaaggattaaagggcatccaattgggaggaagggaggtcaaactatccctgtttgcccaatgacatgattctatatctngaaaaccccatagtctaggcacaaaagctccttaagataacaaaaaaaaaactttagcaaaatttcatgatacaaaattaatgtgcagaaatcacttagtattgttataaaccaacgacagccaagacgaaagtcaaatcaggaaggcagtctcattcacaattgctaaaaaaaggataaaatacccaggaatacagctaaccatggaggtgaaagatttctacaagtagaactacaaagcactgctcaaagaaatcagagatgatacaaacaaatggaaaaacattccatgctcatggatagaaagaaccaatgtcattaaactggccatactgatcaaagcaatttacagattcaatgctattcctgtcaaaccacctatgacattcttcacagaactagaagaataaactattaaaagttcgtataaagtt

SEQ ID NO: 485027 - DNA, 596 bp, Homo sapiens
ttaagctgcaggagcttttattttattttatttttccatatcccagtggcacctggaacgccagcgagacagaactgttcactcccctggaaagggggcctgaagccagggagccaagtggtctggctcggcggttcccacccccatggagcccaggaaagtaagatccactggtttgaaattctcgcttccagcacagcagcaatctgagatccacctgggacggtggcgcttggtagggggaggggcgtccgccgttgctgaggcttgagcaggcggttttaccaccacagtgtaagcaaagctgctgggaagttcaaactgggtggagcccattgcagctcagcaaggctgccgtgttcagactgcgagattgctcctccctggacagggcatctctgtaaaaaaggcagcagcccagtcaggcttggaacagacttaaacgtcccttgcttgagggctctgaaaacagaacggattctcccaaaaaagaatgcgaaccttgttaaggcccaacttgcttcttaagggggatccttgacccttgggataatggactggaagacacctccaatttgggctggcaggaacactaa

SEQ ID NO: 485028 - DNA, 383 bp, Homo sapiens
gattcggaacgagggttttgctcttgttgcccaggctggagtgcaaaggcgtgatctcggctcactgcaacctccgcctcccggattcaagcgattctcctgcctcggcctcccaagtagctgggattacaggcgcccaccaccatgcctagctaatttttctgtatggggtttcaccatgttggccaggctggtctcgaactcctgacctcaggtgatccacctgccttggcctcccgaagtgctgggattgcaggcatgggccagcgtgccggctgcatacagtaaaatttaacttagttgacttaaggattttgatttcccgtttctttttttttttttttagatgggagtttttgccctgttcaattcagggctgagat

SEQ ID NO: 485029 - DNA, 971 bp, Homo sapiens
cggaaagagatgtcggcgttttacaaaggcggatggatgctccccggttgaagacgaataatccgtggcaccccggtgtaaacaggagtgttcttgggaagcaccaaacttttctactgggctaccattctactatggggaacccgagcaaccagtgccaatcagttctccgagcaaaccgcctgtgtgcgaggacacaccaccatatgggcggttgccaaacaaccgttgtctaaactctggattatggaagcgctccctcctgtgtgcgtttatataaagatcttgggtagagacgccaccccccgggtggcaaaaaacgtagtctggtgtataacaccctcttgcgaaactcccaggtggtggactttggttacccccccctccaaaaaggaatatcttcagtagtaacaaaggttccccgcgcccccccccacatgtctaggtgcaaaaaattggtaagagatagaatccttcacaagctaagtatgcaggcacagaggagcgcttcatacgcagcaagctcacgcagcttcaagaaacatggcccagtaactctccgtccgcgtgagttatgtacttacagaacgacagtagacaaagctatggccgttactataggggccgcacgccattacttatgggggtaaaagattgtcgattccgcagcgccgacccgatgtacttacgagagtcgcctgtgatcctgaggtccgcacaacagtacttctccccaagtctatgttcggcagtcactaaatgtttcccccacccactagatgtgtcctccgcggcgaagccatttcaaagaaaagaggtgcggttcatatttctggccactccccgtaaagggggaagactggttatgggctacttgcggcgttcgtcctatgggtgatgaccaccacggggcccagagaggatgtagccataaaaacagctcaaattggaacgcccaaacaaagacaaca

SEQ ID NO: 485030 - DNA, 120 bp, Homo sapiens
cattggataagcggatgaggagaggcaggaagaagaggtataaggtgagatcacatacatagataggcccggaagaagaaatgttcctgttttcaaaatccctcatccgcttatccaatg

SEQ ID NO: 485031 - DNA, 251 bp, Homo sapiens
tgagacagtctcactgtgtcacccaggctggaggtgcagtgatgtgacctcctctcactgtggcccctgcctcccaggatcaagcggttctcatgtctcagctactcgggagactgaggctggaggatcgcttgagcccaggaggttaagtctctagtgagatgtgttcatgccactgcactccagcctcggctatagagtaagaccctgcctcaaaaaaacaaaacaaaacaagacaagagccagtcgac

SEQ ID NO: 485032 - DNA, 265 bp, Homo sapiens
taagcgcctggcgcttgctatacttatgcctcataggtgatacgtacaagggaatgggtaggctaggtgtttgtcagggggtagagaatagagtgtgagcgcgtattataccatagccgcctagtaataagagtactgcggcaagtactattgacccagcgatgggggcttcgagatgggccgtcgcggagtccatcaagtggcagtcccgtaaagcagggtatctttcactatacaaagctcatttgagtccagctcagtccat

SEQ ID NO: 485033 - DNA, 1369 bp, Homo sapiens
  misc_feature (625)..(625): n is a, c, g, or t
  misc_feature (815)..(815): n is a, c, g, or t
ggtgataacgggtggtggtggcgcgtggtggggggtgggtggttgcgcttggcgtagtgggggccggcgaggggcccgccgcgtggccctggttggtgccggcgcccttccgctgggggcttctcgcgcccggggtgcgaagttgtggcgcgatatgacaacccttttcccgctcccgaggggggtggttgcgacacacgggtgtgttgtccctgtgtatcgcacgccaggtgttgcagctaaagggggccccacgggtgtgctggttgttggtggtgccaccgccgcttgtttgagggagtgtgccgttgtgtaattcccgggggagggttgaaccagggttccgccctggggtggagtggaggcgagccgtcgtactaggcaggcccccggttgtggccgccggtggtggtcgggtcgccctagatgctctgagtccgccaggccctttggttcaagcccctttcttggggggccctattgtttgggggaggagtgggccttgcccacgggagattggggcccaaggctttctggtttgggctacgggagagagccgttcctggggggcacccgtctttcttggggaacgttgattgtccgcgcccccgtgcggagtgtgccnctaatatgagagggaaaaaggtgtctggagattctgtcacgggtggggagagaggttatggggcccaccaggcgcccacatggagggcgacccacgctggggaaagcaccacgcgtcccacacagtgtcacagagcacgcgtgtggcgcctctatagagagagaggagaataccccacttgacacacagngcccaaaatgcaacattgtccctctctcggaggttttgagaggaggcccctcgacccacaaccccacacacgcgtgggggcactgtctcggttggttggctcggtgtgtcttgagagtgtgtttcgtgttatgaggagtttatagtgttgaggtgttccacgccttgggtgttttcgggagagaaaagagaagaaatgcttacacccaagtgtttgtgaatgttatagggcgaagagcccccgcacacagttggaggtatattatagagagaagcctttgtcgtttcacacaggcacggtgtctctcgggggcttcacagggctataggagaggagaggggaggcctcgcgcgcttttatagcacgatccccacgtcacacacatgcggctcacaagtcacctcacagaaggcttttcgcactttcacagggctaatgttggtgcccttgtttacctcctaaaccaccacagctgtttgtggtttcacacacataatgttgtaaattttccttggttttttttaaaggaatgataataaagttacttgctttta

SEQ ID NO: 485034 - DNA, 415 bp, Homo sapiens
  misc_feature (16)..(16): n is a, c, g, or t
  misc_feature (36)..(36): n is a, c, g, or t
  misc_feature (40)..(40): n is a, c, g, or t
  misc_feature (56)..(56): n is a, c, g, or t
  misc_feature (202)..(202): n is a, c, g, or t
  misc_feature (317)..(317): n is a, c, g, or t
  misc_feature (361)..(361): n is a, c, g, or t
  misc_feature (371)..(371): n is a, c, g, or t
  misc_feature (412)..(412): n is a, c, g, or t
ggcacgagagcaaatnccaaacaaatgcacttcagngcangcagggaggcgcatcnacaagtaacttctgtttctgctaatccaatcctcccctgccgcccctactggttaaatgtgtttaactgttttaccaatgttggaattagccaaccccaccaccacagtaaataaataagaggaccacactttatcgaatataaanttgtttttattgaaggcagcagtcacatgaccttatatctaggcctttaggattagggcctgacagagtgaggccaggccctgaaaaagatgatgtttctttgttggcactaggnggacattaacatgttttacattacatgcatccagtattgggganttgaggcggnctccaaacacaactgtgttgggttaccgggggtagggtacnggc

SEQ ID NO: 485035 - DNA, 111 bp, Homo sapiens
aagccacggtacaacccacaagccacggtacaacccacaagccacggtacaacccacaagccacggtcaacggggaatacctactaagagtacgaactggcaggcgtagca

SEQ ID NO: 485036 - DNA, 610 bp, Homo sapiens
attttggggtatgtcttggccaaattgaaaaggacccaattatttgccccatggaaattcacctctttggtttgaagggtttcccacgggcgcctcggtttggttcaaaaaatgatggaccaggctttttgagccataaaagagaatttcatgcccaaatatttctccctgcatgttaggaagagtaaccgggccgccctgcacttttattccaacaccctcaatttttagatcagtgaagtggagcccaaatattatgcaaatggggaggacgcctatgccattaagggggacttcattcaaatggccgacgagtttaggcggcacctggagtttaaaaaaaagggcaggcacgtggtgttgggtgccattgaaaacaaggtggagagcaaaggcaatttccctccgagttcaggaaaggccttttgcgaggaaaagggcctggcttcccaggatagtggtggggacagcaaggccctcagcgaggtcagggagaccccaaagagcacaaatgtcaaggacagttcaaaggcctccgattcagcctcctagagcctgccccatcccctcctccccccccgagtttttccaataaatttgctccgtggca

SEQ ID NO: 485037 - DNA, 288 bp, Homo sapiens
cgcgttgaatggctggtctgaacagagttcacacagtctagctggtactggggtcaggagacgtgagctacttcacatctttggtcataggtatatcttgaggtacttgattctgtttgtgacctctctctcgctctctctcacgatatgtcttctgaccgtttgtttctatttctgcatttactgggtctaaacactgtacaaaggttaaaaacaacactccaatgggcgtttcccaagagggtggggtacagtttctgaactcacttgtaggtgtgtatttctttc

SEQ ID NO: 485038 - DNA, 305 bp, Homo sapiens
  misc_feature (28)..(30): n is a, c, g, or t
  misc_feature (40)..(40): n is a, c, g, or t
  misc_feature (43)..(43): n is a, c, g, or t
  misc_feature (50)..(50): n is a, c, g, or t
  misc_feature (59)..(59): n is a, c, g, or t
  misc_feature (81)..(82): n is a, c, g, or t
  misc_feature (84)..(84): n is a, c, g, or t
  misc_feature (92)..(92): n is a, c, g, or t
  misc_feature (102)..(103): n is a, c, g, or t
  misc_feature (135)..(135): n is a, c, g, or t
  misc_feature (149)..(150): n is a, c, g, or t
  misc_feature (165)..(165): n is a, c, g, or t
  misc_feature (186)..(186): n is a, c, g, or t
  misc_feature (211)..(211): n is a, c, g, or t
  misc_feature (266)..(266): n is a, c, g, or t
  misc_feature (291)..(291): n is a, c, g, or t
aaaaaaaaaaaaaaaccccccccccccnnnaaaaaaaaanaangtgtttnaaaaaattnaatttaaacccctggcaaaggnnanaaaaaaantttgtaaaannaactgtaaaaaattttgtggttgttgtaatgnactaatgtaataannttttaaaattaaganaatgtaagaaaataagctatnataaagtggtggcttgttttggaantgaataattttggtatgtaattttaccttttgtgtttttcatatagttgcctttnaaataatgtatataaagcctcaaanggtttcagcattct

SEQ ID NO: 485039 - DNA, 783 bp, Homo sapiens
taaagaagaatagctaagtcgaggcccccgtgtttattcggacatggggtcggccgctgacgtatggatgagaccggtgcgactcatgaaggagttcgtcaccctgcagtgatacccgacgagtggtagggtcgcgctcgcccgtggcgtgagactgtgagtgtggaggcagtgggactcggatgagcccatccctgccaaggagctagagcgaggtgtggctgtggggcccactggcctgctctgcctcctctccgaccacgtggacaagagtgatcctggatgctgcagtgggccaatctcacaatgtcatcagcaccatgtcttgtgtggcatcgaccacttggctttggatgaaatcaagaagcgtggtgatcctgagtttggctacaccccagatgtcctgacagataccacctgccgaactcgcagtctccctgctacttaccacctgccgcctggttgccgtgaggccatcgaggaagtgaagaatggtggctggacctcggttggaagcccctcttggctgtgtggctatgtgactcacgcagagcactgtcggcatcatcgtggctggggcagcataggccaggccattgcgtcgtgcgtctgaaaccattcgagtgtccagagatttcgtgtacacagggcggccagcccaggcctgaggaaacagcggaattccaggcaaagtatgtgtatacccatgagctggtgcccaatatgattacatcgtcgtggctgtccttaacacttcaacgagggatcataagatgatctccg

SEQ ID NO: 485040 - DNA, 112 bp, Homo sapiens
  misc_feature (78)..(79): n is a, c, g, or t
gggggggttttttttttttggggttttttttcccccgggggggggggggcccccccccctttgtttttcctttttttnnggccgaaaaaaaaaccccctattttttttttta

SEQ ID NO: 485041 - DNA, 341 bp, Homo sapiens
  misc_feature (214)..(214): n is a, c, g, or t
  misc_feature (262)..(262): n is a, c, g, or t
  misc_feature (266)..(266): n is a, c, g, or t
  misc_feature (285)..(285): n is a, c, g, or t
  misc_feature (298)..(298): n is a, c, g, or t
  misc_feature (330)..(331): n is a, c, g, or t
ggggggggtttaacctttttttttcccggtttttatttggggataaaggggggcccttttttgggaagcgggttttaaaaaatttttaaaaaaaaaatttaaaaaggaaaaggtttccagggttttttgggttatttccttgtttcccccgggggaaaaaaaagaagggttcccggtttttgaaaaaaaaaaaattttttttttttttaggggngggggccggggtttttttttggggccctccccaaggggggaaaatggnaaantttttttttttgggggaanggttagggggtgnttttaaaaactttaaaaaaaaattttttttcnnggggaaagga

SEQ ID NO: 485042 - DNA, 140 bp, Homo sapiens
acgtcgagcattgctgacaatctcatcaaaagtgatattcccactgtgattaatgtttttctgtttcttggcggtctcttggagttccttgagggctgtgatgatcagggcagaggcagaaggcaccacctcaatctggg

SEQ ID NO: 485043 - DNA, 856 bp, Homo sapiens
gaaaactccaggtatgtagtgaatgcatgatggtatggcacaccaaataccatgtggttttcatactccccctctctcccatcctgatgtctagcgcgtaatgattaacttgcgttatgataaattagttgcgtgtacaaagctgagggaaccggaaggaaagtgctaggtgttttcaggaactaaggtggcggggggacgaatttctcttcctcacatgaggttactgtttctttcctctggtgggggcattggatcctcccacagtatgccctggtgattggaacttgagggcttcccatctgtgtacatcccactttgaatccttgatcgtgacaagaaataccttaggccttcagtcaattccgaagctccttcagttgtatttataatgggcgtcttcacagtgcacatatgtgtatgcatgtatacgcccgatacagactatgcgaggacacagactccgtactccattagctaacataccctccctctccagaacccctgtcacatacctttcaggaggtgacagtgtgtctaagttgtcatctaccagacaaacgtctgggcccgtcctccctcctgatactgtggcctcttggtaccagggtgagtgggaggagaacaaagagatgagacatccagaggggtggggggaaaagactgtatctctctgactcatgcctttatggatattgaaagacttgatcctggtgcttaaacagacagattagtggggtgaggtttagaagtggtagccaaagctgtgtctggtgggttcattaggaggattctttaataaagtgggctcggggacagggaaagagggatatattaggagagcgaaaaattgtta

SEQ ID NO: 485044 - DNA, 486 bp, Homo sapiens
ggtaggttgtacgtgtggaggctcacaagatgtcttctcaggaggaagtcttacgagctacatgaagtatatactagggacatagggagatgttaaaaaaaaaaaaaaaagtaaaaattccaaacttggagccacaaatatgagagactttatgtaaaaggtagggtctgggcccgttgcaggggctcacacctttaatcccagcacttggagaggcgggagacggggcggatcgctggagcccaggagttggaggccatcccgggcaacatgagaaaccggtctctacaaacaaacaagcaaacaagcaaacaaacagtttttagtataaaagagtattggtccacgggggaaaatcgggaaaacacacacaaataaaaagaggaaaaattatccgtaatccttctttctacccagaagtgagagcacggttatttggctgatcatatataatcgtatttaatttatagtacaaccggccggtgg

SEQ ID NO: 485045 - DNA, 341 bp, Homo sapiens
  misc_feature (152)..(152): n is a, c, g, or t
  misc_feature (282)..(282): n is a, c, g, or t
agcgcgtgatcagctgtcggattggatcgacagaaactttggaagctgtctgttttgcgtctttggcggcgtctgccttatttgcggctaccgcgtcgcgggcctcttgatggacagcggcgaactcagcattacgggcgacgaaagcctgngattcttcggccatggccaggggcgacaacaacagggaagacaggacgaagacgctggcaatacccatactgttggacatttgaaactaccttcttgcggtgcaagtgctaatgaggacgggggtaaagntagccctttcaatgcaacttgaacagagcgaagtgcgataagcactgttgcgcaaaagg

SEQ ID NO: 485046 - DNA, 460 bp, Homo sapiens
gacactgataggcctcctgcgtggaggtttgcagtaagccagacgacctgtgggtcccagggagagacgggctgctccatggatgctcctgggacctgaggcactgggtggacctcaacagagtaatgagctggtccgattctcgagtttcctactcaagaactcctgatgaagcagattcctgtgggtgacaagtgtcagaagatagaataggaccttagggtcaggaaggatttcttgaacaaaaaaggggaaaaacagattgagagattcagaaagctgtaatatattctgtgacctcaaaggtgacttggaggagggctgtttttcaacgacgggcgtgtagtgaacactgggggcatttaaacggttcagatgctgaatttaatgttatatgtgttttactacaattggtaaaaagaaaaaaaaagtccacgcggccggagtttagtagttgtta

SEQ ID NO: 485047 - DNA, 194 bp, Homo sapiens
tccagtaatgtgtgccgatgtcttacccgaatgggatctcttcaccacacggccaatttatcacaaacccttctctaaacccttacaataggcaggaaactgctcatacccctacgacggctgatggcagaggataaaatattaattctaagaaaataggccgggcgtggtggcacacacctgtaatcctagca

SEQ ID NO: 485048 - DNA, 241 bp, Homo sapiens
cctatctatggacattctaccacctacgcagagatccaagttgctagtacagcagacatggttgtgaagagccctgacagggaagatccataaataacgtccaggggatcagatgacgttgacctagagacttgctcatcttccggccgtgagcatctcgcacgatggcatgaaggtaagacctctctaaagggcagcctgcccgtgagcttcaggcccagcatgaccatccgggccaccc

SEQ ID NO: 485049 - DNA, 191 bp, Homo sapiens
cctacagttaagagtctgaatcctggacgaggggacatatgggacttccggatcctgctccgaggccttcctgggcttgctgtcccccagggagccagctggctgtacgacagccgtgggctcccaactcctccagtggtccctgctgttgcttgtacttcgggggctgctgtgagcctattgcagtccca

SEQ ID NO: 485050 - DNA, 352 bp, Homo sapiens
ccttgtaaggagagatattcgccacatagcgtagctttccatccttcacatatgtgttaaatggaattcattggctccttggtgccaatctccatttaagcatttgtccaccaaggtatttctacattcatatcctcttatagagttcaccttcagaggaatctcatgaaagggggaaatgtagtgaccagtcacattcttaaagaagagccggtaattctgaacgcaggcctgcccgcgctccacatgtgtggcacaggcccatagcacggcgcgacgcgtgtccgtgcactgtgtccccaaccgcaggcacacagcgtctggcgcacccgtgcacaacagccacaacacc

SEQ ID NO: 485051 - DNA, 916 bp, Homo sapiens
cgggcgtctccattttggtctcagtgcgtggactcggcaagaaccagcgcaagagggaagcagagttatagctaccccggccgtcggagccggctcactgcactacccccgcccccttctttcctccagacgccgaagtcgcagggcgctcatggtcgggcctggaggtactgttcgcatcggcagcgcctggcctatcacctgcaggcaggacgcgctcgtctgcttcttgcattgggaagtggtgacacatcggttacttcggcttgggtgtcggtgaccagccgggtcccaatgataaggaatgtcagaactgctgccagctgggtggaacaacaagtgaatgacctgtattgtcctccggtatgagtataacggatgggtccacgaaagctccttgtgaaaggccatcaccgtggagagcagcatgatcctcaatgtgcgtggaatatggctcacagcaaagtggcagacttgaccctgaacttggatcgattatcatcgatgcagaacacctgggtgacttccacgaggacctacaagaacaagtgaggacgcttcggtctccgtattgtcgtctggcaatcagtcacgacctatccatgagcagtgcggaacaggctaatgtaagcaggtcccccaccgggaggttcccccctgctaccgccagagaggtggacccactccggattcctccatgccatccacacaccagtcggcagcctcgcctggtgtgatcccctgggcccgtgtgatgtccggggagaagactttgaccctttttgggcctcggcgcagagttggcatgacttgtggatccctgagatctggcttccccaagagccccttattgacccttcctcagggctccgaacggattcctccaggcgctgtgcccccggggctcggttggccc

SEQ ID NO: 485052 - DNA, 446 bp, Homo sapiens
gcctcatgcagcccattatcatttgttatttgggtttaaaaaaaattttgacatcttttccctcaaacccaaaaaaagtcagaactggggttatttactgttgatttcatcctcctggggatgaaaaaacaagcctagaggaatgaactaggggtactgaactgtttaaattatttttgggttaataggaccctttgaggatttttttccccattaaaaactttttgaattataaaagttttccttacattatttaacaatggaccctgttaaaaataaaaataaaaattcaaactttggggggttttcagcagccgttaattggacattttgccctaactttggggggtgggctttttgtaagattgggctttggggttcagtttgttacctttggagacttatttaatgaaacccttcaaataaacccaacttggttttgttga

SEQ ID NO: 485053 - DNA, 353 bp, Homo sapiens
ctggaagaaaggcgataatatttctttccgatggtgtctcccaagtgtgggtgctgttgggtttttataaggttgtgaaaaggaagatgcacatatcttcattctccactggtgtgcatggaaatgtgtgcgagtgtggatgtataataaatcgagtaatatcgaatgaggtggcttgtgaaatactgcagtgttggatgcttcacgaggtattatcctattttattagcacacatttgctagctcattagagttaatctttatagaaaggacaccgtataggttcgtaataaatatttacaggacgcacaatagatctattactactttaacgactattatcccttctccag

SEQ ID NO: 485054 - DNA, 733 bp, Homo sapiens
gccggcgtgtgaaggaagcatggcgagactgcgatagtatgacttcgaagaatggtactgccctgctgttcctggaggacctccaccattcgcccatcaccgatcatcagtgtggcgtcactgttctttcagagctgcgacctatcgaatcacaggctgcggcacgcctactctacctgaccaacattcagacgatgggcgcaagcttgttggacaacaccattccaatgctacacacgtactgacgacccacagatacgttatcctctgcgaagagccaccacagtcacacggcacaggacagcgacccaagagtcacacacacagacaacgctagataaggcacacaagacgctaggaacgccgtcgagcctatgacagcactgcatgcatacaacgagtgacatcattcacatgagcaccaacacgattacgacgtgtatggcgcaacgagacacgagcatattacatttacaaagaattgagaactcattatagcacttacgtgacattgatgatgaggacaagtacatgtaacagagtcagacagtgcatacaaggcaaagtaagatgatagaaataggcacacttgcaaacacacacaacaagaaacaacacagacagacaaagcacaaagagaaacacacaagaaaacacacaaaaagaacaaaacacagcaccacaaccacagagacaaagaaacacaccaaagacaaagagaacaccaacagca

SEQ ID NO: 485055 - DNA, 678 bp, Homo sapiens
  misc_feature (417)..(417): n is a, c, g, or t
  misc_feature (450)..(450): n is a, c, g, or t
  misc_feature (460)..(460): n is a, c, g, or t
  misc_feature (543)..(543): n is a, c, g, or t
ctcgtgccgattcggcacgaggaagattatatcccgcgcctggcttgaagggtcctacgtacacggagcttcgctcattgctagcacagcagtctgagatcaaactgcaaggcggcagcgaggctggggaaggggtgcccgcccttgctgaggcttgagtaggtaaacaaagcagctgggaagctcgaaatgggtggagcccagcgcagctcaaggaggcctgcctgcctctgtagactccacctctcggggcagggcatagccgaacaaaaggcagcagaaacctctgcagacttaaatgtccctgtctgacagctttgaagagagtagtggttctcccagcatggaccttgagatctgagaatggacagactgcctcctcaagtgggtccctgacccccgagtagcctaactggngaggcacccccagtaggggcagactgacacctnacatgggcgngtactcctctgagacaaaactttccagagaacaatcaggcagcaacattggcttgttagcaatattcgctggtctgcagcctncactgccgatacccaggcaaacagggtctggagtggacctccggcaaactcaaacggccctgcagctgagggtcctgacttgtagaatgaaaactaacaaacagaaagggacgtggcacccaaagatgggggaaa

SEQ ID NO: 485056 - DNA, 175 bp, Homo sapiens
cctggctctgaacttagttactaatagtgagaggagctggtccagtgcctaaagcaaagagtataacaagacggtagaaagatgcagagctaacagaagtgtcaattttgtctgtctctgtctatgaaaatgacctttagtactgcaaagcttaggaacacatcctatagttcag

SEQ ID NO: 485057 - DNA, 218 bp, Homo sapiens
ctggtggtgtagcctcatgtactgcgtgagtctgtccaggctgcatgatgggtcagcccttccttggggctcggatggaacagttgtatgcgcaggaacctgacagcctctgcttcgtaatccaccccgactcggttcagggcgatgttgatggtgacggtggaggcatcatggtgtggctacgagaacgtgccgactattgacatccacatgaacca

SEQ ID NO: 485058 - DNA, 280 bp, Homo sapiens
tcgcaatgctgaaaacacactcaaaatccctatcatgactttttacagcacaataaaacccagcttccacctttttcccatccccagggattctgatacagctctttggggatggatgaggcctgggcaactcttaataacctctccaggtgatacagatgtgtaggcaagagggagggccaaaagaaaaaaatatcagctaatacctagcaggagaagcagtcaatttaatgcgatgatccagttatcactcagtgtatgaaaagagcagctcatcgta

SEQ ID NO: 485059 - DNA, 353 bp, Homo sapiens
tggatgcctccattaagtgaaacaagcctttgctgaattggagagctttttaatggatcgagaagtggcgttgcttgctgaaatggacaaagtgaaagctgaagcaatggaaattttgctcagccgacagcagcaattggttgagctcagagctgatatcaagcactttgttagtgaacgtaaatatgatgaagatctgggacgagtagcccggttcacctgtgatgtagagaccctgaagagcattgattcatttggaccagtgtcttaatccaagaacaggtattcgaccagattccgatggagcttaagtacatctggggtcttgagtaggccagtgggctctggttgtt

SEQ ID NO: 485060 - DNA, 480 bp, Homo sapiens
  misc_feature (369)..(369): n is a, c, g, or t
  misc_feature (382)..(382): n is a, c, g, or t
ttattgctaggctggagtctgggatgcagaatatgagtattcatacgaagacagcaggggctatgcaggtggtctgagctcggctatgggggctcacaagcccgcggctcagctacagtctgggctccagctttggctctggggcgggctccaggtccttcaggcggaccaggtgctccaggggccgggtttgtgatgaagatcgagacacgtgatgggaagctggtgtctgagtcctatgacgtcctgcccaagtgaacagctgcggtagcccctcccagcctacccctcctgcgctgccccagagcctgggaaggaggccgctatgcagggtagcactgggaacaggagacccacctgaggctcagncctagccctcagnccacctggggagtttactacctggggaccccccttgcccatgcctccaggtacaaaacaattcaattggtttttttttggggtccaaaataaaacctc

SEQ ID NO: 485061 - DNA, 302 bp, Homo sapiens
cagcagcagaggtaaaggttgccctaaagagacgtaatgaaacaaggatgtgaacgatcattattagcacgccccagggacacagacgagatgagcatggaaacacagccattgtatgtgcagttgtgggcacaggtgaggccgcagaggaactgcatagctaaagtgaaggccttcaggagaaggcgtgactgggtgtatcatggtcataagataggttgtgcataggaatggtgcccgtgagcatgctgttcatggcaatcatgcgtatgggcatgcaggtctctgaaattattattatg

SEQ ID NO: 485062 - DNA, 908 bp, Homo sapiens
tatccacataaataccaaaaagaggaaatgcatgcacacaagatggggcaaagacagggactgaggaacgacacagaggacacatgtactatctgtggtctatattaagaggaaggtgaagatgtgagacgtcttccatgtatgcaccttttccaccaagtgtgtgtggaccacatggtgtgatataccaaataagaagtgccccatatgcagagtgcacattgaggcccaagcgtgccaagttgaaaagtgtggccaccatgtttcagaaatctgggcctccctctcattcccatccttcctggtactgaagtcaaccaaaagatggcatgactttacctgcgcaagatttgtggaagcatgtgaacttacgagtggtggctcgtgttatatggtaacaataatgtagacctacagtttatgtatacagttgatttggatgtatcaataaaagctttaagatctaagatgtgacatttttctgtatcatttcacttgtatttttgcatggtccttgtatggcatttcttgtgaccatattatgggtgtgtgaccccttaagcttgcagggcacggttagatgcttagtacgtagaatatagtggccttttagtattttcacatagtaccacgccttactaattatgactttataatccaattactaccttaaattacatcactccatgaacttcaggtcactgtaaaaggtcttaaaaatggaacaattggttaagaaattcgtatagcaaacggcgcgaatatacaaatgacgcggagtacagaccctcaatggaagacatacattataaatagggggacctacacaggggcaaacaatctggagtcctctttcacggacaacgatagcacataggggggcgtattcacacacaacctcatggtgg

SEQ ID NO: 485063 - DNA, 368 bp, Homo sapiens
ctcaagagtcaatgttctctctattacactgtttccctcactttataaatcagctttggaaaatgcaagttcaaagtcaaacagatctctgacgcagttacaaaataaatctaaattaaatgtctaaaaatacacagcacactagaaataccaatatgcattcagaaaacatcatgaaagatacgtagaatttttagcagggattaactctgggatttagggaggtaagacatgtctaatttgggggtagggacagcttcaaataatttgaagtgattatttaaggaattggagttagtttgttgttttttaattttgtggtttgtttttgttttgtttgttttaagacagagtctcgctccatcaca

SEQ ID NO: 485064 - DNA, 421 bp, Homo sapiens
aaccctcccactagcccagttaatccaggagacctgtagatacccagactacaatggggctggagtggcaggggaaacaggccggacagggcccacgaatcctgccaccactcctcactgtggtgtgatctatggcagcctcagccctgatgagggcaatgaggtcctggtatgatcaggaagacgaatcgcaaggctggacgatactgggtgggagaaaaaggtggcttaagacagaggtggcaccaaggaccaagttggtgtaactgactcagcacgcctaggtctcatcctggacttcctgcctcctccccagctcatctccagcagagagttggtcgctgaggcgccaatttggagccagagagcaacggccgaccatcgatgtagatgggccgtcgaccctcattggcaatgaaga

SEQ ID NO: 485065 - DNA, 190 bp, Homo sapiens
gaataaatgattgaatgaagatataataaataaaagctataattatagataacttttattagaattttttttagcaatattcccccccccccccccctgttttgcttttaatgtttttttcctttgggggggaaagtataccctggactaaaaaattgtccttcaataaatacgttttgagggctgtcca

SEQ ID NO: 485066 - DNA, 1198 bp, Homo sapiens
  misc_feature (617)..(617): n is a, c, g, or t
gcatagctcaatgaagtgcccacgtgagcagccgagacaggcatgatgaacactgctgctggatatgtaacaagtctagcgtcccaagagagcacgctgggataaggtgcagctcatggcagcggaacgcaggggttaaggccgaggttgagtgagctgcggtagccgaatccgggcacatcggaggagagggcatcgaatgggagagcaagaagatcgcggatgaggatgccctgcaggcgcattcggcaggctagaggagcaagatatgaatcgacctgctagcgcaaagcatgaggtgccacacattgcatgagcgcaggaggctctgttctcagagatggatgtgacgaggtctaggcgtttagatgtgacatgcaaggaagcagatacggtgccgggatgcctacagaagatttgctgggtaacatagtgatgagtgccagattttaatggtacatggtcaagtagcggattaatggccaaagcgagattgctctaagcttgattgatggtgatggagaacggatgcagttcgggacgtagcaagggctaccttggcacctccaaggatttccaatgggtggagacttgccctacgtatggtgtgaacttgntgtcaatcaaatgctgggcacgggaagaatgggtacgtctgacgtacatatagtcgacagttcgcactattcgggggaggctaatgggcagcaaacttgcatgcttgactgacgatagccgatatagccttatagagcctccctcgatgaacgttgcacacactcaaaagggggaggacaaggggtcttggttggaggacaaagcgcccttggacgccaagtcgggggtcccggatagaggagacattctagaaatgcgttgatacccggtttggagcaccgcatacgggttcgcaaagcgaacattccgtgaggttgcctcggaagtagaagcaattcccgaaggcgtctcttttgttggccatagtttgccaattgaaaggagatgccccgaggggggacctttgcccctcggttaggaatcgcaagacaagacaagattggcctggatgagaggccttctctcaccacgagatgtgggggcctaccaattcggataggaggagaaccactttctacaatagaggaggcagatagcaggagagaccggcacacaggcacgttggcaacgcgaggtcaca

SEQ ID NO: 485067 - DNA, 296 bp, Homo sapiens
cttctgtctatagtggcgtcatcctgggaattacagacaatttaacaagagattgggtttatattctctatggccaaaggttgcactgaagtactgtaaggacttttcccatgctaaacagctctttgctgcttgttatggagttggtacacacgacgttctcaccgaacggcttcgtacagggtcatgctgacatgagactgttgccttttggactacttcctaccccaccgacagcctggggaccacggggcacggcacggacgacgacgacccggccactcccgaccgctata

SEQ ID NO: 485068 - DNA, 324 bp, Homo sapiens
gatagcaggatgcatttatcttatccttcccaatcgtgatggccagttcgctgattattttaattaactttgcaatattgtctactgatggtttaattagcaagcattttacatttgggaacaatattcccgaatcttgctgacgcgcagcaaatttttactccggtgatgaatggctcagtcaatattatggcaatattgattacctttctcgttgcacgcaatatcgcgattagcttccagcaggacgatctgctgtgcggactaacggccattggcgccttttttgtggtctatacaccttataccatcatcgatggtcag

SEQ ID NO: 485069 - DNA, 311 bp, Homo sapiens
  misc_feature (6)..(6): n is a, c, g, or t
  misc_feature (15)..(15): n is a, c, g, or t
  misc_feature (183)..(183): n is a, c, g, or t
  misc_feature (189)..(189): n is a, c, g, or t
  misc_feature (240)..(240): n is a, c, g, or t
  misc_feature (255)..(255): n is a, c, g, or t
tcgccngtttggctnggccctaaacttgcccttctcccctgctgtcgccacttattgttgtgaggctgtggccatatccgcctgtgtcccatcctcctcctcctcggccttctgcactgcatctgccctgccctcccactgtctcctctccatggtgcctccgcttgggctgaagcctgtttntcctcntcactctttccttgccctccccttcactgtgggccccttagcccgtatccntctcgccatttcgcngcccactttcctctggctgcctcgggctcctcattatcaagatagggtccatggga

SEQ ID NO: 485070 - DNA, 176 bp, Homo sapiens
cccaagggctgggggcttttttaaaaaaaaaaaaaaaggggggtggccttttttttttttagaaaggtagaattggtttttcccaaagtttatgtgggggttgattcccccctcctcccttgggtgggacctgggttgggggtttgatagaaaaattaaccccgctttttgttcca

SEQ ID NO: 485071 - DNA, 174 bp, Homo sapiens
aggtgggcgagaagcaaagacggagattggagcgcatgttagggtgcgtggagtggaaggcaatggtgccatactaaactgcagaaatactaaagggcatggactacagcgactccgcgacggagccttgcctgggtgagggagtctctgggacgcagggggctcctgtagctt

SEQ ID NO: 485072 - DNA, 940 bp, Homo sapiens
  misc_feature (348)..(348): n is a, c, g, or t
  misc_feature (444)..(444): n is a, c, g, or t
ggctcgggctaagactatttggggtagcctaagtatctcttctatatcccctggcatgttcttttttgcgctgtcacaaatgccctattacttgaatcatcctgggataggagagaagcttggggacagcatgtagcacagtgctgagcccaggattgagatgttttcaaagtgaacgaactatgtagctaggaaaaggagcacgtgtgtttgtcagcagggttggtaggttgagagtattttctctttggccgaaaccatcagtccatactgatacttgatttgtgctatgccttagatatgaacgatggagtggtcaggatagccatggatgccattccaaagttngtgatttgaattttcataaatcatattttaaccaaagcattactacttaaaggaatcttagggtgaaccctatgaatccttcagtgcgcttggatntgatatttggggtccatttaaaatggagtacctgtatgtatttggattcagctttaacttggagataatcccgagtcatgctttaaagaagttccttctgagatcaggagctcaggtgtttggtgaactctgggaaaactagacactcccctttacctgtatatagttctccttcgtgggctcctgggtactgggggacctgggtacgattggaggcaatttacgaggctggctcctcaatatttggcgtcctccaggcccaaggctctagactttcgttggtgggtccccggccagggttctctccgttactacgcaaagttggggtaggcggcgcggcgcacactggttttcacttgtgctcacgctctgcgcgcattcacagcggggggtatgttccggcgccctatgttttccagtgccccaaaaccggggttccaggggtctcgggcccacataggaggccggcgccactgggccgcggagcgtttctccg

SEQ ID NO: 485073 - DNA, 534 bp, Homo sapiens
cggacgcgtgggtcgcccagactccgccatacatagggacagacctagttcaatgaatctgaggaggctactcagtagacagtcccaccctcacacgattcttgagctttcacttcatcttgcccttcattattgcagccctagcagactccagctcctattcttgacgaaacgggatcaaacaactttctaggaatcacctcccattccgataaaatcaccttccaacctttactacaacaaatcaagaggacgccctcggggtttacgttgccttctttccctgtctctcgcttaatggacattgaacactattgctcgaccaggaagctcctagggcgagccagacaaattatacccgtagccaagcccttaaaatactccctccccgacatccaagcccgaagtgatattatcctataacgctacaccaattctccgatccgtccctaaacaaactaggaggcgtccttggccctattaactatccatcctcatcctaggcaataatccgccattctccatatatccaaa

SEQ ID NO: 485074 - DNA, 228 bp, Homo sapiens
agaatgaagtctactttctgctgtgagaggtggacggagacaggaacaaaggacgcttggatctctgactgtcctctctgccgccgcgtcctctctgcttcttgtgtttgtgtgcctccttggtccttaccagcaaacgcgcaagggtgccgggtgccgggggcacggaaagtccgagggtggagggttgagcgttgagcgacgtctgtgctccttgccccctgacga

SEQ ID NO: 485075 - DNA, 659 bp, Homo sapiens
  misc_feature (34)..(34): n is a, c, g, or t
  misc_feature (79)..(79): n is a, c, g, or t
  misc_feature (83)..(84): n is a, c, g, or t
  misc_feature (103)..(103): n is a, c, g, or t
  misc_feature (110)..(110): n is a, c, g, or t
  misc_feature (184)..(184): n is a, c, g, or t
  misc_feature (222)..(222): n is a, c, g, or t
  misc_feature (244)..(244): n is a, c, g, or t
  misc_feature (246)..(248): n is a, c, g, or t
  misc_feature (284)..(284): n is a, c, g, or t
  misc_feature (289)..(289): n is a, c, g, or t
  misc_feature (299)..(299): n is a, c, g, or t
  misc_feature (309)..(309): n is a, c, g, or t
  misc_feature (318)..(318): n is a, c, g, or t
  misc_feature (326)..(326): n is a, c, g, or t
  misc_feature (344)..(346): n is a, c, g, or t
  misc_feature (353)..(353): n is a, c, g, or t
  misc_feature (357)..(357): n is a, c, g, or t
  misc_feature (366)..(366): n is a, c, g, or t
  misc_feature (396)..(396): n is a, c, g, or t
  misc_feature (404)..(404): n is a, c, g, or t
  misc_feature (417)..(417): n is a, c, g, or t
  misc_feature (452)..(452): n is a, c, g, or t
  misc_feature (464)..(464): n is a, c, g, or t
  misc_feature (470)..(470): n is a, c, g, or t
  misc_feature (474)..(474): n is a, c, g, or t
  misc_feature (479)..(479): n is a, c, g, or t
  misc_feature (488)..(489): n is a, c, g, or t
  misc_feature (493)..(493): n is a, c, g, or t
  misc_feature (500)..(500): n is a, c, g, or t
  misc_feature (503)..(503): n is a, c, g, or t
  misc_feature (506)..(506): n is a, c, g, or t
  misc_feature (513)..(513): n is a, c, g, or t
  misc_feature (522)..(522): n is a, c, g, or t
  misc_feature (525)..(526): n is a, c, g, or t
  misc_feature (528)..(528): n is a, c, g, or t
  misc_feature (536)..(536): n is a, c, g, or t
  misc_feature (582)..(583): n is a, c, g, or t
  misc_feature (632)..(632): n is a, c, g, or t
ggggaggcggtgatgtggaaaaaaagtaaaaagngcacaagaaactgcagcaggttggtgctcacagtggatctgaggnatgnncgtacatagaaggaccttngccatgncccctgaccaacccctgtgcaccaaacaccacactgagctcagaatccgggcagagagggaaccactggtacantgaggccaaggcacacgcagccgggcctgccgactcgngcccagcagggaccattaggtntnnngaggaggcagctgagggcgacaggatttgcacagancagtnaggggcagtngacgcagggnccagatggntctcccangtcaggtgagcccagatnnnttctttncagntcctctggngggtgggttggggggagtagctcaccaggnccaggagnagcccatcctggnggcaaagcctatcccaaaacctggccctgcctctncctgaggtgacnttgagnccgnaaaantgaagcccnnaggntgacacntgntanccggaanctgttcctngtnntnagaggggnctcggtttctcccggggcatatgggcaggaaggccctcgggatctnncatcagttccacggccgcggtgcggtcgtcacctgtgatcacggctgcntggtgccccctgccggccccacctcag

SEQ ID NO: 485076 - DNA, 219 bp, Homo sapiens
atcgatacgacttttttttataacaactggattttatatttgggaaaggaagggaaaaataattttattcccaaaagagatggcgcagaaagaaaagaaattctcaccccttagaaaagttattagttttgggtggcgaatttctggtttaaggatggcttcgttcccctctgaaaacgtagctcatcctgactggccaaccccttctgtcgtcttctc

SEQ ID NO: 485077 - DNA, 305 bp, Homo sapiens
  misc_feature (242)..(242): n is a, c, g, or t
gctggaccaatggtcggtggcccaaaaagagctgctgaatttgtgctgcacatgcttaaaacgcggagggtaatgctgaacttaagggtttagagtgtagaattctcgtggtcattgagacatatccaatgtgaatcaaagcacctaacgatgcgccgccgtgacctacaggagctcatggctcggattaaacccagtacatgagactctcccgtgccgacattgaggaggatccgttacgngaaaatggaacaggattgttccttaaacctagaagagtgagggttgcccatttgcgataatag

SEQ ID NO: 485078 - DNA, 131 bp, Homo sapiens
  misc_feature (107)..(107): n is a, c, g, or t
taataaggctaggcccacagttcctctttctcttgcccactggcttcgtttacttaccctcggtgattccccaggtgactccccaatagtgtgaagtgtactccctnctcttgagaaactgtagagtataa

SEQ ID NO: 485079 - DNA, 264 bp, Homo sapiens
tctctgaggatccccagactgtcgacaggttgatttctgcagctggtgctcccggtgccctggctccctactggtgcgctgtcgcatgtcaggtgcagggagctgcatttgcccttgtttctgtgcccttctgtcctacgtagcgtgttggacattcctgcggggctgggagaaggtgatggtggttccgtaggagtcttccccgtcattccacaccatcagttctgctttcagctccgaggttactccccaccagtatggcac

SEQ ID NO: 485080 - DNA, 3054 bp, Homo sapiens
  misc_feature (1793)..(1793): n is a, c, g, or t
  misc_feature (1801)..(1802): n is a, c, g, or t
  misc_feature (1837)..(1837): n is a, c, g, or t
  misc_feature (2036)..(2036): n is a, c, g, or t
  misc_feature (2643)..(2643): n is a, c, g, or t
aaaaaaaaaaaagcatatcaaaacaaaattttaactactaatgggaaggttaaaaagctgccacgtatttctagtacaatgtatccaataagagcaaggacattgttaaatggaacaagacagctgggaaaggccccactatctctaatagaattgtgctactataaaacatgaagatatcagcaatttggccacttgcagtttttttcagcatgttaaagcaagtgctaagtactttattagtactttatttagtactttattttaaaggtctagaaaacaacagtcttcctggaggccccagaatccctttcatgggattcataagggactcaggtattcttattttctgccaaaaggtgtgcttatttagggactcttttacgatactttgtttctgaagttaggtagatcttggtttactgtgccaaggtcctacctagcattccctgtaggaatatttgaaattccactagctagtctaagaagtcaaagcacaaaattaattgtcaacgcttctctcatattcttaaaattgaagcagtttgcagggaagaacaagaatgaggtgtccctgccttggtaaagcaactgccaaattttgttctagaaagaatccccaagtgtgtggatctattataatttctttatcttttatgaatgagggcatcttttctacttgagcaagatcatggtccttgaccagtgggcttttccttcatatctgtcttgtgtagttgtgcttttcctttggctcgtttttggtctgtcagggtaaccagcagtgcacaatatgagacaaatgctctttagagagaaatctggtgagactgtagaacccagagcaaaactgtttttttttcagtctctgttttcttttctaaatgctatagaaaataaaggcacctgaaaagaaactactactttaacactgctgtggaaggccttgctttataagaaaaatattattagctatgggaaagtaatgttctttatgtaaagacttaaaaatagactaatagtttacagagttattatataaaatacgatgtgaatttatttcaaacaagttgtgaaggtaccaaaaaccacaataaaagttaatatatataaaaactactagaacaaaaaagcttgaaggtgtgggggtggagggtatggaagaccaaaagtaaatttaaaaaagaaatttttgaaaggaaacagctttatcaggggaagttaaatataacactccgtttttttcttctttctaataatgatatggatcaacaaatgcaatttgaactttttaagataactctaaatgtgttttgtttcttaaatgcacaattgattcttctatactgtaatgcttctttgctgacgctggaaaatggtcagactgctgactttgtgcctttaaaatgcattctgctttgacagtggcagactttttggtgctggagaagattcactagcagtcttatatgtgcttttcaggaaatatctttctacttaaggccttgagagattcaaagtggcatgacttaggcttggaccaaatataagatcttttacattgcaaacaaaatgttgtattgaataaaagggttaaaaaaatcataatgactagtggaaattttgatgggttgttaattatttaaaatgtatttgaaagtatacagactgaaaatttcagtatgaatatcttgaaaattttcagcacttttccttgtttacaaaacatctttctaacttaaaaaaatgactatgccttagaaagttttaaaaggcacagttacccttacatnacatatannaggaataaaatattaatgcatttgctgaactgtanaagaaaatttaaaccttgatttcagagtgaatggatggctttcacttgagagagtctttaccttattcccaaagaaactgcattaaaaagatgaaactatttctttagactaagtctctgctactccagctcatatatatgtcagatctgctctgtagtatttctgacatggagttgttataagatatgtgaaatcacntagaaaataaaatcagatgtgaatagtttagcaggatgaccaagccagatgcagactccttggctatggcaaagttctgtgccagtgattttatttggagtctgggaactgatagcttgatataaaatcacctggtgtcaattaaatatacaaatctatcttttttaatagaatgaatcttctttgtttgttcaataattgtaacttattatgtcaggtactaaattaacatccttaaggaggtcacaatctaggaggaacatgggcaaacagttacttattttatggcatacgctaactctgaaagttcagcaatgatgttttaaaatgttattttttattaagggaaaagcaattttaggtaatcattggctgttataaacggaaatgtcactgacaacagggattagagtaaaagtatctccaaactagagggatcccctccccaaccaggtcacatagcatctctctcaggaccccctcttactgcaaaacccagcctctactcaacagttctggtgatggggagcatttattccataacagtgttttttgtctttttttttttttcccccagtgtctcttttaaagaaaacttacttaattngggctctaaattggtgaaattacccaaaactttggatagaatttaacctctgtcaccggtgttatttatacctaagatccgggacagtcccttgagatcatacggtttaataactaaagttgggccttttgtttcaccacctgtatggtccatatttatcggactttcaccaatgggtaaactgtcatgaaaagcatcccattgtgtaactttcagtaggtgctttctcggtatgcctaatttaatttcatattacataactcaagttccccaccaaaatgaacacttttcccaaattagtagcgtcacaagtcttggggctaaactggtgtatggccctaaaggttcataaagcgagctctctaccttttacctccaaaaataaaaacaacgaaaaattttcggcaagaa

SEQ ID NO: 485081 - DNA, 250 bp, Homo sapiens
  misc_feature (29)..(29): n is a, c, g, or t
  misc_feature (39)..(39): n is a, c, g, or t
cgtcgggtggaccagcagggaaaaggaanaaagtatacngcaggcacgtgagagggaaacaggatgagccatcacgagggaaaggaaggtggaacgcaagggggaaagaacaattaactggaagtaagacaggttccttattatccccacctcatgcctcatccacatgctcgcccccagacaacggtccaaccggtccgacttctcagccatctgcggtctatcctttaataagcttcaactcattcca

SEQ ID NO: 485082 - DNA, 148 bp, Homo sapiens
gatctttctgtgccgtgtggtctgtgctctgtggtctgtgctggcgtgtgttcttgtgcttcgtgtgttctgtgctgcgtgtgggtctatgtgcttcggtggtcttgtgctgggtgtggtcttgtgcttcggtgtggtcttgtgctgg

SEQ ID NO: 485083 - DNA, 437 bp, Homo sapiens
  misc_feature (57)..(57): n is a, c, g, or t
  misc_feature (184)..(184): n is a, c, g, or t
ggctattcaggtggttttaggccggcctatggggggcttccaaacccggccccaaanaaaaactggggttcaaattttggtttggggggggggcccactcccttaacccccccaagttccccaagggggggggttttaaaaaaaaccaaaccccctattgggaaatggggttttagttcttttncgtccctccccaaagaaaaaattggggagcccccccccacccacccccttttgggtggccccaaaacttggaaagaggcccccttttcaggggtacccttgggaaaagagaaccccctttgggttaaccccaaccccccaccccccttggggggttttttcctgggggcccccccttgcccagccccccagaaaaaaaaaaattaaatggtttttttttttggggccaaaaaaaaccccccccgggtttttga

SEQ ID NO: 485084 - DNA, 1297 bp, Homo sapiens
gcttcattcgagacccaggcaggtgcgcgcagtcctaatggctgatcatcattccgtggagcacatgtgccgcctggacatccgattcctaaccatcccatcacagcctctggacacacgtgggcatctatcatgatacgcgacttggccctggcttgcgcacgaacctagatggcagtacggatcgaaagggagcatgatcaaggatcgtgcgagtgtaatgtggtcgtacgacgtagaacttgcgtcggtcatgagaacgtcatcgatttaccatagcggatggaatgcaagtacaagcaagtggtcgcgcacaggtccccgcggtgacacaggcggttccgcggtgtcatggagcccacatgtcgcgtacatacccggcacgcgcgtattgcggcatgggtgggacattcctaagaaccatgcgtatagaccgggaacccgtggaaggattcccggaaaccagtgggagacgtcgaaatacgaagtgtgagccacgccagcgggacaacatagggcaagagaaattgttacggggaccccctagtaaacagatcagtgggaatgcccacaaaggttcgtacccataagatcccaaccggtcggtggcgaattagaacggactcctaatccaagtagtggcatactagcacgtttgtcgcaccggcaggaaaatccaattcacctagttgcgtggctttgtagcgacactcacacgcagtaggaaaaagccacgtccttcgtccaaccaggggatggcgatcgcgaaaaacgggctggaggagccaccgaccaaagcacctccataaccgatagttgcgcaagttcgaactgcgcgaccttccaaatagagtacgatccgtcgccgattcagcactgctaaacgagtcaacacagcagcaacgcgcgtggcccacgccaaccctagtcagccgtggaacctttggcacactcggcgcaagaccggtacgacgaaatacccagaatagtaggctgttgcgagatagcacagatcatgcacagaccaatatagagaataccagcaaagcggagagagatgacacggaacagagatactgtcatacccaacagacggaaggtcggtatcgacgagtatgttagaaaggaacgctaggcatgatacacaatggaatatagagaagatatcagcgatcgagagacacacgaagtcacaaacacgtagcgcaaagcgcacaatcagtggagaagaaagaacatacagtagggaggataagaggatagagcccgataatgccagatatggtgtcaacaggaa

SEQ ID NO: 485085 - DNA, 424 bp, Homo sapiens
ctatcacagcgcaaataataatcctggtttgcaaagcaagccacattagcaaggattttttatttcccatgggttcttagccgaatgtctcaagctgctagccatctgcaaagagggtatgggtttagctttccagctgatcttgcaccacgaatatttttctaagaaatgcagactcatccatgagcagggccctgtctacacaatctaaggagcataatgaccgtaatgcttacactcatcgcaagttgagtagtcagcgacactgacagttggaagggtgaaagacgaaatgaatatgtttgaacatctacagtgtactttggaataaggtggtgcggctgctatcagaaatcatggctttgagccctggtgagatatgtcagttctctacagctcgtccgctcgtcctgcagtcctgcag

SEQ ID NO: 485086 - DNA, 640 bp, Homo sapiens
tccagagttaacaaaaaaattaatttggtggtctgaaagccacgatggagaactttaaaaaggtcccccggggaatgtaactggggggaaaggtggcgaaagggcaggactcggcagcccatggggcattgccacaagatgcgcccaggcgctcggggggtgaactcgtggtggtgacttcaggccagagggtttctgcccccgcaggtgcccgtgacagctgaggtggctcggaaggccccggtctgtggagaaggatttcacttggggaatctttctttcttctttctttttctcacataagcggttctctctctaggtggtagcgctcctcgggctatctctagcggggttttggcagctttttctctccctctcctctttgtggggctctcgaggggtgaagctccgggcccctcagggggcggcacatgggtccccgggatccggagcaagaggcctgggaactcgggtcccagcgccaccggtgcccagagcccgagagctaggtccagcaaaggccccggggtccgggccaacagggggggccgggacacctcgggcatcctcgggtggctgaaggaacaggctatgacgtcatggcctatctgggcaaaatgggccagaaggaagacttcga

SEQ ID NO: 485087 - DNA, 127 bp, Homo sapiens
agaaatacggctttgaaccaaagaagctgttggaccaactgaacggatatttacttacagctggactgtgctcggttcgggaaagcaattgctgaacgaccaggaggattctaacagtacggggatt

SEQ ID NO: 485088 - DNA, 1591 bp, Homo sapiens
ggctggagcgcagccctcaggtgccagggatctgctccggatgcgggacccgctccggccgggagcatggcacagcgaggctttcctggattcgcgcgggtacattgcgtgagagcatgaaactatccaggttcgacgtggaaccattgaataggcacgatgagaagtcatgaaggctaggaatggaggcttggtacgacgtgcgggtaggccaaagggttgtgagtgattactgatccaaaagcagtcttgggtatgtcggacatgatggtcagacttcatcacctgtcgccctctctggccctgtgagtgtcctgtgactcgtccgttggctacggagcctgcccactggggaaacgagcttccaaggatccgtagtcccctagtatggacccttctggcgaagcacagatgcgtgattccactcccgtaatcggacggggcgacacggacgggaagcagaatcgagcccactcgtttgcgtcgaactgaggcacggagaaagtggttcgcctataggcgcatagaacccccacgttaggaaactcggcggcttgctgcggcacaaagggtttaaccggtgcggaccaagtccaggccgcagacaagacgcacgcatacttaacacatgcctgtactgcgaaccgtgcttaacctggacacgcacctcgggagcgccggccgcctgaacattgcgatctcgcgcgtcccaccccgtcgcccgtatcggaattgggcagccaggtgccagagacgtacccacgggcggcggcccgaaaggatgttcatctcttgcgcacgtcgaggactccgcgtcttcgaaagtggcgccggatttgcctgggcctttgggaaaagcggtgttccacaaggcacacggatctcgggcccgataatcgtaaaccattttcgcaatgttcggtccgagggaatcgcgggacgtaaccaccgcaagtccggttgggaagccccccaatgggcgtttcgaaggggcgagaccacctatttgagcacgtgtgtttttcgggcagaaattcctagcttggttccacgcccccccgggacagacggcaagacatcgcgcattcgtgggatcctaagcgcgtaaacttcgttcacagagcgttcccctcccgtctttccgcggtgatgccttccttttgcatgaaaggccatccttgtgcgtcgatccacagggcccctctagggacaggaagaaaacattgaggagcgggaaggcgaagggagtcgaattcgtaggaaagtaggcgttagggagagagcaggaggaggatacattgcgggtgaatagaagggcaggggggacaaggaaggaacatgaaacctgtgtagggaaccggtgtgaagcgtggaatgggtgaggacagtgaaaggagcatggtgagagatgaaatgaagtgggaagggtgatgtggaatcgcgtccatgggtaacgggggggttacgagatgatggtgacgtggagaggcgttgagatggacagagtcatgatagtatgaggtgtgatcattgttggtggttaaagagatgatctgtgggaagtaaactagtgaggatgacgagggtgcag

SEQ ID NO: 485089 - DNA, 796 bp, Homo sapiens
  misc_feature (251)..(251): n is a, c, g, or t
agcgggctaaacaaattgcgaatataatgtgatagagttctttaaagagaggtaagagcaacgtgctttgggagcagagaagagggagaaagcaagtgatcttggcgctggatgagaccaggggacaacagaagaggaagcccagctatcgtcatttatagtctttagcgaatcgtcttgcttgcaagagttcccatgcgttcgtgaagaatacagtgagataaagtcatgtagaggccacgtatcatccntccttgctgctgtgcacgaagtttcctgggctggaccgttgtcagacagagaggcttattgtgacattgtatgctagaagatgaggcgttctgggataggcccagaagttcctgatgaccggcgacttcgagccctcgctaggcccagtgtgcccgcttccgcttgtcaatgccatcttcgagtggtccagtgttctgattggggtctggacaagagtgccagaggatcttgccccttgacagcaagctctgctagacgctgcaagaaagactaagataaccgaaagtcagggatggagactgtgagaacctgaagaaccttcacgcattgattcttgtcaacgagataacaagttagcaaagttagtcctggagcatttacaccttttggtgaagttggaacgactttatctgtccaaggaatcagctgaaggaatcgtcagagaaaatgccaaaatcttcgaggagctgcgtgcccatgagaatgagatcaccaaagtgcgaaaagtagcggtcaagtggactgaaccagatgaatggcgaga

SEQ ID NO: 485090 - DNA, 838 bp, Homo sapiens
  misc_feature (414)..(414): n is a, c, g, or t
agcggggcctgcacgaaggagggcagagtccggttgcggctgccggcccgacgcccgcgcatccccgctcgccgatgcgccgccgtcgtgatgtccggggccggactagccgcggtggtgagctgcctgcgcccgcaggccggcgaggagcctgagagcctgtcaggacactttctccctgggcagtgcgtgcctgtaatgctgtttgggatgccccagatacaacagtaacatggtgtcacatatgtgcaaacgtcacaccgtcaggccatctagacgtatatacatagtagtagaataaacccactagtacaagcgcaggttagcgcgctgctacgtatcctgtatatgtatgctgttacgacgctccgctcgttgcactctggatgagacagaagatcttggagattgctntatcctccctgaccctctgtctgtgagccaacgcttcaaataagccatgaatgtacgtacatgtcgcgtgatctgcaatacttttgtgagcagatctgggttacagttatatgcaaaaaggtcaacatcctcaaagtagcgcttttggcgtggagcacatgggactatcaagataggaacgaatcgtagacgaacccaattggattagagccaacaggcgtggctgatgggtggttccaatgagtgagttgactcgtggttaacggaacgtttttagtagacccgcaaggctacgggagaccaagttgacaaggaatagagaaggacgtcaaagtaggaaattttggccttttcgaatggaaaagcaaagcaaaatcatcgtttcgccataccaggttgaaacgggccgaaataaggcaaccaa

SEQ ID NO: 485091 - DNA, 312 bp, Homo sapiens
tccactagtgtaggcagttgacacaaaatagactacaaaagaggctttgacatatctgatcacacaatggctaagacccaggctggaatgagataccgaactatgcttagccctaaacgtcaacagttaaatcaacagaactgcatcgcagaacactacgagccacagatgaaaactcaaaggacctggcggagcttcatatccctctagaggagcctgatgctgtaatcgcaaaaccccgatcaaccacaccagctctcgctcaggctatataccggcatgctgaggaaactatgatgaatgctacaaagc

SEQ ID NO: 485092 - DNA, 823 bp, Homo sapiens
tgcttccacctgtcccgggagcgtgtgttctccgaggaccgggcccgcttctatggcgctgagattgtgtcagccctggactacctgtgactcggatgaagaacgtggatgtaccgggacctcaagctggatgaacctcatgctggacaaggacgggcacattaagatcacagacttcgggctgtgcaaggaggggatcaaggacggtgccacctatgaagacctttgcggcactagctgagtacctggcccccgaggtgcgtggaggacaatgactacggcgccgtgcgagtggactggtgggggctgggcagtggtcatgtacatagatgatgtgcggtcgcactgcgccttctacaaccaggaccatgagaagcttcctgagctcatcctctgtgggaggtaggatccgcttcgcgcgcgcgctgctgtggtcccgcagaggctcataggtcctctggcgttttcaggggctggcgtcgaggcaagacggaccgcccgattgtcacgaggcgttgggctgggggctcacgaggtatcgccactgggagatcatgcggctatcgcttctttgcctggtatcgtgtggccagacagcgctgtacgagtaagaagctcaggcccacccttcgaagctgccaggtcacgtcgcggagaactgggcagctaggtattttgatcgaggggttcacggtgccagatgatcatcattgacagcacctgaacctcagtatgacagcttgggggtggggtgggctgcgagcgcgggcccaacttccccccagtttctcctactcgggccggggcgggctgagcggcggta

SEQ ID NO: 485093 - DNA, 1470 bp, Homo sapiens
  misc_feature (131)..(131): n is a, c, g, or t
  misc_feature (238)..(238): n is a, c, g, or t
  misc_feature (539)..(539): n is a, c, g, or t
gcaagacgattctgcagacgcataatatgaagtacctatacataggacccaacatggatactgatctacatgcttgcgtcgtttaagtcattgtctagcttgatcctagctgacatgaggtgtacaagagnacaaaggtgtgccagatagaacggcgtgtgctcgtgtggaagcctggccactggggcaaccacagccattgctgacgacacgctattgactgcttacgctatatgangctttcgtgtcaagtggcctacctgtgcagtgcccaagcatggaaacctccagacaggaacaagtctcaagcacaagcgaaagtacacaacgcaggtggcagacgcatagaagtgttacgatgcgtgtacaggctatgcgagcgttacatggccacagcagcgtctatatggcagaactggggtgtatagcgtgtagcataggctgacgcactcgtgcatgacggtggccttgtcgctcttcagagcgctcgttgccctcgtggcgttgattgttgtgtcgtagctcgcggtagcgtaggntgaaccccggttgagtggccagattggacccggatcgctcctgaggggccaacagatcgcgcatgagttccacatacccagagcatctatcctctttcgctgagacgatcgatcgttgcgcggcatcaggaatgtaggtgcgacgtgcgcacaatttttttctgggcaacttttgtggggaactaatttagggtgaattgggtggcgaattcacctatagcggcgtgactgtcctagtacagtggccaagtgcgtttcctaatgaacggtgccgtaaactgattgtcactcaaacgtaagttagtaaactgcccgccaagcaatcttaaaaccttatcccgccaaaagtacgttaaccgtgcgtcacctctaaagactgggatcttggcgcccggttttcgacatgtaactaacttcgccgagtcccatttgtgtggcgacttccgcgacgcgcttgaggtttgggcccttggttttgggggctacgatttgccaattgtcccgccaggccctggcctcaagtggcaccctaacctccggttttctgggttggaaccctctaacactctatctggggttgtccccccaaagggatcccacagaggttttttccccatggttcttccccaattgtgttgcccttctcttttcccccacgttgtgtatacgcttttttaaccccccatttttcaatgggttacggcggacgacctttcgtttgtgcatacccggggtccacgcgccggttttaaagcccggttcctgtaagcacttgatgtgggcggccaataaccacttgttttttgtggctcgtccatgcatctcattggttgttccccctcttttatacatagagcgttgcgtcgcgatgacgctcagggggtctctacgtttacgggcaacgggcgcctcgtgctgtggcgggtggtag

SEQ ID NO: 485094 - DNA, 459 bp, Homo sapiens
ctttagtaagaatagtaattgtattctttctataaaggtacatagaaaaactgagggcatgttggggatgatttgtgttgtaccatgagctacactgaatacaaatggaaacgctgatgattatttgcttatccagtgagtagtggtgtaatgttcttaaatccatcagatggcaggataacgtttagtagtgcaatgatctgacacccttcttaaggtaacacaaactaattggcccaaataactagaaatggaatcaaactgattttcttcacattatctttaaggtagttattggatgaattctgctgaatttactcttatggaaataagaaagcttatgttgagggatttagtgaaaggtgaattgcttggtctagtatacaacagaaggcagatgttttagagtttatttacattcttacatctttttgttgaaactctgtctcaaaaaaaaaa

SEQ ID NO: 485095 - DNA, 314 bp, Homo sapiens
caaggcgggaaaccctgcagtttttaaaagtgagccccatgatgaatttgccttttaagctgggagaaaaaggaaaaaaagtgtgtttttattatggcctcgagaccctgtagcctaaaaacctgcccacatagtgtttgctaaggcagtaatttagactttcccttatttgtgattactgtagtgattgattgattgatttctttttactcccaggtattattttctatccccttattttaattttttgaattaatttgaatgtttttttccctaactaacttttccccataaagtcccctattaaaccccca

SEQ ID NO: 485096 - DNA, 135 bp, Homo sapiens
attagaggaccccgcgctacggcattaagtgaacggatccacacgtggagatggttcctggccctttcaggagggagtgaagtgggtggggcgtttgccttcggaaaccacacgttcacttaatgccgctagcgc

SEQ ID NO: 485097 - DNA, 249 bp, Homo sapiens
ccccggggggggacccccccccgggtttttttctttgcccgggggggggttaccctttttccccgggaaccgctttttccctttggccctttttggggccccttttaaacccggttttttccaaaaacccggggggggccgggccgggattcccggggttttttttccccccggggccggttttttttttttttttgggcccatttttttttccccccggggccttttaattccctgtttttgggggca

SEQ ID NO: 485098 - DNA, 694 bp, Homo sapiens
ttcagaagacctggtggggcaagtccgtgggcatcatgtgaccgagctggagaaagccttgaactctatcatcgacgtctaccacaagtactccctgataaaggggaatttccatgccgtctacagggatgacctgaagaaattgctagagaccgagtgtcctcagtatatcagggaaaacgggttgcggacgtcgggtccagagattgggtatcatcaactgattgagtgcagtatgaattctagcgaggacgctcacttcatggcggtttgatatggatgtggcgtggcagaccacaaaaaatggccatgagagaaagccacaaagagtagctgagttactgggcccagaggctgggcccctggacatgtacctgcagaataataaagtcatcaataccacaaaaaaaaaaaacaaaaaaaaactaaaaaactctggttcgggcgcgcctccggcgcccccgaggaaaaggttttcgagaacaatgtcggttggggggccgcggggcacccagacgaggtaaagttggaacactgctgtcccacagcgtcgtcccccaggagacgacatctgggcaccgtaacatacgcgcctggtggattttccacaccatttaaaaaaagcgccgggggcgacaccgacgggttgtcggacaccaactcccaagggagggtccgacggcaccgtagcggc

SEQ ID NO: 485099 - DNA, 185 bp, Homo sapiens
gatgtaaagaatagtggggtagctgatacttagccagtttcagagttagtctaaaactaccaacagagtaaacaggcaacctatagaaggggagaaaatatttgcaaactatgaagacagacaggggcaagtccaatgtggcctcccggataaacctcaatgcactattctttacagagcccagg

SEQ ID NO: 485100 - DNA, 266 bp, Homo sapiens
  misc_feature (51)..(51): n is a, c, g, or t
cgcatcttcagagataatgtcacagtcctcttccttcacttctggtgtctngcagccattttcatggattctttctagggaaattcatctgtagagtgaagcatgcagaggctgtttctttttttttttttctctggaccagaaaaagattggtttacctaccatttcatgggtagtagggcccagggggcccatttttgggggtgtcacagggtcagtatagatgggggcatcctctaagaagtcgcaccggcgggcttgcaagc

SEQ ID NO: 485101 - DNA, 147 bp, Homo sapiens
tgcttcgatatcaaacacatgctgtgagaaagtcgacatgtagatactgtagggaaccaggagtaagaaaagctttaccagctttactacaaatgtgtgaaagacatcaggatcccaacaacggaagggtaaagtgacttccccttt

SEQ ID NO: 485102 - DNA, 337 bp, Homo sapiens
cgcttcctgggttcaagcaactctcctgcctcagcctcctgagtagctggtatatacaggcgggagccaccgtgcccggctaattttcgtatttatagtagagaccgggcttcaccatgttggccaggctagtctcgaactcctgacctcaggtgatctgcccgcttcggcctcccaaagtgctgggattacaggcatgagccactgcgcccagccagaagaccaagtatgctattctggaacccgcattatgtaatagagacagcccatgccatgggctgggagttgggctttaggtccttgctctgcgcctaacttacctgtcttgatgagtctt

SEQ ID NO: 485103 - DNA, 102 bp, Homo sapiens
tcctggtgaatgtgtttgatgtcattaagggagagaaggaagacgaagtaaacctgagggcgtctttgattgtgtagtaagggtggaggtgtattacattcg

SEQ ID NO: 485104 - DNA, 170 bp, Homo sapiens
  misc_feature (69)..(69): n is a, c, g, or t
  misc_feature (155)..(155): n is a, c, g, or t
  misc_feature (164)..(164): n is a, c, g, or t
tggaaatgggtcatcataagggtaggggagcttggtcttcaggtaggcgaagaaggatgctcgttctgnccattcacctcacatttttggacagggtgaaggtgggctggtatcacccccaggacggacatacttgagactgttcagggatctcnctcattcgntgacag

SEQ ID NO: 485105 - DNA, 355 bp, Homo sapiens
gttgattttctttgcttttttcctcttaaggagctctcagtgtgtgaaagttctaaagccccaaaaatcaatgatgttttagccgctaaaatttaggattgatcgtttcttttaaaaaagatttggggaacctgatctggccggtattttacctaaattccctgggcaaaggtgggtatggcaattaaaagtcaaaaaatgggttgtttagcttggtttgtttccccaacttttgattaactctctgtatgacaactctacaaaagttgggggcgggctttttcaacagcatttttccttcaaaatcatctttttaatcaacagtcattaataaatggacatgggcgatattcca

SEQ ID NO: 485106 - DNA, 368 bp, Homo sapiens
ccccccccctttccccaaatggggggggggggggggcggtggggggtttttttaacccgggttttttttgtccccctcttttcccctggggcccccccccccgtgttttttcccccctttgaagcccccggggccgttccccccccgggttttttccctgggccggggggggggtaccatttttccccgggaacccgctttgccccttgggcctttttgggggccccttaaaaccaggtttggcccaaaaaaccggggggggcccggcccgggtttcccggggttttttcccccccggggcccgggggggggggggtttttttttaataaataatttggttaataagggtggtttttttgaaaggcca

SEQ ID NO: 485107 - DNA, 81 bp, Homo sapiens
caattaggggattactatggttcggggagttaccactactttgactactggggccagggatccttggtcaccgtctcctca

SEQ ID NO: 485108 - DNA, 300 bp, Homo sapiens
  misc_feature (252)..(252): n is a, c, g, or t
  misc_feature (262)..(262): n is a, c, g, or t
aatcatgctccattgtgtacgtacgccattttgcttatccattcctccatcggtgggtgcttggcttgcttccacattttagctattgtgaatgatgctgctctgaacatcagtgtacacataccttgttttgagaccctgctttcaaatttgttggggtatatagccagaagtgaaattagtgcatcttaagggtgattctgtttaaattgtttgaggaaccgcaatactgttttccacagcagctatggnaggatggganaattgtatgatctatgaattatatctaagtaaaactgt

SEQ ID NO: 485109 - DNA, 801 bp, Homo sapiens
cgaggaagaggaacgaggatggctatcagagctgtctgatgcaatacttgaaggataccccaagtagcaagaagcagttctttggaggaagttgggatagtacgactggtatgaagattacaacgtcacatctcccagacccctgaggggcccacggtcaggactggtgggtactgcaggatgtcagaagagtgagatgtcttgcactggctacctgtgtttttggttggcttttgtctgttgttcctgctactttcaccttgtaagcagagcagtcaggagacaagcataaaccagagcactgggtagagaggatgagggctggtggtctgggggtagacccagcctcatttcattgtctaaattgcagtagcttgaggttaacatttagacttggaacaatgctaaaggaaagcatttggcaatatgttagttataactttaaattattactagtagagaatagtatgtaactcttgccttcttggtactatgtccagaatcactggccacgatatcataaccgtagaggtaacgcgcagacagtgaactttggagaacctagaggtagacgagaggttgctataaaagcgagcattataggaagggcccacggcttcactgcaggacctcctgcgcttgtgtacctcaggagccgttttaagtatcttttgtagcgcttttcaccccacccccaagtcatgggagaaatgcaggcaacactgagacatgggagagggccaagatatgctgacagaaagggtgattttgaggctcagtaatactcggatgtaaccggtt

SEQ ID NO: 485110 - DNA, 114 bp, Homo sapiens
gaggatcccccccgcgtacagttgcggacgacaggttagtttaccctactgctgctgtgttgtttgcatggtaatcctggtccatacgagagggaactgaggttcagacatttg

SEQ ID NO: 485111 - DNA, 275 bp, Homo sapiens
ccattgagcctggattccatcttcctcacagtctcactccaacgctccactttattccctgttcccttctactggtttggaagccggtttgcatccctttttctctccctttctttacctctaactgacagaggatctagaattttcccttcccatttcccttaggctacggaaaaactctggactccatcatctctcggaaaacccagggattttttggggaacccaaaaggaattgcctggggggcaaaagattggaaaggaaaaattccctt

SEQ ID NO: 485112 - DNA, 205 bp, Homo sapiens
attcgcgggcgggtcgacccagctactcaggaggttgagatgggaggatcactggagcctaggaagtcaaggcggcagtgagccactgcactccagcctgggtgacaggaatgagactgtgtcttaaaaattaaaaacaagttacagcttttgctgtagaaatcttggaaagtacagatattaactaatataaaatagaaagtcg

SEQ ID NO: 485113 - DNA, 748 bp, Homo sapiens
  misc_feature (661)..(661): n is a, c, g, or t
ttttgggacagcggcaatcatggcgccacctgtgagatactgcatccccggcgaacgtctgtgtaacttggaggagggcagcccgggcagcggcacctacacccgccacggctacatcttttcgtcgcttgccggctgtctgatgaagagcagcgagaatggcgcgcttccagtggtgtctgtagtgagagaaacagagtcccagttactgccagatgtgggagctattgtaacctgtaaggtctctagcatcaattcacgctttgccaaagtacacatcctgtatgtggggtccatgcctcttaagaactcttttcgaggaactatccggtaagaagtatccttttcacatataccttagcaactggaataagattaggatagactaggacaccagaattatgagcaacagctacacttcctatatttcttctgccctgtactctttcttctttgagctctgattctgccctagtagtatccgatacatggatgatctaggacaaatggaaatattaacgagagggtctagacgtacagcacaggcttggcgccgatgctcacgccctgtaatctagcactttgagaagctgatgcaggtggatctattgagatcatgagtttgagaccagacttagcgacatggtgaatacccatctcntgtactaaatacataaggtagccaagctcagtggcttacaccttgtcctatcactttcggaggctgacgttgggtgatcacgctgcg

SEQ ID NO: 485114 - DNA, 175 bp, Homo sapiens
atctttcttaggttacttctcccctcattacgcctgcactcccaccatcagtgtgcactgtacatagtcgcatttgatgctcactgattaatgaacttcaacatggagccatcacaaaccacaaaaaaaaaaccaaaaaacaaacaccacacaccaacataccaacacaccccat

SEQ ID NO: 485115 - DNA, 1711 bp, Homo sapiens
agggaaggaggcggcggccatggattttgggcgagctgctctacaacaagtctgagtacatctgagactggcatctgggaacaaagtcagtcgccagtacagtgtatgtgtggaagccagaaccatcgttctcaatggacacgacccctatgtgactgacactgacctgtacttatccgagagcgagactctggcaaactgtaacgacgcttggaccgttcatatgctgtagtagaacaaggtacgtactcgtcataagtgccaccaattacaagaacgttcagccaaagagctgattgcactttcatattccatatataacatattagagaagcaccactgatacaaaactagaaggcaagcatatgtgatgagtccaacagcgagccaccagatacggataaccataatgatccaatagtaaggagaactcaacaacttggtcaatgacttcggcggcagcctgaatcgctgatgatggcaacacgacattgcattgcgacacacacaactatgaagaaaaacaccagataatgcacccatccaaagaaacaacatgtttggatacgcacaccatatcaaactagatcgattcatacaaggtggcaatgaacaacaagatgacaccttcatcgccagtccacggggggcaggacaataaccacggcaccgtggcgacatatcatgggcaagagtagactagaacattcgagaccgatataagtcccaaaagtaacggcctaaattaacgcaaaggacacacgatgcaggaagtcagcacaataaagcaaaaccaaagaataagaaaggacaattcataattagaccgtccagggtgattggtggggcaaaattgcgaggacataaggatagaacatcatacacagcaagtcaaccaaccacttggagagagcacaccagacgtacagacccagagccaccacggaacgcctacagcacaacgagacgcgatgccaccggctccacgcatgacgcacgaagtctaaagccaaaacactaacaatagccaagaaaggcagacacaacaagagctgaacgagggacagtgacatagaagcaccatgatcaacgggaagacaataaagaaatcggccaccacagacaaatctcacaagttataaaagagcaacgcacacacagagcagtggaacagagacaatctagaacctcgagaccgctgtgaatgccgctcagcgacgaccatcagcaacaaagaacgaacagaaacccgatggaaagatcacgatgcacgtagttgtaacaggaacacaagctgaagagctgagaggcaccaaagactgtcgacgcctaccagattgcacaacagtgtaacgagagagagcaacacgacacgacagaagagaacaaaagcaacacaaggaaacaacgagggggtatagagaacacgacaggaacagagagacacggacacagcggaccgcgagcggagcgcacaagcacaggacgacacgcaaccaagcgggagaaagcaggcaacagcgaaaagcagcggcaacaagtagacagaagagcactaaaacacagaacgccgcgccgcgcgcacataaagacacgagagaaagaaacagcgccagcaccgacgaccagcacagctactggctgacgcacgcacgacagccaaggcgagcggagaagcagagacagagccgaacaggcagcagcggccaga

SEQ ID NO: 485116 - DNA, 170 bp, Homo sapiens
acttggtctgtccagagtggcccgaaggtcctcgatctcagcctagcagcaggttggctctgggctcgaagatggccagctgttccttcaggtcctcctggctccggagagcatcatccaggtggatcgtgggtatccgttgaggatcgacttgagccgcagggtacccg

SEQ ID NO: 485117 - DNA, 166 bp, Homo sapiens
gctcggtacccaaagggaaatgtattaatatttgttataaaaaaccgtacaaaaatactgttcttccccttcacaattttaaaaattttgaagagtgggggaagagtgaaattgcaatgacctaagtcgttttatcgcaaacacttttcgtcgaaataacatttcg

SEQ ID NO: 485118 - DNA, 108 bp, Homo sapiens
tacgtggttccgcactcctggatgatgacgagtttgcatacgagacactcctcgctgacctctggctgaggatattccgactcgacgcgaggcgatttgatagtctgc

SEQ ID NO: 485119 - DNA, 526 bp, Homo sapiens
  misc_feature (28)..(28): n is a, c, g, or t
  misc_feature (511)..(511): n is a, c, g, or t
cggcctgatgatgagccccggcccctcnacaccatgttcctgacctgtttgggtgggagttaatggcacaatcctgaagatgtcatcagaacgctttgcttgctttgatgagaagcaacggcaccttcaggaagattacctaaggagctgctgacaacctgggggatcggtttacgatgaggagtggatgagctgtacgagagcacctttgacaaaaggggatttcattacatcgagttcacacgcatcctgaaacatggagccaaagacaaagatggctgaaagaactttagctaaaatcttccagttacattgtcttacttttttttacttttcagacacttcccccaccctcatagaacctgttgcatgcaacttagtttcccagctttgcctcttctttttgatgtatttattccagacctttctgccccttagcacttgtataatcagactggaaatggggatgagggtgtaaattgtattgaaaaagatcgcgaataaaaatcancaaatgtgaaagccc

SEQ ID NO: 485120 - DNA, 601 bp, Homo sapiens
  misc_feature (28)..(28): n is a, c, g, or t
  misc_feature (511)..(511): n is a, c, g, or t
  misc_feature (540)..(540): n is a, c, g, or t
  misc_feature (547)..(547): n is a, c, g, or t
  misc_feature (557)..(557): n is a, c, g, or t
  misc_feature (575)..(575): n is a, c, g, or t
  misc_feature (577)..(577): n is a, c, g, or t
  misc_feature (580)..(580): n is a, c, g, or t
  misc_feature (590)..(590): n is a, c, g, or t
  misc_feature (596)..(596): n is a, c, g, or t
cggcctgatgatgagccccggcccctcnacaccatgttcctgacctgtttgggtgggagttaatggcacaatcctgaagatgtcatcagaacgctttgcttgctttgatgagaagcaacggcaccttcaggaagattacctaaggagctgctgacaacctgggggatcggtttacgatgaggagtggatgagctgtacgagagcacctttgacaaaaggggatttcattacatcgagttcacacgcatcctgaaacatggagccaaagacaaagatggctgaaagaactttagctaaaatcttccagttacattgtcttacttttttttacttttcagacacttcccccaccctcatagaacctgttgcatgcaacttagtttcccagctttgcctcttctttttgatgtatttattccagacctttctgccccttagcacttgtataatcagactggaaatggggatgagggtgtaaattgtattgaaaaagatcgcgaataaaaatcancaaatgtgaaagcccagaaaaatatattngtatttntggttttgcnggatttttacatttttananaanaaaaatgttnttttgnaatta

SEQ ID NO: 485121 - DNA, 151 bp, Homo sapiens
ctgttaatacagaggaagaaggctgcgacggtggtcgtgactgagcggcccggtgacaggatggctgggcacagattggtgttaggtattaggagatctacacatccacaccgttgcaacagttttgccagctaattcaaaaaatcctgtg

SEQ ID NO: 485122 - DNA, 172 bp, Homo sapiens
aggactcgtttggggaggtggcctgcgcttgtagagactgcatccccgagacgatggcggagggagataatcgcagcaccaacctgctggctgcagagactgcaggctgggaggaccagctgcacgaatggcgagaggtgatgctgatcgctgataaagtcctccgatggga

SEQ ID NO: 485123 - DNA, 878 bp, Homo sapiens
gatccctgagctgttctgccgtggaatcttcgggactccgcccgcgcgcggcctgcagccatggagtcaccgccaggagcccgagtgaaggagcgcgtcctctgcctgttttgacggtaggacgggaccctcacgccgtgttcgccagaaaatgtgacccctgagtgtggccgccttcctgcagaagctaacgaaggtaaggtgcagactcgggttgtggagggcaggggtctggatacttgtacaggatcgctgagcagctggttgacggggatgaacgtcattgggacaacgtggcgataatgtggtggggcgggagacaacggggaggggtgcagaaataaacgcagggggacaggacttgcttctccaaggcaagaccatcaatgaaacccactctggggagatgcagcttgtttgaaggacttgtggatccaatttattggcttaaaggtacatgggccatgtcaaggttggcccaaaaaaaagcggtggaacctttcatccgagttccgggaaagttgaaatggtggaacattctcggccaaatggggcgcgaagctggcaccccgtggagggaaaagggatcgagggtccctccagaaggtgtccacggaaacgaggaacgatcccggggaagaaaggttccgtgtggaaacgccccttggaaaaacagatggtgggctggaccacagggggctagagggtactccccgagggaaggcaatgatccaggtttgggagggtcatccccgagggcgtgggaccagcggcaaactgccgtggaatagctggacacgacagctttgagccccaccacttcttggggaagcgagaagcccggggggaacactttgaaacttgccgccccgggatgt

SEQ ID NO: 485124 - DNA, 309 bp, Homo sapiens
acgttgacacttcagggtctattttggttaaattttgcatggagccgttccaggagagaactcatcttactcagcttttctgactctatgatttaaatcagaaaacgttatcagtaactgttctatcaagaccatccacagttttccttgcaaaataaattcccacacttcatcacagtaagaattcagttaaaatattttccaaaatcattttacttcaaaacatccaaagaagacatttttaatggcaagatgacacacaagttatgggtctgatgtaaggaataccataccactggactgttatct

SEQ ID NO: 485125 - DNA, 160 bp, Homo sapiens
actcgatgcgcagtcgatgctccggtctgctgtcgctggtccgcgctcgcctcgtctcctggtcctagctgtcctgtgtgaccttgttctccgctagcccgtcacgaggttgtacacggtccccgtgtgcccaggttctccgggaccccggcacaccggg

SEQ ID NO: 485126 - DNA, 826 bp, Homo sapiens
gaaagatggtgtcccgcgaaggaaggtaccggctctacatgccacctcttccagtctccaccgctcggcgcaccatgggaaaggcacaaggcaaaggcggctcgggagattcagccgtgaagcaagtgcacgatagatggccttggtggtattaaaggataagtcaaagcatttatcaatgaagacaggacacaggaacgtgaatgttgttcaaggaagtgcttttggcgtctgggttgtatcaacgtatcaggcgtctgcaaagtttagccaactgctgtctcactttcacctcaagcagcaacagcagcgcagtgatgctagagctttgagtgaatgttccacattatctacgatgtgaatattgattgcgtgagcactttcgcccgatgtaagacattgatcattcgttctactgtgggcttgtgtatctagtcctacatacgtattggctcagttcagtgacctcgtggcactcgctggtactctcatgttatatgttaccgagcatgccatttgaatgcaatcgtgatcgttctgcattctatgagtcccataaaaaactgcccgaaggatctctcctcactaaacggcatactagactgactcctaaacctgattggaagttagtaaagaaacaggatttttccccatgagggcattgacaatgagcaaagtatcaggcttgtgagtacatgtcctgaagaagtgccgatctgtacttaccaattcaccatctgatcacatgtcctactgtgggaacttgaacaagaagtcagctgttgcagataaacatgaattggtcaggcttgccagaagtaagtca

SEQ ID NO: 485127 - DNA, 1273 bp, Homo sapiens
cgcatgctgcagccctgttattgatgctgagatggctctgagcctaacattccatgatccaggatcgtgacacgatgtgcacaggctgctgctgtagctgctgtgggtaaatttggaaccacgaggagaccccagggccagaagacgaggtcattctgtctgcctgtgatgtgtgtcgaacctctcttgccatacattgatatggtgggtatctggagagggggtgatcctagcccaccacgacacactcactgtaggcaaagcacaatgatatatatcttagttgtggctggcgagcttcaagagtgacccagtccgatgctgataggatgtggcatccgccatgctgggtcaaccaagtacagtcgcttggcaatgttgcacagtacgatctgtctgcctgactatgcactaggtcacaccgttgatcctcgatctggtgctggtgcaaaagccctccgaggcggggcatgtatggcctacagtgcgggggatggacgtgtccgcggtcaaagcctggttggtccaatcacacaatggcccaaacgtgcagtcgaatggaggtcctgtacgggactctactaacgatccctccaagttgggatgaagcggtcctgcacgtactaagcacgcacgcacgaagggaagtcttcaatcgctagtgccggggcctcctccatgtcagggaggcatccaatttcccaggtgcttcttggggtagccccttgggaaacgcgttgccaagataagttcattccggctacaccttcccacttgggggaccaaccgagaaaaggccaaatcatatcgttggcaggcaccttgtgacttgtttcccaacacctgtacccggtgctggagagttattggtaagaccctccattgggtttcgctcaggggaatgaccataagagccattctagaggccgtcttagggagcgacccaacttcacgtggactgcgaaacacgggccctttggttgcttcattatcccggaacattaacccaatgtggtgggcgctacacccatcgccctaggagatcgcggtaatgaccaggcgaattgtatcattccccgggggattatcctagggcccccccagagtggtggcgtaaaagattggggatcttggggccgtgtttcggggcactggcacgatagttgtaccccaatcactaccaggttgtcatatcgaccttcctctggaagactcttcccacgttggtccccgcgggtcaaaaactctgactagtcctggcacgatttcccct

SEQ ID NO: 485128 - DNA, 291 bp, Homo sapiens
  misc_feature (184)..(184): n is a, c, g, or t
tctgcatgtgggtgtgctgtctctctgtactacttatctgtgctaagatgtatgccagcatcgtaccccaaaatgtcatatacttgagttgggggtagacagtcagctgacaggtggcaatacttatggaggcgatggaaaaatttacattcagcagaagagcctaattcctagcaaggattgnattgagaaacaaggagcattagaaagctccagaaggcggggtctcaggcctgcacatctgtcaatatatgatgagtgatcgggcctatgcctgagtgtaaccctcct

SEQ ID NO: 485129 - DNA, 218 bp, Homo sapiens
ggccggctacagcttctgaaaacttcccaagtcatcataaccaagaaagtgggctgggcgcggtgactcacaccttaatcccagcacttcggaaggctgaggcgggcagatcacaaggtcaggagtttgagaccagcctagccaacatggtgaaatctcatctctaaaaatccaaaaattagccgggcgtggtggcaggcgcctgtagtcccagctac

SEQ ID NO: 485130 - DNA, 110 bp, Homo sapiens
atttaaactctagacacaggtttatcctggattaacttagataactttgtagcagtggttatattgcttataatttaatgtacaatgctattgaaacttctaaaactagg

SEQ ID NO: 485131 - DNA, 450 bp, Homo sapiens
aatcagtcgtcccataaagcgcgtttgcgtcaggaaggtgatgaggctgctgggttccacatagacccagccgcccctctctcctcatgctcgcctcccgcccacctctcggggagccaaggcagccccagcaaggagtaaatgagtgagtgggtcctggcgccccaggacagggcatgtcgggacaagtgttcaaatggcaggcggggggtcgggaggagtttgtggctttggcactgacttctgtctacatgggacctcagcccccaaacacacacgacacacacatacaacacccacacagacacacacatacacccactcacacacgccacacacacagacctcacaccacacacacacggacctcacacaccacacacacagacgccaccacacagacatacacgcactcacactgcacacagcacacacgcagaacgcgcctaa

SEQ ID NO: 485132 - DNA, 543 bp, Homo sapiens
  misc_feature (21)..(21): n is a, c, g, or t
acggacctaaagtcactcatngcatatcttccgttagccacatagcacttgtcattgttgccattctcattcaaacaccctgaagctacatagaagccaccgccctaataattgctcatggtctcacatcttccatacttttctgcctagcaaactccaactatgaacgagttcacagccgaacaataatcctagcccgcggcctacaaacactccttccactaatggctgcctgatgactcctagcaagtctaactaatctagctctacccccatcaatcaacctaatcggagaactatttgtagtaatatcaaccttttcatgatctaacatcacaatcattctaataggacttaatatggtaattactgctctatattccctctacatactaatcacaacacaacgaggtaaacatactcaccacatcaataatattttaccctccttcacacgagaaaatgcacttatatcactgcatatactaccactcctacttctatccctaaacccgaaaattatcctaggccccctatactaaa

SEQ ID NO: 485133 - DNA, 480 bp, Homo sapiens
ccttcttcctatgagaaggaaaaacacttcatgtgggcatcacttccaaagacaactcaacaaataatagtactcgacattcgtcatatttattttactaaataccatggttcaaaagaacacaaaccagaagacatacttaaactagtctacatgggtggggttaaccacacccagtctccacattctctctatgtatatggagctagtaccacttcagagtgactgattactcgtgtacgctgccttttctgttaaaatgaataaatttctctgaacataaaaaaatttctctgaaccaacaaagacatgaaatattacaagatacaggcactttatgttcccagttttagaaataagccaagtgaaaaatatttaataaaagtaactgggccagagttttctactttagttctagacacttaaactcaattgaaaataaacaagttttagctgggattaatgcaatggtcatatttg

SEQ ID NO: 485134 - DNA, 363 bp, Homo sapiens
actccagcctgggcaacaagagcaaaaacttcgtctcaaaaaaaataaataaatgtatacaagacaatgtacataggttatatgcattttatatcagggacttgagcgtctgagattttggtatcctcacagcatcctagaaacagtatcctgcacatactgagcaacaactgtatacataaaggttgagggccgggtgtggtggcttatacctgtaatcccagcacttaaggaggccgagacaggagaatttcttgaggccaggagttcgataccagcctgggcaacagagcaagacctccatctctacaaaataaaaataagagaggagaagattgcttgagcccaggagttcgagctgtg

SEQ ID NO: 485135 - DNA, 244 bp, Homo sapiens
attaggcgcgttctggtggtgcccattggtgagacactccattagtgagacctagagtccagattcttgataggagccaagttcgtgttctatagctatttatgtaacaacaagcagaatcacgttttcccatttgtacttcagtcgctagcccctgttttgcacagccaagtactggctagtatgttctattttgggcctcctgctgctaaagaattgtctgagcacgcagaacgcgccatat

SEQ ID NO: 485136 - DNA, 666 bp, Homo sapiens
ctgtatgctctgggcatccccaatgtcctccaaggagctgcagtcggtggagcaggaggtccgctggcgcatgcaggatagctcaagtacaagcacctggccttcctggcagagtcctgtgccaccctctcacaggagcagcactcgacaggagctgctggctgagtctgctcgacacacctggaaaggcgttgtgacagaaacttgaatgattcccacacattagtggaccgtcatgactgaaggtgggacacctctcggagtccatcgtaatgagatccgcctgtgaagactaatggtgcctggatgttggctggagcactttggtcccctttgagctgcgtgaaggtgctggtgtagtgctggcagctctagagccggcggtccgtgcccttgctgcgggccatctcctaccagcctggtgcgagagaggcccttctctctgacgaagagatgtgctcttggacgtggacctatgcctatggacaaactcgagctttcaccagagcccaggtgtcccagcgcctgggcagcgacctgttatccctcatggcccagtctgacttctggtgcggtggcccactgtgccagtccttcgcttactcaagtggctctactgtccctgtttgaggcctttgaccagcacgtctgaacgagcgcaggaat

SEQ ID NO: 485137 - DNA, 214 bp, Homo sapiens
tgtttcctttgtctctcagtgggggctgagtgagacttggaatcgtcaggggcacgtacacactcactttgggcccgggaaatcacaatccttttgtttcctggcagagtggcaggaaaggggggatgaagaaagaagaacaagcgttgttgtgcatgtgggggacacagaggttgtttaaggcaatggttttacgaaagtgtaagcctgcttg

SEQ ID NO: 485138 - DNA, 1322 bp, Homo sapiens
gcaccggggcggacgcggaaccgaggcatgtccatgaaaagagttttttggtgtctggggacaactatcctcccccgcaatcctctggatatcctgggggggccccagccacccatgccacccatatggtcagactccctacactgggagttaacggaccacacagaggaacaaaacataccaagaaagcagagaaacgcagaaagaacacagaacacacagacacacacaagaacggacaaccaaacaaacaaaaccacaacaaaaaaacaaccacacacaaaaacaaacacaaaaaaccaacaaaaaaaaaaacaagcaaaaacaaaaaagaaaaaaacacaacagaaaaacgaaaaaaaacacaaaaagaacaacgaaaaaacaaaaaaaaagaggagaaaaaacacagacaaaaacaaaagagcacgacaaagcagaaaagagaagaaaacaaacaaaccacaagagacagagcagcacaggccgcaacgagaagagcaggacaaacacaggagcagacagaaaacacgaaggagcaaggcgaaagacgacagaagaggaggagcgcgcagagacaaaagcaaaggagggagcacagcagcgacgcaacggacacaagcgggacgaagacggcacgacaagaagagaggcgaggagggaacagaaacgaacaggagacgacaggaagcgaaagagaacgagaaggggagaacgagcgagaaagacgaaagcggacaagacggcaagagaaggagaaggacagaaaaagaggacccaagaagaaagacaagagaagagcaacaagatagaagaagcaagacaagaacacaagacacagaagcaagacaagacaagagacgcaccacgaccacgcggcgaaggaagcagccacgagcacgcagcacgaagcggagcgaaagaataaacggagacacgcaagcaacgacagacaggaaaaggagggagagaacgcagcgcgagcacgcgaggagaaaaccaaggatagggacaccacggaccgcaccaccggaccagggcagccaaggccacaagcgacggaggagggaggagaagcgaagcggggacagagagaagaaacaaagcgacggcgaccggagcacgaagacagggagcgagcaggcgaccgcgagagagagagaggaaggacagacggaggagaggccaacaagaggagagccggcgcgcagagcacgaaagacgcggaaagaagaggcaggacacggcagaaagagcacggacaaagacaagaacaacaaggactaaaaggaggacgacgagagaggacagagcacggagaa

SEQ ID NO: 485139 - DNA, 541 bp, Homo sapiens
agagaagtagaggattctaccactggggcatcgtagtcccctaaattttaattttctttagtacatgtaattccatgagataaaccacatctacataaactaaattggtaaaaaccataaggttcagtaactttaatttttaccaactaaccaccgtaagtagaaggtagtggtgagctatggatgtcttctcgtgcatagataaagcattaccaaagcagatcatcccattttaatatgatgcatccaaattagctgtgccaaatatactctaaattcctgatactcttcctgcctctgcgtcgttattttctgaataggtaaattactgtaagttccccaaatgaaagatactctaaagcaaaaaagaactggaatttaagaaatattatgtgctctttctataaaatagaaataaaatttgtaggatataagagtctcaatacagattatatcactgccccatgcaaatatgattttatttaaacaaataatgaaatattactttttggataatactatttttatgtttacattattt

SEQ ID NO: 485140 - DNA, 309 bp, Homo sapiens
  misc_feature (17)..(17): n is a, c, g, or t
  misc_feature (19)..(20): n is a, c, g, or t
  misc_feature (22)..(22): n is a, c, g, or t
  misc_feature (71)..(71): n is a, c, g, or t
  misc_feature (116)..(116): n is a, c, g, or t
  misc_feature (127)..(127): n is a, c, g, or t
  misc_feature (131)..(131): n is a, c, g, or t
  misc_feature (139)..(139): n is a, c, g, or t
  misc_feature (144)..(144): n is a, c, g, or t
  misc_feature (167)..(167): n is a, c, g, or t
  misc_feature (171)..(171): n is a, c, g, or t
  misc_feature (174)..(174): n is a, c, g, or t
  misc_feature (181)..(181): n is a, c, g, or t
  misc_feature (194)..(194): n is a, c, g, or t
  misc_feature (229)..(229): n is a, c, g, or t
  misc_feature (276)..(276): n is a, c, g, or t
  misc_feature (292)..(292): n is a, c, g, or t
  misc_feature (295)..(295): n is a, c, g, or t
  misc_feature (308)..(308): n is a, c, g, or t
aagaaacagataagtananngntgcttctgttgcaactgttgcctcaattcaggtgaatcttgaggtgttncaagttgcaacagaagcagcagtatactaaccagcttgccaaagnaacagataagnacantaaagagnttggntctctggccaacaaccccagtgnacancgncaaaggnaaatacagaaggntcgcttagtggcagagttcacaacatcactgacanacttcagaaggtccagaggcaggctgctgagcgagagaaagagtttnttgctcgagggggggnccngtacccaattcgnc

SEQ ID NO: 485141 - DNA, 148 bp, Homo sapiens
ataatcaattattgtgagctaacggtatgtaaattatatcgataaagatgtccttcttatggggtgttcatactgatcagacttttccacataaattgaaaacagtaattttatatatactgtaaataaagattgaaagtttttgata

SEQ ID NO: 485142 - DNA, 264 bp, Homo sapiens
  misc_feature (39)..(39): n is a, c, g, or t
actctgacgctatttgcggtgcctttcagcattgtgctntacttgtgcggagaggtgagggcatcactaacctgggataacccagtgatttactgtgcccatgccaatggtgacgcccacagtgcagggtgtgcctgtgtcatgggtgttcctggtctgaggattgaaggcagaccccagttgtgagatacttgcccggggggaggtctcgcaagggtacagaccttgttgggtaccagcgttggtattgggagcagaatggtc

SEQ ID NO: 485143 - DNA, 100 bp, Homo sapiens
tcttcaaagcgctctcatacgaatggaggctatggaagccacttccacctgggctgaggacgttctcttctcaaacttaagctccccagagtacatcatg

SEQ ID NO: 485144 - DNA, 320 bp, Homo sapiens
  misc_feature (60)..(60): n is a, c, g, or t
  misc_feature (88)..(88): n is a, c, g, or t
  misc_feature (171)..(171): n is a, c, g, or t
  misc_feature (222)..(222): n is a, c, g, or t
  misc_feature (282)..(282): n is a, c, g, or t
ttctgctacagcgacatggcccagtcccaaaggcgcaagggcccacttgtgtcagcagtntgcaccagcagcgtgcgccggcaagatngcagaagcatgaaaagggccggccagaagacacctactctggctggaagacacgtacccctgaagatcaagaaagaagctatntgggaacaatgtagcagttacgtcagaccaggacacttcctgtttacaggngactataaaacctttgtcctatcatcacttgatgtggacgccattttagcctcagcccgnctgcacccaggcactgattaaaacagcatgttgctcca

SEQ ID NO: 485145 - DNA, 294 bp, Homo sapiens
gataatgctcttctaagacggtcaagtaacagtcatacagctagtgaagtccctggttattacaattgttaaggagtgtaatagccgttacaaaatgcacaatgcagcttagtattcggtcagtcgtatgtggtcatgttggcgatccccatttcaccatataatcctcccaccgtacggctgcgttatggcaccgtaaactctaagtaccaccagctagaaggaccgcagtctcggatgatgttcaatgattctgggtaatgtttaggtcagatcattggatatggatggtcg

SEQ ID NO: 485146 - DNA, 628 bp, Homo sapiens
ggtcagttcggtaatagcgttgttaccatgcccacgtcgacgaaactccggcggctctaggaaacgagtctcggatcagaattcttcaagtgtgaactctttctctttcgcgtccgaatcggatctttctttagtccgcggggaaatttttatccaaagggatttccgcgatgaggattgagggcggccaatgctcccaggtcgtgggccaaccaagcggggatagaggggctggcaggaatggtaagttgggcggaattgatgacggcgaggatgtcagtcattcgctcgactggcatcgagagcgccgggggtgggccacctagagagttcacggccggattaatcgaaggaatcatcgtgataggaattgcctcagcggtcgcagttttgtaactggcgtcttctggatcgaaataatggagttcgaatggaggcacgacggttttcattaccagcggtaaaagctccctgatgaaacacggcggtgccggcaattttccgccgctcatcaccgcgcgggatactgaccgggctgttaactttccaggctgtttcattcggcagctttggttgatgaaggctattcgaattccggtaccgcgcgcggggagatttccgcgagtgt

SEQ ID NO: 485147 - DNA, 630 bp, Homo sapiens
  misc_feature (21)..(21): n is a, c, g, or t
cgcgcaagccagagaaaaganaactttggattgcgggatacagacaaatatgtttcaaaggatgcccctgtaacccacctttgggttctccaccatgtcgggggaaagaggtccaattttttaataaaagtgtagccaacaaacttgtccagatggtggtttataaaccgcaaaattaccggtttaaggttagtttccaacaaagacactctgcacagtatccacggctccatccataaacaatttgtaattcaggtcgtatcatcatgggccaaagcaacggcatggttgtaatgtccatttcgcagcacggatctttgatacaatggaggcaacatagcttcacagctgtctgatatctatacagctgattggtgcatccatggtcactcgcggatgtacacatggtgaatgaatcattgcgtgcagaccttttttgcaggagtgtaggcaaatagcaaagagttgaactgcatcctgccatactgatagactcgccttcccggcagttctcggcaagaacactgtcactcttaatgccatacatggtcgcagaggagagcaggagtgtgtgtattcgatgatctttcaaccccccccaaaaaggtgtggcgtggacctgcatccctg

SEQ ID NO: 485148 - DNA, 389 bp, Homo sapiens
atcagtggttctgcataggagttgcattgtcagcagtttttgaattatcaggtactaaatccttgatatatattcagcattatctccatagttcgagtctaacagctaaaccaagtagccagtcaatagcttcttgtcgatcttgaatcttgaaaggacagttaacatctctgagatacttttcaaagaacttgggccagtcgctgctgtggatgtttcttaaattccctctgtcttcaatcttgtagtgcctgattttctggtcttcaagccaaacgatgaagtttctaaattctgtttcatctttgcagttgaagccggcggggttgtggtagtcgagagccgtcaacttgcgtcggaacatggtccccgctcctcgctctggtcct

SEQ ID NO: 485149 - DNA, 1172 bp, Homo sapiens
  misc_feature (224)..(224): n is a, c, g, or t
agcgtagggacgacgtctagaagatgcgaggcccatgcattgttgagacgtggctcttacctgatctagcacgagggacgaagagctcctccacttccctcattcaccaaaggaaggcttcggccgcagccgtacccaaggttaccggtgagcattgggcgcggcgtggtgaaaaggcggcttcgcgcagagtctgcctctatctatgtcggtgctgtgaatcnatgaggagcatgaaactttgcaaaggaggaggttcttacgttggtgcggacaacggaatgtgggtgaacaagacagcgatgaataaacgtaggtgtaacacacgcaagactcgacaggacttctgcagaaaaagcgtgactgacgaatcttgtcggaaacatacatgaagtcacttgggcacttctgcagttgcccttcttaaacagggcaccgcctctcagggtgcactcaggcatcacacgagacaactcacgacattagaggactccccagtgtctaagaaaagggccactcgtgttggaagacgctaacctgttaaggactggtctctctcacccctgggggccctctttcccggaaaggcgacgactgaacccatatttgggggtaacgacctccccatttgggacagttactgccttgtaccggctactgggttgacagaacggaaaccactgccccaatgctttacccaagcatcgggcgatcatattgaaaaaggggcacggacttggggggatcgggcacactcgggcgcacaccactaagtactttcacatccaagcacttccaccggtttattggccacaggcctccacggtacatgaaggcccttacattcccagccaacccgggtattagtacgtcgttcctggcagccacaccattacccacgtggccaacacttcgcacccagaaaccacaggatttggtacacgccgacagggaacaacccccttcgggatggatccaaattctcctgttaaacacgtcttcagcagccaaatcttcgccggacacgcaagagataataactaactccacagtgctcaccagggacgcctgggaccccaacgggtagcctttttccttcactaccgtttcactagcttcgatattcctacagttacctccaactctagagcagactggtcacctcaccttta

SEQ ID NO: 485150 - DNA, 411 bp, Homo sapiens
  misc_feature (264)..(264): n is a, c, g, or t
  misc_feature (273)..(274): n is a, c, g, or t
tctggctttatggtattccattaggttcttttcatttaaagtagtcttaaaatcaaagtatccaatattttaaagccacaaagtagattacataattagcagagattttagtcagtaaaatgttagaaatcaaactataagaaaattcaagtcctttattttgtgtcttgggtatatgtcattattttaaattccacactcccttatttaatcactttggtaagtgcctttgatgttttgaaatgtatagtgggagaggacganaaatggtannaaatgtccattgggtgccctggttccagtttcaattcctcaaccattttacaggtgcaagttagcctttgtgttaatcaaagtgtatttgtagcccctccatagtgaacaatgaaataaactatttcatagaaaaca

SEQ ID NO: 485151 - DNA, 1076 bp, Homo sapiens
agaggtcatgcgttgttgtgtttgtgttgtttgtcgtattattgtattgttcgctggtctgtgtgtgctgtgattcattttctgagtccagaagagaataagcagttggacagaataacatggcgggcaagttgtgtggggtgttgccagctgtgtagatctttgggtgtgtcggttccaattgtttgataattcgatcacggcccctgtggccccggggtaacctgcccttggacgccgcaactctttgtccacgtgggcccctttcccgcgccctgtttgccgtccctgtgctgtcccctcgcctgtgggttgcgccagtggttgtgtgtgtgaccccgcgtcgcgtgacccgacccccggggcaagctcctcaaccttggaccctccgtatttaatttgtgcgcgccctttggcctacgcgcggtaaccacagatcctctgatacaagggtggagcattcacaaacttcataactacgcccctgattcggccccactgcggacagttgcgccgaccatctcatatgagtcaccctagccatcattgtgactatgcgcaccgtactaataagtggctcctttaacctcgcccccctttgtcgccacacccaggacccctctgattactccggccctcatgacccttggccctaatatgatgttatctccacactagcagagacccaccggacccccttcgaccttgccgaaggggagtccgaactagtctcaggcttcaacatcgtatacgccgcaggccccttcgccctattcttcatagccgaagtaccaccaaccttattataataaacaccctcacccactaccaatcttcctaggacccacatatgacgcactctcccctgaactctacaccaacatattttgtcacccagaccctacattcttaacctccctgtttttatgaattcgaaccagcatacccccgattccgctacgacccactcatacacctcctatgaaaaaacttcctacccctcaccctagccttacttatatgatatagtctccataccccattaccatctcccagccattccccctccaacctta

SEQ ID NO: 485152 - DNA, 259 bp, Homo sapiens
  misc_feature (234)..(234): n is a, c, g, or t
gctccccgtgatacctgggtgttgtgagtgtaaatcagttgcgatgagtaggggacagggagcctactagggtgtagatatagctagaggtggcgcttcacaattccggtgcatatagtaggtagcctgcagataatgttaagcggtataggcgatacggccacgggctaattggtttgacacataacctagtaccttacttattcactttacatctaactgtgacaaatactnacttattccacttctctaacaactg

SEQ ID NO: 485153 - DNA, 739 bp, Homo sapiens
  misc_feature (4)..(4): n is a, c, g, or t
  misc_feature (52)..(52): n is a, c, g, or t
  misc_feature (134)..(134): n is a, c, g, or t
  misc_feature (137)..(137): n is a, c, g, or t
  misc_feature (145)..(145): n is a, c, g, or t
  misc_feature (147)..(147): n is a, c, g, or t
  misc_feature (182)..(182): n is a, c, g, or t
  misc_feature (201)..(201): n is a, c, g, or t
  misc_feature (256)..(256): n is a, c, g, or t
  misc_feature (264)..(264): n is a, c, g, or t
  misc_feature (317)..(317): n is a, c, g, or t
  misc_feature (319)..(319): n is a, c, g, or t
  misc_feature (323)..(323): n is a, c, g, or t
  misc_feature (337)..(337): n is a, c, g, or t
  misc_feature (347)..(347): n is a, c, g, or t
  misc_feature (460)..(460): n is a, c, g, or t
  misc_feature (467)..(467): n is a, c, g, or t
  misc_feature (472)..(472): n is a, c, g, or t
  misc_feature (480)..(480): n is a, c, g, or t
  misc_feature (621)..(621): n is a, c, g, or t
  misc_feature (739)..(739): n is a, c, g, or t
cagngtgtcgtgaaaacataccccctaaaaaccaaaaatgggaaacgaaaanacttcaataatcaacacttgtcgctcatttggacacgtattaattccgggcaaagtccaccacatacatggccaatccttantcntaataaantncggttggcaatcgacaaaacaaccatttgaaaaantttgaaaaggaggcatgcntgataatgggaaaaggcccccttcaagataatgccctgggcccttggaataaacntgaaaacntgagcgtaaacgttgataactaccaatttaataatcccccttgatggaaattntntganaccatcaagatacntaatgtaacntaatcaatttaatgccccagtacacagagacctttattcaaaaacaatgatttacagtggacactcttcaggctgtacctgttcctgttccatgaattgtttgtcttcttggntttttgnttaantttaaagncattgataatctccaaaaatgggcaaacccgatatcatgcccttctggcttacacactgggtgttaaacaactaattgtcggtgttaacaaaatggattccactgaaccaccctacagccagaagagatattaggaaattnttaaggaagtcagcacttacattaacaaaattggctacaaccccgacacagtatcatttttgccaatttctggttggaatggtgacaacatgctggagccaagtgctaacatgccttn

SEQ ID NO: 485154 - DNA, 177 bp, Homo sapiens
gtcccgaggctttcctcctcagcagacgcagctcccatggattatgctatcgccgcgctcgtcgtcgacaacggctccgtgatgtgcaaggccttgcttcgcgggcgacgatgccccccagtgccgtcttcccctccatcgtgggtgcgccccagtgcaccagtgacgtgactggtg

SEQ ID NO: 485155 - DNA, 275 bp, Homo sapiens
tcagtcggtaccactctcagaacaaagcaaacaacaaaaaaaaaacaaaaaaaagaatacgatatggatctggtgctgtagccgggatggaccccaaaaacatgctaattgaaagaagccagatacaagaggccatgtatgatccttggatatgaaatatccacgatagactcacccatggagacagaacacagattagtggtgggctgggaggagtggggaggagggagtcatggctgtgggatttctttctgggatgaagacaaagggaaaca

SEQ ID NO: 485156 - DNA, 166 bp, Homo sapiens
tgcatgtgtgacggaggacgagtaagtggaaagtggcttttccaggctgacatttgatgccagtgggatctctgatttttttcctctctccctcccctccccctgtaggaaacaatgcccttttgataataatttgctctctgcctccatgattccgtactcccca

SEQ ID NO: 485157 - DNA, 450 bp, Homo sapiens
ggtgctctcatggcacatgcaactcaagtaagtctacaattactctacttcccctatcatagaaaagcttggcacctttcatgatcacgccctcataatcattttccttatctgcttcctagtcctgtatgcccttttcctaacactcacaacaaaactaactaatactaacatctcagacgctcaggaaatagaaaccgtctgaactatcctgcccgccatcatcctagtcctcatcgccctcccatccctacacatcctttacataacagacgaggtcaactgatccctcccttaccatcaaatcaattggccaccaatggtactgaacctactagtacaccgactacggcggactaatcttcaactcctacattcttcccccattattcctaaaaccaggcgacctgcgactccttgacgttgacaatcaagatcaccaccaataca

SEQ ID NO: 485158 - DNA, 162 bp, Homo sapiens
gtgcctgtgtttctagagatccccacgatatccggtcagtaatgcattcgcgaagtcatccatgtgagcggacgatccacctgaatgggagccctgaaggagcccattcacatccctaagacctgctcccgccacaatgacagacagggaatggaggtgatg

SEQ ID NO: 485159 - DNA, 318 bp, Homo sapiens
cctttttcaaaccccccccccctttcccccctactccttcccttcctttgagggcccctcccctttggggttgccccttggttttggggccccccccccccccccgcccccctttattttttccccccctttcccccgggcccccccttgggggcccttccccctttttgggcttttggagggccccgattgttcccaaatttttcccccccccttccccccccccccaaaaggattttcccccccccccttcctcccccttttttttggtttttcccccctttcccttggttttttttgggttaaggggggttggca

SEQ ID NO: 485160 - DNA, 241 bp, Homo sapiens
tcccctttaaaatcatcgccttgaaagcttgaaactgattccagtgatggtaccattagccctgactttcctgagacttgctttgggggttctccttcagagcctgtgatatcttctttggaatactaagcagagctgtctttgtcctttacagacaaaaataattctgaactaagaaaatgactcaaacaccttaaagtgccctgcaaggtccttgccttcctttccagcttctttcatg

SEQ ID NO: 485161 - DNA, 379 bp, Homo sapiens
tctttgctacccattaaacagtaactcattacttttcctctcttgttcccagtaactcttattgtatcctctatgaatttgtctattctaggcacctcatataagtggaatcatactatatttatcctcttgtgattggcttaacttagtgtatattcaggggtcatccatgttgtaagcatgtctcagaatttacttcctttttgaggcttaatattctctggtatgtatagactacattctgtttatccattcatctgttgacgacacttgggtttttcccaccttttggctattataaataatgctgctatgaacactggtgtagaagtatctgagttcctgcttccagttcttttgggtatatacctaagagtgg

SEQ ID NO: 485162 - DNA, 107 bp, Homo sapiens
ttatcaggtcaggcagtgattagtttatactagtgcacctgcccctgtgtccagtgcacaggtcctatctgctccactagtagagggtaatcacagctcatggaggt

SEQ ID NO: 485163 - DNA, 930 bp, Homo sapiens
agcggagctccgggacccaggtgacgggaaagcaggcagccccagcggcgggagcagtcggcagcagcccagtgcccggggcactgggcgtgggggtggtgcagtggtgaaatgggcagacaatcgcgcagtcagttgtcgagcacatgcttgtctcatgcttttacacttcatcgtcgagtgattttgtcatgtgtacttgagtgcagcagtcggtcgtgtcgtctatgtcgtagatcacaagacactcaacagtttcgacagacaggccaatcgagaatatagagtgcctaccccaatctctacggaggtgcccctgttgagcctttcagaggttacgctaatctcgggggcctcttatcactctatagtgatagagcgcggtggcgcgtcccctcggtcactcgcagtctactctcagtgtctcctactccttaacgcatcgtctcaacacggtgtcaaccacatttatctcgagccagccccatgcgccgccagtctatgctacctcctcatcgtgatgtctcatctcttagctccggtgggctgtccagcccagatggcatggtggtgaaacacaccttgtggtgctataattcaacgatgttgctcactaccaacccatacctcatgacctactctgccctccgcatacactgcgaagcaccaaaaccgtgctgcatgacagcctgattcccgcagcctgcagccgaacgatgcactctttgctctgaccaccaccacatctccgcacaccccatcacacacgactagccgccgagcctcctccaacaccctgcttcataccatcaccactcataaatccctcgcaccgccgagtactcatgttctctggtggtgatgtcgcgcgggtcgcttcctgctctcggccgtagctgacgagtttctcactctgtgcttgtttctttt

SEQ ID NO: 485164 - DNA, 175 bp, Homo sapiens
cccgggtgtactgcaaaaacgggggcttcttcctgcgcatccaccccgaggtcgagttgacggtgtcctgttagaagagctgaccctcacatcaagctacaacttcaagcagaagagagaggagttgtgtctatcaaaggagtgtgtgctacccgttacctggctatgaaggaag

SEQ ID NO: 485165 - DNA, 418 bp, Homo sapiens
atctccaagtcagaggactcacacttcccagtttcaaaatttacaaaagtactgtaatcaacacggtgtggcgtggacttcaggatagatgcatagacctatgaagagaactgagagtccggacatccacacagctatggctggatgattggatgatttttgataagggctccaagtccatttaatgggaaagaatagtcttttcaacaaatgatgctggggcaactgggttcctgcatcaaaagaagggagttggaccctatctcatatcaggtacaaaaattagcttgaaatgtatcaacgacttacatttaagagccaagagcataaaattcgtaggagaaaacataggggtaagttttcatgatgttggatatggcagtggattcttagctataacacccaaagtatgaacaac

SEQ ID NO: 485166 - DNA, 1469 bp, Homo sapiens
tgatgactggtcacccgcgcttgtggtgtggtggttctctgtttctgtcgctatggcgtgtcgtatctggctcgagggtatgtgttggggtggggctggctttggtcttcgtctgtctctccgttgttgtttgcgtgttggactggtgctgctcgagttgtgtgttgttttcttactctctcttcttcccctattcggttttgtccgtgcggccgctcgtggttggtttgcgcgtctcttttatgtgtggcgtgtagtgtgcgcgtgttgccgcttcgcgcgtcgcgtagcggtttgctcgctcggtgtgggaggctcggcgtggtctaggtagggtctcgtgtggtgtgttcgattcgtattgcgtgtgtttgtctcccgcgctctatggtggtgtggcgcctgttgatgtatgggtgggcgcgcggggtgtgtgtgcgtcgcctcgtatttcatcggtctcgtggtggggtgtggtggtcgtcggttgtctgcgcagtatgagtcctctttccctgcttattggtgtctgtttggtttgtatgtttcgtcactccgctgggtttagctcttgtgtgtggtctttcttgttgttaagagtatgtctcgcttccgcgttctatggtgttttgtgtgcttatggttcttcttgtgtgtgtgtggcgatcgctgtgtattatttgtctgtcgcggtgttgtttgtgtttgttctgtctgtttctgttcttcgtctccgattcggtttgctgtttttgcttttgggtgtgggggttgttttgtctgccttgctgtgctggtgttctctcgcttctctttgctggtgttttgctctctttcccttgttcttctctctattgtgttttttttgtcctgtttgctcgttgttgcttctcgcttcttctttgctcatgtcttgtgatgtgtgtctttctgctgtgtgtcggtgtgtgtggttgttctgttgggtgttgtttggttgtttgtgtctgttgtcggtgttgtgtcgtgctgtgttttggtttgttgcattggtggcgtcgcgtttcttcttgtttctgtccgcggtgtttttgtttggtttgtgcgcgtgtccgctcgtcggagcggcccgttcgcgccgcgtctttgtatagactgacgtcttcgtgtgtggtgtggccccctcgggtgcccctccccacagttttctctcaagttgctttccgtcgcatagtccccccgagttatattcatctgttagatctctgcggcccgcgacacgctctcttatagagaatatgtaggataacctccccgctaagacccctcctctctaagaatttatagtggttctcccgggtttgttcttttttaaagggttctctctcactatttttcaccccccctctccccgctcttatcatatagcagcacaacaatcgagcctactattcaactccgaccggacccactcaataatacagaaaaac

SEQ ID NO: 485167 - DNA, 651 bp, Homo sapiens
cccttaaagacccaaatttatgctaccactaaacaaaaatacccactcagtctgggttaaaatggatgtctttttaaaggtatttaaagattcaactaagctttaaagagggctgagcagctcaagaagcctgtaatgtgggcataactctttggacctgatcttgatgcttctgctgctctgttagcctctgaagagcaatatctaatttattattactcggattttttaaaaagctttaaagtgcctcaggggtcccctgaaactaattttctatttctgggattccctggattcattatatgagatggtgacatgattagaggaattcttttttagtatgaaaattgtgccttttcttcttcagtacttgcctccttgctggcattgaattaacacagggacaaaattttggtaattttttatttctactctcccaccccctgttgcccagaatttgtttgtggcctttaccaccttgaggatgaagctattcagctggcataattatctatggctgtagcagtacactgagttgactgtgccaggatattgagaagctctgggggtgatttgatacctcgcaggtttcttattttggaatgaggttcttttcttgaggtgggtccttctataaccccggttagtttg

SEQ ID NO: 485168 - DNA, 606 bp, Homo sapiens
tcttttttaagctaattaattcattgtgatctgtttgttagatctttttaaaatactcactggataaagcttgaaattttacaacaatgcccctgagacaattttagggaagtcctttgattattctaacttaacttcagtgtcatggaaaacagaattatatatccaagtgttctttcatattcagaacatccagtactcttccaagaagggaatgttcatgattatatacacatatatttattgactgtgttgctcagcttcttatctcaaggagagtcagtaactctttttcttgataaaaactaccatgtcagccaagcacggtggttcacacctgtaatcccagcactttgggaggctgaggtgggctgatttcttgagcccatgagctcaagaccagccaggacaacgtggtgaagccccgtttctacttaaaatacaaaaattagccaggcatggtggcgcgtgcctgtagtctcagctactcggagggctgaggtgggaggatcacttgagcccggctggctgaggctgcagtgagctgagatcgtgccactgtactccagcctgggtgacagagtgagacactgcctaaataaagga

SEQ ID NO: 485169 - DNA, 217 bp, Homo sapiens
gtagatacacactgtaccatgacacacacgcaccccatgacacacaccacacacagccaccctctgctctaccagctttgcctctgttctccgacagcgccagtgttgacacgccagaggttgcctgggccccactccttcccagctgtctccaggattagggaagccccaggcggatccgggccgcaaggagccttcctacccagcccccatgcag

SEQ ID NO: 485170 - DNA, 776 bp, Homo sapiens
ccggggtgtgcagtcatctttgcgtgtgcgccgcctgggtgttcctgggtgtgcctcgcccttggttgctcgtgctcgtcttccccttgggggccctccccatcgtgcgggtcctgggatctctcttgcgggtgtactctccccgcggtgttatgtcgggcgcgacggcgcaattttttgtatcaagcttctcgctgttagcatatcatggtgtgtccccgccccgcttatgttttgcgctcagtggggagtcccacgccggggggcaggctggggcggaggactccccgctcggtggccgctgtggtagcaccctcacgcggggtatgtggtgaactccgcccgcggcttcggtgaggagtcacccccccactgtgggggtttgtgtagatagttcgttatcggcgtgcgtcgccacaagacgacttgtctgggcgctctctcttggccggcatgtgtgttgcccccccctcgtgggcctttcgcatcacacaatggtctcagttttccctgggccctgttttctgctccaacatggctctccttatccctcgcccgttttattcccccccggagtttccgtctgggatcaagcccgtaacgtcctcgcccagatatcgccgggtaaccacggcccgctacccatgtacgactcctcgctcttattccgacctacacgtattatgcccgggataagcctacgtctctcaagacacgggcccgcgccttatcttcacgcgatcacccgcaccgacgacaccgtctgcaaaactacg

SEQ ID NO: 485171 - DNA, 285 bp, Homo sapiens
aataaacagatgtgatactgatgttgcctgattttgatcactgttctgtggttatagaagaaaacatccttgatccttaggaaacacaccctaaagtagtaagggcatcatgcctgaaacctgcttccaaagggctccagaaatagcaaggcagcaatgcataagccaaatgtgtccaagcatgtttacacaacgcaggtcacagtttgcaacatttccaaacacaaaggctcgggtcgtggtcggctccacatttcgtaatcccaagccattttcgggcaggcc

SEQ ID NO: 485172 - DNA, 144 bp, Homo sapiens
acctgttactacgttgcgatgtgcgaatttatgaccattaattcatttcccgaaaagtgcagccacggcgcacgtggctcatgcctgtcactcctagcactttggcaggccaatgcagtcgtcgcaaccggaggggactcctct

SEQ ID NO: 485173 - DNA, 292 bp, Homo sapiens
aagtccgaacatgggagtttgccaattgcattcatcaagtcgttttgcggagtcagatccctgatggaaaagctcacaggctttgccttccaagtcctgggttcctaactggtgaccttagcctggggtttgtggggagaccaaccctggcttccaaaaaaaccccattccatggactatcaaaaataaacccaaatttgggtgacaaaactggctttggatttgccttttaattttgtggttctggcaggttgggaatgattaatatttaacctttattttaggaaccaaa

SEQ ID NO: 485174 - DNA, 389 bp, Homo sapiens
  misc_feature (249)..(249): n is a, c, g, or t
  misc_feature (377)..(377): n is a, c, g, or t
gcagtttgatttaaaaaggatctaaggtcaggcacgatggctcacacctgtaatctcagcctgccttgtagctgggactacaggtgtgcaccactacacctggctaattttttaaaatttttgttgagatgaggtcctactgttttgccctgttggtctcgaactcctgggcctcaagtgatcctcccactttgggcttctcaaggtgctagggattgtagggcatgagccaccatatgtggcccattngctttatgcttgaggattaaaaatgctgtctccatagtatccagatattctaaattttgtggaaaggcatcccacccattttttgaggagggccatcttaaaccattttttaggctaggttgttttanttaaccggtagg

SEQ ID NO: 485175 - DNA, 189 bp, Homo sapiens
gggcttaatcgtgtcactgccaggcttccagacagcgggcacaacttccccatcctcgtctgtgtactggaaggcctggaccagacgcagagcctcatccacggagcgtccacaggcaaatcattacagtgtctgagaaggacaccttccatgatgataaagaggccctgtagcatgcctattgtttca

SEQ ID NO: 485176 - DNA, 147 bp, Homo sapiens
  misc_feature (76)..(76): n is a, c, g, or t
aggtgacttagcagcatcccccaggtggggcatccacggggcatagtggtggccatgtgttggtcatgtcagcatnctttttcacattcatcagggtcaatgtcacactcaggcatcatagttccagggtcacggcagctcgcaatt

SEQ ID NO: 485177 - DNA, 763 bp, Homo sapiens
  misc_feature (59)..(59): n is a, c, g, or t
  misc_feature (80)..(80): n is a, c, g, or t
  misc_feature (133)..(133): n is a, c, g, or t
  misc_feature (249)..(249): n is a, c, g, or t
  misc_feature (278)..(278): n is a, c, g, or t
  misc_feature (305)..(305): n is a, c, g, or t
  misc_feature (308)..(308): n is a, c, g, or t
  misc_feature (511)..(511): n is a, c, g, or t
  misc_feature (534)..(534): n is a, c, g, or t
  misc_feature (543)..(543): n is a, c, g, or t
  misc_feature (546)..(546): n is a, c, g, or t
  misc_feature (555)..(555): n is a, c, g, or t
  misc_feature (559)..(559): n is a, c, g, or t
  misc_feature (564)..(564): n is a, c, g, or t
ggccccaaggaggggcgcccttgttaggaaaacatcggggtgtgcgctttaacgtcacnacgtccccctgccacgcgacnccatccccccggaggggggccagatcatccccccagcccggcgttgcctttangcaagtgttttgaccgccacaccccgcctcatggagcccatttaccttgtggagatccagtgtccaaaacaggtggtcggtggcatttaccgggtttttaacaggaaacggggccncgtgttttaggagtcccaggtggccggcncccccatgtttgtggtcaaggcctatntgnccgtcaacgagtcctttgggttccccccttaccttaggtccaacacgggcggccaggggtttccccaatgtgtgttttccccccggccgaatcctgcccggagacccctttgacaacaacaacccccccaaccaggtggtgggggagaccccccagcgcaagggccttaaaaaaggcatccctgccctgggcaactttctggncaaattgtaggcggcccttcctncagggcctnccnccccggggncttncagcncccccagccccacgtccttgaattttcagacgacacctggagactgtcccgacccagtggcttttgccccaaaaaggggaaaggaacacccgggtagatgatttttagcaggcaggaagtcctgtgcggggtccccatgagcatctccacctgtactagtgcccttggaataataaattttataaggtggtggctttta

SEQ ID NO: 485178 - DNA, 196 bp, Homo sapiens
  misc_feature (161)..(161): n is a, c, g, or t
  misc_feature (171)..(172): n is a, c, g, or t
  misc_feature (177)..(177): n is a, c, g, or t
gtgtcatagtcttgggggttgttaatgaagaattaagactgtgtcatctgtatgtgaaattgatacaacttacctttgcagcattctcccagcaatccttatgagccccattgtccccatgtgagcactttcccagacaggcctgattctccctatgagtntcacagcctnnccttncccacatccacatccttcc

SEQ ID NO: 485179 - DNA, 227 bp, Homo sapiens
  misc_feature (62)..(62): n is a, c, g, or t
  misc_feature (132)..(132): n is a, c, g, or t
  misc_feature (140)..(141): n is a, c, g, or t
  misc_feature (158)..(158): n is a, c, g, or t
  misc_feature (162)..(162): n is a, c, g, or t
  misc_feature (167)..(167): n is a, c, g, or t
tgcggagctgccctccactccctaccaagtctgtgtactgggtacttcttcacattgcctcntgtgctctggtccagccatggtgcaaggacccacctgcttgtctgtgtccaaacagcgtttcctgaaggnagaactgnntttctatttccaacagncagnactancagccctttggtatgctgtcgtgaacttttcagatgtgccaagctgaaagctggcccctg

SEQ ID NO: 485180 - DNA, 588 bp, Homo sapiens
ttagagctaggagtttgagaccagcctgggctatagcaagacccctcactacaaaaataaaacatcaaaaacaaaaacaattagctgggcatgatggcacacacctgtagtccgagccacttgggaggctgaggtgggaggatcggttgagcccaggagttcgaagctgcagggacctctggattgcaccactgcactccaggctgggtaacagaatgagaccttatctcaaaaataaacaaactaataaaaagcaaaaaaaaaaaaaaaaagaaaagaaaaaacacggtgctttggggcaccatctcagctcccttgcttccaggttgcagcatgtggacgtgagtttctggacaacagaatgtggtggtcagaagttgacatttttgccaacacggggttcgttgggttgggggctctcccccacatcctttcctggcctatgagcgggaacataacacatgcctatgatccagcttgggtcatacccagggggagggtggcgcaacgaactgaaagggaacctgaatccctgaatgactgcttggaatagaacccactcagaaaaataaccttttatatttttat

SEQ ID NO: 485181 - DNA, 898 bp, Homo sapiens
caggaagctgggcagccggaatcggcaatgacccccacccaggggccagcgggagcagggcctgcatgagaccccgacagaaggtgggggggggggggctctgggaagcacaggccagcacctccccaggtggcaggactctggcttggggtgcccggccctcattcccttgcccagcgcagtgagtgctcattgtgtcttggcccctttgttcgcaaacgtggataaggggtgcccaagcctctcctgatgctttggtaaacaagaaggtttcagcagtattacaccaccttccctcattgcctccgagggggtggaagggggtgggcacacttccaggggccccccagtgccccttggcccccagggactggaaaaggcttcccaacccagagttgtccctgttgggaaggcaggcagaaggtgacaatttgacacggattttccttgcacgcgtccttcctttatacctttggaagcagttaagaatcttaccaggcacaagattagaggccgccctttgccgtgacggagcttgatagacgcagcccttggtcctccggtcccaggactgaagagcccagttgccttcttgcccaccctttcccccagggccctcttgccagccttctggttgcacggtcgagggccctgccccaatgggagggcctgccaagagcttggctgggggaccccctcccgggctcttgggctccctgaatgggtgtgaagtgtacctgtggtggtccttcttaagccccattaaggaagccccagggtttataagcgactgacattcgccacgtgcatctggatataggaaaaaggcgccggagaaaaggcaaaattacactttgggcgtgcataaaagaagcctcttttttttacctaaggtagt

SEQ ID NO: 485182 - DNA, 1048 bp, Homo sapiens
ggccaccactggcccacccgggactctacgcggttctgcctgcggacgacagcgagaccgggcgctcgcgtgtccaggtgactgtatggtgggctcccagtcagcggagtcgttcttctggctgctgcatccttgcttcacagggtagatgcctgagtcgggagctcctcttttgcacctgtaacttcgtcagagagtgtgcagctgagtacccagggtgccagcgatgccggagccaaggtgactaacagaatcactttgaagcatactttcaatccacatgcatcagaacttcttagcgacaggaaagggccagtgagcatagcccggacacctgcgtttcacctggccatatcagcggaactcccacattatccgttgggcctgttcaatctacttccattccaggatgcctagctagctgaggggcggaccctacgttagaaacccaagcggctcttggtgaaccggaacttgacgaccagagagaccagaagaaccatgtttagcgcatgaactgcgaggagactacaacgtcagccgaaggtacgatctggccttccaaaacccgttgaaggaacacttatcttcgaaactgggctccaggaacgaatgatatgcccagaaaggcttagtattatgggcacccagaccaccaacgtgggaacagccccaccattccgcaaaaagggttggtacttccctgaggtggattgcccatgcaaggtggttgggaggcaaaaaacggcgagaagggggacacaaattacgtttggaaacacttgggagaacccccagacaccatgggggtattcccacgaagagcaagttcaggaatttggccctcacagttggaaacttaaactgggtatagtttatacaacggaagcgaccacttggaacttgggggaaggcgcattcattgaaatggtagcagaagcccaagggaaccttccaaagttgggggataggcttgcgatggcacttcccaacacatgggcttttccggaaggacagccctgaaaatagaaaggggggtcaaaaccac

SEQ ID NO: 485183 - DNA, 481 bp, Homo sapiens
tcaaaggctgcagcagcatccacacatcactttcattttttgtttaaaaaaaaggtaagaaaggtctacaggagatggtgagtttattatgtctatgtttggatagaggttttgatttgctctcgaatgttccaggctggagagaaactaggagaaaagcacaggatgtagaggtctattcggcataatcttctccctcattttcatcttcaccatcaacagagagagcagcatacttgctgcagaactgaacttagaagctggattttcctcaggttactttggctcaggtgcagatctggagtcttgatcctttttgccatctttcctatctgactccttccagtggtctctgttccctccgtctcctggaccacggatagagttcccagtttggcctttaggggcattcatcccatctactttattttcatctttccttcctggtccttcctcagatggttgagctggagctactttt

SEQ ID NO: 485184 - DNA, 158 bp, Homo sapiens
  misc_feature (14)..(14): n is a, c, g, or t
ggggggttcccggnaaaacccccccccccctttttgttcccttggggggccccctttcctttgcccaggggggggggggggggcaggatttggaagttttggggttcgggggggttttcccataataacaaaaattcccaactttggagaaacttgga

SEQ ID NO: 485185 - DNA, 232 bp, Homo sapiens
  misc_feature (18)..(18): n is a, c, g, or t
acttccacccttgccccnctcatctgccgcctttgcttttggtgggctagttgggttggatgctttccttctccaggtgctttcatgcagcctaaagtacagcctggaccacccctgtgtgtagcttagtatagattccctgagctgcagctgagcctgagccatatggtgatagttacactttgacatgagataagatggtggagattggcatgccattgaaactaagagc

SEQ ID NO: 485186 - DNA, 207 bp, Homo sapiens
catccagcaaagttgcacgcgcagggtaatcatatgcatggtaggttgcatgtcagcattgggctgttcaattgtccagttccagtgttttcaatctgcacgccaggcttcatgcggacaggcagcacatgtattccatgttcacttcatcactcacagattcagttctatctcatcagggatggaggtcactgcagctacgcaatt

SEQ ID NO: 485187 - DNA, 148 bp, Homo sapiens
  misc_feature (72)..(72): n is a, c, g, or t
tcgacagcacacacgccaacagcacacacacgagcacacagacaaaacgcacggcgacacacgcacacacancacacacagcacacacactagcacacagcacacacactaagacacagcacacacatgcacacacagcacacacacg

SEQ ID NO: 485188 - DNA, 383 bp, Homo sapiens
cacccagcccgggtcgcaggacagggccgcagcagcaagctctctgagtagacgccttactgctccaccgagctgatccctgatccaggcgcctggcgctgcccgaatcctatagagaggaggatctcagctggcttggagatggttccctcccatagtctcatcatgtatactgccagctatcgtttcagactatacacctgcctatctactcccagacgtgctagaactattcacacattcctcattctttacaggatacagtaaaaacttctgtgcaaggcaatatttccactcgcatatcctgccctgctttagcccaaagactgcacttcctggcccatcatatctccttgctttagcatcctcagatcagaattccc

SEQ ID NO: 485189 - DNA, 830 bp, Homo sapiens
  misc_feature (62)..(62): n is a, c, g, or t
  misc_feature (104)..(104): n is a, c, g, or t
  misc_feature (221)..(221): n is a, c, g, or t
  misc_feature (324)..(324): n is a, c, g, or t
atagaaaggatggttaccccaaataccctgacttgatcattacacattctataaatgcaacnaagtgtcacatgtgccccataaatatttatattatatatcantgaaaaacaaaaatgtgatgtaattaatatcactgaaatgcacactttacatggtttaaaaggcagatttgttatagattttttatcacaattttaaaatgtatttaaaaataatanatccatgaaatgttaatgtttttataaaaaatattttcatatgcaagtgagattgacagtaaaaaaaaattttttttttttggagatggagtctcactctgtngcccaggctggagtgcagtggcgtgatctcggttcactgcacctggcctaatttttttaaattactgtgtgggagatgagatctgtgctgtgttgcccaggtgttttcaaactcctgggctcaggggatcccccctcctgagattcccaaagtgctgggatggcagacaccagccacatgattatcatatgtcatgaaaaatacaaaagcccaaaaagtggtatattcatccaatgggatattattccaccataaaaaggaatgacatccttatcatgctatgtaaatgaacatgggaaaacctttatgataagtgaagtaggccaaactgaaaggccgatttggttgaatatacttttgggagtatatagattggcaaatcctaggccgcaagtgcccagaggttgcgtgaccgaaatgggtatgcaccagcggggaacaggggaaccccggtaagggaaaggattgcccttataaaaaaaatgccggtgcggactgacacgagg

SEQ ID NO: 485190 - DNA, 93 bp, Homo sapiens
cggtccctgcccctgctcgcggcccgccctcggcgcccgcggcccctccctcaccctccgcgctcagcctttctctgctgcgagtagtgacta

SEQ ID NO: 485191 - DNA, 885 bp, Homo sapiens
gccctggtgtgattccgtcctgcgcgttgtctctggagcagcgtctttaatctccgtccgccttctctcctacctaagtgcgtgccgccacccgatgaagattcgatggacatggacatgagccccctgaggcccagaactatcttttcggtgtgtgaactaaaggccgacaaagattatcactttaaggtgatacatgatgaacaggcagtccaattaaagtaccactgcactttgaaaatgtctgtacagccaacgtttccccttggggggctttgaaataacaccaccagtgcttctcaaggttgccgtgtgttcagggccagtgcatattagtgacagcacttagtagctgtggaggaagatgcagagtcagaagatcgaagaggacggcggatgtgaacactctttaagtatatctggaaggcggtctgcccctggaggtgttagcaaggttccacagaaaaaagtaaaacttgcgctgatgaagatgatgacgatgatgatgaagaggatgatgatgacagatgatgcatgatgatgatttgatgatgaggaagctgaaggaaaaagcgcagtgaagaattctatacgagatactccaggcaaaaatgcccaaacgttaaattcgaatggaaagactccagaacatcatcaaaccaagattaaaagggccagaatccttcaggaacggaaaattctaaaaaccaaagggccagttttgtgagcactttacccacaatgcgccgttttaaacggggtttctccagggacccttccattgggaagtgcgcgaggcaacggtacacactccgggggcgttcaagaaaagtaacgccttttgggcggtaggaagaccccgtttgttcggacacgcactacttg

SEQ ID NO: 485192 - DNA, 277 bp, Homo sapiens
ctcgattggaactgaatgggatgatttactttcgaagctcatgtaaggcgccgtatattgcatgttgcagcggcgcttcattggctttactggaaaggcgtcgaaggtgggatccactcctgagtcttctttctagtggaagaataaggcacatattgttctggggtgccagtcacgttgaatttatggatcggccaaatgaatttacgagcaggaagcggttttggcgttggaggatcatcagccatactgtgaagccgacgatgccattcagttg

SEQ ID NO: 485193 - DNA, 809 bp, Homo sapiens
cgtggatcctgcccgggagctgaaggttctcatcaatagcctcctggagctactgaccgaggtgggggtctctggccaaggccgcgacaatgccctgaccctcctcattaaaatggtaccccggaaatcaccaaaggaccccaacaatagcctcacactctgggtcattgatcaaggtctgaagaagattctggaggtgggcggctccctgcaggatgctgctggtgagctcacggtgacggcaaacagccgcatgagtgcctccatcctcctgagcaagctgtttgatgatctgaagtgtgatgccgagcgagaaaacttccaccgactctgtgagaactacatcaggaactggtttgagggccatgggctggccgggaagctacgagccatccagacagtgtcctgccttctgcagggcccatgcgacgctggcaaccgggccttagagctgagcggtgtcatggagagcgtgatagctctgtgcgcctccgagcgggaggaagagcagctggtagccgtggaggcactgatccacgctgccggaaagccaagcgggctcgttcatcactgccaacggtgtctctctgctcaaggacctgtacaagggcagcgagagggacagcatccgcatcagagcactagtgggactctgtaagctcggatcgcgtggagggactgacttcagacatgaagcagtttgcttgaaaggtccaccctcaaatggcaagcaatgccgaaagtgggtatgcaatgaccccgatgttgccggtactcccggccgggcaagggaggggctgggttacccc

SEQ ID NO: 485194 - DNA, 357 bp, Homo sapiens
cggaccccttagtctacactcatttcttccctcccactaggatttcttcccaatctgacgctctcaattccattccagtctacaccccatattcctgtttcctgacttcctatctctgtgaacttcttctcatcagtcctatcaattaagtcaggtctctcatatattaaaatacactactcccttgacaacacaccccgtctattaacaccctgtcaatatccaccccttttatagccgagctttcacaacgcatcacttccccagcaataaccacttcttccattcccatatactgcactgcctatgagaatctagtcttctgcctccagcactatatagtagggaaatattcct

SEQ ID NO: 485195 - DNA, 375 bp, Homo sapiens
  misc_feature (39)..(39): n is a, c, g, or t
  misc_feature (74)..(74): n is a, c, g, or t
  misc_feature (77)..(77): n is a, c, g, or t
  misc_feature (89)..(89): n is a, c, g, or t
  misc_feature (102)..(102): n is a, c, g, or t
  misc_feature (110)..(110): n is a, c, g, or t
  misc_feature (115)..(115): n is a, c, g, or t
  misc_feature (122)..(122): n is a, c, g, or t
  misc_feature (132)..(132): n is a, c, g, or t
  misc_feature (134)..(134): n is a, c, g, or t
  misc_feature (136)..(136): n is a, c, g, or t
  misc_feature (142)..(142): n is a, c, g, or t
  misc_feature (144)..(144): n is a, c, g, or t
  misc_feature (149)..(149): n is a, c, g, or t
  misc_feature (156)..(156): n is a, c, g, or t
  misc_feature (169)..(169): n is a, c, g, or t
  misc_feature (233)..(234): n is a, c, g, or t
  misc_feature (269)..(269): n is a, c, g, or t
  misc_feature (281)..(281): n is a, c, g, or t
  misc_feature (293)..(293): n is a, c, g, or t
  misc_feature (301)..(301): n is a, c, g, or t
  misc_feature (310)..(310): n is a, c, g, or t
  misc_feature (349)..(349): n is a, c, g, or t
tcgtttctgcgttcgtcgtgttctcttggtagtgtttantgtttgggtttttcctgctgaggaatgtgcttttnctntgtgtttccagnttcattttcggcnagtgtttnttgcntcttacnaggcaccgcntntnttgtcntntccanctgtttngtcattttttggnagatgggtttggctgcttttcgtcctgcatctcgctgtgctttaggcattatcattctggattnnttgggttgtgattaagatctagtgtggacttgggntcttctttcatnatttatttttcnttattatntattttgtntttctgttttcttaaataggaaatgtttctataaacctntaatgaacaatttaagttgggatttt

SEQ ID NO: 485196 - DNA, 481 bp, Homo sapiens
ggccgtccaaaagtaaaagttgagtatcctatcatgtcaagcacggaccctgaaaatgggctcatcctcgactgcattcagcgaagccaccagaacacgtggaaagtgtaacatgccatcttgatttttcgagctgatggaggtgtataacacccgcgtatagcttatggcctgggcttggcttggactgttggacgagttctttatgcttatggctattacacgggagaactcagcaagcgtagtcgaggagccttggggtccatcgccctcctgggcttggtgggcacaactgtgtgctttgctttccagcatcttggttgggttaaaagtggcttgggcagtggacccaaatgctgccattaaagaattataggggtttaaaaactctcattcattttaaaagactgacctttatttccatctgcattttttttttgaaaacaataaaaacttgcctggcatcagcctaatgcctaaa

SEQ ID NO: 485197 - DNA, 141 bp, Homo sapiens
gctcagtgatctctgggctcagtgatctccatctggctccatgtgctgaatacaggcatgagcaccgactggctctccttagaatgtgtaagtgtctattggataaaagtacctttgaaatggtctagagatatccacatc

SEQ ID NO: 485198 - DNA, 478 bp, Homo sapiens
cacaccacctgagtcctgtttaatattagtgcttctgaatcaaaggatttatgtttcctccttcaccttggatctaagtcccagtttaatgacccatcagaggaaacctgtctgtaactgagaggcagtaacccttcactgtttcccagatccctcctactttccttctcatctttttcttatgtctaccctgtctgtacttgcttcctatgcaatgttcatcactttgtaacctcactgttatcacttcaaaagagtgtagttttgtttgttttgaatcagggaaagtaaacttatacctcaagtcagtcaaaagatgagaaaaaagaacaatgaagcaaaacttttttttgttttctgaagcaaaacactttaaaatcttgtttgactcaattctgtatgtttaaattacgacttctatggataaaacaaatacttctgaagtagaaataccatccttactgtttcctttcatcct

SEQ ID NO: 485199 - DNA, 220 bp, Homo sapiens
aaaaaaaggggccctttttttggaaaaaatgggggaaaaaagcccggggttttttcccccaaggttagggggttttttgtaagggcaaaaaattttaaaaaaataacccgccccccccccccctttttttggggggggatgccccctttttggggttttttgtttccaggggggccggccctgttttaacccggaaaaaagggggttttttgttttgcca

SEQ ID NO: 485200 - DNA, 286 bp, Homo sapiens
tttatagctacccgctgtatgggctctccttcctgcaccacgcctgggaggtttcgggctcctctgtgggcattccatgcctgcaagctagacggtcataggccagtttcctttggcacatagagtttgagacgagaaccactgaagacgtattccaccactagcttcagaatcgatcctgcccgctggtagaacaggctgtgaactgctttgctttctggggtatccccagatatctcctgcaacacggtggacttgcgcacttcctgtcttgctcatgctatcc

SEQ ID NO: 485201 - DNA, 309 bp, Homo sapiens
  misc_feature (83)..(83): n is a, c, g, or t
aaaaaaagggggggtttttttaattgatgttttttatgaaagcctgaaaagccaaggttaaagtttccccttttttcaaaaanggccctgattcaaaagcctcctccctctttccatggggaaaattggaaatgatgccccccctttccccccaaattttaaggggtcccgggcaaagcttttttgttgggaatcagctgacccctgcaaatgtgttttttctcccaccccttttagttttaaaaaaaaaaattcctaaaatcccgtttgcctttcctttccccccgggaaataaaactttgtttttga

SEQ ID NO: 485202 - DNA, 387 bp, Homo sapiens
  misc_feature (43)..(43): n is a, c, g, or t
  misc_feature (338)..(338): n is a, c, g, or t
  misc_feature (344)..(344): n is a, c, g, or t
  misc_feature (350)..(350): n is a, c, g, or t
  misc_feature (359)..(359): n is a, c, g, or t
  misc_feature (373)..(374): n is a, c, g, or t
atagaatcacagatctgagagttgaaagaccagcactggtcantcgggcccaccctctccagtgccctaggggaacatgccagtgcagttccagtttgcctttgttaatagggccaaaaaaagtctgaggcttggcttccaaggagtattagagttcaacaaattctcattctcaataggcaggcgtgaaacactcttaacccttggctcactccaccagcacatgtgtttgaagccccttagtcttcactaacacactttctaaagaagtagaaggaagttgtgatatcagcactgaagggtggtgaggaaaaaaatgggtgggacccaaacaccantggganggaagntcatggganagtatttgactccnngaacattaacaag

SEQ ID NO: 485203 - DNA, 123 bp, Homo sapiens
caatcgctctagctcagaagtggagtgagcctgggcaacatggtgaaacccgtctctaccagacaaaaagcagccaggcgtggtggcacatctgggtcccagctacttgagaggctgagccag

SEQ ID NO: 485204 - DNA, 954 bp, Homo sapiens
gatccctcaaaacaataataatttagaaaacctaataaaccctggagctgtaattcgagcgtagggccaccagatggcagcggagcataagtcacaggctccgcgctgcaccggaaagaagcgccttgctagatcctgccgtggggaagaagggcccggagtctatacacgcgggtatagactgcacaacagattgaggaggaggctcagctcagacggctaagccgtttattctcaatcacgtgagtcgtcagtagcaggaggcggacctgactcaggcctgctgagcgctcaggctacctccagggatgtggaaccagacagctccttgttcctgacccaaagacggctcatctggatgtttaaatgtcaacaatattggcctctacccaaagctttaagtggaaaatctcgaatatttctaactgattcctctttcttctgccgccgggccctaagcccgcagggcccgtccgctgtccttggaaatgcctctacaaaaatccccgccgcctttctgttcaataacgtgacgttagccacatgctcgctagtctcagggattcagaaatgtcaactattctctcctcctttaaagattttttaaagggtaaccaagtccaggtaaattttatctgaaggaattcttaacttacaggaacttctaaagctggtttatacccaagttagagtagaaaggtccctggatggctcctgttggactggcagggaaagttctagcacgcgtgtcttcttgctctagcctaggtgggtatttaactcagatggcccgagcccagtcgtggagtgtcaagccacaagtgtgaggctgggcttgaaggtcggagtggcccagactggctgggcaccagcggggtttaaatgccggtccaatgtccgcagggggaggagtgaacccccctggacgaggtaactcaaaggcgggcacaagtg

SEQ ID NO: 485205 - DNA, 1664 bp, Homo sapiens
  misc_feature (365)..(365): n is a, c, g, or t
  misc_feature (473)..(474): n is a, c, g, or t
tcctggttttcaagccaatattactggcttacttttcatggtttcaaataacccaaatactataatttaagcactgggtaaattatctgggaatttccccaatgtgctttagttctccgtggacctctcttcttctccccttttcttcttctttataattgagggcctatagggtggctcctcattcttcattcttcgtgtggactttttaggtgccatctcacatactgtggagtgtagtggggtgtttctcttgctcctttgaggatctcccatctcgtatctctataaacttctacagtgtgtcttatgtgttatttctcacactatatccctatatgtgtcatctctatctctctccccancttgtgtgagatatattttataactataggaggaaaactctccaagaacttttataacacgcccctgtgtcaaactgtgagggctctcccacaaaacagtgtgtgtcnncccacaaaacgccacacaaaatctctgtgggtcgtcccccacaaatttcatcagcggtataatttctccttctcccttctcccacatgtgtggctctcaagatctcaaagggttattttgtgagaggttatacccccctgtgtgaaatatttctctctctataattcctataaaaatctcccccacatttcgtgggtctcctctctcgaaactgtgtgagtggtgcgttatgtgttaaaaaaggtgtgggccctcccaaaagagatgattgtgtgcccctgtgttttagggaaaatctcccgcgtgggaaaacccttatgtgaaatttattgggtcctctctgggcgctagtggcccacaaaagagggggggaatctctctcacacgaggtagtgtttgctcttcacatctttcatataaaacctctgtgagagatattggggggaaccgagaatattaatccccgtgggggaaacgaatcccccttggggtgtggaaggccccccaatattccttaaaattctcactcgtgggaaggttctttcaaacccaatattccccaggtaggggaacccccttctctatagggccccaacagtgtgtcccaggaggcggcaactacattttcctgcggcattctacttggggcacaagcgggggcaacacggccggaaaagggggaaaagaaaagggtgttccccctccctcaaggggagaggcccagtggaaaagaagtggttcccccccccctgtattttcttggttcgctttctctcataacccacaacgcacactgttgcttgttgctgggtcgccccgaaagagggccctacagggcccaaggagccccacaaggccaatttggggaaaagaagccaccgggccccaaggagagacatgtgttgcgcccatttttgtcgcgagaagaaaagggcctcgcttgggggggggcccagcgatgaggtgagggaatgtggcgcccgcgggaaagaaaaacaatccctgtggtccgttaccaaacccagggcggggccgctctaagcccactgattgtagttggtgttgtgtcgccacaccagacacaggaccactgactcagaggtggccgatcagcaagacagttgtagcccccctcattaatagagacccaacctagcgcgtgaacaacagttgcatagtagacactcact

SEQ ID NO: 485206 - DNA, 183 bp, Homo sapiens
  misc_feature (65)..(65): n is a, c, g, or t
  misc_feature (69)..(69): n is a, c, g, or t
  misc_feature (122)..(122): n is a, c, g, or t
  misc_feature (157)..(157): n is a, c, g, or t
ttttctaatccttgttagactactgatttaaagaaggaaaaaaaaagccgaactgctgtagagcncacntcagagtttagttttataataaaaactggtttgaataattagacctttacatncctgaagataaacatgtaatcttttatcttatttngcgtcaagtaaaaattgttcagaaga

SEQ ID NO: 485207 - DNA, 119 bp, Homo sapiens
gattggtggggaacatcccatgagcctttgtaggatcttatcctcttaggtactaatactgcgagctgtggcccctctctaccataaatcctgtttaatactagctggattcctctaag

SEQ ID NO: 485208 - DNA, 565 bp, Homo sapiens
  misc_feature (261)..(261): n is a, c, g, or t
ggtgaacaacgcgtatggagtaacatgtacggaactagctccaagactcacacaactgccgttcacacacatcactattcctaaggcggtatccgttcccctccactttaaaaaccttgtgatcatgatctcatgtgggatgctggagcatctgcagctcattccactttatcaatcctcttgatgttatgttgtgggtattaagctaagcatgtgacccgataattacttaacccaaatctctagctatgtacgtgatgngtaacatggtgaattctaccttaaagaaactggggcttagagcagtgcagtgactttccctaggttattcatagagtaggaatagaattagaacagagactgagatctgcccagcaccaggctctgtgcttcccagcttctgcttttgcctggctccttctgcttgcctgtgggtgagcgctcacaaaagcagaagggaaaaaatcacacgctacagcataactgagccaatgctgagaattacaaaatttaaagggaaatttaaaagacatttaagccaacccctctcacaacaagagaatca

SEQ ID NO: 485209 - DNA, 847 bp, Homo sapiens
cagtatgcatcacagaataaggagttggccgtgtaaggacaatatccccattcgtcatgctcttattttcccgtgggatattgcatacaaatgcatgtctgttaccaaaatatgtgtaacacagacagaaaccacctgtattgtctttccttgtttcccttaatatgtcatgaatgtctagcaaaaatggtaggatgcttctgtagttcacaagtgtgacatttcagagactttagaggaaaaatgatttgaaataagctgtcaactgtttcattgcttttgtacatttttgccacgtgcataaccccctttagaagtaaatttttacactattgggtgtttacaaggaggcatttctacttccttgagttagctgtgccaaactaaaacatttcccttggaacatgagttataagtgattacttttcctttagatgtatacacttttataaaaatcagatttttcagtggtctctccagatataagcaagaattgtgtgtaatcaaagatgcttttatagacttgatgtcacaatgcttaagttcacgcctttcctatcaatcacaaatcatgtatgggaactcaataaatggaaccaaaaactgggtttcacaaaactattgttggatatccatcgatgtgcttgcacactatatatcgagtgactttctggacaagtttatccacggacacatccattggccaaaaaaagattgttcaagtggccacctagctcctcacaaaggggggggaaacgcacatcaacgggcttagacatgtaagggacggcctggacactgtggtccgttacttattaactctgacgcaagactcggaaaatccagg

SEQ ID NO: 485210 - DNA, 166 bp, Homo sapiens
tgatcacaggtattattattggctcagaagtttcatttgtggaaaaaactaaagattcttggttatatactggagatgatgattcactatcgttctcctgtgtttgaaatttgagatctgaggccgggcgcggtggctcccgcctgtaatcccagcactttgggag

SEQ ID NO: 485211 - DNA, 146 bp, Homo sapiens
cagtgaaaccttgtcagcagcagtgtggtcccttagccccacaggtcttgtctgcctgcatttggacatcagccaaatttgggcccgatcaactataacgtgtatgacactgaaattgttttgactcaataaatgtataggcttca

SEQ ID NO: 485212 - DNA, 95 bp, Homo sapiens
  misc_feature (3)..(3): n is a, c, g, or t
  misc_feature (5)..(5): n is a, c, g, or t
  misc_feature (21)..(21): n is a, c, g, or t
  misc_feature (23)..(23): n is a, c, g, or t
  misc_feature (41)..(41): n is a, c, g, or t
tgnancctcccgctttgccanangcccctccggtccagcgnactggatgctccgcctatctaaggtcccagtggaagttcttccaagaggatata

SEQ ID NO: 485213 - DNA, 135 bp, Homo sapiens
ccatcgagatgtactcagagaaaatctctgtatgagagctttgtgtcttctagtgatcgattcgagaactaggaccatgatggagaatgaggcagagggcccaggtgtgtggtgatggtccccctcgaagctttg

SEQ ID NO: 485214 - DNA, 174 bp, Homo sapiens
gggtgatctagcggatcccttgtactatgtacaactatagctacttgtataaaatgtactctcacctacatgctagcatgattcattttttttttccaggaaacagaaaatgtcttggtcgggtattaatattcaaaagaatttaacttttaaaaactgatccccaataaagca

SEQ ID NO: 485215 - DNA, 712 bp, Homo sapiens
gtgcagtcacgggggagcgagggctgctgtgttggcaacgagggactcggctcgtgagggcgacccagaccacacagacactgggtcaagggagtaagcagagtgaataaacaactggaaaggagagccaagccacaaaagtcatcatggctttcagacgtctgacttcgttggaaaacccaagattaaagattgcccatttttcccaacccaccaaagccaaagcaagaagccctgttgtgttttgggtccaaaaaaatcaaaagaatgcaccatttccacaatgatgccaggaggattcttccaaagaaggattttattgcccgaagaacttggttcagggacagaacagggttttcctggaagcagaaggctctgtgccttttatcctcttgtggtaaagcagttgcctttgtggtcaaccccccaaggggaacctaggttcattacccaaagggtttacttttgtgggcgaggctaaatttctaagaattgttgggattcatttgcccaaaaagttttgccactttggctggggtctcctgtgggagaattgtgggcccttgggaaacgggtattcattacataaggcgcacgttattgcccaagagtaaaattcccaatttttttttcgaaggattccaagacttcccggtgggggcgctggggtttgtggggtcccaaccaatgccattaaacacagggcacaact

SEQ ID NO: 485216 - DNA, 934 bp, Homo sapiens
  misc_feature (452)..(452): n is a, c, g, or t
  misc_feature (455)..(455): n is a, c, g, or t
  misc_feature (613)..(613): n is a, c, g, or t
  misc_feature (712)..(712): n is a, c, g, or t
cccggagcgagcggatgggagccgccacctgtaggggctccaggatccccagcggccccccagtccagggggaacgcagtgcgccccgcttcggtgttacttccctcagcctgtggccagcggacttcaaggataactggaggattgccggctccagacaggaagtggccctggcaggtgagcctgcagaccagcaacagacacatctgcggaggctcccttatcgccagacactgggtactcactgccgctcactgcatctctgggtgagggtttggggctcagagcttgggccctgatcaggctgtgggacctggagccagtctgtccccctccctgaacttcctcttcctcatctgtaaaagggggtgacagccccatagtttttatccagtctgggtgagacctgaggatttgtatttctaacaagtttctgggtgttgcctccgccnctntctggggactactggctaaagtggtcagggtcctggagggatgtggcttggagagagggaggtagctgctggctggcataggaagatggtaccaggcgggaagcacctcgaaggtgtggaagcagagtgtagaccctggaggatcttcctgcagccanctggaatacacagtgaagctgggagacacaaatgtgcatcatcgctccaaaacagcacttgtggtcccagttcgtgacgtcgttatccaccgatatttnacgtctcctggaataattgaaaatgacattgcccttgccctgcttgacttccctgtgaattactccacgcacatccagcctgtgtgcctccctgaacaggctttcatggtgcaagctggtacgaactgctgggtgaccggatggggcaaagtaaatgaaacagattctcaaaccaagagtaattgtgaaactctccagtgcgctgggaccagggaaccaagg

SEQ ID NO: 485217 - DNA, 323 bp, Homo sapiens
gctacgacagccactgtgcccagcccctaccagatgtattctaagtggccgagtgcagtggctcacgactgtagacccagcactttgaggggctgagatgggaggattgcttgaatccaggagttggagaccagcctgggcaacatggcaagacttcatctctactagaaatcacaaaaattagctgggcatgtgtcagaagtcccagccacttgggaggctgaggtgggagagtcgcttgagcctgggaggtccaggctgcagtgagccattatctcaccactgcactgtagactgggtgacagagcaagaacctgtctcag

SEQ ID NO: 485218 - DNA, 584 bp, Homo sapiens
agcaaatggaaagatatcctatgctcatggcctggaagaattaatatagttaaaatgaccatactgtcaaaggtaatctgcagattcaatgcaatccttatcaaagtaccaatgacattttttgcagaaatagaaaaaacaatcctaaaattgatatgcaaccacaaaggaacccggataaccaaaccaatccagaccaaaaagaacaaagctggaggcatcacactacttgacttcaaaatatattacaaggctatggtaatcaaaacagcatggtattggtatgaaaacagacacaaagaccaatggaacagaatagagaacgcagaaataaatccacatgtttacagacaaaactgattttcaacaaaggcaccaagaacgtacgttggagaaaggacatcctcctcaataaatggtattgggaaaattggatatgcatatgcagaagaatgaaactgcatctctgtctctcatcatatacagacatcaactcaagatcaattaaagacttaaatgtaagatctgaaactataaaagtactagacaaaaacctgggggaaacactttagtacattggtcta

SEQ ID NO: 485219 - DNA, 261 bp, Homo sapiens
aatgcagtggaggtgaccgggaccgagctctcatatcctgctcggaacctggtgaccacaccatgttggctgcaagagtggtgtgtctccggatcactatcttctagggttggcacgccagatttcatccgaaggatctccgcatgttgtgaagaattccatcacgaagaatcaattggctgttaacaagctagcaggtccctcccccctacatccctccttctcgttttcggtttttttctcttattatatactaatttt

SEQ ID NO: 485220 - DNA, 279 bp, Homo sapiens
aacgggtgatgcggttggcttcatagcaaaagctaactgatatacaacttttctttttctgggttttttttatttcctgaaaagggcctggtgttcaccttgccctcaaggggggaatgccgtagcacaataataactagctgaccttggaaactcgggggtaaaagaaatcttttggcttaagctttcaaggaacttgggcccacgggggggggcccccttccctccaaatggttaaaaacaaattttttaaatcttttttaagcttttgggtaaaaa

SEQ ID NO: 485221 - DNA, 157 bp, Homo sapiens
aaccccccgggggccctttgggggggcccgtttaattttttttttacccctttaggggcccagggggggattttgggttgggtttttttcgggtttcccccaaccgggggtttttttaagttttttttaaaaaaggggggattttttccccccccca

SEQ ID NO: 485222 - DNA, 778 bp, Homo sapiens
cagcatgcccttgcccgcgccagatgaagcctaagacatgagaggagagaagaaataaaagcggcatgtagtttgcaaatcaggtcatttaagaaccggacagatgagctcccaggaggcaggactcctcagccagaagattagcttcagacccctgacacatttcccaaaggaagaaaggagaaaaaagggcatcatcccccttccgaagggtccgggaggaggaaattgaggtgggattcacgagttgcggaccactccctttgatcccagcgaggtgccaacccggagactggggagagcgagcccatcaggttttgaagttcacccaaggccagtcctttcggcatgagaaacccagaagaagcggggccagctacccgggaggctccatctctgtcccaggtccaattcttattaaggttgacagcgagtgacctgagacccatcttcggtgaagccagggtgatgatcggagactacttactttctcccgtggacctgggaaccctcaggtctctaggtgagggtcttgatgaggaccagaagttttagagtaggtcctaagactcttaccagtgtaaccatacctctctggtccctttctgtgttcctagattttgtacagacttgtttttgagtgttgagtagcacgggaccaaataaggggatgttattttttaagaaacattcattttcattgttgtctccttccttttctgtgaaagtcctcatactgagaaatttgtatattttatattaaatcacttactattga

SEQ ID NO: 485223 - DNA, 596 bp, Homo sapiens
ctgaggaagacccggaaacttaggggccacgtgagaccccggccccggccgcatatggccagcacccggaagcacccccggcggcacccggtataatgtctggtgtgtctgcagtcacccacccggattccacgttcgacccaatatccacccccggctaactcttgggaaaatgtggtatgaagcacttagccaccttataagaggaaccacgagctttctgcccacaactgtcacacccttgacccaattttggaatcttggtcacgtgaaccacgaacaccgggtgaatgctgctaaaaacccagacttggggctgctgcccactcattgatgtggtgcgatcgggctactatgaaagtttctgggaaagggaaagcttccccaagcagcctgtgcattcgtgaaggcccaatttctttcagcagaagagactgaggagaagattaagaattttgggggggcctgtgtcctggtggcttgaagccccctggagggagtttccttaaatgctaactaccttatgaaagaaaaataaaaaaagactcgagcataaatctcggtccgagaagagatgatacctcccttttctgtta

SEQ ID NO: 485224 - DNA, 243 bp, Homo sapiens
ggacccggaagggtagctgttactgacttcatcctcctatttagaagttgaaagagatgcatttactgttgtggaacaagatgtgtccttccaccggctgtttaattgtcatgataacagtaatttggttagaagaaggtgctctgttaaccatttgccaaagagattgtcataattgtacaacttttcccaagtgcaagggctcagcatgattataataaaaaatatgacaaatgtttcaca

SEQ ID NO: 485225 - DNA, 1009 bp, Homo sapiens
  misc_feature (38)..(38): n is a, c, g, or t
  misc_feature (70)..(70): n is a, c, g, or t
  misc_feature (78)..(78): n is a, c, g, or t
  misc_feature (95)..(95): n is a, c, g, or t
  misc_feature (116)..(116): n is a, c, g, or t
  misc_feature (157)..(157): n is a, c, g, or t
  misc_feature (186)..(187): n is a, c, g, or t
  misc_feature (203)..(203): n is a, c, g, or t
  misc_feature (220)..(220): n is a, c, g, or t
  misc_feature (224)..(224): n is a, c, g, or t
  misc_feature (231)..(231): n is a, c, g, or t
  misc_feature (233)..(233): n is a, c, g, or t
  misc_feature (235)..(235): n is a, c, g, or t
  misc_feature (248)..(248): n is a, c, g, or t
  misc_feature (252)..(252): n is a, c, g, or t
  misc_feature (254)..(254): n is a, c, g, or t
  misc_feature (261)..(261): n is a, c, g, or t
  misc_feature (266)..(266): n is a, c, g, or t
  misc_feature (268)..(268): n is a, c, g, or t
  misc_feature (278)..(278): n is a, c, g, or t
  misc_feature (280)..(280): n is a, c, g, or t
  misc_feature (285)..(285): n is a, c, g, or t
  misc_feature (295)..(295): n is a, c, g, or t
  misc_feature (303)..(303): n is a, c, g, or t
  misc_feature (356)..(357): n is a, c, g, or t
  misc_feature (359)..(359): n is a, c, g, or t
  misc_feature (368)..(368): n is a, c, g, or t
  misc_feature (370)..(370): n is a, c, g, or t
  misc_feature (374)..(374): n is a, c, g, or t
  misc_feature (376)..(377): n is a, c, g, or t
  misc_feature (391)..(391): n is a, c, g, or t
  misc_feature (395)..(395): n is a, c, g, or t
  misc_feature (411)..(411): n is a, c, g, or t
  misc_feature (413)..(413): n is a, c, g, or t
  misc_feature (418)..(418): n is a, c, g, or t
  misc_feature (429)..(429): n is a, c, g, or t
  misc_feature (433)..(433): n is a, c, g, or t
  misc_feature (439)..(439): n is a, c, g, or t
  misc_feature (441)..(441): n is a, c, g, or t
  misc_feature (443)..(443): n is a, c, g, or t
  misc_feature (447)..(449): n is a, c, g, or t
  misc_feature (452)..(452): n is a, c, g, or t
  misc_feature (456)..(457): n is a, c, g, or t
  misc_feature (459)..(459): n is a, c, g, or t
  misc_feature (462)..(462): n is a, c, g, or t
  misc_feature (464)..(465): n is a, c, g, or t
  misc_feature (469)..(469): n is a, c, g, or t
  misc_feature (477)..(477): n is a, c, g, or t
  misc_feature (479)..(479): n is a, c, g, or t
  misc_feature (483)..(483): n is a, c, g, or t
  misc_feature (493)..(493): n is a, c, g, or t
  misc_feature (498)..(499): n is a, c, g, or t
  misc_feature (502)..(502): n is a, c, g, or t
  misc_feature (505)..(505): n is a, c, g, or t
  misc_feature (508)..(508): n is a, c, g, or t
  misc_feature (513)..(513): n is a, c, g, or t
  misc_feature (519)..(519): n is a, c, g, or t
  misc_feature (521)..(521): n is a, c, g, or t
  misc_feature (523)..(523): n is a, c, g, or t
  misc_feature (525)..(525): n is a, c, g, or t
  misc_feature (534)..(535): n is a, c, g, or t
  misc_feature (543)..(544): n is a, c, g, or t
  misc_feature (547)..(547): n is a, c, g, or t
  misc_feature (561)..(561): n is a, c, g, or t
  misc_feature (566)..(566): n is a, c, g, or t
  misc_feature (571)..(571): n is a, c, g, or t
  misc_feature (573)..(575): n is a, c, g, or t
  misc_feature (578)..(578): n is a, c, g, or t
  misc_feature (587)..(587): n is a, c, g, or t
  misc_feature (594)..(594): n is a, c, g, or t
  misc_feature (598)..(599): n is a, c, g, or t
  misc_feature (607)..(607): n is a, c, g, or t
  misc_feature (673)..(673): n is a, c, g, or t
  misc_feature (694)..(694): n is a, c, g, or t
  misc_feature (720)..(720): n is a, c, g, or t
taaaaattattaaacaaaacaagcaaaaaataaaagcnaaaaataaatgaattagagtgaaaaaaaattnaagaaaanaatcactaggtaagtangcaaattcttattctaaaaanacttctttaatgtgcttgaagcttcatgtatttagcaatantcttggcctcaatatctaccacctatttnnaaaccagacaaatttnaatgtatcaagaaaatnaggngcaaganantnacacccatatgantttnanccaagcnttgangnacattaagantnaaggnttataaaacncggctganttccatgcaaccagtaaaaggctttgcacatcatttgacagtagaaataaaanngnactaaattngnaaangnngcattgggtttgangtcnatgcgggtatatgggngngtgcnggggggggganaggnctgcgntngntctnnnggntaanngnggngnntgtntacaaaananttcnctcagatttngaaannganggnagngatanacagtnananangaggggtannatgggagnnggnacacagagaagganaaccntaaangnnngtnccagggtanagatatnaatnnagagtganttcgttagcaacacgtagacattcatacatatccggtggaagagtggtttctgagatgcgattgcnatccaaacgcaaatgcttgancttggagtaggataatggccccaggntcttgcagaagctctttatgtcaaacttctcaagttgattgacctccaggtaatagttttcaaggttttcattgacagttggtatgtttttaagcttgttataggacagatccagctcaaccagggatgacacattgaaagaatttccaggtattccactatcagccagttcgttgtgagataaacgcgatactgcaatgcattaaaacgcttgaaatactcatcagggatgttgctgatcttattgttgtctaagtagagagttagaagagagacagggagaccagaa

SEQ ID NO: 485226 - DNA, 763 bp, Homo sapiens
gggattggggctttctgaaagacagtcaagcgcggataatgcttactttctgtgttgaagcactgtggttgtggttagtgactgatgtaaaacggtttctgtggggaggttacagaggctgacttcagagtggacttgtgttttttctttttaaagaggtaaggttgggctggtgctcacagctgtaatcccagcactttgagatggctgggagttcaagaccagcctggccaacatgtcaaaactactaaaaataaagaaatcagccatgcttggtgctgcaaaaaaaaaaaaaaaaaaaaaaaaaaaaaacaaaagaaaaaaaataacaaaaaaaaacaaaaaacaaacaaaaaaaaaaaaaaaaaaaagagagagggggcggcgcggacgacgaaataaaatctctcctcagcagggggcgcgccacagtagcacagcgccccccggagtttttgttcgaaaacagaggggcgcctacaataagaaggacgagcgagtatatatacaaaagcgcgaacgcgcgcggcggcggccgcgtgtataacacaacacacaccagtcagcgaggcggggaggacaagacagcgagggagagtcggcgagagggccaccctacctgtgatcgaaggagagagaccgacccacacaccacctcgggcggggcgcggagggagagaaagaaaaacaaggggggggacagacgaccatactccacacaccgacggaagaacaaaacgacccctcgggggggacaaatacc

SEQ ID NO: 485227 - DNA, 125 bp, Homo sapiens
cagcattcagacaacaactggtacttataatcctgcaacacatacctaactttgaagatccatatacagccgctattgcttgggcgtactgaatacacaagcgcaaacggcattgccacaagcaa

SEQ ID NO: 485228 - DNA, 1316 bp, Homo sapiens
  misc_feature (372)..(372): n is a, c, g, or t
  misc_feature (628)..(628): n is a, c, g, or t
  misc_feature (829)..(829): n is a, c, g, or t
tccgctaaataggcgcggaccgctgagctagtccggcgtcatgaacgtggtctccggaacagacttctacccactctgagaaactgacttggttacaccgtctccacatctactgcaacggaatatagcctcgtacacaagctatccaaggatcccatacaaaccaataccacctctaaaagatctccgccaagatcagcgagatctaacctatgcaatactggagaaaacgagaaggacacgttgtagtcgcctctaaaccatgcggaaccaagggttgtcgaatacgagacaccttgcacgcaaccagacgtagcctaatgtagaatctgtgtgttctcctatcaccgatgactgtactgtagacgatangcccggctatcggcatcagtcttgtatatcctatatagtgtgaacctgtgcgttcaggactcacttctatgcgttctgcgactactgaagggattaactagctaggcaagcttactatccattctgaacaaacgatagttgactcgaatacaagcaagcaatccaggaaggtaactatctgaaaacgtgccttatatatgtggaacgtcacttccagctatgccgacgatggacgaaccttttcggaatttcaaanaagcgcctatgcttcccaaacgagaacaaaattgcggcagcaactaagagtggtggggtgagcccactttatactgggtgtaacccttgtcaggcccatggtcaccctcgcagttcgaacagaacatggagcgcggtttcactccggaagagaatactcgttgacatgcttgccgtgtaggcgcggaggtaatcatgtttncaacgctgcgtcacaagtaaaatggggtcacacgcaccttacgcacttgtatttgttcgtgtgcccaccctgagtgtcatccccgggttacatacacgtgggggtccgggaaccgccgtgggaacataggacactgtaccattaggcttaccgcagggaaatggaacatgctactggaacacacttttaggacaatgttgagttcaatttcaggggacccccgagactgtgaaactctgtgaggaggatagccccacatattgctagggttggaaagtaccttgcggattaacaccgtagtaacgggggcaacaggagaaatatcaccttccccccttggagacgaaaaatctgatatttggaaatggtgacctacatgaaaaacggtttgtttttacaattccatggagcttttaccgactccctgttgaacgaagtaagtcacgaaaaggggaaaccgggtttcacaggcttggggaaaaacttg

SEQ ID NO: 485229 - DNA, 276 bp, Homo sapiens
  misc_feature (125)..(125): n is a, c, g, or t
ctaggagtaaaacgagaatatgagaaaagagtttcggaccattgtagaacaaacgctggaatgattcataataggcaactggtctgttaatctttttcatcatgtgtgtgtataatttacctctncattagaaaggctaacataattttaagtgccacaggttttaagagattctgcaggacaaaaaaagaaaaaagtccttcagtttcagaacctacaaagagcttgtgtattcttgattaatggtatctattttattggcatgggtgtcgaact

SEQ ID NO: 485230 - DNA, 220 bp, Homo sapiens
tgtatggatgttcatgtggtgtatgcatcggggtagtccgacgtaccgtcggggcattccggatatggccgacgacacgtgtatgtgggacagacacacgttacgatttaccgccgactgaatatgatagtgacaatggactttggcgtaggtttggtctagggtgtagcctgagaataggggaaatcagtgaatgaagcctcctatgcggtaaaagctt

SEQ ID NO: 485231 - DNA, 193 bp, Homo sapiens
cagtaaaaggatcagtgggtgccaggggttgtggggagggaggaataaacaggtggagctccaaggattttttagggcaatgaaactcttttgcaggatcctgggatggtagatataggacattacacatttgtccaaacccccagaagggacaagactgatgaaccctaaaataaactgcagactttcctta

SEQ ID NO: 485232 - DNA, 1498 bp, Homo sapiens
  misc_feature (301)..(301): n is a, c, g, or t
  misc_feature (324)..(324): n is a, c, g, or t
  misc_feature (422)..(422): n is a, c, g, or t
  misc_feature (929)..(929): n is a, c, g, or t
gtcagcatacccagcatccacattaggagacttggacgcagattgacagggcctggaaaaagaactgagtaatgccagatacgaggcaccttggaacctcatgtgctcaatagatacgaaaggaagaaagtcagataggaagcgtatgtgcgtgcttctacacgttccactgactggcctgtgcatggtaagaacgaggctgcaaggtgcgagggcatggcgtgcagtatgtgcatgctctacgtagcatcaccaagagaaatcactaaacaaagaagtatgatacacgacaacgatgccntccacttagagatgcgtatcgcntggccatagactggacgagatcgtgggattttgaatttcgcatggacacatgtacctacttacccccgagccatgacttgtggacacccgacgcattnaatcaacccaaagggtagacggtacctataagcatatgctttcctgggcgcaaccacagagttgtcgtctttgccatgcgagccatatccccccacgggggtttccgactggaatacactttttcgaggggaccaaacgccagaagagaaagctagatccgagtttctgcctgggctaggaattagcttaaggcagatggggcacctcaggataagaatcggataccgggatgatcggggtcgtgctatacgtggtatgcggctctgttaacgaagagggcaaggcacgtacgcatcgagccctacgtgactcacgccgcaggtcctcgcgttgggaaaggctcttcccaaattgacaccacgattgctccacgcatgtaagcccttcttgaacgtaggaaggaacccaggaaaacttcctggcaaggggctggcgacaccgctggcgcacaacggggggctctcaccgcgatggatataaccgagcgacgcctcagggccttacgnaacacggaaaacggtctctttgtggcggaacaccgaaaggggcccttctgggaaaggcggggcgctcttacacatacaacgggtctttgggacacgaaccccctttgtgtaccccggcccctaattgtgggaaacggggttgggggggaacacctcgggcacaaagcgtcggttggcggaacacttttcgacttccaaccaagactggccgatttggccctttagccgttggagaggcccaacctgttgggcacgggggggtgcaacgaaccttggcaaggaccccgaggggagtggggcaacaacacccctttgggtgttagggcaacccttaaacccctaagaaaagaaggaattccctatagatcttcgaatctcgggcgcccaggaacatctcaaaccatcggggtggaacatttaactttaacttggcagcttccggcaaccctgggcttaaccgaagggttaaggcgatccaaacgtttgacccaagaaaggtggggacacatgttccactttttagagcgccttaacagtggggatctctccaccttggttcctttcctcta

SEQ ID NO: 485233 - DNA, 135 bp, Homo sapiens
tgctgtgtgtcctgtttctgtgtattgtgtgttttatgtgtgtgtgtgtatatctgtgtgtatatctatattagaatcccagtttttctgaggcatgggaaagttgagagtcactgatagggacatatggcgaaa

SEQ ID NO: 485234 - DNA, 333 bp, Homo sapiens
gagactgaatctcactccatcgtccaggctggagtgcagtggcgcgatctcggctcactgcaacctctgcctcccgggttcaagcaattctcctgcctcagcctcccgagtagctggaactacaggcacacactgccgcgcccagctaattttttgtattttttagtagagacagggtttcactgtgttgcccaggctggtctcaaactcctgagctcaggcaatctgcccgccttggcctcccaaagtgctaggattacaggtatgagccaccatgcccggctggcagttgtattttttaaagcccttctgtcgtattctcgccgccgtata

SEQ ID NO: 485235 - DNA, 328 bp, Homo sapiens
  misc_feature (253)..(253): n is a, c, g, or t
gggaaggtaggtcatgggcgggaccggacgctgcggctattcttgagatttaccacgtgcgttgcccacgagatgtgcaatttgccaatgtggacgatgtataaccgggtgcccaatggcgccttagcagaggcttgagccgtgtgatgggaaactcgcatgcacggctcttagggggttggacgcgggcaaccgcgtcagactacccgacaaccagatccggccatgggctcttgggcgcaagaactggctnttcgccgggtcgctacgcagcggaaaacggggtgcggcgatcatgagcttgatccagtcagcgcggctgaatggc

SEQ ID NO: 485236 - DNA, 344 bp, Homo sapiens
  misc_feature (215)..(215): n is a, c, g, or t
  misc_feature (252)..(252): n is a, c, g, or t
  misc_feature (261)..(261): n is a, c, g, or t
  misc_feature (264)..(268): n is a, c, g, or t
  misc_feature (272)..(272): n is a, c, g, or t
  misc_feature (274)..(274): n is a, c, g, or t
  misc_feature (278)..(278): n is a, c, g, or t
  misc_feature (296)..(296): n is a, c, g, or t
  misc_feature (301)..(301): n is a, c, g, or t
  misc_feature (310)..(310): n is a, c, g, or t
  misc_feature (329)..(329): n is a, c, g, or t
aagatgccctaaggctttttcagactggtcaagaaagagctagacctggtgcttggagaaaagacatctttggaagaatcctctggcccaagttcaagcagtgggttataccttggcccctaaattaaagatacaataggaaacgattttttgccttgccttatgtggacccttttttcagactggaacgtgagaaacgagcccgcatcaaagcncggaaggaaaatttagagagaaagaaagcaaaaattnttttaaaanagnnnnncatntngctnaagcccaaaagtcaagtnttgtntaagatgtntgaactattaaatttaccnttttgttttttttta

SEQ ID NO: 485237 - DNA, 688 bp, Homo sapiens
cgttttcgttcttcaatcaggtatgtgccatagaggaaaataaagtagagccaccccctgtaagtccttggaacccagatgaaatgtttaaaagaacctggcaatatatgtaatccaggttcctggcccttgcatattacggtgggatatacaagagctgataaatagtgcatctgttttaagcgaaatggaaaggtgtttgttaattaacgcacatgcacaccaaggtgcgttctttgagtgtacatgaatctgcgatcgcaaaaacattttcttaagtagctaagggtgaacggtttgggctaatcatctacctaagatggtgcacgaagggcagcttatacacgaatgaaagcggtctacctgatcactatgggtggtacacaggacttttcacgatcaaatattggagcagaggtaagccaaaaatgcatgccctgtgcgccccccgggtttaggattaaggaagcaattcctagctgcccaaacggagatcgttaggtaacgtcattaacccgctgccaagcatataaaatgggaaggataaaagggagcgctggagggtgcaagttttatcagctacccgaaagaatgagggaggtgaaacgctaaaacccaggagtttaaggttacagcgggtcaagaaggcgccacagcagtccagctagggtgactaaggcaaaactcc

SEQ ID NO: 485238 - DNA, 211 bp, Homo sapiens
gtcacgaggatctccgtatctctaacattatgtcggggctagttcaaaaccacgtaatgaaaaagtcagttttacaagcctcattctagtgtatctttctatttgatcatcacattaacgttaaacattggcttcaattatttaattcatgaggatctttcatattaaaatttcaccttccgattcacccgccaggtgctttaataaagga

SEQ ID NO: 485239 - DNA, 291 bp, Homo sapiens
actaaagcagcagcctaaaatcgctcattgcatactcttcaatcaggcgataggcctcgtagctccagtcattctcatcagataccgccgttggctgaccggcgtctgtcattctcataatcgcccacggacttacatcctcattactattctgcctaggcaaactcaaactacgaacgcactcacagtcgcatcataatcctctctcaaggacttcaaactctactaccactaatagctttttgatgacttctagcagtccttctaacctgcctgggacacgaatgttca

SEQ ID NO: 485240 - DNA, 334 bp, Homo sapiens
cacctcccatagttctgccgggtgacccattcctttgggtgaagccccacccccgctcaacgcaacttgtgaacaaccacatggcaaatatggctctaaagcccggctgagctgacacacatctggttgttgttggtttgaaatcctctcacagttagatgatctcaggtcactccaggccaaagcttgatcatgatcacacccggcgaaaaaacagtctgaatcctcgaaaaacctggcccgcacaccaggtctccagcagtaaccagtttcctctggaagtaagggggagccagcttcagccccagtgttctccccatagtctaaacaccga

SEQ ID NO: 485241 - DNA, 127 bp, Homo sapiens
gctgtgctacctaattgcttttttcttttttcctttccaactttctgtttcatagaagggagtggggctggggaaagggctggctgcaattgcagctcactgctgctgcctctgaaacagaaagttg

SEQ ID NO: 485242 - DNA, 1384 bp, Homo sapiens
tggggggggcgcacgaggagacaccacccccggcgaaaaaaaacaccacccccggcgggattagccaaaaaaaaaaaaaaaaaaaaaaaaaaaaaaaaaaaaaggggggggcgcacaaaaaacaccccaggaggggcacaaagtctacagcgggcgcccaccactagttaggagagaagagggggcgcgcccccacacaagagagggagagcgctaaacaaacaaaaagaagagagagaggagggcgaggagcagagcaccacacacaacacgaggggagagaagaggagagaacaacgcgcgcgcagcacagcgagcggagaaaaaaagcgggagagagagagaacacacaacaaacacgcggaggggggggggagcacaccaaagaggaggggacaaaacaaaaaacacaacacacacagagacaaacaaagacacacaaccaccgagagagaggaagaaacaaaacaaaacaaaaacaacacgcagagcgcaggagacacgaatagcgcggcgtgtggcacaaccacaaccgaccaccgacgacagacacaaaaaaagaacgaagagaagacagcggaagaaagagaaagaaaaagagcagcagcgaagcacaagagcgaagagcacacaaatcaacacagagacagcagcaaacaacacccaacaccacaacccagcagacacaaagaagaaaacggaagagtgaaagaagaaagaacagaaccagcagagagagacgagaagcgaccagagagcagccgaccgcacacaaagagcgcaccgaacacaacaacacagacccgaccagccacgcgcaggcgagcacacgacagcagaaccagagcaacactgacgaacgacagacagacgacagacaggaaaaacagagaagacacgagcaaagacacgagagccgaaaacgacgatgcagagaagcagagcacagcggagcgatagaaagcaaccacgcacacagaagggaagagagaaaagagacagcaaaaggagagaaacaggaagagagaaaagaaaacgagaacgaggaacagaagagagaacaagaagaaagagcaagacgacagaacaagaagacaaaagacagaagacagaacaagagacggtagaaaagccaccgcacaacccacacgaacgcgcacgaaggaggagaggcagcgaagacagaagcacgcgaaaagagagcaacaaccaaagcagaaaagaaaacagaaaagaacagacgaccaacaagcgataaaggacaaggaacggaagaggaagaacgacacaactcaacagaagggaagaaaagacgacaagagaaggaaaaaagaaaagcggcagacaagaaagacgaagaggagagacaagggcaagcgacaag

SEQ ID NO: 485243 - DNA, 707 bp, Homo sapiens
gtaccaatcagtttacacaaggtctctgcagtctcgaaaactagtgggcacctctggctttagcaaaggcacttacagccaggtcacatgcctcagtacgctctgcagcaggtgcacttacagagcactaatgacacacagggaagccaaggtttcctctaagaaacagaacatggccgggcgcaggggctcacacctgtaatcccagcactgtgggaggccaaggcgggcggatcacctgaggtcaggagtttaagaccagcctggtcaacatgatgaaaccccatctctactaaaatgcaaaaaattagccgggcacggtggtgcacccctgtaatcccagctactggggaggctgaggcaggataatcactcaaacctggaaggtggaggttctgctgtgagccaagatcatgccactgcactccagcctggcgacagagtgagactccatcgcaaagacaaaaaacaaacaaaaaaaacgacagcctacagtaagtcttacctcggctctcctgccctgggagcaggaaggcatctttccgtggcaaatagcacccgtcaagaccccaaaccttcctctactgcagcaccccagggaatttcacagctgaaaatgctttgtgccgggcgcggtagctcatacctgtaatcccagcactttgggaggcaaagcaggtgatcacctgaggtcaggtgtgtaactg

SEQ ID NO: 485244 - DNA, 299 bp, Homo sapiens
cgccgtacttgatgatcagataaacgcgtccaccagttcgccgtagatatccagctggacctggtcgaacgcttcgttgcccacccgcaccggttgggcgccgccgtggccgctcaagtggtcgagggtggtttccggcagttcctggcgaccgtcgatgccgtacaggatgttgatcttggtcggctggccgcagcagtcgctgacccggcccctgagccagcgcatataggcgttggcttcctcgacgaaacccaggcgcatgaacgcatagacggtggacgaggcgtccgtagcgg

SEQ ID NO: 485245 - DNA, 250 bp, Homo sapiens
gggggaaaatttttttaaaaattgggggcccccaattgtttggcgggggccctttttttcaaaacccggtgccccaaaaaaaggggttttaagggccggcccccttgggttttaacttttttttttaaacctcctcccccccctggtcccttttttgacccgggttggttaccccttaattaaccaaccccggggcctcccccccttttggctttttttaaggggccccttccgtttttttggggaaaga

SEQ ID NO: 485246 - DNA, 772 bp, Homo sapiens
tgtggagtagggagctgtctcccctgagagtcgcatgcaggcgtctgcagcccaggcctctggcaacagctctttgcccatctctgtggacagtggccatcgctgcacaatgggggcgacgaggtctagggccctcctacctgcttacaatttggaaaagtgtggccgggtgcggtggctcacgcctgtaatcccagcactttgcggaggcccaaggccagcgtatcgatcgctcggcagcccgagttaagtgtctagagagcagcccagggcaaactattgattgacgacccctgtcatctgcgcaaaaacattgtctgaaacttatatagcctggcgtggtagcggcacggccttgtggctcccagcatgcatggggaggctcgaagtagtggagtgatctagttatgctctgggatgccgtcgcagtggcttgaagccgtaagctcagtagaatgttgttagtcgcatcatgctagcgtgcgcagccctggggttcgacagagtcgaggcatgcctgggtttcccaagagacatgatagaacagcctaggcgcataagagaagtggaaaagataatgggacttgtagagctctccatggattccagtcctagcaaggaaagacgacgaactcctgaagattctccagaaagtcgcaacaggaaccagctcacaaactcgtggaccaagttttctctagaggggttctactaggaggaccctgcgaccttggtctaatgttggtggccctgcctgggccaatggcccttc

SEQ ID NO: 485247 - DNA, 267 bp, Homo sapiens
aactactactgtatcggtcaagttccacgggagggtctgatgtgaatcttacgtattgatagtactgggactgacacaacctactcggactccgagaaggaccgaatcaccatatacagagacaacaacacgatcactctgtatatgaacatgatcagagtgagagaccccgacacggatgtgtattactgtggaaaaggggatggaacgggagctatcgactactggggccaggtagtcctagtcaccgtatgctgagggagtgca

SEQ ID NO: 485248 - DNA, 743 bp, Homo sapiens
agcggggagtggcagttgtagtggccaaggtgcggttgtaggacccggagcagccggacatggaacaaccgtggccgcctccgggaccctggagcctccctcgtggccgagggtgaggctgaggaagagagtgacttcgacgtgttccccagttctccccgctgccctgtcagctgccaggcggcggcgcccagatgtatagccatggaattgaattggcttgccaaaagcagaaagagttcgtgaagagctctgtggcgtgcaaatggaatcttgctgaagctcaacagaaacttggtagcttagcactgcataattctgagtccttggatcacggagcatgccaaagcacaaacagcagtatcagaactgaggcaacgggaagacgagtggcgacagacaaaggacgcaagctctagtacaaagacgagacagatgtgtctgtggagcacggatgccattacgcacggcatgctttctaactaccggtatgagctttaactgggcccatacctgacacacgaggcaacacagactgacgtgtctgtacaaaaccagttgtgcgtattcggtagcaaagcagcagaatcccataacacacgtgttccaactcttggaccagtttactgacaggtggcttgacaacagttactgaacagtcaacaaagtctcaaaaggcctcgtggctggtagaactgccagaactccagggcagctaaagtgaccagactgaaattacattt

SEQ ID NO: 485249 - DNA, 308 bp, Homo sapiens
ggaccgcactggcgcactctgaagtggcctcatgtggcagagagaaagctagggagctctctgggttctcgtctcataaagacactaattctattagatcagtgcccacctttatgacctcatttgaccttaattacttcccataaatccttttttttttttttttttggaaaaaaagtctaactctgtaacccgggcgggagggcaggggattgctctcgactcagtgcacccttcggccttcccgggttcacgcaattctcctctcctcagggtccggagttgctgggactacgggtgcgcaccac

SEQ ID NO: 485250 - DNA, 169 bp, Homo sapiens
ccttgtgctggaactggcacaggccgcctctggctctcagcatgggaacctcatatgcaattgggatctactagtagcccaaaggaatgaaagagagctctaaccagatatgacactggaacctttccagtggaccccggacccttcccagggaaactggggacatagg

SEQ ID NO: 485251 - DNA, 390 bp, Homo sapiens
  misc_feature (127)..(127): n is a, c, g, or t
atatatattgagttatctatttggtaaggaatgttgacactttcaagtcttaatgagagggtagaatgtgcagtggctcatgcctgtaatcccagcactttgggaggctgaggcagtcggatcaccnggtcaggagatcaagaccatcctggccaacatggtgaaaccctatctctactaaaaatacaaaaattatctgggcattgtggtttgtgcctgtagtcccagctacttgggaggctgaggcagaagaattgctcgaacccaggaggtgaaggttgcagtgagccgagatcatgccacctgcactccagcctggtgacagagtgagactccatctcaaaaaaaaaagtcgacgcggccgcgaatttagtagtagtaggcggccgc

SEQ ID NO: 485252 - DNA, 302 bp, Homo sapiens
atgaagaaataagggtcaacctctacagtcatacttcttcagttccgtagcttagcatctgaatgggttgacttccacctctgccttcagccaggtgtctcttcggtctgggagaggtggttataaaatcattgtggttgcgggcaagcccttcaacccgaggcttcctggttccggttttccttttcctgtggccgcaaatggcccggggaaaaaacccccctttcaaggtcttggcttattgtgttcccttggggttttttgcggggggcgccgtccaaatcccgcgagttttctccccc

SEQ ID NO: 485253 - DNA, 223 bp, Homo sapiens
aaacgagaaaaacaaatcccacgtacggtgggctactcagagacaaggactgagtctcacttatcttagatttatttctctccccagccactgggcaaagaacaagaaggaaagggcacgagatgtgaatattcaccctcttgcttccctgtcattattattattattattttgagacagagtctcactcttgtagcccaggctgaagtgcaggaaacaacga

SEQ ID NO: 485254 - DNA, 470 bp, Homo sapiens
  misc_feature (203)..(203): n is a, c, g, or t
  misc_feature (211)..(211): n is a, c, g, or t
  misc_feature (215)..(215): n is a, c, g, or t
  misc_feature (221)..(221): n is a, c, g, or t
  misc_feature (224)..(225): n is a, c, g, or t
  misc_feature (230)..(230): n is a, c, g, or t
  misc_feature (242)..(242): n is a, c, g, or t
cgttcgtcagacaggaatatacttggggatctgccattgggtcagtcctctaggagtgggcagatcttgatcagtacagtattggagtgaggttacataattaatagtttttacatatagccgatttttttttttttggaaagcggagtctggctcggtcccccaagctgaagtgcaggggcgacgatctgggctcactgcancctccatntccnggggtncanntgatnctcctgccgcancctcccaagtagctggaactacaggtgtccaccaccaaacccagctaatttgggtatattcatgaccagatggggttcggccatgtgggccaggctgggtctaaaactccagacctcaggtgatcctctcgcctggcccaaagtcttggaattacatggcatgagccaccggactgggctatttataccaaatactagagcaaataataaaccctcctcaacgataac

SEQ ID NO: 485255 - DNA, 615 bp, Homo sapiens
caaaatccggtgggtgtttgtgtttctacatgaatttttggttcggcacttcgtaattcgtaatcaacaagtgctcaacgtctttatcgttacgatttttgaagttaacgagatatgacttgtcgaacgcattgagataaatcttttgaccatttgctgtctcttgatcagctggatagagtgatgaaatcaactcagtattcttgattaccaacatccagttggccactgattcattaatcaagtattgtgctagacgttcctgttctgactgaccaaactcgttgttcgcatacgttgagaaatccgtatcatacggagggtccaaaaagatgaaatcaccggcttcgggttggtgctcatgcatgaactgttcaaagtcttcgtttcccattgtggtattagtcagcaactggtgtagtttctcatcgttgaaatactcgaaacgcgactcaagcgtgttgttgttatatgacattccgccatatggaacattaaacttgccagttttgctgtaacggaacattgagctataagcatattgacgaatgaataagtatagtgctgccttgcgaccgtcactgaaattcaagtcatacatgcggttgaacaagt

SEQ ID NO: 485256 - DNA, 412 bp, Homo sapiens
tgaattcagtaaagtttcaagaaataaaaacatgtaggaaaataagtagcatttttatgaaccaaaatcatgcagctaataaccaaaccaagaacacaatccaatttacagtacccacaaagaaaatgaaatacctaggaattcatccaaccaaggcaggtcaaagaccactgcaaggagaagtacaagacactgttgaaagaaatcagagatgacacataaatggaaaaatatccatgctcatggattgggaagaatcaatatggttaaaaatggatatactgcctaaagcaatttacagcacttcaatgctattcctatcaacaatacccaattgccatttatttaaaagtcaacttagcacattacaacctcaattatcaaacattcaatctgggcaaccgacgaaaca

SEQ ID NO: 485257 - DNA, 320 bp, Homo sapiens
caggggacaatgccgttccttttttgcaaaattcccttaaatttttggtgaaaaacttgcccctcttgggaaccctttaggttttcccaataaactccccactgtacattttttaaacatttttttttttgcccccatgggttaatttgaaaaaccccctccgataaatggccccgtcctttgggtaaatttgtttaaccccattccttaactttggactggaaatggtgcttttttttttttaaatgggtttttttcccggggaaccttttttttttaaaaatgtttggctaaaataaaaacccccttttggaattgga

SEQ ID NO: 485258 - DNA, 136 bp, Homo sapiens
agtcacagcccctatactccctctacacattaaccacaacataagcggggctcactcacccaccacattaacaccacgaaacgggtaatctaacacgagaaaacaccctaacgttcatacaccccatacaccatta

SEQ ID NO: 485259 - DNA, 339 bp, Homo sapiens
gcggccgcctactactactaaattcgcggccgcgtcgacggccatggaagaagccaagaaagaaggctatgacttgagaagtgatgccattcccattgtggctgccaaggcctctcgggatattgccagtgattacaaatacaaagaagcatatcgtaaacagttgggtcaccacattggcgcccgagcagtacacgatgaccccaagataatgtggtccctccacattgccaaagtgcagagtgaccgtgagtacaagaaagattttgagaaatacgagacaatccagcagcccaggaggtcgacgcggccgcgaatttagtagtagtaggcggccgc

SEQ ID NO: 485260 - DNA, 134 bp, Homo sapiens
agtagagtagtacgatagtctacgtgatagagtttgataaatacaatgccagtcaggccacctacggtacaaaagaaagatgaatcctacgggctcagcagcactagcagcagcatcatttcatatatagctat

SEQ ID NO: 485261 - DNA, 361 bp, Homo sapiens
gtcagactgtcctagtgcaagctgtcatccctatagctcctggagcttatcctccacatgccccctggggtgactccttctctgatctcctcggcttggcggctgaggaatgacactgcccgaacacctcggaagccccatgaaccatcatggacctcgagtaactcttaaggtggactggtacgtccatcccctttaaagatctgatatagggggccactcactccatcctgccctcctttcagggacctggctccctagcctccattactgtcgtgggaattgacggcctatgcctccagatctctccagactccagttgtgtgtcaactagatcaggactccttatggcactcctttt

SEQ ID NO: 485262 - DNA, 655 bp, Homo sapiens
  misc_feature (456)..(456): n is a, c, g, or t
  misc_feature (459)..(459): n is a, c, g, or t
  misc_feature (471)..(471): n is a, c, g, or t
  misc_feature (475)..(475): n is a, c, g, or t
  misc_feature (530)..(530): n is a, c, g, or t
  misc_feature (577)..(578): n is a, c, g, or t
  misc_feature (587)..(587): n is a, c, g, or t
  misc_feature (609)..(610): n is a, c, g, or t
  misc_feature (623)..(623): n is a, c, g, or t
  misc_feature (653)..(653): n is a, c, g, or t
ctgcttcacgcaggatctgagtttatgggaatgctcaacctggaagccggaggttttctgcagattcgcctgccatgatgaagttattcaagcaagccaggagatctgcatgatgtctgcacccaaaattacatttatcggcgctggttcgacgattttcgttaaaaatattcttgggatgtgttccatcgcgaggcgctgaaaacggcgcatattgccctgatggacattgaccccacccgcctggaagagtcgcatattgtggtgcgtaagctgatggattcagcaggggccagcggcaaaatcacctgccacacccaacagaaagaagccttagaggatgccgattttgtcgtggtggcatttcagattggcggttatgaaccttgcacggtgactgatttcgaggtctgtaagcggcatggtctggaacaaaccattgccgatacgttgggnccnggcggtatgctnccangcaatgcgccatctgggtgccttcgatacccgcgatggagaaaataccggcctgntgacttcacacaggaacgcggttcttcgccaaagaggccgttacggnnacacgcagnaccacttcgtatacgtcatctnncagttgggaagangccgtattcagatcaaagttaacttctggntt

SEQ ID NO: 485263 - DNA, 964 bp, Homo sapiens
cggaggctctgctcggatcagaggtctgcagcggcagcttctgggagcatgagtgctgcagtgactgcatgggaagctggcacgggcaccggccgacctgggaaagccggggtccccggaggttgcagctccgcggagctccggggaggtccaccggcgaaatgagatcccggaggtcctagtggagccacgcaggcgggggctatgtgcggggcccggttattgggctcagggcggctttggcaagatgcttcgagatctcggacgcggacgaccaaggaggtgtgcgcgggcaagattgtgcctaagtctctgctgctcaagccgcaccagagggagaagatgtccatggaaagtatcctattcaccgcagccctcgtcccaccagcgacgtcgtaggattccgcggcttttttcgaggacgacgacttcggtgtcgtggtgtgggagctctgccgaccggaggtctctcctggagctgtgcaacgatggacggacagtcccgtgactgagcctgaggcccgatactaccgtacgggaaatgtgcttggctgcatgtaccgtgcaccgaacccgagttattcatcgagacctcaagctgggcagcttttcctgaatgaagagctggaggtgaacataggggatttgactgtggacaaagttgaattgacgggaagagagccggggggggacccctaatacctaggcaccgagggctgagcagaagggccggttcagggggaggtggggccagggggatacaaggatccgtagggggcaccgcattggggattggcaaaggacacgcggcacagagaagaagatcaggcaacgggaggcccaacagagagaagacgggcccaaagcgaggagacacgcagacgcggctacagaacacaataaaacgaccgacacgcatgggagagcgaaaaaagagagcgaccgtgctgctggcacaactgcg

SEQ ID NO: 485264 - DNA, 164 bp, Homo sapiens
attcgcggccgcgtccactttttttttttggagaaagggtctcactctgttgccctggctgggctccagcaatcctctcatcccagcctccgcttggactacaggcacatgccaccatgcccggccattatttcatgggttttttttttttctttttatgagac

SEQ ID NO: 485265 - DNA, 1291 bp, Homo sapiens
  misc_feature (756)..(757): n is a, c, g, or t
  misc_feature (1005)..(1005): n is a, c, g, or t
  misc_feature (1114)..(1114): n is a, c, g, or t
  misc_feature (1125)..(1125): n is a, c, g, or t
  misc_feature (1133)..(1133): n is a, c, g, or t
  misc_feature (1146)..(1146): n is a, c, g, or t
  misc_feature (1152)..(1152): n is a, c, g, or t
  misc_feature (1158)..(1158): n is a, c, g, or t
atatgttctcactattctggtggctggacctccaagatcaaggcattggcagatttggttcctcctaagacttctagagagaaggtaaccacctgcaagctaaggaaagaagtctgtgtcctcacatggccctttctctacacatgcacccctggtattccttccgcttcttataaggacgccagtctattgaattaagttcctgttcttatgactttatttacctttaattacctttttaaagatcctagctccaaatatagccacattggggttagggcttcaatatatgaatttagggggacagaatttcagcccaccacagttactatagtataatgtatgtataaaatgtaataattaaataaaattcctaaagtggaggagagacagttcagaatataaacattaaaatgtgctacgatttttccttttcaattttccagcagcattctgaggtaaaatcaatagttttcctcccaaataataatttttgagagatatataacttaattgatcatttgccaagtgagaaaggtgtgttgataatcaagctctagccccacacccaaagcacccttttaaaattcaaacaaatcatttcttaatttccttgctactgcccttgctgaaatgtttatctgtccattcccgcttagtcaattctgcttgacttcaatacttaaatttaacctaaactactctctctaggatcctctctcattcataattctatcaatgtattaccacactgtnnagtaattttttgcttgctatctcttcatttctgaggcaattattgtgtaactttcattgtttttaggggctttatgctatcccttattcatggaagggctctgtaatgatatcaaacagacagctgtaatgagttggaggtctctttaatggacaccaagtagcttgccttttcagagaagtttcctgtagggttttcctgatggtataattttatggaaggcagtacagaaagagaacctttattgngatcaggcaaatgaagggtaatgagaacttaacccagcacagtgaaagcaattcaaagggaaggtgctagcctgtgacatcatgagtatgtgcagagtatcacatcagngacataccatncatggacngaggacacagaancaaggngctgtnaattcataagactgagatagaagtagaaagtaatctcttaatatcctgaagctggggcattgacactaaagattaaatgagtgcaatatgatcgtttgaatacactgtaaataatacaaaattatgtaacaac

SEQ ID NO: 485266 - DNA, 192 bp, Homo sapiens
tttatgaataggagactcatacaaatatctgtatcttcaaaacctcacacattccatgtgagtccgctgaaaatactcacaggcttttacctggaacctgatggttgaataaacaatttatatgcgaagagtaaacggaacaacgaaaagttaaacgtgatttttgcatggataacgcagagcaggaacgaa

SEQ ID NO: 485267 - DNA, 1287 bp, Homo sapiens
ctgaaccacgacgtactgcagcgcagctgcagccccgggggcccggtgcggcggtgcctcgttactctggtgatggcccatgtgtgcctgctacccctgtggcggagacgctgccccagaggccctggtgaaggcccggcgtctgctggagctgggtggacggggcttgggggcgggcgctggtggggctgcagggcgggccgttcggcctctacgcgcccggccgaccatcctcgaggtcgtccaggcctcttccatccctgtacgagcccaaggaggtgcgcttcggtggtgcgcagcgttgagcggcgcgcaagtcgtttcccccatcgacacgatacagccgaatgaccacaatcgcaaccgacagatccgggaacaccgggacacccagagaagcacccaaggggacaaaaagacgagaacaacattccaaggcagaaagccagaatgcgaggatctgggaacaaaggtaccgaacaggttgggggcgaacagtaggcatgggcaggaaggcaatccaaacctaagagccgaagacaagccggggaagccgagattacaaagggaacacatagaagaatacgacaaggcagccagccaacaaataaaccacagaggcaaaaaacccaaagacgaaccgacaaatcacagatggcaagacatcggaggggaacaaacgacaggctagttgaggacaacaaccggacaatggaaaaccaattcagaaagaaccagcgacgacattcaaggggacaagcctggagaacgatgaacgagaatagcaggagtcccagaacagtcgaaaaagaagacacaagagaaaaaaaagagaaaaaaagaacaaaaaagagaacacaaaaagaaagaggaaacaaaagagaagaacagaaaaacaaaaagagaagagaaaacaagaaagtaaaaaaaaaaacaaagaaagagaaagaaaagaaaaaaaaaaaaagaacagacaaaaaaaccacgagaaagagaagaaaaaacagacaagaaaagagaagaagaaaggaggaagaaagcgaggggagaaggaaacgagaagaaacaggaaaaggaacgaggagaaaaagggagagaagaagacagaagaaaacacggagcaaaaagaaacgaaaggaaggcggaaggagggaaatgacgagagggagagggcgaggaagagagctacaggaaggtagaggagagaaagagcactagagaggagaataagaggaagagagaagagagagagagaaagaaaagaagatagagagaagaaaaagagag

SEQ ID NO: 485268 - DNA, 218 bp, Homo sapiens
ctgtacttcctggcaacatggtgacaccccggttctactaaaaatacaaaaattagctgggcgtaagtggtgcgtgcctgaaatcccagctactcgggatgctgaagcaggagaatcacctgaacccgggaggcggaggttgcagggagccgagaccgtgccactgggttgaccgtggcttgtgggttgaccgtgaccgtggcttggttgaccgtggc

SEQ ID NO: 485269 - DNA, 435 bp, Homo sapiens
gctcgatattatctcacatttggtcagctgggagcttcttcatgatggctctgatgatccactccattaatctctattattctttgagcgcttccttgcttttaggtacacaaaatattccaagctcaccttatactctttccgtcccagccctggcatcagccatttctctatgcacttctgactcctttagtgaagagtatttagaaaacaagctctaggcattagttgtgctcattggtactgggtttcgttacttctaagccctgtcagtggagttgaccaaaacttaaaacttctactcttcaaaagatattgttcagaaagtatcaagatggccgggcacggtggctcaagcctgtaatccccactctttgggaggctgagacaggagaatcgcctgaacccgggaagcggaggttgccgtgagccgag

SEQ ID NO: 485270 - DNA, 759 bp, Homo sapiens
  misc_feature (401)..(401): n is a, c, g, or t
ggagaagattctgagagagaccgccgtaacaagaccgggtctctcaggagagcaggcgcctgtgcttctgtcggggcgccgatcaggcgggcctctccggccctcagaatctcgctcggttgcccaggcctggagtgcagctggcgtgatctcggcctcacgggccatgcgtctgccctgccatgacgtgagctctccctaacgttacttctctgtcataatttcctaatataatatcttgcacagcaggacgtatgcaagacgattgatgattggatactatctctacatagtattatgaagtgtacatgaagagctattgggacacgggggctgtgcacacatgcggcaaaacgtggtcgctgcacattatgctcgttagctgtgatgagactggtagncgtatagaaacatcagtggagtagaaagacacgatctaggcgaggtgactttgccgccggatcaataagcggacgacttgaggcgcgttgaatggacacctgaggacatgagcatctactgtcaactctaccatgtgtgtatagcaccaggtcaacaccaatattcatggttcttgagtactagccgcaggagagctgtaggactagataatatcccaggaatcgtcgtcatgaagaggagatgccggtggtcgtgccgtcagatagtattgtgtgtatgttatgtgtcccgggcagggctattgctcacgagggagctcccgccagaaaatgtgctgtcagatgaatttcataaatg

SEQ ID NO: 485271 - DNA, 637 bp, Homo sapiens
  misc_feature (180)..(180): n is a, c, g, or t
  misc_feature (191)..(191): n is a, c, g, or t
ggtaatgccaacatttatggggaaacagaaggaaatggagcagggaagggagcttagaaactgcagccacagatcggggagcagtaggacagagcggttctgagcaacccaggcaagagtttcaagcgcgcgctggtcaccagcgtcacatgcctcagagaagtcaagagacctgagaangtccatggatngatccggcaattatggaatcttttattaataggaactaggatggaacctacatatgacacttatttgaaaagaaacccatcttcaaactatagatttactgagaaaaggctagtactctgtggacttggaagacatgactttgtgcactaatgatttccacattgaaagtaatttctggatgaagaaaaagagctttcccagtatgaaaaaatccaaaataattaggatggaaacacaaggaagaggatcggtaagccagactataagaagaggagaaatggcaaagagacgaagaagaggcatgcaatatggtgtaatcatataatagaatttggacggagtcttgctctgttgccaggctggagtgcagtggcacaatattggtcactgcagcctccgctcccggattcaagcaattctcctacctcagctcctgagtagctgg

SEQ ID NO: 485272 - DNA, 417 bp, Homo sapiens
ggcttcacaggatgtcaggaacctatgtccaagatttttcactcacaatgttggcaaagtggcgttggctgccagcaggggtctcagttccttaccacacggacccctccttggggctgcttgtgtgttctcacgacatggcagtgggctctcctacagtgagtgatccaagagagaagggaaaaaccacaacatctctcatggcctatcctcagaagccacacaccatcttcttaattactcacaggtcagtctcacccaaggtggaaggggcgtgaattccaggaggtgagaaacactgtgttcattttggaggcaggtcagtgctacgcatgacaaatcttcaaggctgatttgacaacatgattattgggtagcggagcattccaagacactaagattccatggcacacatgt

SEQ ID NO: 485273 - DNA, 273 bp, Homo sapiens
cccagttttaggtttttcacccatgaaccgcacacttgtgttgttgcacgcccccaatgaacggctgcatgaggttgtgttcctccgtgggggggacatatatacacgcctgctgcctgcccttgccagtgggcctgccctgcccagtgacagttgagccctggaactcttaaacctttgcccctggggtttccatcccaaccagggccaaggccctccttttcccccttccaaataataaagtttatggacagggctgtttttaaagtccta

SEQ ID NO: 485274 - DNA, 1650 bp, Homo sapiens
ccttggcgagtgatgcagcacagccacgagggtggggtgggaagatcaagccaccgggtgcgcaaacaaggggttgataggcgacatggaaggaaaaaactatgtttgggtggtaattgtgcgatgtagaagggaatgtggttaagtgggggctcacacaagtgtagcatgtgtgactgagggtaggtgggctacgcgacgcccgccacacgagagatgagcatggggtggtggagtgggcccccccccccctcgcgcgggggaatgatacggctggtggtgggcagcggtgggtgaagtggtgtgtccacacgactcgcggggatgttcgtgttcagcacacacgaaacagaacgttatgatagtgaggcccctctgggccgcacgcactgggataagaatgttggggccgcaggcaggtcgcagccacagaacgaggcagcgtttgtggggggagcaacaaatagcgggtgtctattgtggcccaccgtcggtagtagcgtggtgtaaccacgccgcgggtatgaagctgtctgactcagtataggggtcatcaatgagggcaccgtctggtcgcccggttggtcgagcagccacccacacaacgagggggctcagaaccagcaacagagtgtggtagtccagcagcgtgtgagttggggggaaagcacacacctatggatgacgccggctgcccgccggcggtgtggggtggtgagagtaaatacggctgtgcctccgccagcataatagtagtagtagtagtggagccacagcgttgcacaacgtagtataggcgtggggtgggtggatgagaataaacatcgtcaggtagcgattgacgcagtagaggggggtgccccccccctcgcgaacagaggggggcaatagtaacaacactgggggtgggagtagaacacaactggggaggggacacctcaccacacgtggtgggggtgctgcactccagcgactgctgagagtggtgtgatcgacaacacagggggagacaacacacccaacacgctgagtgctgctcgacacaacaacgagctgtagtgattaacacaacgtttgcgtgtgggcaacgtgtcgtccacagatggtgtcgcccccgtacttcatgacgcagccatctacaacactgtgtgggtcatagaagcgctcaaaagggtgtctcctgtggggagagtggtgtacacacaccgcagaaagtgtgtgtgggcgaaacgacagaccacacacacaagcagcgggtgtgtgggtgagacaccctcgactgttgtggcgcccaccctacggtggtgacgtcgcgctcacaacaaggagagtgtagtagaagacaccccccgtgggagcgcaccacacgaccccacctcacaagagtcactcacaataggatataatagagataaagaacctcgcttctaacatgttgtgtggggagatgtgtcctcgccatccacacgtcacacgtgtctcacactaccaccaccggaaagtgtgtctccacgcctcgtgcacacacacgtgtgtccacacggagttaacacccacgtaataaaagagaggaacgccgccatatggaacccccacccggtgtgctaagtgcccctcccagtgtataggtgaccacgggggtacacccca

SEQ ID NO: 485275 - DNA, 1151 bp, Homo sapiens
gcaattgcaggggaggtggcctccattactctcaagtactgaaattcggagacatagccagaggtgggacacaagtgcgtgaagagtgaagagccaccgcactgctcaacacatagtcctggaaaactgcgtgcaagccaagcgaaatccgtttaccacagtctctcacattcacgatgccacaaaacggcacgcctgggataatgcaccgcaccgttgttacacattgtactccccaagtccggtagaaacaatcgtgggcaacctcaagagttgttcacggcctccattacgagcatactggcttatccagtgtcgcatcgggcacaaaactcccccctccgactcccacactgcgggtagtcactcatcaaacaaaagagcgcggaaattgtggcggcaaacccacaagccaccagcgacaaacttcaccatgcgtgtctaccaagatgccgcggcccaacagggcaccgcactgcgccttgacattcacagctctcctcccttcaaccgcacccccaaaaaacccccgaggaacgcgacacacgttgcacaccacagtcccacaacacgctgggccagccgaacgagggtcaactccaacttccttccacctgggaacacgcgcatacggcatctacgttggtggcatctcatttaccagtggggccatccgacgactcacgaaaacgacacggcactcggcaaactgcaagggaacagaaacgggacattccaacctacacgcgaacacccgtacggattcctccaggaaactttccacgtcacgcaacacccatccccacctttggcacacgacatctggcggacccgacgaacgcacgcggcaaacgcaatcccaaccacacacacgggaccgcccaaggcggccacgggaacacagccaaagagctaacccactaagcaaggcgccataaccccggcctcagccacacgcaacggctaggaccacctcacaccaacgcaacacagcgagcaaacccgggagcagcgacaccacgagaagcggacaacgacataggccagcagcgcagctcaccagcgacaccaagaagacatcatccaagggccagtgacacgaacagccactgaccacgaggtcccgactcccccggagcataccgacacag

SEQ ID NO: 485276 - DNA, 948 bp, Homo sapiens
  misc_feature (948)..(948): n is a, c, g, or t
acctctcgccaggccgtcctcgtgaccgtgacatcgtctttaaaccctgcgtggtactccctgacgcaccgccgtgagatgcccagggaaggacaggccgatctgaaaattccaagctacttccttaagatcatccaaagctattggatgattatccgaagatgttgcattggtgggagcaggaccaatgtgggctccaagcaaggatgcagcaagatccgcatgtcccttcgcggtacagggctgtgcgtggtggattgggcaagaaacgagcatgatgcgcgaagggcattccgaggatcgacctgtgacataactcaacgcacagctctgtgaggcacacactagctgtcctcactagtccggggggcaatgtggcgctcttcgcttgtacaccccataggggaagggagcctcatcctgcacgtactgagagggaccattgtttttgcgcccggccactacacgtggtagtcacagcgtaggattgcctggtccacttatgttgccattttgcccccagttggtcaacaaagtccgcttgggtagcaagggcaccacgaaagccaaccgggcttctcccgggcaccccggagaagaagaaacacttccttttagtgccaagagacctttgccagagtagttgaacccatctaaaagaattgcttctagtggggcaccaccccaagctggcacatttcatggcagatgactgctgcgcaagctgtgcatcaacgcaacgtgtgcatcacaccctgtcgtgtgtgttaggcccgacgtaatattccacgatcgggctggaagacactgtgttccgagaaagtgttccgcccttattatccatttatggtggagggtcaatcccacaaagcgtgtacagcaacaagtggacagcccttctctaccatgcgcttaacgcggtatagatatatcaccagaggcaaactn

SEQ ID NO: 485277 - DNA, 1107 bp, Homo sapiens
ccttctagtgtcttcactgtattttctttaaaaaaaaaaaaaaaaaaaggggaaaaataaaccactcaaaagaacaacaaaaaaacccagcacaaaaccgacgatgggagtttggtttctttggatttctttggccaatgggcaagaagatgagatggccctcagcactggaggattctggccccctggtgggtggcccggctgcccccaaccttcaggctggccagatgctccccggggacaaacaccaggctaacaggagccagacggccagggcctggcccgggcctccggttcctggcccccaacccaaccaacctggcctgggagaggaacggggtcgggtccgtgtcggagaaagtggacaggtcccaaagccaaagccgggccctcaaagcatcatcagggaggggggtagtcagttgaaggcagttcccaccggagtttccggagcctcagaaatccaggagatacgcacaggcccacccatctggagatgacaggggctggacttcccggtggctggggcttttccattggtccccctgggcctccagggtcctcctatgggctctccatgggacgtgggtgggcgaaggtgcgtggggggccggaggtccccgtgccgtgtagtgtgtgaagaagatatgaacgagagcgcaatcgaataagacagggtgtatccacagaccagacgggtgcacaggcccgaccagacatgcaagccagaaattcccggtacagcagggtgtacaacaaaacaagcgcaatggggggataggagatgagagaacctcccgaattccctcagaagccacagaggaggcacacagtagacagagggtcccaccaaaacggataaaagacgggagagaacaatataaaaacagggtaaagggaaaaccacaggaaactggttcacaaaaggactggggcgcagagataaaagaaacccgcgcgcgagagaaaaggtggaccccaccacgggagcaccatatagaggacagcaaacagagggaagaggaaacccataaaaaaacacagtaaacaaaacaggggcaacgtcatcaaaaaacgtgccccactataaaaaaaggcatgacaaaa

SEQ ID NO: 485278 - DNA, 907 bp, Homo sapiens
  misc_feature (624)..(624): n is a, c, g, or t
  misc_feature (809)..(809): n is a, c, g, or t
tgtcttcaagacatccaagatgaagaacctcgtgtggaccagcggtatctcagtccctggcagtggtgaatttcacgctcagcctcagaggttgacttctacattcgataaggacatgatccacatcgcggacacctaagggtcgtccaggcgttatggggatttcttcatgcccgtcagatcccagcaacatttgaggtagcttatactcgaaccctgaagaagatgggacacgagcaccttggatggatattccacacacagttgcaggtaacctgtagtgtgactgtattgataggtcgaggaagtgttattggctaccgtgaaacctttatcctagcatcatggcccatctagcctgtcagactcacgtttaaccagacgttagaggaccgaagctgtttcaatgtggatctcagctagaggatctttggagtccacgaaataacaaataataggacatagagaaataaaaagccccggggtgtctctgactctgcagggagggggacaaaaggcggtagagtcaagtggcgcttggggccaatgacgtagcttgccgggcacgccagtgtttgcttggtcgcaagggggtgctacatctgggcgggctcccctgtattngggatggcgggatcatcatttgccgcatgacgctcgggggttttccgcggcgggttactggagttgtggcgcggggagggcgaccccggggacatttgtgcatacccggcaacctttgaggccgtccaggaagggtttaccggaccggactcccaggagacacctgtatgctgggacccttgtangccgggaccgggacattggcgtctgtggtggggaccacgggaattggaccgggggtttcggcgggagaggttttacgcgcgttcacaggggccttggc

SEQ ID NO: 485279 - DNA, 180 bp, Homo sapiens
atgatgatggtgtatggagaagtgaccgagccaataggctgctacgtatccgtttgtcggaatcagatcgaatgtatttcgaaggtttgagatacatctcgaagatttatgataggagggttatggttttactttggtcaaaccgggttgactttcgacgccgcataacaccacacaatt

SEQ ID NO: 485280 - DNA, 503 bp, Homo sapiens
tgatctagaggatctccagaggacaaggagggtggagagggtgcttggggactgtagggcaagagagctctggttaggtaggcctgggagaaggagccacagctagaggttgcagggtggccaccatcaaaaagttaggaaaagaagaagcttaagtttgtacgatgctttaaaaaaaataaaataaatcaaatcttctgaattatctgtgaggcaggtgctcttttccatccccatttggcagataagagaactgaggtcagagaggtaaagtgacttgcctgaagtcacacagctaggaggtggaagagctgggaatcaaaccagctatgaacaaatgccttccctcccctcatccctagtctgttcccagtgcccccagctcaggcctccttcccaggaactctctagggatgtcgctcaaagcctctctgcccaaggtctcttcccacctgctgcctcatttctccctcactccttccaagttcccattgctgatcatg

SEQ ID NO: 485281 - DNA, 313 bp, Homo sapiens
ggcaagtttgaatcgcggtgagacgaagggcgtaggtggtgggatctcaccgtggtccgaataagccttttctctgccttgtttgtaggacgcttcagcgggaatccgaaagtgggctgcgggcaacgtgctgagacaagggacttccggaaatgggccacgacaaagggcggttcccggctcgcagaagaggccggtcctttgcatgttcccccagttggggccggattccattcggccaccttaaaaaatcttagggaaggaccagctcaatggactgttgttggcccaacttggccgctgtgtaccaggc

SEQ ID NO: 485282 - DNA, 180 bp, Homo sapiens
tcacctgggcccgtttttggcgtccgcgtatggttgtcgtagcccgtaggccctacacgttgggcgctttgcgtagtttatatgcctagaatgttacgttcggtacgcattaggaatgccattgcgattagaatgggtacaatgaggagtaggaggttggccatgcgtggattgccagga

SEQ ID NO: 485283 - DNA, 162 bp, Homo sapiens
tggaaagaaccaccttgcactcctatcatgcccggggcgacgagcgcagcaccaaccccatctcaaaaaaccaccggggtggggttaaaaaggagcttaatagttgatgaaccgagggcagcatgctaccattaaccaagttgatcaaagagataattcaat

SEQ ID NO: 485284 - DNA, 1271 bp, Homo sapiens
gtgttagacttactcaatgcagaagatgaaataagggaagaggagagagaaagagcaactgaggaaaaagaatcaaatgcatttcattcattcaatcctggcaagcaatcagcacatggcacatttttccaaccatttgcacttgtgtcaattcccaatcctggcatcagtctcactcaactgccggcacattcattcaatgcaacaagcaacatgcatgttattcaaacagcacagcaccaccagcacgtctttcaccaagcgacagcagcacactgcattgcatcacgcattttcagtcacaacaggcacaatcattgccagcccacgtggtcattccagcaacactcttctgcaagcaagctgcaagcttgtgttcatatgcagccatttcatattagtagcacaccaggcacataacacatcatcattccccaccagcacagcatagtttccagcatctaaccgaagatggaaagcaacaaatttgcggcagcatcacgaagcaagcaaaaagcaaccatggtcaaaagtgtagtaatggacaacagaagtgtccatagatgtattatatcctaggtggtcatctagtagatatgcgaaaagatatgtggctccattcttataaagaaaggtgtacctactatgtagggagtacaatacaaggggtacaagtatccgaacaatttactatgtcagtgagagacaagaaccccaaagacattcactcctaccacctattagcaagttacatttcatttaccacatggtcttcataaccttataacctttacatcctaaattgggcagttaccttcaacaatttcaaacttccatgtacgcacctcaacaagcacacattgggacggcaggtacccactatcgacatactaatggcactccaccgaacaaaaggcacaataataattaaaacacacaactcacaccagacacgccaacgaaaacagagaaaatgaaaagcaaacaagacaggaagcccagccacaaaaacaaagcgtacaggccaaataaacagaatatggacatggaacacgaaaaaaacaagaaaagtgaaaaagaaaaaataacaaataggaaaagagaaaaaggaaaataaaaaatgagataaaagaaaaacagaaaataaacatatagaagtaaaaaagaaaaagacaaaatatataataaaaaggaaaagtaaagaaaaaaaaatcagaaaggaacgatagaaaaagaaaaaaatatgttgtgattgttagttaataataaat

SEQ ID NO: 485285 - DNA, 347 bp, Homo sapiens
gtatatttgctagaaatcaatagaacgcctcacagcgcatataacctctctcaggagttcaactctatccactaatagcttttgatgattctagcaagctcgtaacctcgccttacccccactattaaactactgtgagaactctctgtgctagtaaccacgttctcctgatccaatatcactctcctacttacaggactcaacatactagtcacagacctataatccctctacatatttaccacaacacactgaggctcactcaaccaccacattaacaacataaaaacctcattcacacgagaaaacaccctcatgttcatacagctataccccgaagaaggcca

SEQ ID NO: 485286 - DNA, 171 bp, Homo sapiens
atcctccttcacagtgtgagaccttccagaccaggtctgaacttgtggacttcttgatggagaccttgatcatgttcaaggacctcattggaaagaacgtgtaccctggaggctggatggccatgagcatggttcaaaacagggtcttcctgagagctatgaacaagtttg

SEQ ID NO: 485287 - DNA, 127 bp, Homo sapiens
tcaatctttgggagagtttcagtactggatagaatttaaatgtcttctttctgaaaccctttctcctagaaactaggtaataggtgtagaagactctccctaagggtagccaggaaggtctcctgtt

SEQ ID NO: 485288 - DNA, 822 bp, Homo sapiens
  misc_feature (49)..(49): n is a, c, g, or t
  misc_feature (63)..(63): n is a, c, g, or t
  misc_feature (76)..(76): n is a, c, g, or t
  misc_feature (87)..(87): n is a, c, g, or t
  misc_feature (100)..(100): n is a, c, g, or t
  misc_feature (105)..(105): n is a, c, g, or t
  misc_feature (118)..(118): n is a, c, g, or t
  misc_feature (126)..(126): n is a, c, g, or t
  misc_feature (134)..(134): n is a, c, g, or t
  misc_feature (194)..(195): n is a, c, g, or t
  misc_feature (300)..(300): n is a, c, g, or t
  misc_feature (302)..(302): n is a, c, g, or t
  misc_feature (310)..(310): n is a, c, g, or t
  misc_feature (314)..(314): n is a, c, g, or t
  misc_feature (338)..(339): n is a, c, g, or t
  misc_feature (396)..(397): n is a, c, g, or t
  misc_feature (401)..(401): n is a, c, g, or t
  misc_feature (430)..(430): n is a, c, g, or t
  misc_feature (440)..(440): n is a, c, g, or t
  misc_feature (452)..(452): n is a, c, g, or t
  misc_feature (479)..(479): n is a, c, g, or t
  misc_feature (483)..(483): n is a, c, g, or t
  misc_feature (543)..(543): n is a, c, g, or t
  misc_feature (556)..(556): n is a, c, g, or t
  misc_feature (558)..(560): n is a, c, g, or t
  misc_feature (618)..(618): n is a, c, g, or t
  misc_feature (622)..(622): n is a, c, g, or t
  misc_feature (628)..(628): n is a, c, g, or t
  misc_feature (646)..(646): n is a, c, g, or t
  misc_feature (648)..(648): n is a, c, g, or t
  misc_feature (650)..(650): n is a, c, g, or t
  misc_feature (658)..(658): n is a, c, g, or t
  misc_feature (668)..(668): n is a, c, g, or t
  misc_feature (671)..(671): n is a, c, g, or t
  misc_feature (675)..(675): n is a, c, g, or t
  misc_feature (679)..(679): n is a, c, g, or t
  misc_feature (683)..(684): n is a, c, g, or t
  misc_feature (711)..(711): n is a, c, g, or t
  misc_feature (812)..(812): n is a, c, g, or t
cccacctccccaccccccaaacacacacacacacacacgtacacactgnctaagcgcacagcnagggtgggcaggnatgctttggcnatggggccccttngcgcngctgtggcatggncggctgcnaggtggtntggatgtgagctcagcacctttggaggtgggtggaggcaaggagagaaagaagtctcagnnctcccaaggacacaggagaaggtgcttgcaaaacaggcagataagaaagccgacaggaacccagaaaagagatgagaaaaaagaagagtggaaaaagagaaacangntgggtgcngcantcacacctgtcctcccagctactnnggaggctggggcaggagaatcgcttgaccccaggaggcgggggttgcagtgagctgnnatcncaccactgcactccagcctgggtcctccncgtgagaatncgtcttatattntaaaaaaaaataaagttttgttttttngttncagctccggggtgaaaacaggatgtgggcaacaaaacaacacaggaaggaaacagcgagnggaaagggaaggnannngatgcatccaagaactggttagagtgcaaggaattgggaaggaaagaaaaaggtgggngggngggganacaagaagaggaaaacanangnaaagcggnggaaagaaanacnccanaaanaaanncgggcaagaagaacaaagaggttgganagggaacgggagcctcttgggagagtcttagaccttgacaaaaaccaggtgggcagagtgcaccaggtcagccacatacgccagtgggtttgatggccgtnagactggcca

SEQ ID NO: 485289 - DNA, 368 bp, Homo sapiens
gtgtgaaaacgttccctaggtgtaacttgattctcgagtatcacggaacacagggcaacccagcagcatctcaagcagcaatcagtgtcaaactggcacctagttcattccacagtgtggatgagatcaggctgacagcttcacaggagaactaggcctgctcaggcaggcgagagctgaggcccggaaggagatggtggcagaaggtgtcacaccacaggtatccaaccctcctccaggaggccggatgtcagaggggtgccttgggtaacctctgaaactcagaagtgaaagggggctattcctagttttattgctataggccattatgattattactgactagtattgattggtcgtattggtta

SEQ ID NO: 485290 - DNA, 263 bp, Homo sapiens
ctgcatgccacatgttttgcagccctggtaaaaggtgcagcacaacccgagaaggagagaagccgggagacgtgtcgcatgtgttttatctgtggctatagttctcctttctgacaaggaggcccccagcactccttgtgacctagagctggaagtggaagggcttggggtgctgcttcctgagccctctgctctaagtccatcttctccctttgattccctgcagattggtacacagaacagcttggagcttcttgaggatc

SEQ ID NO: 485291 - DNA, 117 bp, Homo sapiens
cgcaatcccactactgaacatatcgggagaactgacctgctcggttgccgacctagcaccggggacacatccttagacggcctggagctgccatcgctcaacgctggggcaccatat

SEQ ID NO: 485292 - DNA, 839 bp, Homo sapiens
ggagaactagtctcgagtttttttgatttttttgtgggcttaataacaaaattcctgggtataaggcaaaatactctgtgcaaccgcagtaccgagggggagccctgcccccccatccaccctcccctttccttatgccatccagataggggaaaggagcaagggggaactctcgtgggccaggggctgcactgttgggacaaaacctgattatagggccacgcgcagtggcgagcaacgatgccagcacggtggcacatcctcccgcgaatcccaatcgacagagctagacatcggcccaacagaagaggcgctggcagcaagaggagccaggacacgccacgaaccaaaactagggcccggaaccctcgaacagcacaccgagaatacactagagaaaagccttagaacaaatagctaacacaactacaaaaaggagaaaacatacaacggaagaagacaaaacgaccttcacacgaacaccgtgccccaatgagaagacggtgcccacagaaatactccaagcatttataaaaactacaaaacctcccctgatatataaccaagacaaacacccataccaaccaacgttttgcgcaccacccactatccaaatttatccccaaatctatgtaccacctcaaaacaactaaccactctagtaggaaacaccaaaacattatcacaagactgtaccaataaaaaaccacaaaacataaaactgcaaaacccatcaccctcaaaaatgtcaaaaaacacttacaccaccaatcacccacaagacatagtataacacaaacactctcacaacacaacccatgataagaaaataatatatc

SEQ ID NO: 485293 - DNA, 115 bp, Homo sapiens
gcacgagaaggttaaatacctgtgttcagattgtaagatccagtccggacctgctgtgtatattgtaacgttaaatgaaaaaagaaccccccgttgttttatagtcatgcggtct

SEQ ID NO: 485294 - DNA, 889 bp, Homo sapiens
  misc_feature (378)..(378): n is a, c, g, or t
  misc_feature (422)..(422): n is a, c, g, or t
gttgagtttaagcgcggtagcccttcccccagaaacatgcctctggagttggtttgctgcgtcaggcggatgcgacagaggtccgtgaggtgagatcctgaaccattaggatttgcagtgggagaccccccctcgaggatgtttgcacaatgctccatcatgagtcactgtgcgtgacaggagccgttataccgctaggtccacctgaacaccaagaggatggaccaaacaatgtcgccaagtccattgcactcgcgatgctctgacggtgatccagtcgatggatcatggacctgtggatctctctgcatggctctggcgcacatgaatcatccctagcatccacgagactgtcctgggtgtaaatcacatgtctgnagtgatcctgacgaattgatgagaccgaggtaggactgatggcnttgccatcgaatggttgccggttcatggacacgggccccaaacacgtggtgttcccgcgaggtctctttataaatgtgcacaggagaagggtatcttgacagaatcttcttcctgttgtgcggcgagaactaagcccaccaaagtctcaggtgagctaggatgggggtcttctcgttgctcttgtggggtctattattaaagaaccacactgggagacggcactttcacgcttgtagcggagttgcgcacaactccatgtgactcgcaatcgggaattcccaaacctaaggggtcgcgggtctatgagtccacaggccacatgagtggaattgagtcgaggatgaggtcaattggagccaccgatcacgtgttgcttttaggcagattcgaggtctcgtccaggtcaagcagcgggcacctgatgtataatgtgatggaaccccatctgagggggcgacatatacca

SEQ ID NO: 485295 - DNA, 372 bp, Homo sapiens
cacgaggcgggacgccctggtgctggacgtgcgcgacgaaggcgagtaccgagcggcccacattccccactcgcgacacgtgcccctgtccgccatcgacagccgcatcagggagctggagaaatatcggaagcggcccatcctgatcatttgccgcagcgggaaccgctccggcgccgccgccaaccttttgcgcaagcgggggttcgaagaggtatgggtgctgaagggcgggctggtggcgtgggaacaggccaacctgcccatcgaaaagggttagctcggtggcccgggtgaacatgtactgcaccgccatctgcccttattgccagatggcggaagccctgcttagacagaagggcgtgctggaga

SEQ ID NO: 485296 - DNA, 304 bp, Homo sapiens
  misc_feature (258)..(258): n is a, c, g, or t
tttttatcaccaaaaattttaatcacttatttgtatgttacgtttcacaaactaccttgagagacttaattttatataatgcagatgttagtagttcaatctctagaagcagaaagactggagtttgaaatttggttctgtcacttttccccagtgtgatcttgcaccagtgattctagtccttaatttcttcatataatccagtggtttccaatgtcttctataacaaggcagctagtgtgagactaaccctccccnaaaatccgcgccgttcccctcgaccgcgctttcgatggcgccggca

SEQ ID NO: 485297 - DNA, 649 bp, Homo sapiens
ggggaaatggaggtgcgcaaccctctgttcgaccacgccgcactgtccgcgcccctgcctgtgcccccatgctcacctgcctgcactgccatgacctggagtgcagacagacgcccacctgctcccctgacctctgatgtgccccctgtgggatggtggcatgggcctggatgcttcccactaaaaacatgttttgatgcatgtgtgctttttggcttgggccttgtggctccagtgccctgtggaccctcttgccaggtgagaccccctgaaccatttgtgccatggacacctcctgtgtccccttgcacctctccctgttgtggtttagaccacccaagactggatgggggcatggagaaccgtagagcgcaggaacgggttgggtaattctagagacaaaagccaattaaagtccatttcagacctgctggacaaaaaaaaaacaaaaaacaaaaaacaaaaaaaaaaagggggggccggacaaaaaaaaccccgagagggaccaaaacacggggaaccacaaacgggcccagaggggcacactatcgggagcaacaaaaaaaaggaagggaatgtacgtcattaaacagagagagatagggaacaatgcgcagggtgagaaatagtgaaagaccctaataggaac

SEQ ID NO: 485298 - DNA, 257 bp, Homo sapiens
acacgaacaacaacttatagccaaatatctatagtaaaccacggacacatactgatatggaatggttagactaaaagcaaagaataaggccacctgctatgaatttagcacaacactataaaagagcattagttaaccaagacacttgtttcaaaaagggaaacaagtacagagactgattaactgagtgagaaaggcaagtcacaatttagttaaaaacctgctggcccaaggtcagtagattcattccttatacc

SEQ ID NO: 485299 - DNA, 163 bp, Homo sapiens
  misc_feature (1)..(1): n is a, c, g, or t
  misc_feature (150)..(150): n is a, c, g, or t
ngattatattctgccacacagtgttacttgctggaggacaaaaaagaacggtagtcagtaagcaggaaaaaattcagatcctgctaagtgttattacacgaaaaattttgatgagagaatgggttagtctgctcagtctgccataacaanaataccaactcag

SEQ ID NO: 485300 - DNA, 181 bp, Homo sapiens
ccgtttatccttttaactttttgccccctttactttggtaaaattgtttcaactagaccccccctctcccctgtttaaaccaaagaataaaaaaaaatttagcccctttttgggggccaaaaaaattttgagggctagctgtttttcggctgccggctaaaaaaggactcctgattttgta

SEQ ID NO: 485301 - DNA, 608 bp, Homo sapiens
tcattgaaaatttttctccaaaatggctgcttgcaaatttaatatcatcgcaagggcattcagctcttctgcaccgcagaatcagctagtaaaaacacctattcaagtattcggaataagcggccgatacgcaactgccctatattcagccggggtaaaaagcaaggaattagacggtattgaaggagaattggtgaaaatacaagatgccattaaaacagataagaaattcaggcagtttattaaagatccaactatcaaaagatccattaaaactgaagcattgaaacaagtatcttcaaagctatcattatcaaattcatcgaagaacgttttatctttgatcgctgaaaatggtcgattaaaggaatttgatggcatagttaatgcttttaaaattcttatggctgcccatagaggtgaaattacatgtgaagtcacatctgccaagccgctggatgatgctactaagaaggaagttgaagcatcattgaatttgctaaagcaaatcagaagattttaatgacaacaaaggtcgatcctagcattattggagggcttattgttaccatcggtgattatgtagatatgagcattgcagggtagtt

SEQ ID NO: 485302 - DNA, 554 bp, Homo sapiens
  misc_feature (28)..(28): n is a, c, g, or t
  misc_feature (39)..(39): n is a, c, g, or t
  misc_feature (211)..(211): n is a, c, g, or t
cggggcccgcccgtgtctccagccagtnctacaggacanttgaggagctgcgtaacatgatcctcacaggccccgtggtcaatgcctacatgctggtgcagattgacaatgcccgtttggctgctgttgacttccgcaccaagtttgtgacagagcaggccctgcgcctgtgtgtgggggccgtcatcaatggcctgcgcagggtgctggntgagctgcccctggccagaggcgtcctggagatgcagattgtgaacctcaaggaggagctggcctgcctggagaagaaccacggggaggaaatgaacgccctgcgaggccaggtgggtggtgagatcaatgtggagatggtcgctgcgccgggcgtggtcctgtgccgggtgctcaacgggatgcgtggcctgattgtgaagatggctgagatagaccacacggattgcctggattggttcttcagcatgacaatgggactgaaccgtgaggtggttcccaacagttaacctggtgcctagtgacaaggttgtgatcgttagtgctccggcaccccatgcagg

SEQ ID NO: 485303 - DNA, 461 bp, Homo sapiens
actaacagaaatttctttttccttcttacattttcaccgctagaggatttgttcttaccatcgatcctagcaacctgagcacatgacttctttttctttctatttttttttctttctttctttcttggttgcttgcttgcttgcttgcttgcttcctttctctgtctcaaaaaaaaaaaaaaaaaagaagaagaagaaaagaaaagaaaaagaaaatagtgagagcaccatataaggaaagtggttcaggcactgtggtaaggggtgagtgtcagccaagtcatcagctatcagaacacgaagccatcaggtaatatatcaagttgatacattaagaaggaggggccgggcacggtggctcatgtctgtaatcccagcactttgggaggccaaggcaggcggatcacgaggtcaggagatcgggaccatcctggctaacacggtgaaaccccatctctact

SEQ ID NO: 485304 - DNA, 159 bp, Homo sapiens
gcagacggttctcactaggagggcaggggcacgatctgggctcaccgcaacctcggcctccgggactcaagtgatcctcccacctcggcctcccgagtatagctggggaccacagatgtgcaccaccaggcccgactaacttttggtataaggggtagg

SEQ ID NO: 485305 - DNA, 392 bp, Homo sapiens
  misc_feature (19)..(19): n is a, c, g, or t
aaagtggaggagcactaanagagagatccccctgatgggcatctatagccacagccccaccagaagtattcaaaatagccaatcctaaatgtttactctgctctaccttgcgattctcacagaaatcccaataaaggctttggcctaggatttccccttgctcctgtgttctgacaccaaaccaaaacctggtgtttcccctgtgacccttcatggcataaacttctttccaagccttgttctcatttactcctgtggccacacccacttaatcataccatatccaacatttatattcttaggacatacttgttattctgctctttaataaacaggctattgttgtttactctttccatgtaaaattttaaatcagcttgcctaattgcaaa

SEQ ID NO: 485306 - DNA, 212 bp, Homo sapiens
aagcagcaaacttactttgtttgtaagtattcattaggttgaaatactatttataagggcagagggctatatatgatttggctattatttctaggcactccatcccaatgattccactaacaaggattacatggataaaggtaggtatgaaaaatgtattaagctacccattaattctcgaactacccaccagaggacttgaaaatcttaaa

SEQ ID NO: 485307 - DNA, 184 bp, Homo sapiens
gaggatcccggagcggcggatcttgaatgcatgagctaaggttatttgcggcaagtaaataatctggcggtggtgtacttggattgggcggtaagctgcacagcacctaaaactggtcgtataataatttgggccaggtgcagtggcaaatgattttaatgccagtgcttggggaggcccaggc

SEQ ID NO: 485308 - DNA, 132 bp, Homo sapiens
agtcggcacccagttcctttaatggcaggagaatcgcttgagcctgggagcggaggttgcagtgagccatgttcatgccactgccattaaaggagctggagccatgttcatgccactgccattaaaggagct

SEQ ID NO: 485309 - DNA, 241 bp, Homo sapiens
agtcttagagctgtagaggagagtcctatctgtctgatgatgaacagaggttccctaaagggcccaaaagggggactccgtggagcgccatcccgggtggtcaagtagtcagtgtctgtccaaggttgctgtcaggctcctccagtcactgtgagtgggactctgaactccccttggggtttttggtttccaccctcaagatgcccaatgtacaggctagaggtgaggcttgcacaatcta

SEQ ID NO: 485310 - DNA, 794 bp, Homo sapiens
aactcaagtggcgttagccctgattcccggggcctggctgtcagtcgtaggcaattctgccggccgaagattggtgagcgcagaggcctgtgtggcagcggagcgtccattagggacgagtgatgcagcgggaacgaggaatgggcagactggtgaaatcagcaaacttgggcgtcgtgttccggcgccggaccccgtagtttgtgcagtacggtccatggctaatgaaacacagaaggttggtgccatcccgattttccgttttcccttcacacgcctattccatccgaggaagacttcatggctacgagcgtgtaccgggatgggaggctggcaaggatgggatatctgagagtccaacgtggcactgggaagtccttaacgtcttattgtggggccctctcttggactccgtgactttgaacagaagaagcgtgaagaagaggcagcgaatccttgaaactggaactggccccttacatgatgagaaagatgaatccctgtgtctgtcttcttcctgcgaggggctgcaggcaccccgaggcctgctggagaaccggctggggttactcagttgtgtgcagaagaaggagagagagggacctggttggaccgataaaggcgggcagggccaggaggaagcagggagaagaacgcctggagagattgcagacagggtgcccggtcagagtatgcagcaagggcctgaggccggagaagaagacacgagagggttcctccggtcaggaggggatgttagagacaggccggggttgaagtgagagataagatgg

SEQ ID NO: 485311 - DNA, 289 bp, Homo sapiens
actcattgtcagtttcctgaaataccaaaacaaacttcttacttacccctgtgagatatggtgccacaggaatgaagagtaaagcaataaacatgcatatgcagtgcatagtgaagtagaagggtatatatccaatatatatagtaaagtatagcctaaagtctcttaacatatctcaagttcagcttaaaggttactcagtacatagaactgtagcctaactggacgtgtaaccagacggtaccctactcttgtggcaatcactaagtttcagccaaccaaagacagc

SEQ ID NO: 485312 - DNA, 714 bp, Homo sapiens
ccacgcgtccgcagatcgcaggatttccaagaaatcgagcctgtcccttgtgcacttgggaataaattccccaaagacagcattcgggatcggtatctgaggctgccgggatttccagctctcagccaggttcctgacatgtgccaggcctgggggctaagccagacagtgttgctccggtctttccacggggaaggaagccaccccaccgcttgctgcgagtctccctcgctggagaagggaagccggccggtccggaggaatgggctggaattcgaattagagtggatcttgtctcatggatgctcttaggagaccacacacaatcctgtatgcaatggacccctcgactgggtgaatgctctttcagaacatatctccctcctgtgcaggtaggtgaaagcaatcctctgctaactctgcggtgaaatatcaggagatccacccaagcttctctgcgtgtgcatatcacacgggagcatagctaatcctgcagtggcgctcgtctctggatatcggatggaatcctaagaaggaatcatgttatgaagccttgtgtagctgaggagataatgtccaccatgccagagctctgatcacaggaacattcaaatcctcttcgtggtggtcgatctggttccaatcttgtgaatctagccgggtgcatgagatggctcgggtgcaaaatcaggaaagcaaatggtaagctaaatg

SEQ ID NO: 485313 - DNA, 153 bp, Homo sapiens
atggacttctggtatgcagacggtcagttatcagaagctcaggtatccagaaagtcaggtatgccagaaggtccaggtatgccagaaggtccaggtatgccagaaggtccaggtatgccagaaggtccaggtatgccagaaggtccaggtatg

SEQ ID NO: 485314 - DNA, 246 bp, Homo sapiens
taaaaccctttttttgggccgagaacctttaaaattttccccattggaaaacccgttaatcctttttttcccgggggtgggccaaaaaaaaaaatatttttgggttggaaaaaaatttgggcctgtttttgccctgggcccaaataaaccccctgaggggcttttttgggaattccccccaaaaatggcaaaaaactttaactttaaaccttttgcaaccaaggggctttttttttttgaaatttg

SEQ ID NO: 485315 - DNA, 166 bp, Homo sapiens
tcatgctggtagcccctcgtgatgttgaagatccatcgttcgtattacccagttggcacgtgctgccggtatccacttggtgttggctactcagcgtccatcgaccgatgtgtgcaccggcctcatcaaggccaatattccgtctcggttggctttcgcgacctcc

SEQ ID NO: 485316 - DNA, 366 bp, Homo sapiens
gggttttcccccagcacgagtgtttcgggctgcccggagtcgcccgggagcaggtgcttcaaccaaagttacccgggggccacccgggccggcgggggtggggggaacgtgggggaactgtgttttcacgtgactcagcagtgcccccccccgtccccagctatgcattccctccgtttccagtgagcaaatgtcttgcttggaaagtggacctgggtttgggtttgtcctgagaacttaccagcaaaaatcctcatttttgtggtacgggttttccaaaaattgtcaagtttttttcagtttaacagttcctttaaatgtgtagtttttgaggaaaaaaatcaataaacagttgttttcgggcca

SEQ ID NO: 485317 - DNA, 115 bp, Homo sapiens
caagcagttatacagactcaggttggttaagtttggctgaagatgcaacatgaagggtctctgaccagcgtcctctgacttgaaggccagtgctctttctattatactataatgc

SEQ ID NO: 485318 - DNA, 372 bp, Homo sapiens
caaagggccccccttttttttaaaaaaaatttttgccccccctttttggtcccccctttttttcccccccctttggggggccggggggggttttcccccccccccccgggtttggggcccctttttcccccttggggggcccctttttttttttggggcccccaaaaaaaatttttccccccggtttggggggggcccctttttcccccctcccccgggggttttccccgggggtttttttttccccccgggggggggtccctttgttttggatccccccctttccccccccctttgtggcccggcccgggtttttttttggggaatttttttttaaaaattttttttttttttagggggggggtttgggga

SEQ ID NO: 485319 - DNA, 164 bp, Homo sapiens
tctatcctttctaaagtgtttagagtgttgggacatacggtacaccaattatatcagtacgctgccgaagttgacctggtggtgtgatgatgcagcccaggggtaggttaccgaccagatgtcctccgattattagcgcatcgttacgtgcctgactggctaac

SEQ ID NO: 485320 - DNA, 140 bp, Homo sapiens
tgccggttctgtaggaggtgcagcttcggcttgggtgtcaatcgggtgttccttcgtccgttgcctgccccctagaaaggttcccgcagactatcgggggcctatttccaacgagtttttttcgcgacgggttttccttt

SEQ ID NO: 485321 - DNA, 1381 bp, Homo sapiens
  misc_feature (700)..(700): n is a, c, g, or t
  misc_feature (926)..(926): n is a, c, g, or t
catggtgcgagtttattgaatatcatcccctggtccggtcctatgttgttgggagcgctgccgtgtggtcggacggacgcacggccgtccgcagccacatgtggtgtagtaatgggtagggtgtgcagtgaaaccagtccctttgtgtagaacgttcgtgttgtcggggtagtattggaagaaagagagatgatgtggcaccacccgtgtgggtgtgtaagggtgtatcacccccccgagggggggttgcagcccccccccaacccgggggcccgctgttgtaactgtctaccaatgtgttgggggaacaccccccccggccccccgaagaaaattccgtgggactgtgagaaggactgcgccagttataaacaccaaccgccaacgggggcaccacagaaaaaaggtgtgggaagtgaacagtcggagggttaaccgtgacccgagaaatgggcctaaacgtgggccaataggagaatcttggaacggaggggtgtggaaaaccagtccccccgagttgtggttggtgtgggcacacacagaggtgggagtattgaaggcacacggagaaagtgagagcgcgagaatgcccacggtgtgcttgccccccgcaaagaaggaattcttcccggtgagctagcgaccacttgtgctggccccaaaggttagagctaccacagcttgtgagaaagccccttcnctctctgggcttgctaaggagaggctcacttggaggacccctcaaactgtggaaattgtgtgtgccccaagcctgcggcttctcggccccaacccacgaaagttgttccactggagacccacgcgctcttggccacgccaccacgctatgaagcccaccgacctctaagaggtgtgtgtccacgacacacactggtcttctgcccggatgagaggatgatagaccnctcgtgaagaaatgagaagctcggagagcccacgcgctccacagaaagttctaagtgttataataagcgcacgccttgtccctcgtagaaggtccacaccggtggccacgcgctgtgtcgccacccccacttatttaatcctaggctatagcgcgaaacacatgtgcttacaatactgttgggaatgcctgaaaggaagaatgaagtgggctttcgcgaagtgaaatgttggccacagtttataaaaaataaacttcacttggtttggaccccgccactaatttaggctgttttggaaacgccacagttgaatcccttgagttttcaataataataagagctgctccacgtcaccactcaccacatatattcacgtggtgaaatcttgtttgttactgtcattccccttccttttcgtttagaatcagaataaagttctactttcaaaatatcta

SEQ ID NO: 485322 - DNA, 383 bp, Homo sapiens
tccgggcaccctcaacccagcgccctgcggcaaggcctggaacagcctggtggttttggtgcgctccctttgccctccccgcaaccctttgcgagcacttgttccaggaaaaagaccctggttagggtggaggttgcctcccccaaagggcgctgttggtggggcctcccctcccccattttcttgtttttttggttttaagactcgggagggaggcggcaggcgcctccgcaaccgataaagcagctattgttaccttcccttgcaaaacgggaacccaaccaagtgtgtaccgccggcggtggcgggggaggaggcgactgtgtgtgcaaacctcagtcggaaagggggtggggttgggaaataaaggtttacacccccca

SEQ ID NO: 485323 - DNA, 149 bp, Homo sapiens
acattgaggaatcctttcacaggaatcgttttgccagggcctggagttaagaggagccttcagaggaagcctttgagtttaatccatagattgggcccttccctttattgagacctggagattctgattcgaactctggaggaaacccg

SEQ ID NO: 485324 - DNA, 719 bp, Homo sapiens
  misc_feature (143)..(143): n is a, c, g, or t
gctcaagtttagacgacatgaggctccacaaatgatttcaggactggagctggaagggatacttctcgttgttccttatgtcctccttggctggtcgaagggttgcatgcttctgatatgctcattgccccatatgatgggtntcagatttggatgtctcgccatagatgaggatggtgtatacccgtaaggaagcccagctttgagttaggaagattaggatccacgtcctacaccttacggcaagtggcttggcctgtgtaaattgctctggtgtcctcatcttggatggaacataactagtacctgtctgcacaggttattaactgagtaagtgagaataatgataagcatgatcgtgcgcatacgtgcgaaaggcttgaatcagttgagataggcaacacacgagattgattcattagtcattatgtgcccgtggagcttctcgtgccgcccatacagctctcatctgaggacatctccctgcacctacgtattttgtgatgataatgggtgtcatgctgacatgtccctcctggatgggttcttgccagcacagcagcaagcctgtgctaggcttcaccaccgaagctgcctggccttggacaagccatgtaggttctctgggctttagttttctggaacaaataagagtttgcaagctgaaaggactgtacaaacgctaggcatcagtagaatgttgaagaagatgcaggacc

SEQ ID NO: 485325 - DNA, 623 bp, Homo sapiens
atccgcctcgtgtgctggcatggaggttatcatcacttggggacatttgtgaacattgtctggttggcggccccccgcccttgggccgaatcgcgtccctcgcctcccggtccatttggggcttcccccccccattgttgtcagcaggatcttttgtgcgagtcccgcacccctgcgcagggcgcaccgggttccccacagagaggctgccgtgctccctcgcgactttgtttctaccgtccgggtcctgggtgtgacccccaggtcgtcccacctgtggggcgatgtcttggcaccccccgtttctctcgcacaggcttgccgtctctcgctacgcccggtgccgtgtccaccccccatcggggcccacctcctccgtgggattattggcccctgaaggatcttgctgtcccctcgcctccggctggcctcttttttatttcctccagaggatccctccctcctcgcgcccgggaagcgccttatttgtcctattggtgggcagttctcaccaccacccttgcgagtggcttggctctttttttcgcgcgcccgtcatcggagtcaaaaatataaacaccatttggggcgccctaccaagagagaacaactagacagaaaaa

SEQ ID NO: 485326 - DNA, 909 bp, Homo sapiens
gggcagcagccggcctgagaggagcgtgctgtctcctctctccgcaatggcgtgtgctcgccctagtgatatcggtgtcctccgaacaagggggagtcactcttgtgcataggtgtcactttgtgcctgttggtattcccaagggcttcttattcggaccaagtattgtgcgttgaaactgtggttcacatccgaaatttgtgccgcagaaaagacatacagacagatcgctaatgactggttaaggtgtaatgtaggcaagtgctctatcaggatctacgttgcctaggaggtctgggggggtgtaaacttgggcagagactgggttggggtaggaattcccccaaggaggttgcagaggggtggtgggaacttacatcgggttattcatgggaacacagggctgacttatgtgggagaacagatggtcgttctggtggggaagtggccgaaatgttttagcacccaaaacaataaatgattgaaggcggtatgaccattaggcatgaaggtgaacacaacaaagcaaggaaaatcggaataacggaccaatatgggtgtctgtggcctcattggggttgaacctcaacgatggttactcaaggggttttcatggttctaaacggggtgcatacgctatgcgaggcgaaagttccgtggacactttgccttgtggctaggtggaacgattaaggtttgaaagggctcacaaggaggaaccaagggaaagctggtttggtgccttaagaaactttaagaggccctgggaatggttttcaaaaagggttaatggctcttaaagagaattgagaactggaaaaggcagaaggagaaccagggagtatacaagggcagggggccgggctttatcttaaagggctaaggatcgtacaggctgagcaattctgg

SEQ ID NO: 485327 - DNA, 1499 bp, Homo sapiens
tatattttgtttttttttgggatcccaaggtccccaggagggtctttatttttttcttttacaaacatccggtcactgggggtctcccttggctcttttggcccgttattgccgaaaagccgggcgtttggcacgggccattacggaagactagcgaaggctttgtgaaatttctctttctttccctcaggtgatgactcgagcttttctccgttctttatagacgtttccggacgggcattgtaccggctccggactcagatgtgggtgtggccaagtttctacagtttcttctgagccgagaaagtgtgttcttccccttctcttgtgggggcccagaggggctcttcctgtgggggacagaaggattgaagttttggagcagcgcggaaaacctcctatacagggcgcgtgtgaccaccgttttgggacctcttgcgagaggaacatctcccgggtgggaccatgtgtgtgttcaccggacactacatcgtgcggaattccccacgagacaaatgtgccgcgaagtgtgtatcgcgggggccccacatcttcttgggtgacattcgcgcggtgcacaaacacctttggaatgacctcactttcacaggggttatgtgaaacgcccgggagagagccaggggagggcaggacaacctatctcggggtgggtggggctacccgagaacatccggtgggggggcagcaactgcctgcacatagatttggggccccctgggatttggggcaacccccgtagaccagcgggtggagccatcaacagaggcgcgataattcgcagggcaggcacgccctattgggggattttgtggcccggggggcgctccataaaagagtttcttggggggcggacatcattataacaggaggcccgggcaattagggggtttacgaaccccccacggggttggcgccaacgaggcagcacaagattggcccaatgcccatctggtatgaccaagtggtggtgcgctacagaagacacccatgttccattcaccggaggtgtggagcaaccacagaagacttggccatatcggggccccgtagggggcaccccatggcgcagggaaaaacagtggaacccgtgttgaaaacgagcgcaaaaacaggcaacacccattgttggggagcccaattgtggtcccacaatagacccaaggtgcgacccgatatgggagaactttgtgcgggagaaatatccgggcatatcatgagagggcccaccgcagatgggacacaccaagacggggagggcccccttcttgggaaccgttgaaacaagctgtctcccagagaccctaaaacaagcgggaggtctgcaccaaagacttgtggcccgcacacgcaattgtgaggctcaaacgaggggcactaaatgagatcactcctccaaacaggagagacgaagagtctcctctcgtacaacaccacgacagagatagcggatgaaataagctcgggagcgaagacaagaa

SEQ ID NO: 485328 - DNA, 123 bp, Homo sapiens
acccctgccaaacgtagtacccaatcactaaaacagagggtatttctgttttttgtttgtttgtttgtttgagacagagtcttgctctgtcgcccaggctggagtgcagtggtgccatcttgg

SEQ ID NO: 485329 - DNA, 295 bp, Homo sapiens
gaatctttagcttttaatcatttttccaatttgacagtttaataactggttgctctcttctaatctcatgccttggcacctggtagggcaggaggagctcagtgcaaaaatcactttgggcctcattccccttagagacaagtttgcccaggtgcggccagacagatgttaggaaggttgataaccagttcagtctctacggattagcctcttttcctttccctccattatttagtgactctgagtaagttaatacacccttattttagctgttaagtactatatgaataagtgc

SEQ ID NO: 485330 - DNA, 580 bp, Homo sapiens
ttctattaacttggaaaatataaaatgaataaaacattccaattgggaagataaaaatgaataattcttcctgaaagccgatcagaaacatttacgaaaaatcgtaaagattaaaaatattttagcctcaacctgggtgtaggggagggtccaacatttaaataataaggggtcccgaaagaaagaatgttaattatcacaagaaaattttagaaattttccatgaaagcccagcacaaggtttaacacccgggttacaacaccatcatgacagttcagaacacccagaattaagagatctttaatgttttcaagaaggggggcttaaaaaacctaagtcacatattaaggtacgggaattaaaatggcattagaaatctcaaccagcacgctttggaagggctaggggagggtattatttttcaactgtcattctatgcttagccacatttcttgttaaggccgaatacaaacatctttaagtatgccaaaatctcaaaatatttacaaccatatttactttccatgttctctttctccggaaggtatttaaaaaatgtgccacaccaaaaaaaaaaaa

SEQ ID NO: 485331 - DNA, 108 bp, Homo sapiens
aaatggcgtgcggtcacccgagtcctgggtaaggtaagtcggggggctacggtggaagagtgtggagtcgggaagctgagctgtcggatgagtaagattgatgtggct

SEQ ID NO: 485332 - DNA, 156 bp, Homo sapiens
atccccccacctcagccttccaagtagtgacgaccacaggcttatgcaaccacattcaactaatttggtaaattttggtagacacaagggttcacggtgtggtccaggcgggtccgggtctcaaactcccgggctgaagccatccttccaccttgg

SEQ ID NO: 485333 - DNA, 224 bp, Homo sapiens
aggggagagaagaaaaggaggaatgcagagaagccctccaagaatgatgagtgattcgtgcaggtggagggaacgatgtccaatacctgaagcagaatctcaaaaaaaaaaaaaaaaaccggaattcccaattggtggccttttggttttcgtgtaccacttttggaagcccgaaattgggactaaggggtgtataatcaatttttatgcacattgggtggaca

SEQ ID NO: 485334 - DNA, 162 bp, Homo sapiens
cagacatatttgagaccttacaacaccccagacatgtaagttgctatccagagctgtgctatccctgtacgcctctagccgtaccacatggcatcgtgatgagactccggatgacggggtcaaccacactgtgcccatctaagaggggtatgacctcaccca

SEQ ID NO: 485335 - DNA, 1264 bp, Homo sapiens
  misc_feature (312)..(312): n is a, c, g, or t
  misc_feature (1264)..(1264): n is a, c, g, or t
agcgggttgagctctgttgaggaatccaaagtaggcccgtgattgccacacagacaggataggaggagagtatgtgtataacgtcacttgtccgatcaaagtacaaccgagaactcttagaaaaagtcacgacattgcgtcatcgcgaatcattgtgtggctttaataatcaactctttcgaatcctacagtgatgaatagtaagacacggtacagatagagactaagaagactattgactcctcctacttatctgatcatcgaataccccaatgacaatgtagcacagatgtcgaaaacaggagatgaccnacttatctaataacgcgataattctattgcaggcaaagaataagaggattcaaaagtccggatctcatctagtggcatgtccagacagcatcattattgccagtcacgtccatgtcgaaactcatcacttctcctcagtagaattaccttggttaggggtataccaacggcataattcttagcataggggattgtgccccacgaatggccaatggagatacgaagaggttcaatgccaaacgggatggttttactcgagaaggcactcacagggcagggattctccaatggccccaggtcatggcacatgacatgtctatccctctaagtggaggatactttgacacgcgctgttctctgtgacacaagtcatttcccacgatgtgaattatatatgaaaagcggagtaggttcttatgtcaggggaatactcccaaggaggcaaaatggaaccgtcatgctagtggccattaattagcggtttagaaatgaaccctgatttcgccacgatgtacatgacccctagaatttcgaatatccacaacactgaggttagttcaatgcagcggaaagcactttgtgtcacagttgcagccatggatcaaggaatactggcagacctaacaggtttgattgccctggaattttttacttgggcacatctgtaaatacttaggcaaacactagcaagtgctttgaaagggaaggcgtaggtacacacaagctggaacagggttaggttcactttaaatctccgaggaaccttcgggtaataccgcgacttggactcgttaaacccaggaaaaaataaggtcccttttacgcgaaatttcgctcgcgcccttaagcgacacagacacgaattgttggtttccaacactaaacgatgtaacacgtattcagagcacagccccgcctattggcgcttatacttggatccgccgtgaccacn

SEQ ID NO: 485336 - DNA, 221 bp, Homo sapiens
  misc_feature (98)..(98): n is a, c, g, or t
cccatgctgtcttcagatggtatccgtgtatatattgcatcttcctctaggctctacacgatgaacaataacacaataagatgtgcttggtttcctanaagccaacaaaattaagatttgacatgaaaaagatattgcctccaagtgaacgagaatcgcgtaagacgtgatgagcagaggattgtaccttgtacaatagtcgcatcagccactaggttacc

SEQ ID NO: 485337 - DNA, 430 bp, Homo sapiens
  misc_feature (21)..(21): n is a, c, g, or t
  misc_feature (65)..(65): n is a, c, g, or t
  misc_feature (87)..(87): n is a, c, g, or t
  misc_feature (91)..(91): n is a, c, g, or t
  misc_feature (96)..(96): n is a, c, g, or t
  misc_feature (99)..(99): n is a, c, g, or t
  misc_feature (103)..(103): n is a, c, g, or t
  misc_feature (106)..(106): n is a, c, g, or t
  misc_feature (110)..(111): n is a, c, g, or t
  misc_feature (113)..(116): n is a, c, g, or t
  misc_feature (144)..(144): n is a, c, g, or t
  misc_feature (146)..(146): n is a, c, g, or t
  misc_feature (148)..(149): n is a, c, g, or t
  misc_feature (163)..(163): n is a, c, g, or t
  misc_feature (172)..(174): n is a, c, g, or t
  misc_feature (176)..(177): n is a, c, g, or t
  misc_feature (211)..(211): n is a, c, g, or t
  misc_feature (224)..(224): n is a, c, g, or t
  misc_feature (228)..(228): n is a, c, g, or t
  misc_feature (230)..(230): n is a, c, g, or t
  misc_feature (234)..(235): n is a, c, g, or t
  misc_feature (238)..(240): n is a, c, g, or t
  misc_feature (242)..(242): n is a, c, g, or t
  misc_feature (244)..(246): n is a, c, g, or t
  misc_feature (249)..(250): n is a, c, g, or t
  misc_feature (253)..(253): n is a, c, g, or t
  misc_feature (255)..(255): n is a, c, g, or t
  misc_feature (265)..(265): n is a, c, g, or t
  misc_feature (279)..(279): n is a, c, g, or t
  misc_feature (288)..(288): n is a, c, g, or t
  misc_feature (290)..(290): n is a, c, g, or t
  misc_feature (295)..(295): n is a, c, g, or t
  misc_feature (297)..(297): n is a, c, g, or t
  misc_feature (300)..(300): n is a, c, g, or t
  misc_feature (303)..(303): n is a, c, g, or t
  misc_feature (305)..(305): n is a, c, g, or t
  misc_feature (307)..(307): n is a, c, g, or t
  misc_feature (311)..(311): n is a, c, g, or t
  misc_feature (318)..(318): n is a, c, g, or t
  misc_feature (322)..(322): n is a, c, g, or t
  misc_feature (324)..(324): n is a, c, g, or t
  misc_feature (331)..(331): n is a, c, g, or t
  misc_feature (361)..(362): n is a, c, g, or t
  misc_feature (381)..(381): n is a, c, g, or t
  misc_feature (390)..(390): n is a, c, g, or t
  misc_feature (406)..(406): n is a, c, g, or t
gcttccagttgtataaaagtntagcacatgcaattatgtatagtacgtaataggggataataagngattacattactagtttaggtnattnatggnacnattnggnttannannnnagactgtactccttctacttattaaaanananngtaacgggaaaacngcctcaggnnngnnggtggggggggagggggagggggggagggggggnagggggggggggngggncngggnnatnnngnannnggnngangncattccagtnggacaagatatggnggtaaaagngngggananggngangngngagncgggggngggncnggggaangggggggggggtttaacaagaaagtttaannagtaacaaacatttttaanacaaaaaantttttaaatagaaaanagcctatagaataaggacagaaat

SEQ ID NO: 485338 - DNA, 1322 bp, Homo sapiens
  misc_feature (1322)..(1322): n is a, c, g, or t
agcgggttgtgcgtcttgcggtcggcgtagccatgccgtctcgtgtcctatcagcctatgtcaccgcatgctttcccagcggtcttttgcggcctgatgcccctgggtcctggatgctaggccggtggcctcctggtctctcatgcagtcgtgctctctgctccgcgggggagcccagagtgaggctctggcgtaatttgcgagcggcctttaggatagctctgcgcaggtagcctggtagcatgttccgcactttgtgccctgacagggtagtagcagcacgatgaccatcgcttgtgcaccgtgcataggcgagcaagtaccaagggaccctgttgttcatttagcgatagtgagcagttcctacttgtacaatgcatttgagcgcccagatgaaaatcgcgttttcacgttacaatttttcctcagttgcttattgaaaatgcgacccttggtgctataagaaccttgtgatgggcgtccacacgttgtcacgaatttagtcactgtttccagtgcgacgagaaccgcaacgatagagcgcgatcatcggagaaattaccccttgacttacttaagaatttgccttgacaaacaggcttaacattgcttgttcccccacaagacaacttttgctaacacttaactactatggcaagaacttataggaaccgtgacttgtctcttatttgtaacataaaccatgttaggtctagtaaccccccatttgtggggcctttaagcccttgaaagcactagcgcgatacttcggtcaactgtcgttgcggatgaaacgacaagtgaacttggtctcgtttgtaccgacccaccatttttcagccccagttacgtcgcatatagatccccgctgcacaggaccgtggcattcctgaaatgggcaccctgggtacaatatcacacactgtggctattgttgattacttacatccgtttccgcagtgaaactggagttcgttaatgcagtactccgtgcgaggtccttaacccctgacatagatgaagccacatgcagcccagtgcaatccgcgcctcaaaatgctgtcctagatcacttatcacaaatgacgagccactcacggaaccaaagtcaaaaattgatgcctcgagtcagatgtgaagagccataatgctgcgagcgtgacgagaacaatattcgggtaggaacatgaaacatcagctcgtttgcagcacgcactctcgctccggcccaccgaactctcgacgcgttaatgacgcaagtacctgtgcacgcatgacagtgaacatgaacctagccaaatcaagacacaaaccacacccan

SEQ ID NO: 485339 - DNA, 163 bp, Homo sapiens
  misc_feature (107)..(107): n is a, c, g, or t
  misc_feature (144)..(144): n is a, c, g, or t
tgacttaaggaccccggaccttacctgatgcttgaggactgaagctagctatctgttagcttgtatgacagtataataagtggatatcatgaagtctgctaatgatngggaaaactaaaaaggagcattaacctatctgtgtgnacacgcccatgtactgtga

SEQ ID NO: 485340 - DNA, 529 bp, Homo sapiens
aactcttaaggcagagtgcgaaggagtgttgttttgtagtaaagggtttggtgctgtttataatacagtacacactgtcatgctgcgtgtttcacagattaccaaaattatttactctacactttttcaaaataacatttgagattgaggttccttcactgagtagtctggaagatatagtctggataatttgctatgaagttatgagggatacaagtgaaatactggggaagaaaatggattggaaagtaaaattggtactaaagcccatactgattatcttgactttgttttttaaggcataggtatatattttggatcaaaatccttccaaatttgaaaactcaataaaaataacacttattaaattctagttagtgtagcactcatgctgaagtaaacatgatcgtaggcagaagcaaaattttattataaaatctaaaacaaaaccttatagagttgaatctattccatctgacttcaatatttgccaaacgtttattttacctcctagattgatgttggtata

SEQ ID NO: 485341 - DNA, 737 bp, Homo sapiens
atacggctgtaatcctgggctacttagaaactactgtggactggtttagaaggtataaggttcctgatggagaaccagaatatgagtgtgcgttgtaatgcacctaattcataacgataaggactttgccatctagatattattagtagcactcatgatcattggaaaagcattaatgactaagaaataagcgaatgactagacatggagtaatctagattgcgtgaattcaacttagtctgagagccccttcaagtgtgaatcctgcatgctgtcagaagtccatttcgtgggatgcttatacccaacaccctgtgaatctgtcctgtcacggtcaccaatcagacgtggataagtggtctccatcaccataaaaagtactgagatttctctggaaatatcacagctcgatattgctacatcagtgttcatctgggatgtgttatgaatgtaagaaggtagatgaggctgtgtcaaagctttaaatttgttagaagtcatcttactaatgtcaattctgctgtgactatattccactattgtcatgaatgtgattccactctataagcatgatgcatgatctcatactaagatagacttatagcacatgcttgaatatcaaagcagttagtcatctggaagtcgctagtcatttagatgtgcatgggagctcgtatgggtgttatgttgccatatgtgaggaaataaatgatttttggtgaagcttgaccctaaag

SEQ ID NO: 485342 - DNA, 415 bp, Homo sapiens
ctcccgggatcacgtgatctccgtacctcagcctcctgagtggctgggattacagacatgctccaccatgcctggctaattttgtatttagttttagtagagatggggtttctccatgttggtcaggctggtcttgaactcctgacctcaggtgatccacttgcctcggcctcccaaagtgctggggatacaggcatgaacccctgtgcccggcctaatttgtgtattttcagtagagatggggtttcaccatgttggccaggatagtcttgatctcttgacctcgtaatctgcccacctcgactcccaaagtgctgggattacaggtgtgagccactggacccagctgccaagaattgttttaagctttggtttgagttaatgtatatctaccgcattgcaacacggtctctca

SEQ ID NO: 485343 - DNA, 109 bp, Homo sapiens
agtttgcatgaggtgcacgcagccacctcctctccagcacagagcctgaaggaggtgcgagcccaccgtgtggtcctggcagcatgaaactcaaggtgccatcttagcc

SEQ ID NO: 485344 - DNA, 963 bp, Homo sapiens
tacgtatgtctttcctgggttgtttaatctgcacgatgtgggacatgcgggcacgattgagactgtgaccagtgtcatctgcctcctactgtgcagctgctggtcacagcacatcctggcagccctgacctgagcatgcattgctgtgtgcctgcctgtgaccacctgcaatgttccatgttggctactacaatgatctgctgctgccactacctgcatgtgcgctgctgtggccatgtgtcttcctgtgcatgtttctgcttcccctgctgtgcctgtgtgttgtgttgtgatgtgattgaccttgtgatgtgttgtgcccctgtgacgttctttctgatgtacttttctgtgtgccatcctatcctgcttgcttgaagtgcctgaccccttcccttgtgtgttgctgtctctgtgccattgtgacattgatcaacttgtgccaatgtgagcatggaattggttgtgagctgccatgcatgtgcctttgatgcttgcttctacctgcacctgacttattatcccgttgtgcctggtggcttgtgcttgctgtttgtgcctgatgtctcttcgtgtgcttggagtcttgtgaagacccaaagttgtggcccaaaaggtggcctattcttggcgaacgtgatctttgtgagttgctgtgcagtggcctggaagtcatggctgttgcaatgttggagctgtgtgcccttgcacttacctgcccccttgagtgacttctcacacggagatctgactgaccctttttttgtggccctgcaaattgggtgttgttgatggcccactgtgtggcatgttttcattttttggaccaggccaaccctcacaaaggcttatcattcataatgcctgtgagacccatgcaacgttatggtggcaaccttttccaccacaagggcctgggaaccctttgtcttttacctttggaatgtgcagtggaagggccca

SEQ ID NO: 485345 - DNA, 162 bp, Homo sapiens
gtgtaaatcggagccggtacccaggtcttttcccctcaaagctacatttccatccagtcttcacatttagctgattatcttgcctgtgtaatcgggatatgtcgaaagagaatccttcagggattaagcctacctacctatccagctgcgtttcacttccga

SEQ ID NO: 485346 - DNA, 138 bp, Homo sapiens
taaagaggctactattttaattgacaatgcttttggagtcggggagaaaaaatttaaaaccccaaaatttctttcgtgttacctcaaaataaaaatacacatgtggatttatgaacaatattaggttaacatatttcc

SEQ ID NO: 485347 - DNA, 281 bp, Homo sapiens
gcacgacgcgtgcgattacacatgtgcatcttcttatattttaacacaagacattattgcccacagaagagggactttagatcatggcttacttttcgacattggaacatttagggcaatggcaaaagtcattattgcctatgctcttttcttaatttgtgtttcattagatagccactcaaggaaacaccatgaaagatactgacatcaagagactgctgcatgcccatcttttatgcatattttcaattatcctaagcatcttcattccatcattcttc

SEQ ID NO: 485348 - DNA, 88 bp, Homo sapiens
gcctgcgccgacgatgcccagaatccagaactttgtctatcactctccccaacaacctagatgtgaaaacaggataaacttcacccag

SEQ ID NO: 485349 - DNA, 723 bp, Homo sapiens
  misc_feature (723)..(723): n is a, c, g, or t
ggagatggggtttcgccatgttgcccgggttggtatcgaactcctgagctcaagtgatccgcccaccgtggcctcccaagatgctgggattgcatgcatgagccatcacacctggcctatttgctggagaattctattgagccctctctactaaaaatacaaaaagagtagctgggtgtggtggcacacacctgtagtcccagctactcgagaggttgaggtgggagaatcgcttgagcccgggaggcggaggttgtggtgagccgagattgcaccattgcactcaagcctgggtgacaagagtgaaactcagtcaaaaacaacacccaaaacaaaaaacaacacaaagacctgtgtcgcgcgccgcccgggcccaccggaaaagaggtggaagaaccattcgcgatggcgggccgcgggcccccagagggttagcgtgacacgtgtgccacaacgggacccccagaggacaacaccggggaccactgacacaaacggcgggaggggagctacactcaccccacaaagtctagaaaaaaaagaggccccagggaggagacaccatacgaccggcgacttccgacgaacccaagaactcccagagggggagcagatcccaaggaaggagaaactgcacggggggacccgaactcaagcaccggcgactaccccaaagggcgaagcgcggagcagcaacgttagcgaccccggagcaggttaggn

SEQ ID NO: 485350 - DNA, 108 bp, Homo sapiens
ccgtggtatgaaattcttctcttcctcagctgatgactcgagctttctcctttatatagatcaaaaggagaaagctcgagtcatcactgaggaatgagaagaatttca

SEQ ID NO: 485351 - DNA, 250 bp, Homo sapiens
gatcaatgcaatggagcctgactcgacttgtcgtgctgtcgctcttcgtcgacgaccggaggaaaatgcgagatcagcgatgcagcgtcactctcggaaaggattggaggtaacgcctcaatcagcggattaccttgaaactccagaacaggagactcatggtacttcgcgaaattctggacactccgattcatttgctacctcccgggcggaaccgactgagcagatcaattacctcagcaccccggtg

SEQ ID NO: 485352 - DNA, 376 bp, Homo sapiens
ccaacagggaagatgagttttgagttttttcctgcttctaggatgatagagagcaatcttcaacctgggccttattcctacataagtagctgaaatggggtttgtcttggaaattctctgaaagttaagattaactaccagctggtcttgattcctccttaccattagagtgctcagtaatcttataaattgtgcaatcatttgttttgctttacttttttgttgttgtttatttgtttggttccgtttttgttgttttagtcttttttccattgggtttgaccactctagttgacttggtcaaacctgaaggaaagttttaaattatggggaacaagacctttgaactggctaaattcctgaagctggaaaaaca

SEQ ID NO: 485353 - DNA, 290 bp, Homo sapiens
ggagctttcagggaagggcggtgcgcgccgcagcgcgagcctcgctcggggtgcagccgaatcggctgcggtaattccggctgaactgcgcctggtcaccgaagccccattgataggcgatttccgagatgctcttgcggcatgcgggatcacgcaacatggcgtcggacatcgaaaggcgttggttccggatataggcgcaaacggtgatgccttccccctcaaaaacctgatgcagatatctgagcgagatgccacagccgtctgcgaccatttgcggcgtaagccgc

SEQ ID NO: 485354 - DNA, 344 bp, Homo sapiens
ccaactagtacggcagtcaataataagctaatctaccagaagaagggctatcctagaagggcactagcataagtcaaggatagagaaaactcgcaaagtcaggcactaggagtgtaggaaacattgagatagctcaggaagcagccaaagcactaggatagacaagaactgctagggaaaagctagggagaagtaggccctgctagcaggggaaccaccagatagtaggaaatagtagctatacagcgtaccaaaaactttgacaaactatatccttcctagtaatacttatacactaggcaacttagaaaaaactatcgtaaggatgatgaagatagctagag

SEQ ID NO: 485355 - DNA, 239 bp, Homo sapiens
gcacgagctgggatttaaggagaattgagagaatgtacccacaaatcccagtgatgcttttatacttgcaacacgtgtatccacctctagcttccctgtgcagaaatgtttggcattggaatgtgaggtatctctcaggaaacagagtggcaatgggtaggatgaaagcatcactgggatttaaggagaattgagagaatgtacccacaaatggcagcaataataaatggatcacactt

SEQ ID NO: 485356 - DNA, 174 bp, Homo sapiens
cacgaggtgtttgcgtgagcatgaggcagaaccgtccgcccgcttcggtgccgcagtccggtgtggggcacagtccgacggtgcgccgctgagtgtcgagccgcccgacgcgcaaccggcggccgacgagttcagctgggtaaggtgctggcaatgaccaatttcccggagccg

SEQ ID NO: 485357 - DNA, 384 bp, Homo sapiens
atgtacaatataatacaataaactccaaaaaggaccccttagatcaagagagagagagagagagagagagagcgcgagcgcgcagcccgtacagccgcagtgtgaatgcccacactgcctggttgggggccactgactcattgcggcatgggagacctaatcagacccaggggacccgtcaggaggtggctgtgcccaggctcaaggccagaagagagacagaggcagtgagggtgacgggagagccagacaaggacagagaggtagagcaggggacagagggcgacggaagaaggaacgggcgcgtgggaatgtcgaaggaccacatcacgctgggagcagtgcataggttggctgcggggacaccagggctctactacctgg

SEQ ID NO: 485358 - DNA, 149 bp, Homo sapiens
tcgactagtctgaagaataccatctgaaagaactagatggtacacaatccccacatttaaaatggacagtcaggtttatttaaacgtaaatacgactattttatctatactgggtcaggcttctctgtgcccttcgcctacgtagtgtc

SEQ ID NO: 485359 - DNA, 123 bp, Homo sapiens
  misc_feature (47)..(47): n is a, c, g, or t
  misc_feature (65)..(65): n is a, c, g, or t
  misc_feature (68)..(68): n is a, c, g, or t
  misc_feature (106)..(106): n is a, c, g, or t
  misc_feature (121)..(121): n is a, c, g, or t
ggcaggggggcgggagcgcggcagaacggctctctggtcttccaggnccttccgcaccttcttgngcntgtagatagatggggcagtcccggctggtgcagatgangtcctcgtgtaggangc

SEQ ID NO: 485360 - DNA, 102 bp, Homo sapiens
  misc_feature (23)..(23): n is a, c, g, or t
atattacgatgaagtcatcacgncagttatgatcatcatagaaattcttcttcagttcaccatgtcctgtctttttgcctttttgcctttttatcaacttgg

SEQ ID NO: 485361 - DNA, 363 bp, Homo sapiens
cggtccgtatctgtctcggcgctggctcgataccttccagttgtctgatgcaagccacgtgtgtgctgctcgcagctgtagtatgaagaattgggcaacaacctaccctggatgccgggtgcccgggcgtctttgagaccctgcccaagatctctgccctgtgtttgctagatgtgccctcattccctaccctggctgacatcgcctggattgctgcgggtgacgaggagacatattgcccggtgtcaggagtgatacgcgcccccatgaggcacacctgataaacccagtcgcgctctgtattgtcattgcagaagctaatgccgtctgattcccaatcctgatgtggagtccagagcgaga

SEQ ID NO: 485362 - DNA, 248 bp, Homo sapiens
cagctgtgatagtgagagtctgtcatcaaaaaaagacaaaaaaattaggctatacatgaaaaaataaggaggtccagttcaggatacaataaattctggctgcatgtcaaatcaccaccaggaaattctccccaatcccgactgacccatactgtttcccacaagggctccacacatagtcagtatcccgtgcttccactgtgtgtccaaattctcctcttactggttttcttaaacctgtattggtt

SEQ ID NO: 485363 - DNA, 557 bp, Homo sapiens
agcgtatggttttgccttataccatacgctggaaactcataaatctaaaaaagagtaggtagctacatgagcctgtagtagctgtttaccagtttttctgaaacattaacgtatttaatagagtcaaagtaaagactattatcacattagaatgaaggtatgcatgtatctaatccgttttttttttttcttcttagacggccaaggaaatctgatgtggaagggaaaatagaaatagtgcagttggctagccggacacgccaactcttcgttcgattataagctttagtgaaaggggctaataaggcgggcaaaggggaaaaaggtgcggggagttaaactttttattttacttggtataaaataactttccgaaggttatgatagacatagttttacatttaagctttaacttatcccggcggattggagtgacaggtgaataatcatatttctgaatgataaggtatatttcggcagaaacttagtattggtttagggacccctgatcagaaagaagaggagatagctggagacatcattacgcgggaatggaa

SEQ ID NO: 485364 - DNA, 108 bp, Homo sapiens
caggcaatgctgtcgaccagggatgtgtaggatgctctttgactacctggcggacaagcatggttttacggccaggagatatttagtatacactctacagagtgcaaa

SEQ ID NO: 485365 - DNA, 134 bp, Homo sapiens
gcggccgcctactactactactactactgctcgaattcaagcttctaacgatgtacggggacatggtgaaaccccgtctctactaaaatacaaaaaaatagctggacaacagagcaagactctgtcacaaaaaa

SEQ ID NO: 485366 - DNA, 106 bp, Homo sapiens
tggtgtaagggaccgtgctgtagtaagggaacgtgcaggtgctaagggaatcgtgctggtgctaagggaattctgtgctggtgctaagggaatacgtgctggtgct

SEQ ID NO: 485367 - DNA, 457 bp, Homo sapiens
gacattcgggcttgttttattggcatttaaaaacaacttttaaaaccccattttttttgcccaaaaaaaaaaaaaaaaacccaaaaaaaacccgccccagggaaaggggatcttttgccaattttgggaaacttgcctttgggaccccctgggctttggggtaaatgggggggccaacctaaaaccaacctaagcctccagggccccccacgggggggtggggcccccctttaaaactcctttttgaaggcttggggcatctgccccatgattaggaagggcccccctgcccccgttataaatgcccatttcacactggcatggggatagggactataaaacggcccttaaaaacaaaccaaaacctgagggggaacccggaagggacccccaccccctggggctttgctctcatcctagcttattgggccaggggcccctttggcatttccctttt

SEQ ID NO: 485368 - DNA, 188 bp, Homo sapiens
aaaaaacctgggggcttaaaaaaattagggctggattaaatccacccattttggttaaccaggcaattcgccttttttggggttggccttaaccttagtaaaaaggccctttaaattttttttaaaagcctttgaaagccttttggttgggtttggtttttttccattaaggtttttatttggggtta

SEQ ID NO: 485369 - DNA, 1406 bp, Homo sapiens
aatgctgctctggtttcttgcgcgcttggcgctacagggagtgcgggcggcgactccttgcgcaagtcagcttgcctgggaaagggctttgtggctgaaagcgactggttccttgccacaaaggctccgctggcgtttgcggttcagcggccgtccctgagtaagatagccacttttctccgacgctgccaatagccttctccaagtgctgcaggctttcatcgctttgcaggagccatgcctcggggacggaagagtcggcgccgccggaacgcaaaggcagctgaagagaatcgcaacaatcgcaagagccaggcctcagaggcttcagagaccccgatggcggcttctgtagccccgagcacacccgaagaatacctgagcggcccggaggaagacacaagcaccctggagaaggcctccagtaccccttcagaagcttcgagcactgccctagtgcaaaagccggttacccggagcaattttcagggcaccaagaaaagtctcctaatgtccatattagccctcatcttcatcatgggcaacagcgcaaaggaggccctggtgtggaaagtgctggggaagttagggatgcagcctgggaggcagcacagcatctttggagatccgaagaaggtcgttacagaagagtttgtgcgcagagggtatctgatttataagccagtgccccgcagcagtccagtggagtatgagttcttctggggccctcgagcacacgtggaatctagcaagctgaaagtcatgcattttgtggcaagagttcggaaccgatgctccaaagactggccatgtaactatgactgggattcagatgatgatgcagaggttgaggctattctcaattcgggtgctaggggttattctgctccatagagagatcctaggcaaacccttaggagtggaaaagagaatccaaagtatctgctccatggagtagataggcagggtcctgaattcaaaaggttgtggagggtggggagggcactgtatttggtatttgtgaccagtgctaattgttaaactgcaaagtagtgtttgctatagatattgttatcttgtattcattttataacactgttgactaagaatcacaatatgtttaaatatatacttgaggaaaagtttatgttatttttttctgtcgttggcatttgatattaacagctgtgctaaccttattaaatgaagtctttgtgtcatgttgtgtgatggatagaaagtaccactgagaggctgttctttgaaagtttggaataaccagtaaagtgtgagtggaagaagattacagatttgttctgtctttcccttgtgtctgatgtcttgtaatggaacacatttgtaaatatgctcactgtgcaaatagtataaataaaagcatagtaaac

SEQ ID NO: 485370 - DNA, 267 bp, Homo sapiens
cgatgatccattcgattccatgtgatgattccattcaaaatctattcaagtgatgtctccatttgattccattcgaccatgattgcctttgattccattcaatgattccattcggttccgtttgatgataattccgttcgattccatttgatgattccatttgattccattggatgagtccattcgattacattcgatgattattccattcgagtgcattagtatgattccattcgagtccattcgatgattccattcgattccatt

SEQ ID NO: 485371 - DNA, 514 bp, Homo sapiens
ttatgggaaaaaaagttccctgggggggggccaacccaaagggtaaagggggtttcgggggtttgggggaggcaaaaggggcttttgaggacaaaggggggggaaaaaaagcccaaaaagattttggggcaaaagcccgggggggtttttaaggggaagagggtttccaggagggaaaaaaggaggggggttcccccaccccccaagaaaaaaaacgaaggtttaaaaagttttggccccctggtttccccttttccatttaaaaaaaaggatttgggggtttttttggttcccggaaaaaaaaaaaacccttttggggcctttccaaaccggaaacaatcccgggggttccctgggaaaccggtttggttaccatttaaggggaaaaccggggtgggttttgcggggaaattaaaaaaacctttttaaaaagttggggaaaaaaccaacccccttctggaaagtttggaattaaaatggtttttcccccgggcaaaaccccttttttttccca

SEQ ID NO: 485372 - DNA, 215 bp, Homo sapiens
tgagtgctatagcgaggagatactcgttctgagaacctctgaggtgatgggatctgtgcctctgggtcagggtattatgtgtagtagatgtagtgccgagacaggagtattcgctcttgtatagccaggctggagtgcaagggaaaaatcgtatggtctagatggacagcatctacctcgcaggtacaggctattctcctgcctcagcctcccga

SEQ ID NO: 485373 - DNA, 845 bp, Homo sapiens
attcctaggctccgacaatcatggtcaacagaagatcaagctgcaaatatgtatgtcgtaaaacttaaatgataaagctagttaagtcttgctaatgactagttcaaaggtcatgggtacattggacctaagttaccgttctagatcgtatagaagaaagatacatcttaagcacagattggtgtatccaggaattgagtggggggaagaggtttgttgtggattctttcatactgcaagagaagaaaccatttgcctcttggggaatgagctaacttctgatctagtcttaagactagaatgctaaaaacaaaaacatgaaggaaattaaaacccttattattgaaattgattgtaaaaacattgttactggaaatttatgggacttgaggccttcctccagaaaataaggacttgattgtcaggcctatatgaggttctgaaccttaatgccatgtattgtacttactaaaaattgtgtcaatgaaaagtacattagcagtatgaacttctggtccagttggaagttttccatgtgaaaaatgtgatgtttgcatggaactgtttgaaacttgtttattttctagtcccccctccgcaaatgtatagaatttaagctagattttcccctttggataaagacaagattgacgtgttatgggaattggtgttagtagtaggattacgtggaatatagattatataagctaagctaggagctttgaaggaattctgactatttggaccggtgcaatggtcacgaatgaggaatggcttcaacggctaagggggaaaagagggaacaagagggcattaaaagggaggggcgggaataagggatagaa

SEQ ID NO: 485374 - DNA, 217 bp, Homo sapiens
gtatcctgtgggcagatagccacatcccctatgcctggtaccctatgcctagtggtacccacatactgggtacacacacacacacgcacacacatttttaacgagagggtctcactctgtcacccaggttggagtgtggtggcatgatcttggctcactgcaacctccgtccggggttcgggcagtcctcccacctcagcctccttggggcctctgg

SEQ ID NO: 485375 - DNA, 304 bp, Homo sapiens
cccttttgggggcccccccccatttttcccctttagaaaggtggcaggaaatttggggaaaatttgaaaatcccctttcaaaaaaaaaccatggggccaaaccccccgggctttatttttgggggtccccttttaaaagggattgtttttggccccgtttgtttaagtccgggctcttattgggtcaaaaaaaaaaaagttaacttcccttttttgtaaattagggaaaaattaaaaaaagaaaaaagggggaaaaacattggaagaaaaaaaccgggttttgggtttttttttaaaacaccca

SEQ ID NO: 485376 - DNA, 496 bp, Homo sapiens
atcctgtgtcatcgttctgcggagagtgtaaaagtatttgtgtgtgatagctaagtctttacataaaataacactgcttattgattttattttaaatatttgtaatgcttaatttatatggttggtttggttgatatgttctttattaaggaagcaaaatacatctctcgtactgtcttgctattttgagatagagcatagcctttaattaatataatctaaaaatatttagcatatacttgattaattcaggttcataaggattagagtaaggacagagacgtaggacgtgaataaaatcattcagttaagacttggtgaacttattaagtgcttttgggcccatttaggcatgggtgacttaacgtactgggcaaaagttgggtaacttagctccattctttgtgttctttgaacgttggtattattcctcatactcttgtgtcattaatgatgaagaccctaattaccaagctgtctatgctaatcgcattac

SEQ ID NO: 485377 - DNA, 199 bp, Homo sapiens
tgtctacatccagtcgtcgtctgcgtgagtatcctaatatttccatgcagggaagggcgcgctccgactggataagcaatttatttcccgcatggcatagtgtttttgcactacaggctctaagtgtgagaacctggtctggatttgtttgaaattatttcaccaagaaagatcataaataaatgtttctttcaagaaa

SEQ ID NO: 485378 - DNA, 457 bp, Homo sapiens
gcaggtgtggatgtaggtgtgggagtaggtacaggtgtagatgcagctgtgggtgtggatgtaggtacaggtgtagatgcagttgtgggtgtgggagtagggtcaggtgtagatgcagatgtgggtgtaggagtaggcacaggtgtagatgcaggtgtgggtgtgggagtaggtacaggtgtagatgcaggtgtgggtgtgcatgtaggtacaggtgtagatgcaggtgtgggtgtggatgtaggtacaggtgtagatgcaggtgtgggtgtggatgtaggtacaggtgtagatgcagatgtgggtgtgggagtaggcacaggtgtagatgcaggtgtgggtgtggatgtaggtacaggtgtagatgcaggtgtgggtgtggatgtaggtacaggtgacgcagaagtgagtgtggatagtcgacgcggccgcgaatttagtagtagtaggcggccgc

SEQ ID NO: 485379 - DNA, 166 bp, Homo sapiens
gagtaagtgactcagactacatccaagggaatgtatattagggcgatcccaatatacaccacaagccaaacgacttccagcgtatcctagtcttcagtacttaacttcattataccaccttatgcccaagtcatactagctattattcataggaccacacagtagt

SEQ ID NO: 485380 - DNA, 924 bp, Homo sapiens
ggagggcacgtgcatgcccctctggcttaagagttgcatgggtagtcggtagcggatggagcacttctggtactcgtagtagtacaagcccgaatagacggaaatagtagccgagaccattccttgagtaggagcagaacgcggagaatctcgacatgtagacatatcattgaaaagatgtcatgctagattaaaggggggaaatgcgcaatgcaatgagctcgacgaaaggtagcattaaagtatgtgtagtgctacttgaagagagaagccgagtacgggttgtagctatactatagtatgaaaaactattactgacgacctttctatgaggatcgagacatcacttggaattcattttcaaacatggaagttcagatttgttctttatatcgatgtttggagttcgccattaataacgaagcgagcaatatgaatcgtgagtaagtaggtacgtcatgtatgatttaggatgtgctggatgattatttgaatttgaggtattgagaagtggggtctctctaaatggacattgatgaacagtgaatgtcctgagggaaaataaaccatgggtgatatttgctggcgaatgatttcgatgtaaccagaagattatagaagactaaaaagtcttcttatgatttcttcagaggcccacagtatcaattatcgcctgggtggatagacgatggtccggagcttcactggacggaaacggcagaatgtctttcgaagctatagtgccggggaaaccatggtgcgaacaacccgatggctggggagatggagccatagactggcgaggggaacagtatgacagccgagtatcgaaagcaagtgcaaaaagatccaacgcaccttgcttcacacacacaaagatccgaacataaatgctcacacatctgtacaccggctaacaaaaaa

SEQ ID NO: 485381 - DNA, 1065 bp, Homo sapiens
  misc_feature (301)..(301): n is a, c, g, or t
  misc_feature (319)..(319): n is a, c, g, or t
  misc_feature (353)..(353): n is a, c, g, or t
  misc_feature (417)..(417): n is a, c, g, or t
  misc_feature (429)..(429): n is a, c, g, or t
  misc_feature (434)..(434): n is a, c, g, or t
  misc_feature (486)..(487): n is a, c, g, or t
  misc_feature (489)..(489): n is a, c, g, or t
  misc_feature (500)..(500): n is a, c, g, or t
  misc_feature (513)..(513): n is a, c, g, or t
  misc_feature (521)..(521): n is a, c, g, or t
  misc_feature (530)..(531): n is a, c, g, or t
gcggacgctgaggcagatctgaatatgccccaggttcagaagatctcggttacaccttttaatctcctctccttccacccctcatttcctttttgcacacattacaggtggtgtgttctgtgataatgaaaagcatcagaaaagctttgtacttgtggtttcctctattttgaattttttgatcaaaaaactgattagcagaatatagttggagttggcttcatcttcctggggttcccctcactcccttttttgtcaaccccatctgtagcctcttcctctactcaggcagtcgacccgncacgatgagaagtgggancagcagagggcgccaacttcaggagtccgctttncccaccaggcttcattcacccagtggacctgaactgtttggtagagccacctcggcccttcctntcctcatatgtntgttntggtatgcgcacagttcctgtgggacttgggcccgtgagagttttccattgnnanagaagttcagntggtcccattgtnaactcagnctcaaatcnncaactgtcaggccctacaaagaaaatggacgagcctcttctggtggatagctattgactccctactgagctgcccatgctggtctggcaaacacaccttatctgactttgcctttcacaaacagtaagtgtgattacccatatatcacagcccctatgactgacccctcagggagatcagcactgattaccatcacatgggtgggcaacgactatcagcagcaaaggacacgaatacatactagatcaggcataatacgaaaccaggctcgactcacagtcgtactcaaaggctacaaggaatacgaaacggggatacacccctatacgaacaagagcacctgcataacgaggaacaacgcacagtagaggaacatccacactataactgcagcggggcaacatacttaggtgcgcatggtggcatctacacattgtccccaaacacaagggaataagcgcgtcgaggagggaacgcacacgaagaccacgaggagcagcagacgcagacacaaaaaacgacgacacagaaaca

SEQ ID NO: 485382 - DNA, 176 bp, Homo sapiens
tgcctgccccagcatttggggggcgaggcggaggcagatactagtcatgagatcgagaccatgctggctaacacagtgaaaccctgtctcttctaaaaatacaacaaattagccaggcgtggtggcgggcacctgtaatcccagctatgcgggaggctgaggcaggagaatcgctt

SEQ ID NO: 485383 - DNA, 156 bp, Homo sapiens
cctttttgcccaaatggcccatgttcgaagactgcacaaaaacaacaatagcctcatcatccccaccatcatagtcgcaccatcaccctccttaaactctactactacctacgcctaatctattccacctcaatcacagctatctcccccagtgat

SEQ ID NO: 485384 - DNA, 393 bp, Homo sapiens
cagccgaaagctgactttctgaggtcacagagtgaagttggcagcagaggcagtctccccacttccaggccctggcatttttcctgcacacacacacctcttggacttctaccatcacagaaacagattttttttcgatcccttttagaaataggcgaacggatcaaattcagtaatctcccttactctgagccttgcctacactggcacattcctgaaaagtgtaaagctgtgtgggactagccacttaatcataaccaaacccctgcccaggtccctcccacagaagttagtcaccatccctgggaggagggctggatcttcccttggggccacaccacgctgatccctggaccacaaggatgcttatgaggtctgctcactggaatccca

SEQ ID NO: 485385 - DNA, 1349 bp, Homo sapiens
cctagactacgagaaggagaacgaaatgatgaagtcccacgtgagtggaccaagccatcaacaacgccatcaactacctgggggagaaaacactaaatccatatacaacgactgactagacggaaccgtgagaagacatagaatcatgacaaagaacgacacatcatagtgcaacataacacagatacacaacgaaagcaagaagatacaaagataaaacaagagaaaccatcagatgttttttaaatcaaacagacggaaaggaaacaaagtagcacaacacacgataacaacacagagagaacgcgagaaaacacacatgacaaatcaaacaaacaacgataaagataacagactacaacctcagacaacaaacacagaagaacaaacaaagccagcacagaacaaacaaaaaagaacaacaacaaagacagacaacgtacacaaaaaaaaaacaaacaacaacacacatataaaaacaaataaaaaaaaaaaactaaaaaaaacaaaaaacaacacacatcaaaaaaaacaataaacaaaaaaaaacacaaaaccataaaaaaacacttactaacaacacaaacaacaaaaaaaaagaaaaaacaagaagaaaacacaaaaaaaaaaataatacaaaaaacacaacatacaaaaaaaaaacaaaaaaaaaatcaacaaaaaaaaaaacaaaacaaaaaataacaaaaacacataacaaacaaaaataataaaaaaaaaaaaacaaaaatacaacctacacaaatacaaaacaactcaaaacaaacacaaaacacacaaaacataaaacaaaacactacccaaaaatcaataataaataataaagataataacaccacagtcaaaaaaacaaaaaaaacacaacaacaaaacaacataaagacaaagaaaagaagaccacgcaacagagggataggacaacaaaaagaggaaagaagagcagagagaataacgagaaagcaccaaccagaagaaaagaacgggagaacgaaagacaagaaaagagagaaaaaaaaaaaggagaaggagccgaaagaagagaaaaaaacaaaagaagagaaaaaaacagaaagagcaagagaagagcgacaacagaaacaagcaaggaaagaaacaggaaaggggagagaaagaagaaggggagggacaagagacaacaggagcggggggaggcgaagagacgacgagagacacagaaggagaggacgaacgaaacagaaggaagagcggacagagaagtgacgataggagaaaagcaagagagacagagaacgatcaggagagagcacgagcagagagagaagaacaaacagagacgaaagacggac

SEQ ID NO: 485386 - DNA, 127 bp, Homo sapiens
tctattaaccacccgtcatacttggaaaggggagatggccaatctgtctagttctgggtcctaccagagagcttgcccacgcgaagtacagcagagtaggccgatgactatgtgacaaatgttctac

SEQ ID NO: 485387 - DNA, 365 bp, Homo sapiens
tcgtctttttgataggattgatttcttacttcatctatgtggtggaaacatacttgtatattcactcctttaaattattgaggctgttatggtgtcatattctatcctggaatgtccatgtgccttgagaagaacgtgtatctgctgttgttgggtggctggtatggtttgaatttgcatttatcttatgagtgaggtagagcaatcttgtccatatgtttgcgagccatttgtttgctttttctgtaaactatattgttgtcatttttcttattttatgggagcttattatatacatgctaagaacaacaaaaaaccaccgctgtaaccgtattcaacaagacgaggggtacccgaggctcgaa

SEQ ID NO: 485388 - DNA, 408 bp, Homo sapiens
cagctcagcctttgctcccctaccaaagtccctccccggagtggagcgcacctagggtccctcttccgtcccctcaggcccagttaaccgtatcagaacagacagcctcggggggaacccaccacgacagcatgcctcccgtccacggtcagacatgccaggataccccagagacatgaatctcttccgaattccgtggagacgacatatcgccaacatccttgttcactcatctagcctacatgctcaaaaaatctggaacgtacccagacatcgatgcgccccgcgaatttcaggggaaagaagccaggtccatgtaaagctgtgagtgattcactgcaccgagtatcatggaaactctttcaccaactaacatctacacctctacaaggacgtgatatgaaggta

SEQ ID NO: 485389 - DNA, 250 bp, Homo sapiens
  misc_feature (5)..(6): n is a, c, g, or t
  misc_feature (18)..(18): n is a, c, g, or t
  misc_feature (35)..(35): n is a, c, g, or t
  misc_feature (45)..(45): n is a, c, g, or t
  misc_feature (56)..(56): n is a, c, g, or t
  misc_feature (68)..(68): n is a, c, g, or t
  misc_feature (76)..(77): n is a, c, g, or t
  misc_feature (102)..(102): n is a, c, g, or t
  misc_feature (104)..(104): n is a, c, g, or t
  misc_feature (110)..(110): n is a, c, g, or t
  misc_feature (123)..(123): n is a, c, g, or t
  misc_feature (147)..(147): n is a, c, g, or t
  misc_feature (172)..(172): n is a, c, g, or t
  misc_feature (175)..(175): n is a, c, g, or t
  misc_feature (200)..(200): n is a, c, g, or t
  misc_feature (207)..(207): n is a, c, g, or t
  misc_feature (238)..(238): n is a, c, g, or t
gcatnncagatgaattcnagattacaccactgagnattttaaagnaacagtatggnttgattgacttnacaaacannatattattgatggatattattgtancncttgtntatgatgtttagntgatctctcatgtgttgattatgnatctgaatatgggatcagcgtatgntantatcatcacagctgtagcatatctnggttttngctagattgggggactaacatctggagacantcattcatcttg

SEQ ID NO: 485390 - DNA, 177 bp, Homo sapiens
gagcgtcacatggagcttatatttagctgattcatgatgtttactaatcgatgcaatactgtagcaggaggcagaagagaagacagtaattactatatagggatatgctgtgcctggccctttcgctaaatgctgttacatataatatctcatttaatctacctagcaaatacattt

SEQ ID NO: 485391 - DNA, 675 bp, Homo sapiens
  misc_feature (429)..(429): n is a, c, g, or t
actagttctagatcactgacggcagccgcagggatctttataaaacgaaaatcagataatgtcacttccctgcttaaagccctttgagtggcttcccatgcacttagaaaaaaaaaaaaaaaaaaaacgggccaggtgcaagggcttatgcctgtaatcccagcacttggggaggccgaggcgggcggatccccttgaggtgggtagttcgagaacctgctgggccaacattggagaaaccctgttgttctctactaaaaacacaaaattagtcaggtgtgatggcgcatgccttgtaatcccagctactgtgggaggctgagtcttcaggagaaacgctcgaacccaggaggcagaggtgtgtgggtgagttggacattcacgccattggcacttccagccggggcaaccaagagttgaaacctccgntctgaaaaaaaacaaaaaaaaaaagccccaaactctcaatataaaaaactctcaagttttccatggggggtaggtggttaaacgcgagaagaagattaccaattgaaaggctcttaaaaaaacttccctgtgcaaatttgggcaacacctttaacaaaaaaaaaaaacagggggggggcggcacccttttgtagtttgttgtttttggtgagaaactttcaggagaaaatcattttgttggaaaag

SEQ ID NO: 485392 - DNA, 513 bp, Homo sapiens
gaccgtggctgaaggtcaagagagaaagaaagagagagagagagataagtagtaaaggaaaaaacagtgtaccctattcctttaaaagccaggtaaatttaaaacctataattgataattgaaggtcttctccgtgacactgtaacactccaataccaccttgtccagtgtaaacaagggcatagcccaaaagcactgaggccactgacaactcgtagccttcctatcaaaaatccttaacccagtaacccgcagatggccctaatacattcaatctgtagcgacaactgttttgctaacacaagaaagtatgaggctattctgttaaaaaaaaaaaaaaaaaaaaaaggagggttattccaattttacccattaaaattccctttaaccaaggggtttccctaccgggttctaattcttatttcctgtacaagggcccgcccagacctaggaggaacccccttcaggaagggccgatagacagtccccccctccccctgggtgttggcggga

SEQ ID NO: 485393 - DNA, 146 bp, Homo sapiens
ctccaagcttgaatatcgggcagggtgattgttattgtatgtatctttacctaaattgctcaggcattattccagcagtagatagtgactcgtggaactgtccacggatccagcgctaaccttcatccacctggacatcgctgttt

SEQ ID NO: 485394 - DNA, 1431 bp, Homo sapiens
  misc_feature (479)..(479): n is a, c, g, or t
  misc_feature (1137)..(1137): n is a, c, g, or t
tgggaagccccgggcacacgggccagatcggcgagggcccggagcagggcggcctttcgtccacgattccctccaggggcacagtttcaccacacgcaccccctttctggcacgtgggcaaagggtgtgtgtcattcagcaagccgtggtcggtggagggcaggagagaggagtgtggtgcacgaggtggagtgaaaatcacgagaaggaggccagaatcctccctccgagggggcagcgtgctgtgaaccaccaagagggaggccgagaaccctcgtggggaaaagtgagtggggctcaataacccataatagtgctctttcatatctccaaagagaggagcgtggcactcgcgggaatagctataacctctctctctctccacagatctctcgtggcaccgaggagccagagaaattctcccgagggggctctttctcacatatctacagacctcttggtttcccacatttagaganctctctatccccgggcgctccccaattatgggccgcgggcgcacttatacactcgagacaacgcccgtgtcgcagccttggtgggagaactcttgtgcgcttggggcgccagggcgacacatgttgatctcaaattcacaaaaaagagctggacaagtatctcgtgggcgggacaacgtgagagggagcgtggtatccccccaatgggggggggggtggttacatataacacccaaaagaaagtgtccccttttcacatggagatgagcgcggacccttcacaagaataatcacaaacatttgtgggtccacaacaccctgtggtgcccaagacccgcgtggtgacccaacacaacactcgggggggaggtatctccttacgagaatgtgggcagctgtgaagtgaaaccacctcacagggggggagtaccaaccatggttggtggtgggccaagagaaggcggacaacaaaactaaaagggggggctttcacaacacagagtccctggcagaaggctccccgggaataatacaaggagtcccctccgtttggggcgcaaaaaggaggaaacacggggggtttatatcacacacaaatagctgtgtggaaagagcccctttcccacatcttctggggcgaaaaggagacatcactccncgggaggaaaaagcaacgagcggcgccaccagggccgttgggccaccgcttgtagtgaggcagcccaattccaccgagaaaagtgtgggggaagaaacgggccagtatgctgtgtggaagtgtagtgacggcctccaggaaaacctatggggccaggtaggagaagatgagaagacagagcccattaatgcgcaaagaacgtctcggggagatgcaccagacgcagtataagcaggggcggacctcaggaagggttatggcacgcccgacaataaggagcatgcgcccatatag

SEQ ID NO: 485395 - DNA, 212 bp, Homo sapiens
taccatcatgggtcagatggacgaagaggatataacacgtaggaggtgaagattattgagccatgagtggagtctgaagccacggatgaagtcatccaggaagcaagtacatagaaaagagggtagtacagatgcaggcatatgggttagagtcagcaagagacggagtcttgctctgtcgcccaggctggagtgcagtggtgcgatcttgg

SEQ ID NO: 485396 - DNA, 776 bp, Homo sapiens
tacccctccttagtctttatgcgctcaaaaaccaaattaaaccccccccccttgtaacgggggggcagggaaaaaaggcaaggaacgcccgaagccccgcctgggagacccccacgtctcactgtgcccccgcgccatttttctcgccctgagaatgtgggatttgtgggttttcacatctcttgctccctgtgtgtggcgtgggcgatgagagttgtgagggggtgagacgccctcgcgtggggggcacctgtgggccacactgtgagacgccccctgtgggagagaaaaagtctcagagagagagggagagtgtgcgaagaagagcgcgccagcgtgcccacgagccgcctgggcttctcagtggaggacaacagaaggcgcggtgtgcgccccctcccagagaagagtctctctgtgagagagcggagagagaaaggggggcgcgagtagtgtgcgcgcaagaagaggtgtctctctcctctctcagaggagtgtgttctcacgagaggagagcgggtcgtcgccacccacggaggaagaggacgccccactacaaagcagcgacggagagggggcgcggccccctcacatcgtgcggactagaaggcgagcaccacagaagagaggcggctgtggcgacccagagaagaggcggctggaaaagagcgggggctgctacataacacaagaagtagtggtgttggtgtgttaacaacaacaagaagcaaaggggggtactccccaaaaacaacagaaaggcggggtgtgggcga

SEQ ID NO: 485397 - DNA, 810 bp, Homo sapiens
  misc_feature (15)..(15): n is a, c, g, or t
  misc_feature (142)..(142): n is a, c, g, or t
  misc_feature (174)..(175): n is a, c, g, or t
  misc_feature (195)..(195): n is a, c, g, or t
  misc_feature (207)..(208): n is a, c, g, or t
  misc_feature (302)..(302): n is a, c, g, or t
  misc_feature (306)..(306): n is a, c, g, or t
  misc_feature (323)..(323): n is a, c, g, or t
  misc_feature (372)..(372): n is a, c, g, or t
  misc_feature (385)..(385): n is a, c, g, or t
  misc_feature (402)..(402): n is a, c, g, or t
  misc_feature (406)..(408): n is a, c, g, or t
  misc_feature (492)..(492): n is a, c, g, or t
  misc_feature (532)..(532): n is a, c, g, or t
  misc_feature (548)..(548): n is a, c, g, or t
  misc_feature (590)..(590): n is a, c, g, or t
  misc_feature (740)..(740): n is a, c, g, or t
  misc_feature (797)..(797): n is a, c, g, or t
aaggtgagagttttnataaagtagtatgtacaatcctgcaatgataaaagacttcctaatttaattctaagtagtgctaatcttcactatgactgctattagtggttcagctgaagacttacaaaatcgatagaagctaaanttctctttgccaccaaagttacaaatgttaannagttcaaatatgcccatcanagctgccgtaannttctcaatttctatttctacatgccatgatccagactgtacctaacaaaaacacggtacatttgtattggaaaacagggtcccatttatttgtnaganaaagctgggtctcagcnttcaccagagccaaattcaatggcaacctgcccataagtctcaatttcncttcttgccaaanacaaaatagagtttacntaannntggatatgacccgggtgaccgtatacatcagtgtatggccggtgctatttacatgtgagatgttgccttgcgtaattccggggntagggtaccatcatgcctttcgtttggcttttggggtggnagctgcggttgcgggnctgagtttgcttaccatgattgtcccaatatttacttaaganacaatacccaaaggtttcttgtttacatatctctttccacatctagctattcatctgtgtacagatttacaccactttagcaacaagaaacttttgaacaatatctattatactgacatattaaactgaagatatgaatacataatcacnctgaaagttttgatgaacatgtatgacagactcccccgacttagtttttcccatgtnaaaccctatttgg

SEQ ID NO: 485398 - DNA, 231 bp, Homo sapiens
  misc_feature (1)..(1): n is a, c, g, or t
ngagcggacaaggccaggcatagtggctcacacctgtaatcccagcactctgggaggctgaggtgggaggattacttgagcctagtaggtggaagttgcggtgagccaagattgcatcactgcattccagcctgggcaacagagcgagaccctgactcaaaaaaaaaaaaggaaaaatggaaattttgaatctgaaatttctatatggcctgaaaaaaagcactttgagaa

SEQ ID NO: 485399 - DNA, 171 bp, Homo sapiens
  misc_feature (29)..(29): n is a, c, g, or t
  misc_feature (63)..(63): n is a, c, g, or t
  misc_feature (116)..(117): n is a, c, g, or t
agacaggaggggaaggacagaatgggccncagcccagatcctctatccctcaccagaggggangagggagagtggcatagctctgtgtccaaatgtccccagatgcctgtgggctnngccttggcgtgggcttgtgccttgcagggcttggccattggccttctggagcag

SEQ ID NO: 485400 - DNA, 919 bp, Homo sapiens
  misc_feature (27)..(27): n is a, c, g, or t
  misc_feature (62)..(62): n is a, c, g, or t
  misc_feature (64)..(64): n is a, c, g, or t
  misc_feature (67)..(67): n is a, c, g, or t
  misc_feature (73)..(74): n is a, c, g, or t
  misc_feature (84)..(85): n is a, c, g, or t
  misc_feature (90)..(90): n is a, c, g, or t
  misc_feature (96)..(96): n is a, c, g, or t
  misc_feature (101)..(101): n is a, c, g, or t
  misc_feature (107)..(107): n is a, c, g, or t
  misc_feature (109)..(109): n is a, c, g, or t
  misc_feature (111)..(111): n is a, c, g, or t
  misc_feature (135)..(136): n is a, c, g, or t
  misc_feature (141)..(141): n is a, c, g, or t
  misc_feature (147)..(147): n is a, c, g, or t
  misc_feature (152)..(152): n is a, c, g, or t
  misc_feature (158)..(159): n is a, c, g, or t
  misc_feature (162)..(162): n is a, c, g, or t
  misc_feature (166)..(167): n is a, c, g, or t
  misc_feature (170)..(170): n is a, c, g, or t
  misc_feature (172)..(172): n is a, c, g, or t
  misc_feature (203)..(203): n is a, c, g, or t
  misc_feature (282)..(282): n is a, c, g, or t
  misc_feature (286)..(286): n is a, c, g, or t
  misc_feature (313)..(313): n is a, c, g, or t
  misc_feature (452)..(452): n is a, c, g, or t
  misc_feature (457)..(457): n is a, c, g, or t
  misc_feature (460)..(461): n is a, c, g, or t
  misc_feature (543)..(543): n is a, c, g, or t
  misc_feature (572)..(572): n is a, c, g, or t
  misc_feature (706)..(706): n is a, c, g, or t
  misc_feature (917)..(917): n is a, c, g, or t
taattctctcacgcccagttctttgantgatgactgtcaccccaacccctttccccacaggncncantcacgnnggggcgcggnncacanttacantacanttcacncncnttataaaaaacacctgacgcagannccctncctttnattancaaatnncgnatgnnccncncccagtcccgcacattcacacagaccctggnccagggacatcctcctcatatgaagcattaaggcacatgctgtactgtgagccagcactccctgacctcagggtgtgtnaggngttggcactgtagagagaaaccaagantcttcctcaatgcctgccttattctgagcacccacccttagctctgataaggatatcctgagaccacattcaagatccaaaacctttcctcatagatgagggccgtcacccctgcaaacatgaccctgttctgtttgcngggtntgnnagattttcacttctgagagaaaaattgaggagacttctgtctgcaccactcctgctgcaggcctggagcagcttctcagggnagccctggcccactaaggcccagttatgngggcagaggggtgcagagccatacctggctacacccacaggtggacacagggagcaagctccttcgctgttctctgggctcattcccccagcacaggagggcctccatgcacactcattccacaggccccactngccctgtcacactcacacggcacgcacttggcgctgcctgctgtctgccttccacctgggggtacaagaggtcacccaagggggcaggcgtgcagggcctcttggatcttctggcggcaataggagtacttctgcaggatctggcggaggtgctcctcctcctcccgctgcaggatacgtaggaagttatgtagttcaggcatgctgaagngt

SEQ ID NO: 485401 - DNA, 899 bp, Homo sapiens
  misc_feature (458)..(458): n is a, c, g, or t
  misc_feature (496)..(496): n is a, c, g, or t
gactcttaaatatatttcttccagctccagtcgcatgcactagacctgctgtgcttaaatgtcctgtgattgggtcatggaattgcagcatgtccagcacttgaagaggtttggatgctttaagtcactgcaagaggccaggagatggggtcacagagacagaagagacagactgtcttgtacagaaacctaagggctctctattatggactgaatgttcatgaatccccccaaaatcatatgttgaaggcttaaccccactgtgacggtatttggagacggagcctttggaaggtgattagggttagataagatcatgagaggtggctgaggccttgttgacaggattagtgctcagtctccttagttagaaaataactctggccagcatcctaactttctgcagcagtaagtaggatccctaataaaggctgaatatcatactcatacccacaatnccttacttggtttaaatacaaaagattatcgctgccanactgtgcataagaattggtagactatgtttgaaaatgttttcctttaataatattgcaaatacctgaagccaggcaataaaagtaagacacaatatcttatttggtagtggtttactttacaatattgttatcagactcccagttggaaggaagaggtatagtatcaccagtttatactacatatttgcataaacagtaaatatttttctcctacttaaaacaaaaatcaaataatgtttagtaataagactaccttcagccactgtgaaaggacttagtttagggtgatggtgtcttttctacacggttctataatcagtagaggttatactaagctcagggtcccagattaacagtctgattcgatactaaaagcaggtactacgatatcaacgggtcatt

SEQ ID NO: 485402 - DNA, 660 bp, Homo sapiens
  misc_feature (219)..(219): n is a, c, g, or t
  misc_feature (257)..(257): n is a, c, g, or t
ataacagagttttgtgtcgttgcccaggatggagtgcaatggtgtgatttcagcttactgcaacctccggctcctgggttcaagcgactctcctgcctcagcctcccgagcatctgggattacaggcataagccaacacgcctggccagcatcctaactttctgcagcagtaagtaggatccctaataaaggctgaatatcatactcatacccacaatnccttacttggtttaaatacaaaagattatcgctgccanactgtgcataagaattggtagactatgtttgaaaatgttttcctttaataatattgcaaatacctgaagccaggcaataaaagtaagacacaatatcttatttggtagtggtttactttacaatattgttatcagactcccagttggaaggaagaggtatagtatcaccagtttatactacatatttgcataaacagtaaatatttttctcctacttaaaacaaaaatcaaataatgtttagtaataagactaccttcagccactgtgaaaggacttagtttagggtgatggtgtcttttctacacggttctataatcagtagaggttatactaagctcagggtcccagattaacagtctgattcgatactaaaagcaggtactacgatatcaacgggtcatt

SEQ ID NO: 485403 - DNA, 431 bp, Homo sapiens
caccgtactcgatcaaacctggctcacgatcggcaaatcctggacacctgaacagtggaaaaaggagcggtggattttgccgctcgcgtcgatcgggaggtggacatgtcgtatgcccgcaaactcttccttgggcgaaaaacggagacagcatcatgagccttgtagccaacgcaaaaaatgtcgaaggacttgagtttgtcctggtcacgtctgatcatggctttcaagactacgacatcaaagggcacagtgtgctgcgcagagcatgcataccgcatgacatcaaaaaaggtgagaacttcaatctgtaccatggcgagagcagcaaatcaggagtgaagtggacaggcgacttggcagattctcttcacaaatggttctcctcagaaaacacacagcagccttgagcgttgtgaacttcgaaaaac

SEQ ID NO: 485404 - DNA, 102 bp, Homo sapiens
tcaagcttctaacgatgtacggggacatgagttaataaatccaatcaagcattagtaacttacccaagtattctgtttgactattaaaaattttccaatgca

SEQ ID NO: 485405 - DNA, 323 bp, Homo sapiens
atggcatgtagtgaggacaatcagtaagaaaagtatagggaagggatggaatctagggtatgatagaaatgctacaaacaccatttagttgccatcaataagaaatgtacttgtataaaaaaaaatcgaagggctggcatggtccagaaaaattgaacaggtttatttataattattataaagtggaaccgctgagaactgtgcacggaaacattttaactggcagttaatgctttacgtctccgcatttatattaaaaatccacacacaaatgagaatggaagaacggccaatacctgagttctgtcctcattacaggccag

SEQ ID NO: 485406 - DNA, 133 bp, Homo sapiens
tgctgcatccgcatgtcgactctaagcgatccccggcttattgactcgggttaatcgtgtgaccgcggtggctggcacgaacattgagccaaccctggggttagtactagcttagttgaactttcgatttatt

SEQ ID NO: 485407 - DNA, 215 bp, Homo sapiens
aacctgggcgacgtagtgaaacctcatctgtacaaaaaaaacaaaaatgagctgaacgtgatggcgggcatgtgttggtctcagctactcaggaggctgagatgggaggatcacctgggcctaggaggtcaaggctgtagtgagtaatgatcatggcagtgcattccagcctgggttaacggagtgagaccctgtctcaaaaaaaaagcaaaaac

SEQ ID NO: 485408 - DNA, 803 bp, Homo sapiens
  misc_feature (15)..(15): n is a, c, g, or t
tagtgcgatccccgngctgcaggaattcggcacgagggtttcaccatgttggccaggctggtcttgaactcctgacctcaggtgatccaccacctcagcctgccaaagtgctgggattagaggcttgaaccactgtacctggccaaaaaccagttatgatcctgtaagaacgtcggttctcatccttttctgactcagaatgagatgaaagctgtggggacccacctggaaaactgtatagttcgatataatttcagggagtacttaccaccctaccgccagcttaaaaattataagttatccagtagcacataccctagatactaaagagtgtgttcaaagctattcattcaggctgcacctaagtcaccaacagagggtccaattcagaacatgatggcacaactgtgtgatggagtacagttcagactacttgcttactggatttacagacagaggtattaggctaaaaagcaaggcagactgcgactactcttatcttatcttatttgagcaagtctactcttgccagctgactgagtgctcactgtcactgaacctgactcccagctagtgatctctactagcttgagagtagctcaatgagcacacactgctatctgattttgttggaatgtaccctgtgcaactgctgactctggtagcattccatgtgctcaagtgtgatcaagtacacagctgctagattatgagcataattttgagctagagtacagtgcttggagactagatacttgcagtgaaagtttacgggaaatatctacgtataaaccgttaaccaa

SEQ ID NO: 485409 - DNA, 194 bp, Homo sapiens
tgggaagagggtcatgtggacactggggtggggtggtctcccccacctcctcacatttatgctacacgaacacagacacatgcaggtgcctttgccgaaaccaagtcagggttctttcaagttcaccaagggaagggcaggaacaacttcttgctctccaagtcccacacaaggcagctgtcttcacactttac

SEQ ID NO: 485410 - DNA, 171 bp, Homo sapiens
ttgacctagaggatccggctatacattatctcaatggtataatttttccatattcctcaaagtatctctaaggtgatgtcctcagtatctactttaattcccgccaacaaacagcttcttcacagttacatggagcccttgttccttccagaattcctcttcttggctaca

SEQ ID NO: 485411 - DNA, 149 bp, Homo sapiens
aatcagctcggcccgtgttatgtatctcggaaataagtgaaatagatcggacttcccaaactagagtatgtgtgagcagtggcctcgatttgtcttatttttgaagaactaggttctaatcctggcaccaccacttgtgtaaactgatt

SEQ ID NO: 485412 - DNA, 822 bp, Homo sapiens
  misc_feature (60)..(60): n is a, c, g, or t
  misc_feature (74)..(74): n is a, c, g, or t
  misc_feature (115)..(115): n is a, c, g, or t
  misc_feature (140)..(140): n is a, c, g, or t
  misc_feature (210)..(210): n is a, c, g, or t
  misc_feature (264)..(264): n is a, c, g, or t
  misc_feature (596)..(596): n is a, c, g, or t
ctgatgagtcatcttcctagactttcattttaaagagatagatagttatcagggttccangagaagacatggtnagaacatttatatctcaaagacacagagctgagacttcagntttagatactataattgcctaaacnaaaaaggaaggtgtaggtaaagttctagtcaagacaggatggccaggaaaaacaccttaaaccaaggganggcttgctttgctgatttaagccaatggcttctttatcataagacttcccagtnatttagtccttcctctcttccagtgcacagagacatacccctccttacaaataaaaattttctttatagatgtaaatttattttacaaaaatgtttcaaaataaccagatgaaaatcatccttatgccagaaagacttgttttttttttcattactagaaatgaaacagtaagtatttgttgtattgacatacttaggcttagacctgtgtttaacaagaaagcctaataatagcactgtggttagactgtagcctatttttccaaaccatcattttattattaaggaaacgaaggaccaaatacctttcattcatctgatatgatcctttnaaacacattccactaacaagtcccatttggaacagctgaaaatcttttaataaaactttttaaagatgagctcatggcttagtgtaaatttcacaagcttaattaggtcaaatggaaggaactcagatgagtagttgcccaatcagagcccattatttgtaagtcatcagacccctccatgaccttaaaactccactctgacctgattattgcaaacctatttcca

SEQ ID NO: 485413 - DNA, 564 bp, Homo sapiens
taggggcatagaattgtaagttggattgggaaagaaaaacaagacctatctctctgctgttttcaggagacccatctcacatgtgattacacaagtaggctcaaagtaaagggttggagaaagatctatcactcaaatggaaaacaaacaagagcaggggtcactatttttatatcagataaaacagactttaagccaacaacaataaaaaaggagaaagaagggcgttacataatgataaagtgttcaattcaacaagaagacttaactatcctaaatatatatgcatgcaacattggaacaaccagattcctgaaacaattacttgtagacctacaaaaggacttagccacacaataatagtgggggcttccacaacgcactgacagcattagacagatcatcaaggcagaagaccaacaaggaaattctggacttaaattctacccctgaccaactagacctaataggcatctacaggatattccactcatcaaccacagaatatacattcttctcatttgcatttaggacagatgaccacatgctcagtcataaagcaag

SEQ ID NO: 485414 - DNA, 237 bp, Homo sapiens
  misc_feature (8)..(8): n is a, c, g, or t
  misc_feature (10)..(10): n is a, c, g, or t
  misc_feature (12)..(12): n is a, c, g, or t
  misc_feature (15)..(15): n is a, c, g, or t
  misc_feature (17)..(17): n is a, c, g, or t
  misc_feature (21)..(21): n is a, c, g, or t
  misc_feature (23)..(23): n is a, c, g, or t
  misc_feature (26)..(26): n is a, c, g, or t
  misc_feature (31)..(31): n is a, c, g, or t
  misc_feature (35)..(35): n is a, c, g, or t
  misc_feature (38)..(38): n is a, c, g, or t
  misc_feature (49)..(49): n is a, c, g, or t
  misc_feature (57)..(58): n is a, c, g, or t
  misc_feature (66)..(66): n is a, c, g, or t
  misc_feature (76)..(77): n is a, c, g, or t
cccccacntntnatncngcancnctncaacnaaancanactggttaagncgctggtnnctatcatnagatatctgnntggaaatggggtacctgagcagctggactcatcaagctggaaatccatgcagtcggcaaaaccatcacagcgctggtgggctgggatacagcctgctggaggaggcacacaccagagctccattagaacagcttttgttggctgcaaaaaaaaaagaatt

SEQ ID NO: 485415 - DNA, 158 bp, Homo sapiens
aagactgcaagaccaacgccttctcttcctccccatctctctccgcctctgcctactcaatgtgaggacaatgagaatgaagacttttatgttgacccacttccatttaatgaatagtaaatatattttctctttcttatgattttctaaataacatt

SEQ ID NO: 485416 - DNA, 276 bp, Homo sapiens
  misc_feature (65)..(65): n is a, c, g, or t
atgcgtgttggaacatttcacagccaggaggatgagggggaatgggggtggatgtcaggtaagcnatttctggtcccactacaaaactttatttttgattagagtaccattctcaatctcttctacaaaaagcaaaaaaaagcaaaaaaaaaaaaaaaaaggcggccatttcactcatttcaggacctatatacttgtaaggtggtttcctggggtgtgttaatttttacctgttttaaatttttattaattattttttacaataaattcaggtgt

SEQ ID NO: 485417 - DNA, 81 bp, Homo sapiens
aaaaaggcccccccccgggggggaaaaaaacccttttttttttgggttttttcccaaaaaaggggggttttttttggggga

SEQ ID NO: 485418 - DNA, 547 bp, Homo sapiens
  misc_feature (437)..(437): n is a, c, g, or t
  misc_feature (502)..(502): n is a, c, g, or t
gaatgctcttttttgtaatagctgattcgcaatacaagttcaaagcagcgctccctattcaatgatgggtataaagctgcattaccacttttctgaatcactgatgcgcggcacgttccttccaacaggcatgtatatcccggcttgatcttttgtaggagtgggcataccagtttatctggaaataacatcataaaccctaaactacgaatccaacctagtgctacggtgaaactctactcatttcataatatggattataaccgcgagcgactcatacgtgcttagatctgctaatccttaaggaccatacgcactaggcggctccaggaggcgctacgcataagagggctgaaagatgcatctcttaccctatccttcaaataggactatgattcctaccggtccaaagacgggtgacgaggctacatggcacncgagagcatggctctgaccattggacatatattgaacattgcgcctactgactgcccgactgtangagacatagcttacaccggagggtcccttcctttggcatagggcg

SEQ ID NO: 485419 - DNA, 447 bp, Homo sapiens
tgcctcatccagtggcatgcctcatccagtggcatgcctctccagtggcatgcgctcatccagtgacatgccctcatccagtggcatgccctcagccactggcaaggaaagctccaaatccatgacagtcgaagtctctgactggacagttccctgaattctactagtacctccaattccattttctcccatggaatcactaagagcaagacccactctgttccagaagccctataagctggaggtggacaactcaatgtaaatttcatgggaaaacccttgtacctgacatgtgagccactcagaactcaccaaaatgttcgacaccataacaacagctactcaaactgtaaaccaggataacaagttgatgacttcacactgtggacagtttttccaaagatgtcagaacaagactccctggatgagggcatggggtaccgagct

SEQ ID NO: 485420 - DNA, 2004 bp, Homo sapiens
  misc_feature (128)..(128): n is a, c, g, or t
  misc_feature (186)..(186): n is a, c, g, or t
  misc_feature (424)..(424): n is a, c, g, or t
  misc_feature (458)..(458): n is a, c, g, or t
  misc_feature (1228)..(1228): n is a, c, g, or t
caactaacaaccgtactcaaaaaacttctagatcctaagcttatctccacaaaagagaacacacaaacagcaaaaaccatagggcccctctcaacccctccctgcacacacctcatcacttgaaaaanggtcctgctcacaacatcacttttaaacttctgaaatccgcccacaactgcccaaatnacaattgaaacccagccacccaaaatttctaaaggaaaaaattttcttctacttttccacaatttaccccaaaatctttctggctacatttggtacaaaaggcaaataacatacctctaccattacattacatcatatgtattaaacggtcaaaaaattatatatagacctacatacaataaaaaaaaaaaaatatattccaattcatcccttctaatccaaaatttcacgcaggaanatgcaggatctacacttacacatcgtaaaacgangcgatgggactggaggagtaactggacatttcaccttcaccttatacctggagactcccaagccctccatctccagcagcaacttaaaccccagggaggccatggaggctgtgagcttaacctgtgatcctgagactccggacgcaagctacctgtggtggatgaatggtcagagcctccctatgactcacaggttgcagctgtccaaaaccaacaggaccctctttctatttggtgtcacaaagtatattgcaggaccctatgaatgtgaaatacggaacccagtgagtgccagccgcagtgacccagtcaccctgaatctcctcccgaagctgcccaagccctacatcaccatcaacaacttaaaccccagggagaataaggatgtcttaaacttcacctgtgaacctaagagtgagaactacacctacatttggtggctaaatggtcagagcctcccggtcagtcccagggtaaagcgacccattgaaaacaggatcctcattctacccagtgtcacgagaaatgaaacaggaccctatcaatgtgaaatacgggaccgatatggtggcatccgcagtgacccagtcaccctgaatgtcctctatggtccagacctccccagaatttacccttcattcacctattaccgttcaggagaaaacctctacttgtcctgcttcgcggactctaacccaccggcacaatattcttggacaattaatgggaagtttcagctatcaggacaaaagctctttatcccccaaatnactacaaagcatagcgggctctatgcttgctctgttcgtaactcagccactggcaaggaaagctccaaatccatcacagtcaaagtctctgactggatattaccctgaattctactagtacctccaattccattttctcccatggaatcactaagagcaagacccactctgttccagaagccctataagctggaggtggacaactcaatgtaaatttcatgggaaaacccttgtacgtgaagcatgagccactcagaactcaccaaaatattcgacaccataacaacagatgctcaaactgtaaaccaggacaacaagtggatgacttcacactgtggacagtttttcccaagatgtcagaacaagactccccatcatgatgaggctctcccccctcttaactgtccttgctcatgcctgcctctttcacttggcaggataatgcagtcattagaatttcacatgtagtagcttctgagagtaacaacagagtgtcagatatgtcatctcaacctcaaacttttacataacatctcagggggaaatgtggctctctccaccttgcatacagggctcccaatagaaatgaacacagagatattgcctgtgtgtttgcagagaagatggtttgtatgaagacgtaggaaagctgaaattataatagagtcccctttaaatccacattgtgtggatggctcttgccgtttcctaagagatacattgtaaaacgtgacagtaagacattctagcagaataaaacatgtaccacctttgct

SEQ ID NO: 485421 - DNA, 159 bp, Homo sapiens
aatgattctggatatagttctatcacagtcgttgaagacatgtgcgctggtcaggatattcagcttcaggcaagagatgagttgtgcttctaattcttaatcatccttgtccttagtcaggataccgtgacacaatttaggactgtcagctttataggc

SEQ ID NO: 485422 - DNA, 2004 bp, Homo sapiens
  misc_feature (128)..(128): n is a, c, g, or t
  misc_feature (186)..(186): n is a, c, g, or t
  misc_feature (424)..(424): n is a, c, g, or t
  misc_feature (458)..(458): n is a, c, g, or t
  misc_feature (1228)..(1228): n is a, c, g, or t
caactaacaaccgtactcaaaaaacttctagatcctaagcttatctccacaaaagagaacacacaaacagcaaaaaccatagggcccctctcaacccctccctgcacacacctcatcacttgaaaaanggtcctgctcacaacatcacttttaaacttctgaaatccgcccacaactgcccaaatnacaattgaaacccagccacccaaaatttctaaaggaaaaaattttcttctacttttccacaatttaccccaaaatctttctggctacatttggtacaaaaggcaaataacatacctctaccattacattacatcatatgtattaaacggtcaaaaaattatatatagacctacatacaataaaaaaaaaaaaatatattccaattcatcccttctaatccaaaatttcacgcaggaanatgcaggatctacacttacacatcgtaaaacgangcgatgggactggaggagtaactggacatttcaccttcaccttatacctggagactcccaagccctccatctccagcagcaacttaaaccccagggaggccatggaggctgtgagcttaacctgtgatcctgagactccggacgcaagctacctgtggtggatgaatggtcagagcctccctatgactcacaggttgcagctgtccaaaaccaacaggaccctctttctatttggtgtcacaaagtatattgcaggaccctatgaatgtgaaatacggaacccagtgagtgccagccgcagtgacccagtcaccctgaatctcctcccgaagctgcccaagccctacatcaccatcaacaacttaaaccccagggagaataaggatgtcttaaacttcacctgtgaacctaagagtgagaactacacctacatttggtggctaaatggtcagagcctcccggtcagtcccagggtaaagcgacccattgaaaacaggatcctcattctacccagtgtcacgagaaatgaaacaggaccctatcaatgtgaaatacgggaccgatatggtggcatccgcagtgacccagtcaccctgaatgtcctctatggtccagacctccccagaatttacccttcattcacctattaccgttcaggagaaaacctctacttgtcctgcttcgcggactctaacccaccggcacaatattcttggacaattaatgggaagtttcagctatcaggacaaaagctctttatcccccaaatnactacaaagcatagcgggctctatgcttgctctgttcgtaactcagccactggcaaggaaagctccaaatccatgacagtcgaagtctctgactggacagttccctgaattctactagtacctccaattccattttctcccatggaatcactaagagcaagacccactctgttccagaagccctataagctggaggtggacaactcaatgtaaatttcatgggaaaacccttgtacgtgaagcatgagccactcagaactcaccaaaatattcgacaccataacaacagatgctcaaactgtaaaccaggacaacaagtggatgacttcacactgtggacagtttttcccaagatgtcagaacaagactccccatcatgatgaggctctcccccctcttaactgtccttgctcatgcctgcctctttcacttggcaggataatgcagtcattagaatttcacatgtagtagcttctgagagtaacaacagagtgtcagatatgtcatctcaacctcaaacttttacataacatctcagggggaaatgtggctctctccaccttgcatacagggctcccaatagaaatgaacacagagatattgcctgtgtgtttgcagagaagatggtttgtatgaagacgtaggaaagctgaaattataatagagtcccctttaaatccacattgtgtggatggctcttgccgtttcctaagagatacattgtaaaacgtgacagtaagacattctagcagaataaaacatgtaccacctttgct

SEQ ID NO: 485423 - DNA, 201 bp, Homo sapiens
  misc_feature (22)..(22): n is a, c, g, or t
  misc_feature (170)..(170): n is a, c, g, or t
gatgctaacaagaaaatcatcncttttgaagatgtacaaaaagaccgaaaagaaaaagattttctaacagggactatagcatgggggtctgaaccggccctttgttttgcagtttatagaagagtgcttcgcatgtatgatgacagaaaccatgtgggaaaatatacacnctgaagaaattgagaagctcaagggacaact

SEQ ID NO: 485424 - DNA, 2058 bp, Homo sapiens
  misc_feature (1282)..(1282): n is a, c, g, or t
tgaattataaaaagtttgtaaaaaaagaggatggtaaggtaggaattaagggatagagagtgaaagagtgataagagagattatggataataggataatataaaaagaggagaagaagaaggaagaagagaaaatggggaaaataaaagaaacttaatgaaaaaagagaataaaatggaaggggatcatgataaaagaataaattttaaaattttggaatatgcacaaaaatgctgaagttacgattgaagcaagaataaaagtttttgaggggaaggatgttattataattgttaaaaatttgaaaaagaatattaatggataattatggtaaaaaggggaaatgaaggaaatataaaattaaattatatagtatatagttgatggtaaaataattatatatgggaatgaataaagtggaagagaaaaagtatattaaaaagaataaatgatgatatagaatgtaaaaaggaaggatgaaggaaaatacaaattaaagataataaagagaggtgatgagactagagaagaaattcgacatttcaccttcaccttatacttggagactcccaagccctacatctccagcagcaacttaaaccccagggaggccatggaggctgtgagcttaacctgtgatcctgagactccggacgcaagctacctgtggtggatgaatggtcagagcctccctatgactcacaggttgcagctgtccaaaaccaacaggaccctctttctatttggtgtcacaaagtatattgcaggaccctatgaatgtgaaatacggaacccagtgagtgccagccgcagtgacccagtcaccctgaatctcctcccgaagctgcccaagccctacatcaccatcaacaacttaaaccccagggagaataaggatgtcttaaacttcacctgtgaacctaagagtgagaactacacctacatttggtggctaaatggtcagagcctcccggtcagtcccagggtaaagcgacccattgaaaacaggatcctcattctacccagtgtcacgagaaatgaaacaggaccctatcaatgtgaaatacgggaccgatatggtggcatccgcagtgacccagtcaccctgaatgtcctctatggtccagacctccccagaatttacccttcattcacctattaccgttcaggagaaaacctctacttgtcctgcttcgcggactctaacccaccggcacaatattcttggacaattaatgggaagtttcagctatcaggacaaaagctctttatcccccaaatnactacaaagcatagcgggctctatgcttgctctgttcgtaactcagccactggcaaggaaagctccaaatccatcacagtcaaagtctctgactggatattaccctgaattctactagtacctccaattccattttctcccatggaatcactaagagcaagacccactctgttccagaagccctataagctggaggtggacaactcaatgtaaatttcatgggaaaacccttgtacgtgaagcatgagccactcagaactcaccaaaatattcgacaccataacaacagatgctcaaactgtaaaccaggacaacaagtggatgacttcacactgtggacagtttttcccaagatgtcagaacaagactccccatcatgatgaggctctcccccctcttaactgtccttgctcatgcctgcctctttcacttggcaggataatgcagtcattagaatttcacatgtagtagcttctgagagtaacaacagagtgtcagatatgtcatctcaacctcaaacttttacataacatctcagggggaaatgtggctctctccaccttgcatacagggctcccaatagaaatgaacacagagatattgcctgtgtgtttgcagagaagatggtttgtatgaagacgtaggaaagctgaaattataatagagtcccctttaaatccacattgtgtggatggctcttgccgtttcctaagagatacattgtaaaacgtgacagtaagacattctagcagaataaaacatgtaccacctttgct

SEQ ID NO: 485425 - DNA, 136 bp, Homo sapiens
ccccactccgaggctgctcatctctggctcgggtccccctccctttgtggctagagtggcgacgccagcacctgggtaatgggacatcatgctccttggcgtgcacactcctgtgtgctgaactggccatgatgcc

SEQ ID NO: 485426 - DNA, 463 bp, Homo sapiens
acacatactttaatggtaacaattccttgaagcccaattaacttcagctattacaagtcttatgcagatgtcactattagacaatatttagggacttgcactgggttcctcataaaagacaaattcacttaaaagggtaatcaacaatcattaacaggtttgttatgccaacacaaaacatggctgagttacccccctccccgcccaaattactaacacaggatgatcagccccttaagtatacttcaactaagccatttcaacaaacaaaaaaaaccaagccttaaaaaaaagggggggtttcactacccctgagaccactagttaactgtgggtcatactttaaaatgtgagtacacccacacaagaaagcaaattaatcaggtttaaaaaatctgaattatacattgcaaactcgcccaggaaaaacaaactgggggattttaaaaagttaaatttacca

SEQ ID NO: 485427 - DNA, 2043 bp, Homo sapiens
  misc_feature (60)..(60): n is a, c, g, or t
  misc_feature (64)..(64): n is a, c, g, or t
  misc_feature (67)..(67): n is a, c, g, or t
  misc_feature (71)..(71): n is a, c, g, or t
  misc_feature (85)..(85): n is a, c, g, or t
  misc_feature (106)..(106): n is a, c, g, or t
  misc_feature (109)..(109): n is a, c, g, or t
  misc_feature (116)..(116): n is a, c, g, or t
  misc_feature (130)..(130): n is a, c, g, or t
  misc_feature (228)..(228): n is a, c, g, or t
  misc_feature (239)..(239): n is a, c, g, or t
  misc_feature (241)..(242): n is a, c, g, or t
  misc_feature (683)..(683): n is a, c, g, or t
  misc_feature (694)..(694): n is a, c, g, or t
  misc_feature (696)..(696): n is a, c, g, or t
  misc_feature (730)..(731): n is a, c, g, or t
  misc_feature (1267)..(1267): n is a, c, g, or t
ctctggatcaagtgtccacatgtatttctggaaagatccagatggtcctcacctgccctntgcngangganaggaaacttaaagnacccaggacagggaacatggntcngctccanagccaccagctctngcctgtccccttcactctttctagatcattccttgcactctgctctatctttagaggtcactggttcaagtaagtcatcatgaaacacctgcaaaaanactgccccacntnntgcctccactgcctgatgactgaactgacctccaggcttgactctggtctcccctgtgttatttctgctgaaacatccagtcccaggccaggctgctcagtatcttcagggtttcaggacaatgggaagtcccattattactcatctctagaatgtccttggaaatggaagctgcagagaaatcacatctaggggggcaaagtaggatggaatttggaaggggcccagcagttgcacattccaggtaaggaacccaaggtgagccagccagtcaactgattatggagggactgggaggggtaccaggggctgtgactcccactgacgtgtctgtccatgacccaacactgctgctcaattgacacttgagaaagtctgtgcttccctaagacagagcagctggcctcacagtctttgagcccttagatcatcatgcatctntcttgtgacanangcaccagctattggctttcaaggactcgggtggnntgagaggtgggagatgccaactctgattgaaggatacctgtggaggaatcaaaggtgccacacaggacaatcttctctctgttatccacacagcgaagctgcccaagccctacatcaccatcaacaacttaaaccccagggagaataaggatgtcttaaacttcacctgtgaacctaagagtgagaactacacctacatttggtggctaaatggtcagagcctcccggtcagtcccagggtaaagcgacccattgaaaacaggatcctcattctacccagtgtcacgagaaatgaaacaggaccctatcaatgtgaaatacgggaccgatatggtggcatccgcagtgacccagtcaccctgaatgtcctctatggtccagacctccccagaatttacccttcattcacctattaccgttcaggagaaaacctctacttgtcctgcttcgcggactctaacccaccggcacaatattcttggacaattaatgggaagtttcagctatcaggacaaaagctctttatcccccaaatnactacaaagcatagcgggctctatgcttgctctgttcgtaactcagccactggcaaggaaagctccaaatccatcacagtcaaagtctctgactggatattaccctgaattctactagtacctccaattccattttctcccatggaatcactaagagcaagacccactctgttccagaagccctataagctggaggtggacaactcaatgtaaatttcatgggaaaacccttgtacgtgaagcatgagccactcagaactcaccaaaatattcgacaccataacaacagatgctcaaactgtaaaccaggacaacaagtggatgacttcacactgtggacagtttttcccaagatgtcagaacaagactccccatcatgatgaggctctcccccctcttaactgtccttgctcatgcctgcctctttcacttggcaggataatgcagtcattagaatttcacatgtagtagcttctgagagtaacaacagagtgtcagatatgtcatctcaacctcaaacttttacataacatctcagggggaaatgtggctctctccaccttgcatacagggctcccaatagaaatgaacacagagatattgcctgtgtgtttgcagagaagatggtttgtatgaagacgtaggaaagctgaaattataatagagtcccctttaaatccacattgtgtggatggctcttgccgtttcctaagagatacattgtaaaacgtgacagtaagacattctagcagaataaaacatgtaccacctttgct

SEQ ID NO: 485428 - DNA, 847 bp, Homo sapiens
gagcgtcatgaagaaagggggcatattctctgcagaatttctgaaagttttccttccatctctgctgctctctcatttgctggccatcggattggggatctatatggaaggcgtctgacaacctccaccagcaccttttgatgaagaactggagtctgacttggttcgttagtggattacttctgagcttgcaacatagctcactgaagagctgttagatcctggggtggccacgtcacttgtgtttatttgttctgtaaatgctgcgttcctaatttagtaaaataaaagaatagacactaaaatcatgttgatctataattacacctatgggatcaataagcatgtcagactgattaatgtctactgtgaaaatttggtagtaaattttcatttgatattagatataaatatctgaatataaataattttaatatactagtcatgatgtgtgttgtattttaaaaattatctggaacttaattcagctgaagtactttatatttcaaaagaatgaataaccattgataataaaatcgtactttaaggggtttgtccaaaataaatattggggcttatatatcacactatgtgagaacgtcttatttacattcaatggtgccggttgtctactaaagaaaggtttatattaactatgctcaatgtgcttaatcaacagaaaccaagatagagttcaaaatcagtgtcaggtggacactaaaccctctggttcgctataaggagaaggtcggcttaggggacccgggggaagttgggagggcaaaaaattccctaaccgggggggaaaccccggggacggtggaccctcccgtgtacagggggaaac

SEQ ID NO: 485429 - DNA, 2381 bp, Homo sapiens
  misc_feature (128)..(128): n is a, c, g, or t
  misc_feature (186)..(186): n is a, c, g, or t
  misc_feature (424)..(424): n is a, c, g, or t
  misc_feature (458)..(458): n is a, c, g, or t
  misc_feature (1228)..(1228): n is a, c, g, or t
  misc_feature (2039)..(2039): n is a, c, g, or t
caactaacaaccgtactcaaaaaacttctagatcctaagcttatctccacaaaagagaacacacaaacagcaaaaaccatagggcccctctcaacccctccctgcacacacctcatcacttgaaaaanggtcctgctcacaacatcacttttaaacttctgaaatccgcccacaactgcccaaatnacaattgaaacccagccacccaaaatttctaaaggaaaaaattttcttctacttttccacaatttaccccaaaatctttctggctacatttggtacaaaaggcaaataacatacctctaccattacattacatcatatgtattaaacggtcaaaaaattatatatagacctacatacaataaaaaaaaaaaaatatattccaattcatcccttctaatccaaaatttcacgcaggaanatgcaggatctacacttacacatcgtaaaacgangcgatgggactggaggagtaactggacatttcaccttcaccttatacctggagactcccaagccctccatctccagcagcaacttaaaccccagggaggccatggaggctgtgagcttaacctgtgatcctgagactccggacgcaagctacctgtggtggatgaatggtcagagcctccctatgactcacaggttgcagctgtccaaaaccaacaggaccctctttctatttggtgtcacaaagtatattgcaggaccctatgaatgtgaaatacggaacccagtgagtgccagccgcagtgacccagtcaccctgaatctcctcccgaagctgcccaagccctacatcaccatcaacaacttaaaccccagggagaataaggatgtcttaaacttcacctgtgaacctaagagtgagaactacacctacatttggtggctaaatggtcagagcctcccggtcagtcccagggtaaagcgacccattgaaaacaggatcctcattctacccagtgtcacgagaaatgaaacaggaccctatcaatgtgaaatacgggaccgatatggtggcatccgcagtgacccagtcaccctgaatgtcctctatggtccagacctccccagaatttacccttcattcacctattaccgttcaggagaaaacctctacttgtcctgcttcgcggactctaacccaccggcacaatattcttggacaattaatgggaagtttcagctatcaggacaaaagctctttatcccccaaatnactacaaagcatagcgggctctatgcttgctctgttcgtaactcagccactggcaaggaaagctccaaatccatgacagtcgaagtctctgactggacagttccctgaattctactagtacctccaattccattttctcccatggaatcactaagagcaagacccactctgttccagaagccctataagctggaggtggacaactcaatgtaaatttcatgggaaaacccttgtacgtgaagcatgagccactcagaactcaccaaaatattcgacaccataacaacagatgctcaaactgtaaaccaggacaacaagtggatgacttcacactgtggacagtttttcccaagatgtcagaacaagactccccatcatgatgaggctctcccccctcttaactgtccttgctcatgcctgcctctttcacttggcaggataatgcagtcattagaatttcacatgtagtagcttctgagagtaacaacagagtgtcagatatgtcatctcaacctcaaacttttacataacatctcagggggaaatgtggctctctccaccttgcatacagggctcccaatagaaatgaacacagagatattgcctgtgtgtttgcagagaagatggtttgtatgaagacgtaggaaagctgaaattataatagagtcccctttaaatccacattgtgtggatggctcttgccgtttcctaagagatacattgtaaaacgtgacagtaagacattctagcagaataaaacatgtaccacctttgctaaaaaaaaaaaaaacaaaaaaaacacaacacacancacacagtctgggagccctacaagccccccctataagagaagttctccaaaacaccaactgttaagggagcaaggggcacccagtgatggaagcacagagcaacacccaggcgacatagacgagggatcaccccaaagaggaataactccgggaaaaacaaacaaaggtgatggagagattcccaccagactgtagaaaaaaacaagcccggggaacacaaccgggcgcgtgttgtcgcacaccacaacaaaccgaagagagtacgacactgaagcgcgaacacgagggactcacatcaagacgaacatcccaagagagcaggacgcgcatctcagcttagc

SEQ ID NO: 485430 - DNA, 1413 bp, Homo sapiens
  misc_feature (637)..(637): n is a, c, g, or t
ctctatcctctcttggcagtcccaagctctagtgtcttcaaggcatacacaggtgacatgaatctgtaggctggggaatggactgcagcactgccctcctctcaaaggaccaggcatgatgccgtactagccatctctccatgagcccagtggagactccagccgcagtgacccagtcaccctgaatctcctcccgaagctgcccaagccctacatcaccatcaacaacttaaaccccagggagaataaggatgtcttaaacttcacctgtgaacctaagagtgagaactacacctacatttggtggctaaatggtcagagcctcccggtcagtcccagggtaaagcgacccattgaaaacaggatcctcattctacccagtgtcacgagaaatgaaacaggaccctatcaatgtgaaatacgggaccgatatggtggcatccgcagtgacccagtcaccctgaatgtcctctatggtccagacctccccagaatttacccttcattcacctattaccgttcaggagaaaacctctacttgtcctgcttcgcggactctaacccaccggcacaatattcttggacaattaatgggaagtttcagctatcaggacaaaagctctttatcccccaaatnactacaaagcatagcgggctctatgcttgctctgttcgtaactcagccactggcaaggaaagctccaaatccatcacagtcaaagtctctgactggatattaccctgaattctactagtacctccaattccattttctcccatggaatcactaagagcaagacccactctgttccagaagccctataagctggaggtggacaactcaatgtaaatttcatgggaaaacccttgtacgtgaagcatgagccactcagaactcaccaaaatattcgacaccataacaacagatgctcaaactgtaaaccaggacaacaagtggatgacttcacactgtggacagtttttcccaagatgtcagaacaagactccccatcatgatgaggctctcccccctcttaactgtccttgctcatgcctgcctctttcacttggcaggataatgcagtcattagaatttcacatgtagtagcttctgagagtaacaacagagtgtcagatatgtcatctcaacctcaaacttttacataacatctcagggggaaatgtggctctctccaccttgcatacagggctcccaatagaaatgaacacagagatattgcctgtgtgtttgcagagaagatggtttgtatgaagacgtaggaaagctgaaattataatagagtcccctttaaatccacattgtgtggatggctcttgccgtttcctaagagatacattgtaaaacgtgacagtaagacattctagcagaataaaacatgtaccacctttgct

SEQ ID NO: 485431 - DNA, 412 bp, Homo sapiens
aatatacctagacacaatgaacatctccatatttgatggctgaataaaggtcatggccctcatcctcagacagtagttcacaaacagactacacctcggtactcagttcttatctggttcctggcctggtcaaaccaacagcacagaaccttcagcctggtcagtgcgtggctgtgcctctgtacccatggcaagcacgacacccatcgtgcgaggaaacaagtgatggagcttagcacgggcactgtgtcttctcaggacgcctcagcagctctctcccatgtcagcccttcagcagggaagacccaaacctgtcaggaggagacgtgtcccagacctgggctcccacgcggatgtccacaattactcaaagatgcaggacgcagcctcctagaacctgccatttccacag

SEQ ID NO: 485432 - DNA, 2447 bp, Homo sapiens
  misc_feature (128)..(128): n is a, c, g, or t
  misc_feature (186)..(186): n is a, c, g, or t
  misc_feature (424)..(424): n is a, c, g, or t
  misc_feature (458)..(458): n is a, c, g, or t
  misc_feature (1228)..(1228): n is a, c, g, or t
  misc_feature (2037)..(2037): n is a, c, g, or t
  misc_feature (2039)..(2039): n is a, c, g, or t
  misc_feature (2042)..(2042): n is a, c, g, or t
  misc_feature (2045)..(2046): n is a, c, g, or t
  misc_feature (2049)..(2049): n is a, c, g, or t
caactaacaaccgtactcaaaaaacttctagatcctaagcttatctccacaaaagagaacacacaaacagcaaaaaccatagggcccctctcaacccctccctgcacacacctcatcacttgaaaaanggtcctgctcacaacatcacttttaaacttctgaaatccgcccacaactgcccaaatnacaattgaaacccagccacccaaaatttctaaaggaaaaaattttcttctacttttccacaatttaccccaaaatctttctggctacatttggtacaaaaggcaaataacatacctctaccattacattacatcatatgtattaaacggtcaaaaaattatatatagacctacatacaataaaaaaaaaaaaatatattccaattcatcccttctaatccaaaatttcacgcaggaanatgcaggatctacacttacacatcgtaaaacgangcgatgggactggaggagtaactggacatttcaccttcaccttatacctggagactcccaagccctccatctccagcagcaacttaaaccccagggaggccatggaggctgtgagcttaacctgtgatcctgagactccggacgcaagctacctgtggtggatgaatggtcagagcctccctatgactcacaggttgcagctgtccaaaaccaacaggaccctctttctatttggtgtcacaaagtatattgcaggaccctatgaatgtgaaatacggaacccagtgagtgccagccgcagtgacccagtcaccctgaatctcctcccgaagctgcccaagccctacatcaccatcaacaacttaaaccccagggagaataaggatgtcttaaacttcacctgtgaacctaagagtgagaactacacctacatttggtggctaaatggtcagagcctcccggtcagtcccagggtaaagcgacccattgaaaacaggatcctcattctacccagtgtcacgagaaatgaaacaggaccctatcaatgtgaaatacgggaccgatatggtggcatccgcagtgacccagtcaccctgaatgtcctctatggtccagacctccccagaatttacccttcattcacctattaccgttcaggagaaaacctctacttgtcctgcttcgcggactctaacccaccggcacaatattcttggacaattaatgggaagtttcagctatcaggacaaaagctctttatcccccaaatnactacaaagcatagcgggctctatgcttgctctgttcgtaactcagccactggcaaggaaagctccaaatccatcacagtcaaagtctctgactggatattaccctgaattctactagtacctccaattccattttctcccatggaatcactaagagcaagacccactctgttccagaagccctataagctggaggtggacaactcaatgtaaatttcatgggaaaacccttgtacctgacatgtgagccactcagaactcaccaaaatgttcgacaccataacaacagctactcaaactgtaaaccaggataacaagttgatgacttcacactgtggacagtttttccaaagatgtcagaacaagactccccatcatgataaggctcccacccctcttaactgtccttgctcatgcctgcctctttcacttggcaggataatgcagtcattagaatttcacatgtagtagcttctgagagtaacaacagagtgtcagatatgtcatctcaacctcaaacttttacgtaacatctcaggggaaatgtggctctctccatcttgcatacagggctcccaatagaaatgaacacagagatattgcctgtgtgtttgcagagaagatggtttctataaagagtaggaaagctgaaattatagtagagtctcctttaaatgcacattgtgtggatggctctcaccatttcctaagagatacagtgtaaaacgtgacagtaatactgattctagcagaataaaacatgtaccacatttgctaaaaaaaacaaaaaaaaaaaaaaaaaacctttntnggngcnnccngggccccacaaaaacgtttctaaaacacattggcgtggggccgcagggccccaaatagggaaagggaacactggcgcaaacaggtgtccaaagggaaaccgggggcacaaaacaaaggggtggggttcccccccaattaaaaacccgccggggggaacacacggagcgtctcgtgacaaaaccccgaaaagggcgagctccgagagagggcacatcacgaggggtctctacacaacgcaggggggctcaccaaagagaggtcccagaacatcaaattaacccccgcccagcgcggcgtgcgcaaaacgaagaagaagagacgaaagagcacaaacaacaacagcagagaagaaacacaaagcgaacaaagatgaggaagcgacaagaacagagaacag

SEQ ID NO: 485433 - DNA, 1018 bp, Homo sapiens
  misc_feature (4)..(4): n is a, c, g, or t
gganggcgacacttgctacggagtgcatcggacgtcgaagcctagagtctctgcgtctttccctcttccgtgcctcattcctttccttcctagcctggtcgtcgccgcaccactgaccaaaaaaaaaaaaaaaaaaaattgtgggccggccttcgggcctgaggagaaagtttttttaaagacaatttctgtggggcggccgggccccaggatagggttacggtgacctgggccattaggctggtccccaagggagactcggggccatggactaaagggggttggggtttcctcacccaatataaaaaaaaaggccgggggggaccccggaggggtcctgaacaaattccaggatgggaggttccggggaggggcccaattacgggggattcttaatccaccgggggaggctccaagcgggggacgtctcgggatattaaaaatttaagggcccggccccgagggggtataacacaacaacacacaagcaaccacacacaatccatatcctcgcaaccacaacaagagcgcaaaaacaaacaacaatgatgaacatacaccatagaagacacaacaacacaaacaacaacaccagaacacgaaacacacaacacacaacaacaaataccacacgatcacacacgatcagtagcactaacgacaaaaagagggacagagagtaaagaacaaacgcccgtctgcggcgccaacaagcgaagaccgcacaagcgggcgagacagcaggcgggcccaccaatgcgggacaccggcacacacgcggaacggtaaccgacacaaagcccggcggcagcagagagcgaggcagacacgcagaaccgcgccgagagacagagagcgagacgcgaggaagtgaccgacgagcagcacaccgcaggcgagcaaaggcagaacaccgcggaacaagtgcgaaccacacggcagaaacccacacggagccacaaagagggcagaagagaggcggaggaaaccggaagaagcagacacaggcaagtcgcgt

SEQ ID NO: 485434 - DNA, 880 bp, Homo sapiens
  misc_feature (6)..(6): n is a, c, g, or t
  misc_feature (15)..(15): n is a, c, g, or t
  misc_feature (99)..(100): n is a, c, g, or t
  misc_feature (137)..(137): n is a, c, g, or t
  misc_feature (259)..(259): n is a, c, g, or t
  misc_feature (263)..(263): n is a, c, g, or t
  misc_feature (287)..(287): n is a, c, g, or t
  misc_feature (297)..(297): n is a, c, g, or t
  misc_feature (305)..(305): n is a, c, g, or t
  misc_feature (310)..(310): n is a, c, g, or t
  misc_feature (313)..(313): n is a, c, g, or t
  misc_feature (321)..(322): n is a, c, g, or t
  misc_feature (332)..(333): n is a, c, g, or t
  misc_feature (335)..(335): n is a, c, g, or t
  misc_feature (378)..(378): n is a, c, g, or t
  misc_feature (382)..(382): n is a, c, g, or t
  misc_feature (388)..(388): n is a, c, g, or t
  misc_feature (431)..(432): n is a, c, g, or t
  misc_feature (599)..(599): n is a, c, g, or t
  misc_feature (698)..(698): n is a, c, g, or t
  misc_feature (706)..(706): n is a, c, g, or t
  misc_feature (720)..(720): n is a, c, g, or t
  misc_feature (723)..(723): n is a, c, g, or t
  misc_feature (728)..(728): n is a, c, g, or t
  misc_feature (730)..(730): n is a, c, g, or t
  misc_feature (733)..(734): n is a, c, g, or t
  misc_feature (737)..(737): n is a, c, g, or t
  misc_feature (739)..(739): n is a, c, g, or t
  misc_feature (741)..(741): n is a, c, g, or t
  misc_feature (748)..(748): n is a, c, g, or t
  misc_feature (757)..(757): n is a, c, g, or t
  misc_feature (760)..(760): n is a, c, g, or t
  misc_feature (766)..(766): n is a, c, g, or t
  misc_feature (772)..(772): n is a, c, g, or t
  misc_feature (777)..(777): n is a, c, g, or t
  misc_feature (782)..(782): n is a, c, g, or t
  misc_feature (787)..(787): n is a, c, g, or t
  misc_feature (790)..(790): n is a, c, g, or t
  misc_feature (793)..(793): n is a, c, g, or t
  misc_feature (808)..(808): n is a, c, g, or t
  misc_feature (814)..(814): n is a, c, g, or t
  misc_feature (848)..(848): n is a, c, g, or t
attttnccttttggncatatttaacagataaacttgacattacaagtaacagcaacacattcccattctactgaagaaaacaaatgcgatttagctttnnggttagaaaacgtatcttcttactgcaatctcaagtngcatttagaaagtttagttttcccttttctaacctctaaaagatgatatgatttttaatgcaatcatacacaactgttttcacattggaaataatcacgaggaatcaataggtttaggctanctgnctgattggttttgcttccattgtnaatttccggnggggtccngcggngtngggggttnnggaggggggnngnggtcggggcaggggtgaacggccttggtctttagagtgggggngggnacatgnagcggcacacggggcaggtgcctgacttctgaagccagatggnnacacacggcttgtggaaatagtggtggcacggcagctcagttgccacctcccccttcacatattcgctacagcggatggggcagcacatctcctgaccaactgcgccatgatcttcagtgaccaggatctcgggaagagcgtcaatgctctccttgcttgctggtgnattggccacctctacatccactgcgagagactccaagtgcgcaagggcagtttccattgcctgggccaggcgttcttcaagtgccatgtaggtgagganctgagggnccacataggaaaantgngcttnangcnnccncncnaacccantcttgaaanacnccactnaaaaanagggnctcanattcntcnttncataggtctttcgcntacacnctggaggctatttctttaaagggttgtttgtttnccctcacacacgtgagatccccccgggtttga

SEQ ID NO: 485435 - DNA, 1744 bp, Homo sapiens
  misc_feature (128)..(128): n is a, c, g, or t
  misc_feature (186)..(186): n is a, c, g, or t
  misc_feature (424)..(424): n is a, c, g, or t
  misc_feature (458)..(458): n is a, c, g, or t
  misc_feature (968)..(968): n is a, c, g, or t
caactaacaaccgtactcaaaaaacttctagatcctaagcttatctccacaaaagagaacacacaaacagcaaaaaccatagggcccctctcaacccctccctgcacacacctcatcacttgaaaaanggtcctgctcacaacatcacttttaaacttctgaaatccgcccacaactgcccaaatnacaattgaaacccagccacccaaaatttctaaaggaaaaaattttcttctacttttccacaatttaccccaaaatctttctggctacatttggtacaaaaggcaaataacatacctctaccattacattacatcatatgtattaaacggtcaaaaaattatatatagacctacatacaataaaaaaaaaaaaatatattccaattcatcccttctaatccaaaatttcacgcaggaanatgcaggatctacacttacacatcgtaaaacgangcgatgggactggaggagtaactggacatttcaccttcaccttatacctggagactcccaagccctccgaagctgcccaagccctacatcaccatcaacaacttaaaccccagggagaataaggatgtcttaaacttcacctgtgaacctaagagtgagaactacacctacatttggtggctaaatggtcagagcctcccggtcagtcccagggtaaagcgacccattgaaaacaggatcctcattctacccagtgtcacgagaaatgaaacaggaccctatcaatgtgaaatacgggaccgatatggtggcatccgcagtgacccagtcaccctgaatgtcctctatggtccagacctccccagaatttacccttcattcacctattaccgttcaggagaaaacctctacttgtcctgcttcgcggactctaacccaccggcacaatattcttggacaattaatgggaagtttcagctatcaggacaaaagctctttatcccccaaatnactacaaagcatagcgggctctatgcttgctctgttcgtaactcagccactggcaaggaaagctccaaatccatcacagtcaaagtctctgactggatattaccctgaattctactagtacctccaattccattttctcccatggaatcactaagagcaagacccactctgttccagaagccctataagctggaggtggacaactcaatgtaaatttcatgggaaaacccttgtacgtgaagcatgagccactcagaactcaccaaaatattcgacaccataacaacagatgctcaaactgtaaaccaggacaacaagtggatgacttcacactgtggacagtttttcccaagatgtcagaacaagactccccatcatgatgaggctctcccccctcttaactgtccttgctcatgcctgcctctttcacttggcaggataatgcagtcattagaatttcacatgtagtagcttctgagagtaacaacagagtgtcagatatgtcatctcaacctcaaacttttacataacatctcagggggaaatgtggctctctccaccttgcatacagggctcccaatagaaatgaacacagagatattgcctgtgtgtttgcagagaagatggtttgtatgaagacgtaggaaagctgaaattataatagagtcccctttaaatccacattgtgtggatggctcttgccgtttcctaagagatacattgtaaaacgtgacagtaagacattctagcagaataaaacatgtaccacctttgct

SEQ ID NO: 485436 - DNA, 339 bp, Homo sapiens
  misc_feature (4)..(4): n is a, c, g, or t
  misc_feature (101)..(101): n is a, c, g, or t
  misc_feature (104)..(104): n is a, c, g, or t
  misc_feature (112)..(112): n is a, c, g, or t
  misc_feature (119)..(119): n is a, c, g, or t
gganggcgacacttgctacggagtgcatcggacgtcgaagcctagagtctctgcgtctttccctcttacgataaaaaaattcggtctttcctagggttggncgncgccgccnccatgancatgattattatccgttcctagggatgcccgcgcccctcggctacgtgccggggctgggccggggcgccactggcttcaccacgcggtcagacattgggcccgcccgtgatgctcatgaccctgtggatgatcgccatgcaccccctggcgagagaaccgttggggacccgatgaagaaaaatcaggctgctggcgatgacgacgaggatctaagtgact

SEQ ID NO: 485437 - DNA, 852 bp, Homo sapiens
  misc_feature (6)..(6): n is a, c, g, or t
  misc_feature (15)..(15): n is a, c, g, or t
  misc_feature (99)..(100): n is a, c, g, or t
  misc_feature (137)..(137): n is a, c, g, or t
  misc_feature (259)..(259): n is a, c, g, or t
  misc_feature (263)..(263): n is a, c, g, or t
  misc_feature (287)..(287): n is a, c, g, or t
  misc_feature (297)..(297): n is a, c, g, or t
  misc_feature (305)..(305): n is a, c, g, or t
  misc_feature (310)..(310): n is a, c, g, or t
  misc_feature (313)..(313): n is a, c, g, or t
  misc_feature (321)..(322): n is a, c, g, or t
  misc_feature (332)..(333): n is a, c, g, or t
  misc_feature (335)..(335): n is a, c, g, or t
  misc_feature (378)..(378): n is a, c, g, or t
  misc_feature (382)..(382): n is a, c, g, or t
  misc_feature (388)..(388): n is a, c, g, or t
  misc_feature (431)..(432): n is a, c, g, or t
  misc_feature (599)..(599): n is a, c, g, or t
  misc_feature (698)..(698): n is a, c, g, or t
  misc_feature (706)..(706): n is a, c, g, or t
  misc_feature (840)..(840): n is a, c, g, or t
attttnccttttggncatatttaacagataaacttgacattacaagtaacagcaacacattcccattctactgaagaaaacaaatgcgatttagctttnnggttagaaaacgtatcttcttactgcaatctcaagtngcatttagaaagtttagttttcccttttctaacctctaaaagatgatatgatttttaatgcaatcatacacaactgttttcacattggaaataatcacgaggaatcaataggtttaggctanctgnctgattggttttgcttccattgtnaatttccggnggggtccngcggngtngggggttnnggaggggggnngnggtcggggcaggggtgaacggccttggtctttagagtgggggngggnacatgnagcggcacacggggcaggtgcctgacttctgaagccagatggnnacacacggcttgtggaaatagtggtggcacggcagctcagttgccacctcccccttcacatattcgctacagcggatggggcagcacatctcctgaccaactgcgccatgatcttcagtgaccaggatctcgggaagagcgtcaatgctctccttgcttgctggtgnattggccacctctacatccactgcgagagactccaagtgcgcaagggcagtttccattgcctgggccaggcgttcttcaagtgccatgtaggtgagganctgagggnccacataggaaatggcttcagccactcctaacccatctgcaaatccatcaaagaggctccaatccacttctaggtcttcgctcacactggagtcatcttcaaggttgttgtttccatccagcatgaatacccanggttgcatcaac

SEQ ID NO: 485438 - DNA, 663 bp, Homo sapiens
taatgtatcataggtactgggaagaatacagcaagggtgcagactatcctggactgcttatataggtatctcaacacccagtttattaccaagaaactaaattaacagaagcggacccttcagttatggctatggtggtgtacgatctgaatgaacccacttatggacacatacggagacgctacgcattggcatatgtggcggacatgctggttgaaccattcaggccatccttatccgaatgctgctccgacgaacatcaaaaatgatcgtggtggagaagacccaaaccagaaagtaatccagtggggtataaactccttgtgtacatgtggaaccagtataagaccaaaattcccctaaacagtttatcaggaacattttggagtctcccttgctgactgaacacaggacgagtatcacaaaccacgagagcttcaaattgataacaagaatcaaagtggtcacagtatatggaaaaggttctaggtagattacacagatgaacgaaattcgatgtcgaaaatactacatccaagttcatatactaaggtgatcaatgcaatgtcaacaggaatggtagcagacacattacagtttttacatgcgaatgtcataataaattcgacagagaaacaacacatgcctggccatattgtagta

SEQ ID NO: 485439 - DNA, 1230 bp, Homo sapiens
  misc_feature (454)..(454): n is a, c, g, or t
gtagaggatccccggatgactacgggggaagctctgaccatttagccaccaaatgtaggtgtataaggatgtcttaaacttcacctgtgaacctaagagtgagaactacacctacatttggtggctaaatggtcagagcctcccggtcagtcccagggtaaagcgacccattgaaaacaggatcctcattctacccagtgtcacgagaaatgaaacaggaccctatcaatgtgaaatacgggaccgatatggtggcatccgcagtgacccagtcaccctgaatgtcctctatggtccagacctccccagaatttacccttcattcacctattaccgttcaggagaaaacctctacttgtcctgcttcgcggactctaacccaccggcacaatattcttggacaattaatgggaagtttcagctatcaggacaaaagctctttatcccccaaatnactacaaagcatagcgggctctatgcttgctctgttcgtaactcagccactggcaaggaaagctccaaatccatcacagtcaaagtctctgactggatattaccctgaattctactagtacctccaattccattttctcccatggaatcactaagagcaagacccactctgttccagaagccctataagctggaggtggacaactcaatgtaaatttcatgggaaaacccttgtacgtgaagcatgagccactcagaactcaccaaaatattcgacaccataacaacagatgctcaaactgtaaaccaggacaacaagtggatgacttcacactgtggacagtttttcccaagatgtcagaacaagactccccatcatgatgaggctctcccccctcttaactgtccttgctcatgcctgcctctttcacttggcaggataatgcagtcattagaatttcacatgtagtagcttctgagagtaacaacagagtgtcagatatgtcatctcaacctcaaacttttacataacatctcagggggaaatgtggctctctccaccttgcatacagggctcccaatagaaatgaacacagagatattgcctgtgtgtttgcagagaagatggtttgtatgaagacgtaggaaagctgaaattataatagagtcccctttaaatccacattgtgtggatggctcttgccgtttcctaagagatacattgtaaaacgtgacagtaagacattctagcagaataaaacatgtaccacctttgct

SEQ ID NO: 485440 - DNA, 214 bp, Homo sapiens
aggatccctagctggtcgcagtcagaaaaattacagggttatttatattattataagtgaacgctgaactgtcactgaacatttaattgcatatgctttacgtctccggcatttatattaaaaattcacaccacaaaatgaaaatgggaaaaaactggccaataactggatttctgtccctattttccactcgcaatcatatacttaggtacct

SEQ ID NO: 485441 - DNA, 450 bp, Homo sapiens
cactgtgtcagaccgtcccgatgccctccacccgtcgaccctctggataaccactgattactttgtacctgtggatttgcctgtccacgtgtcatgtaaatggagtcatggcccacgtgtccctctgctccccggaatgagttcgtccccagcgtgatgccggtcaaggcatatccggcagcatgcgtcagtcctccctcctttccgtggtcaaacagttttccattttcgtttatccgttagttgatgggttgttcctagtttgggctctttcaaatgcacctgtggacattcttgtacatgtctttgtatagacatgtgttttctgtgctcttgggtatattcctgggaatggagcttggtcatatggcaactgtgtttaatgtatttgtggaactgccaaacagtttcccaaggtggctgcaacattttgtaatcccgccgtcaatg

SEQ ID NO: 485442 - DNA, 147 bp, Homo sapiens
atccccatagttgctagatgaggatggatagtaactagggcaaggacgcctcctacgtttgttagggacggatcggagaattgtgtaagcgaataggaaatatcattcgggcttgatgtgtcggaggggtatttaagtgggttggct

SEQ ID NO: 485443 - DNA, 540 bp, Homo sapiens
  misc_feature (2)..(2): n is a, c, g, or t
cntatgaggatcccgaaggcgcacgaaggcgcgtcgtgtgaagagaccaccaaacaggctttgtgtgagcaacatggctgtttatttcacctgggtgcaggtgggctgagtccgaaaagagagtcagcatagggagataagggtggggccattttataggattagggaaggtaatggaaaattacaatcaaagggggttgttctctggtgggcaggggtggatctcacaaagtacattctcaagtgtggggagaattacaaagaaccttcttaagggtgggggagattacaaagtacattgatcagttagggtggggcaggaacaaatcacaatggtggaatgtcatcaattaaggctgtatttacttctttggtggatcttcagttactttagggccatctgaatgtatacgtgcaggtcacaggggatgcgatggcctggcctgggctcagaggcctgacattcctgccttcttatattaataagacaaataaaacaaaatagggttgaagtgttgggacgcgccatcgtgcgctacg

SEQ ID NO: 485444 - DNA, 362 bp, Homo sapiens
atcacaggtcgtggccatcctcccacctcagcctcccaagtaactgggatcacaggcacattcaccatgcctggctaatttttctttctcttttgtagaggtggggtttccccatgtagcccagctggcctgaactcctaggctcaagcaatctgcacacctcatcctgcctcggcctccgaaagcaccgcaattataggcatgagccacagtgcccagcctttcttctttctttcttttttttttttttttttttttttttttttttttttttttttttttttttttttttttttttttataacccttgggaaaaccgggttttttgggaaaaacttctgtggggggaacccggagggggg

SEQ ID NO: 485445 - DNA, 265 bp, Homo sapiens
tcgagagatcccctgggtgctaggtgactgtgctagcatctacacacgtggccaacgcagcagcccagcacaggacaggcatgcatgggcgcagggagagtcttcaactgcagtgcagtgcgcaacagtttttacaacagtcaagggggcagtcttgatccaaagctgcctgttcgaggagtcctgtgtctccacgaacagacgcgccttagttctttggctgggatcagctcgtgggaagcaacccagagtgcttcctgtggtg

SEQ ID NO: 485446 - DNA, 306 bp, Homo sapiens
gatcacttgaacccaaagaggtcaaggctgcagtgagccgtgattgtgccactgtactccagcccaggtgacagggtaagaccctgtctcaaaaataaaataaaataaaatttaatttaatttaattaaaattagaaaattacctgaccccaaacgatcctcaaaataagacttttgtaagcagattattgtatttagttaacaaaggaagagaaatattaaagtagcatatttttcacacaatacaccgctgtattagtccattttcatgttgttgttcgacataccagagactgggtaatttat

SEQ ID NO: 485447 - DNA, 466 bp, Homo sapiens
tttgcagcagctcctatctaataaagtaacaactcgtcagttgcaggctggtcttgaactcctgacctcaggcgatctgcccgccttggcctcccaaagtactgggcttacaggcgtgagcacctgctcctggccccaaccatctctttctacatacacttgcgtagacggcataaacatgcactgtccaatcatcatagcacaacacatgcaaattttccaccatcatttccgcatcagcagcaatcaccaagcagcagcaacatgtggtttccatccaagtgggcacagcacacagccagcaatttcaaaatcaacttttagggcacactgcacatcgcagtactcaatcaaaacttcagtctttcgctcaataatcaatcaataataatcatcaatcaacaacttcatagaatgtggcccagctccactaacatgcaggcacagaggccaggcatttactagc

SEQ ID NO: 485448 - DNA, 458 bp, Homo sapiens
ccactttctcttcctcctgctctggccatgtgaagacatgcctgcttccttttgctttacatcatgattgtaagtttcctgaggccccttcagctctgcttcttgtacagccttggaactgagaggtgaagctggctgggtttctgggtcgggtggggacttggagaacttttctgtctagctgaaggattgtaaatgcaccaaccagcgctcttttttctagctaaagatttgtaaatgcaccaatcagcactctgtcaaaatggaccaaccaacactctgtaaaatggactaatcagctctctgtaaaatggaccaatcagctggatgtgggtgggccaaataagggaataaaagtaggccatccaagccagcagcagcaacctgctcgggtccccttccacagtgtggaggctctattcttttgctcttcacaataaatcttgctgctgctcaaa

SEQ ID NO: 485449 - DNA, 143 bp, Homo sapiens
gctggggggttgaggggtaacaagatcccatctgtataaagtgcagtttgtgtccctcaaaatatgccctgtatggctacccaaaagcagcttgatgaacaaatccccccatggctcattaaagaacaaagcttccagaagca

SEQ ID NO: 485450 - DNA, 887 bp, Homo sapiens
agagagcgaaaaataggcgaacggcacgctgtcgtcgaaagccaatgctccctgagtcacggcgaagatctcaacgaaatacatgatgatgagctatgggtaggacattctaccagaatatggaagactgtgagtaggcacttgcggttattgtctatggatcgtatgcgtagaacttgtgcgtaatttactaggcatgttgtgatcacggcgacggataaaagcagagtttatatcctcagaataggggtatacacaagtgtttttcgctcagtatttactggaaaatggacatcactagtctttcagtaagatttctctcaaaaacgtgaaaaaccttggtaaaattgcaattctttctgcggatatatggtacaacatgacttaaaacttttttttttctattaaaacttaaaaggggaacaaaacttgaaaaagccctgttcttcagaaggtgagtgggttgagggaggcagtaatatgaagtgactgctgtgtattttaactaccagatttttaatattgccactgttaatagttggaaaggggaaattctgataagcgaaaggtggtatcatcctagggtaagctttattttcagaaacaaagtctaatatttcagattcttcttttggactttatacctctgagttattactaactgtaaagtgggtgtatatgaaacccttccatgcattttccagtatggtctgtaattttgacaggaaatccatgctttggtgggtgtctataaaaaggaatccgaagatatgtgacacgaagggtttaagggggaaagataatttgacttgaagacattgtagtaacctaatttttggaattatatgaagagggcgtgaaggagagaaggatcagggaataagagg

SEQ ID NO: 485451 - DNA, 361 bp, Homo sapiens
tctggagtcttgtctccgcaggctccatctatgagatctctgtggaatgagtgctgactctcctcggggtgacctgatcatggtctcccaggtcctggctccagaaggtggtctgtgagaacccgaataccagccagaccatggagctcgtccccaatttccaggttaaggtgggcacatctgccttccccatgtgccctggcactctccttggcacacccgctaggctgctcgtgggcttgccacgttctcaggctagtcactcccctcccctcggggtttggtcccaaggccctcacattcaccactaaccagcctcaagggtggggatgtcctcatagggtcggcaatgctctgtatt

SEQ ID NO: 485452 - DNA, 142 bp, Homo sapiens
gttagcactattgcatgtaagccactacatcctaatatcctctaaaagagctaagtagtacattgtagttcctgcccacctagacgcccgcaatctagttaaaagttaaaactaaagaataccaaaaagaaaaagaagctgt

SEQ ID NO: 485453 - DNA, 508 bp, Homo sapiens
  misc_feature (30)..(30): n is a, c, g, or t
  misc_feature (35)..(35): n is a, c, g, or t
  misc_feature (44)..(44): n is a, c, g, or t
ccttgaatggtgctgacagtagtgagcganaatgnaattaatgnacatgatgtcgtggtccagttgcagcctaatggtgaacgggattcaacatagcaaatactgtttgactttcagaacgatgattgggtttattctccgcttaaagaatgattagggtatatactggtaatttggattttttgctcccttcaaagatttctgtagaaataacttattttttagtattctacagtttaatcaaattactgaaacaggacttttgatctggtatttatctgccaagaatttacttcattcactattaatagactggtgctgtaactcaagcatcaattcagctcttcttttggaatgaaagtatagccaaaacataaaaaaaaaaatcctcagtatagcttgcaattaagacctagatcacagtatttaagtgttcagcgtttaatacatgaggtcagtgctacagacacctagtatgcactaacccagtttccacctccataaagtc

SEQ ID NO: 485454 - DNA, 123 bp, Homo sapiens
ctcggagttagtagatgatcttgtgctcattgcaaactcgtgcgcttccaggtttccagcaattctcctgcctcagactcccgagtagctggaactacaggcgcggttcaccacacaagcctt

SEQ ID NO: 485455 - DNA, 184 bp, Homo sapiens
tgttgggattacaagcatgagccatcatgcccagcctaaatcttactaccttttaaatacaatttttactttatcatattttaaatttccaagtgctttgtctattccctcttttggttcggtgtctacatgctggtggctttggctttctattcacgtttaagtatgaggcacagattgcagt

SEQ ID NO: 485456 - DNA, 125 bp, Homo sapiens
gtcgacagatatgggaatgtttggttgtgtgagtgcatgtgttacatgtgttgtgcctgtgtatcacaaatatctgaattacttggtgcaatcaatatgaacatgtttgttttcatatgtatagt

SEQ ID NO: 485457 - DNA, 604 bp, Homo sapiens
  misc_feature (92)..(92): n is a, c, g, or t
gtgtctcccgctccaccgcccttagtgagccccatcagctgcccccttttacttcgcatggaacggtctgtccaaagatcctcgtctgctangggcgagcgagacgatgcgttcttatgctactttgtatagaagaacaacaacagacaagaaacgaacaggtcgggcaattacattgttgggtccaactattttataagtgtgtgacggagatgctacagtagcgagcgagccgtatggcaagagcttataaatgattgatgcgaatatttggcactctgctcccccgtcgtgtaaggatactgatagcacaacgctcttacccccctacccatgtcccggccttttggtcggtccatcccttgtccgctttctgggccctcgttcctggtagcccaagtctcagagcgtttcctcttcctgaagccctagaggagttagggaatggagcccaggcaccagggggtctaactgtgtgagccactgagaagagagacgcaattgacccttgccattccaaagcgatagaggcatgagtggtcccctcttgtgccacctaggccagtttgaccctgggcattaactgggcttagaagaaacggga

SEQ ID NO: 485458 - DNA, 956 bp, Homo sapiens
  misc_feature (513)..(513): n is a, c, g, or t
agcggagtgactgcggcctgcatcccgatggtctgtctcctccaaggtctacatgattacctgaagtttaataagtaagaccatgaattatggcatttcttaaatgaacgcgttcaagaacgtgacgagaatgtgcatagaagaaactacagatgattttgaaggttatgtctatctaaatctcgactgtgcgatatatatatttagcctcctttaggtaatagccgacgaaagggtgtggggggagcctgagaagaccacgcgacctggtgtttcttggtgctcacccttaaagcatttcctggggggataatggccacattcaggcgtaaaacaggaggggttccaattacgaacacaataatttaagatggtgctactggggcccacaaggtgaagggcattactctggcgggtgaagcagctgtggtactctcccaggcgaaccaatgggtttaccatattgggatcttcggagacttatgcgcgttcctgaggccccaagggagacantacaacagagtgaagcattctgctagtgtccccgtgagttataaacgtagcttctgaagcctcctcgtgtctacaagggcgggtgtttggcgaatccacaagtgggcgatgaagatcaccagctgtaagcgtcaacatgtaaagccaaaaggttgccccccaatttttgacgaacaaccgggttccgcgaataaggggggccggggtttaaaccagataaaagaccttcgagataaacggcccatctaaattctcttggtgaagaagattatattgtctggaccaccaatctacgcaggaagaaagaagtgcctttagcgcagaaaagaaaaaaaagtctcatttatttgaccaccgggagaaagattatagggtgagaacgccggggcttttcccatgtagcccacagtggttataaaacccaccgaaaatttggggactcc

SEQ ID NO: 485459 - DNA, 358 bp, Homo sapiens
agttactgatgttttgcatatttaagagtgtctggtttggaaaattacctgagcagggtgtggtggcttacacccaataatcttagctacttgggaggttgaggcagcaggatctctcgaggccaagagttcaggaccagcctgggcaacatagtaagactcgtccctaagaaataaaaaaaaattagccaggtgtggtggtgcacacctgtagtcagtcccagctcctcaggaggctgaggtgggaggatcacttgaacccaggagtttgaggctttagtaagctatgattgcaccactgcactctagcctgggttacagagtgagaccttgtctcttagaaaaaagcaaaaaaaca

SEQ ID NO: 485460 - DNA, 151 bp, Homo sapiens
atcgatgtgcagctctgtctgcccgtctacgcctctacagtcccaaacgtctgcctcacaacacattcttcacggcccagtcatctacctcactgtggaccccgcgcaaggccaagctccgcgacctttcagcagcttctacatcagccat

SEQ ID NO: 485461 - DNA, 319 bp, Homo sapiens
tagccgcttcttgaggatccccctgcgcaggttaataaactatcaatttgcaaagcagcatgtcggacagagacacggtcactgattcacacccagtccgtgccgcagaccgtctcagacacgcacggtgggcctgctgcatgattcacacccagtccctgccacagaccgtctcagacacgcacagtgggcctgctgcatgattcacacccagtccctgccacagaccgtctcagacacgcacagtgggcctgctgcatgcgtgttacctggcttttggctccacgctcactcatagccatgtccacatgggggcttg

SEQ ID NO: 485462 - DNA, 263 bp, Homo sapiens
gtctgcggctgtccaagactgataaactaatcataactgttaattctcagccctctttgaacgcttgtcagatgagtcttaggtatttagtagacgtttgcagactttcctgccagtgtcataaaatcctatttatgaatcctgtcggtattccttggtatttgaaaaaaataccatatagtaccatacattagtgatttctaatttttgaaaaattataatagacattgcatcacactaacttacaaagatacaacgttctc

SEQ ID NO: 485463 - DNA, 487 bp, Homo sapiens
gatcggttctaccatgatgaaaagagtttgtggatggatggtggtgatggctgcacaacaatgtgaacggacttaatgccgctgatctgtgcacttaaaaatgagtaagatgttcagttttatgtgtattttgccacaacttctaaaataaacaaactaattaaacaaatgaataaatgaatcaagtgaaagaagagaagtcaatctctgagtccctgcttggggagcgggtgggttaagggcagcaccattgacatgcatatcatggaccagcaaagctgtaaatcacatctcctgctcacaagccttctcacacacatgggaccctttggttcacgtgccagccaggattcccgaagcaaattccttctataatcttcattctcaaggatgtagatgtagattaagaactttaccctagaaggtagggatgagcgcgcaagaatcccatcctcaaatatcccaggcaacaaaaactcagaatcaa

SEQ ID NO: 485464 - DNA, 214 bp, Homo sapiens
ctagctcagccaagcaggaggagctggaagccgccctgcagcggggcaagcaggatatggcacggcagctgcgtgagtacctaggaactctattagcgttaagctggccctggacatcgtagtatcgcctacctacctgcatagctgctggtagggcgtaggagtagccgtgttggcttggtagcgtgtacaggggtgtatcctctagtagtcg

SEQ ID NO: 485465 - DNA, 100 bp, Homo sapiens
tgcttcaagaaaaaagatacccatgtcagtagatatattaaactttaatatgtttgcactctgtaaacatacaacagcctaaagataaagtcattatcta

SEQ ID NO: 485466 - DNA, 354 bp, Homo sapiens
gttgacaaagccccctgagctctacagatgtggacctcagggaggccaagctcctccaggccacaggttcggactgaggaggggacactctcctggagagcagctccctgcttggcaggcgcaccttaacctggagagctgggtgcacaggcaggagcctccgggcctggatagccagtgagcctggcagggtggtgggaacacagatggacgtccccagcagggatggtgcgggtggagggaggagcgcccggcaggtccctgctgtctgggtctgctctggtggtggctgcgggtgagcgcctgtggactggtggcgtggcactgggctgctcggccgtgtgtttctgattc

SEQ ID NO: 485467 - DNA, 391 bp, Homo sapiens
ggatctgcactgactcgtctttggaaggagcagataatgaactctgtttctcgctgggggggatttacttcaactagtaaatgtactgtaagaagctagtcattaagatgttcacaaatcctttatctacatgaagtttgggagagatgttatctttaatccatttatatatagtttgaggggatggatccaactttatttgcttcaacagttcctatctccaaatttgacggagtagggacataaagaaaactacagtccctattccttaccaaacatctccaacatagcggtcctatattctagatcaatttctagggagcattttctagcatattagaccttagctttgtatgaaaaagttctagttaaccattactcgatcttgtaa

SEQ ID NO: 485468 - DNA, 369 bp, Homo sapiens
  misc_feature (163)..(163): n is a, c, g, or t
  misc_feature (211)..(211): n is a, c, g, or t
  misc_feature (258)..(258): n is a, c, g, or t
  misc_feature (279)..(279): n is a, c, g, or t
  misc_feature (308)..(308): n is a, c, g, or t
  misc_feature (354)..(355): n is a, c, g, or t
ctcgtgccgaattcagcacgagctcgtgccgaattcggcacgagcgaaccccagaggtgagattgtgatcggtggccagaatatctccatgggatattttaaaaacgaagagaaaacagcagaagattattgtgttgatgaaaatggacaaaggtggttttgnactggcgatattggagaattccatcctgatggatgcttacagattatnggatcgtaagaaagatctggtaaagttacaagcaggaggaatatgtntctcttgggaaagtaggaagntgcactgaagaattgtccactgatcgacnacatcttgtgctttgggcaaaagtgaccagtcctattgtgatcaanntttggggggtccct

SEQ ID NO: 485469 - DNA, 352 bp, Homo sapiens
  misc_feature (13)..(13): n is a, c, g, or t
tttcaaagtgtgnagtgcgtgcattgttttaaaaagtttggtagtactttttggccgtttggatatttaactccgtttctttttttttgaagacggagtcttgctttgtcgcccagtccggagtgcagtgacgtgatctcagctcactgcaagctctgcctccctgggttcacaccattctcttgcctcagcctcctgagtagctgggactacaggtgcccgccaccacgcctggctaattttttttttgtatttttagtagagacggggtttcaccgtgttagccaggatggtcttgatctcctcacctcatgatctgcccgcctcagcctcccaaagtgctgggattaca

SEQ ID NO: 485470 - DNA, 534 bp, Homo sapiens
ctagaggatcccccatgtgggcatcactgaggatggggatgtccagtttcacctgctgcctgtccttgaagagggaagacgcatgaacagagatggctacaccaattgcaagctcagcgcaaaatgagaagaaggactccttgttcaaacctaattaacaatttccaggcgggggcagcagacagttaaagcaatatggcgcccttccgtgcgtggggaccctgtgtgagttacgcaaggtgcggactcatgaaacttgaggtgtagataacagaagctatccacctccgaggctttccgggtctctagaactggaaagaatattttccgcacttcaacattggcatctgttcccctgtggccaaattagtagattgaatactgtctcccaaaaagatttgataaagggctaatccctggtatcggtgaatgggaccttattcacagaaagggtctttgcgaggtgtcattgagttaaggatcttgaaatgagatcatctggattatcaaggtgggcataaatccaatataagt

SEQ ID NO: 485471 - DNA, 102 bp, Homo sapiens
cgcgtcgctcggtggtgtgtactgcaggaggggccgtgcgtcgaccctgagcctcagcctggacagcgaccagagtagtggctcaaccacatccggttcccg

SEQ ID NO: 485472 - DNA, 563 bp, Homo sapiens
tggcatcgggggctgatggaagtggagagggggctggagagggcaccctatatccagcatgctccaaggttacagctccgtggtccaggccttgctggggaccttcttcacctgggcaatgacatcagccggggcagctctcgtgttcatattctccagcgggcagaggcggatcttagacggaagcctgggctttgccgcaggggtcatgttagcggcttcctactggtcgctgctcgcaccagcggtggagatggcgacatcctcggggggcttcggcgcctttgccttcttcccagtggctgttggcttcaccctgggggccgcctttgtctacctggctgacctcctgatgcctcacctgggtgctacagaagacccccagacagccctggcgctgaactttgaccctgcattgatgaagaagtctgatcccagggaccccacttcgctgctcttcccggagagtgaactttccatccggatagacaagcgtgagaatggcgaggtataccagaggaagaaggtggcagctactgacctcgcagagggcgtggccccct

SEQ ID NO: 485473 - DNA, 444 bp, Homo sapiens
aacagtcacaggtaaaagcacagaaatcatgtgaaggagccaaataatgaaacagacctctacattctaccagatacagagttcaaaaaggagacagtgaaaatactgaaggaattaagagtgcgtatgaaggaattaagagtggatatgaacagtaatcgcagattactttagaaaggaacgagtaaatataaggaggaaccaagaataattagtaaattcatttgcagaggtgtagggagcaaataatgaaacagacctctacattctaccagatacagagttcaaaaaggagacagtgaaaatactgaaggaattaagagtgcgtatgaaggaattaagagtggatatgaacagtaatgcagattactttagaaaggaacgagtaaatataaggaggagccaagaataattagaaaattcattggcagaggtgtaggactg

SEQ ID NO: 485474 - DNA, 806 bp, Homo sapiens
atactagctatatcgctcacacctcatatcctccctactatgcctagacggaataatactatcgctcgttcacttatagctactctcataaccctcaacacccactccctcgttagccgatattgtgcctatagccaataactagatcttatgccgacttgcgacgcagcggctaggccatagacgcctactagatgctcaatctccacacgacatataggccatagactacgtacataacctaaaccatacgtccaatgctaaaactacgtcgtaccacaacaattagtatcgcctaccactgagaaagacgcgtcgcaacacaacacatgcacatcgagaatcccacacgagcgacccacagccagacgtgccaagccatcagaccgccactacataaagggcaccaccccagacgtcaagcacaagcaaagccataatagccaagcctcggaacgccacgacaaccaatatggtcccgacacgcacagacaatagcaagaacacccccgaccacccaacaagtacaacaagaaaaacagaaccaaacggagggacaccaccccacccacgtcgccagtccgccggccgcaactgaccaacacaaaataccccagcgacacgccaacggacaccaggcacaacacaaaacgaaacaggcgcaccacacaaccgaacgcatcaccgcctaccacacaggcaacacaaacacgaaacataagacaagccaagcaagaacccacaagaaaccacaagcgcccagcacaacgcaggcaacacacacgcaaaacgaggaccggcgaccc

SEQ ID NO: 485475 - DNA, 1470 bp, Homo sapiens
  misc_feature (514)..(514): n is a, c, g, or t
  misc_feature (516)..(516): n is a, c, g, or t
  misc_feature (585)..(585): n is a, c, g, or t
  misc_feature (1251)..(1251): n is a, c, g, or t
cttgtggagcgcccccgccggggggcgccggatttcctccatgctcctctccgggagacttgttttgcgcctcttatgggccccgctggggtccccgggggatgatgccgcgcaggtgttgccgcccgccccgacgggggtcacccatgcccttgatggtccccctcttgttagcgccccctattatttttaaaggtgtggacaccaaccccgtgtatgtgaggtgcgaccacacgcggtgtttggtggacccccacataaaagaacgccacgggtccttggtgttaccaaccgggttgctccgcgggaaattttccctcccgggcgaataaatattccgtgttctggagcccccaccacggccgggtgtccccccttggaaaaggaagcgtttgaaagccctattgggaatggaagacccttttctgtataaaaaggggttggtagtaaaaacctttgttggggggggagatgtacccacaacatgggggggcaacaacacgacccaccacangnacacttctctcttggggttattattatagagagcgggtttataagggcgggccgcaccgttgtcttatnagggacgcctctggccccttctcaacagcggagagggaaatagggacccacagcccccttcccacaggagagccacattgcctctcacagaaaggtgtgcgggaaaaaggggaataaaagagagagagagagaaatacacgcacagcgcgcagaaaagccgcggggcgcccactgtctcggcctctttatatctctcgagagagaatgtttttccacagcctctgagatgagaaagagaatcttatagagagagggcctccacacacacacactatatgtctttacacactcggagagtctcccacaggagcccacacagtgagagactctcgtagagagagagtgtgtggtctctcttttctctgtggggccacagggagtcacacgggtgctctctgttctaaaggagggcacagagagttgggcccccacagagagttctctcacaggcgagcagaaaggacgaccctctgtgtgtgagaagagtttgagagaggtgtggagagcacgcctctgaaagagaaagagatagtgagaaacaccacccagagattctccgaatttctcccaaagccgggagaaaggagaatccaaaggaggtaccgtgggagggcgcccacagccaaggaacacacgatctccttttttccaaaaggcatatcccntcgaggacacacgaatcccctcttcaaggaggaaaaggtgggcttgttctgataaagctgagtggcactggagagccctcggccctcgagagtggttctgtgcccttcttcaagccacaagcccacaggttcttcctagaccccccgggagccagtgaactgtcctacctttttttctatcacccagaatgagctccacgatccctggaccaaatgcca

SEQ ID NO: 485476 - DNA, 1639 bp, Homo sapiens
  misc_feature (151)..(151): n is a, c, g, or t
  misc_feature (173)..(173): n is a, c, g, or t
  misc_feature (750)..(750): n is a, c, g, or t
  misc_feature (875)..(875): n is a, c, g, or t
  misc_feature (1160)..(1160): n is a, c, g, or t
  misc_feature (1299)..(1299): n is a, c, g, or t
  misc_feature (1311)..(1311): n is a, c, g, or t
gtatataatgttcgttcttgttggggtgttgctcgagaatgtcagaagattcacggttggttgtctctctcatagctagcatatagttttgaaatagcgctcttgggtgtttgatctttgtttgaaggccccgattgtgttagctcggacnacagataagtgctcctctaaangggcccggtaatgttcttgtgtgtcatacgtaggggccgctcctccgtcagggggtaatgtattgtgtgcacaccacctgggaagataaggcacaaagggagccccctttggggtgaataattatgtggtccacaagagactctttgttcccggcaacaagacttggtttctgttccaaagaagagtggcgcacaagagggtcgaccccaacaaaaacctctttatttttccaattttgggattgtgaaaaataatatgcgacataaatgtggccaccacacgcgttgtgaaggttattttttgtaaacccttgggagatcccacgccgaccccgactgccactctttatgggccccttatttatattgtacccttgggggggttttttcttctcttctcgttgcggttgtttatatgtgtgtaaaaagaaagccaacgaaaagatggttgttaatcttttggggaacaccacgaacatcgtcttctcgggcgcgtcttttgctgggtttgttctaatgtggagagaaccactttacccacgcggccccgcaagatttaagaatgttttttttgggncttttataatggggaacacaacatatatccgtggtgcgcgcgcgtgttgcacagtgttgtgtttggtgggccgtcgtgtttcccacgacgtggttttttaatgaggtgaaatgtgtgccacaatnttatgtggagaaaaaatgcgcacgtttgtatgacacgcacatgtggtagaaaagagtggagagtgggctataaagttgataggactctttttaataggggccgcctctgtggccgcacaatataggtgatagtgcacattgtcacaatgtctcggggtatatttgggattctgtgtgtgcacacacacacatatacgcacagaaatctctgagagaagaactctttgaataataatgtataactcgagatggagtttcacacacatagaaatcacacagagattntggccacatattaagagatgtatgaccaccatcgagatttggctctataaatggtttataaatatattgtaagactgtcgttatatttttttgtgacacacacacacacacgagatgtggtgtataagagataataatnttgagaagtgtntcacagtcgagatgttaacgcacgtctgtgtccacaactgtttcacatgagatttttatatgagggcaccacagagacttttcacacagagaaaatataccttgagaaaatataagattatcacttgccttttgtccacttaatcacgccaattaaacactggccttaacacaaagttgtttgtgttaattggaccacagatttgagaaacttatatgtcgggagacacatataccctaataagagaattaactaaccttatctgccccttgtagaataatgtattaatccattttaccatttaagaaaataatggtttttactggga

SEQ ID NO: 485477 - DNA, 189 bp, Homo sapiens
tcggcccggcttaggtgctcaggaagactctcttgcgggcgtttggggtaagggtgcagcgccactccacgtctgctgtggctcctgctccagcgtgcccagacggatcatgtacagcttccagctcaaagcggggccgacctcagtgagctccacgttgcggtggtctgtcttcttatacacaacgcg

SEQ ID NO: 485478 - DNA, 1005 bp, Homo sapiens
ggagaacgccagcatgaagctggagctcgacgcgctgctgctccaatgtacgaggcgctgcagaccttcgacccggacggtggcccgcagaccccgtgtgcgccaagcgcctggggcccccttgtcgcgcgtgacctggggcccctcgtcccagtgcaaggtgtgccgccaccagcgtcatcacaatagtaaagtccaagactggatgcccgatcgatagggacgcgcgtctgcaccagagcgggtcttctgcggctgcccacctagagcacagtggccgaattttggctgcccctgtccctctgattatccatatctacttcatcgtttccctcccatcgtcgtatcacaccaccctatcatcgtcattccccttccaaaagtcaccaacacgtggtacccccagggggtcgtcccgggcttgacgccccctatatgcatcctcagatcacttgatcgatcagatgatgatactacgctatgcttggggactcgggccacaaggataacagagacagcgatcgacccgactgcgacagatcagaacaccccaaaaccccccctatgccacgctcaacccacgcggagcccaaatcgcaactggcccgcaagagacacgatacccaacaacggactaggagcagacacagccggagcgaaacacagaggcccaaaagacgaaggcgcctcacgcacaggaccatacaaataatgcacacgtcggaaaatccaaccagggtaaacaatacccaagaggaaacactaaaccacaggcttgcatcccagtcagggaaaatcaaaagctggcaacagtgctaatacgaccaaacaatggactaaggacacgcatacaaaaacgcatagcaaacagatcgaaaatgaaatcaatatactagcgacctatcagacagagtacacactgaggaacacaggaacattacaagaaataactgtattaagcagcacagcagagagtaagaagagcacggttcaactacctataag

SEQ ID NO: 485479 - DNA, 1047 bp, Homo sapiens
gggaagtctgtggctctacctacaccagtcaggcagccctggtgcttgtgaagggtcttggagaataggacttctccccctcatgcaccactgctgacacagctggggtttctcacaaaggaactcggcatgagtgcacctgtagacagcctttctgggacccttcaggtgactgcattcccacaggacaagtgccctccaggctcaggcttgtatgagaggtagagtcacaattcatctctacattcttgcagctgaaaagacgtgtctgtctgaaggtctaacatccagtatctgtaaggaacttaaacaaatttacaaaaaacccctaacccaccccattaaaaagtaggcaaaggatataaacacacacttctcaaaagaagacatacatgctgccaacaatcatatgaataaaaactcaacatcactgatcatcagagaaatgcaaatcaaaaccacaatgagataccacttcacaccaatcagaatggctattactaaaaagtcaaaaataacagatgctagcgaggttgtggagaacaaaggatcgcttccacaattctcggtgggagtgtcaccttagttcaaccattgtgcacgacagtatggcaactttcttcaaagacctagagtcagaactaccatttcatccagcaagccccattactgggtatattacccaaaggactcttcactggtcctatcattacgacaccggcatgtcatctgtccactcgcagccctattgtccatataccacgaccgggcttcgccacaggtgccgctcagggttcgcctggcttcgaccgtggttactttccgcggctggatcttcacccggcttttcacgcctcgggctctggtccttcggcgcccttgcgcggctggggggccatccttgaccatctgcggcccggtccgcatgcgtgcccttggcgtgtcccctttagccggcatccgtgcgggcaccctggcgctctcgacatttctgtcgcaccgccccgctgtctcctgcgtgcattcaccccgcgcgtgtgtccctcg

SEQ ID NO: 485480 - DNA, 363 bp, Homo sapiens
gtattcggcttgctaagtgcagatcggcgaaaacgacatgtatatattatcatactgatgatcaggacttctcgtactacttgaacggttcccttgccaatgaggccttggagccatctgacgcggtgcttagcccaaatgcgacgcgacagtgtgtggacatttatggtggcccatttgtcgagaacaacccggtagctccttatcagtgtgccggatcgaaaaatcacgtcaaccaaatctggccagcaccgggcgctccgggataatccaagtctccctgagcgccatcggaaagatggcgctcaggaaatgctggtgcatgcaatcacgccgccgaatgaagataattacggggagggg

SEQ ID NO: 485481 - DNA, 428 bp, Homo sapiens
  misc_feature (9)..(9): n is a, c, g, or t
  misc_feature (327)..(327): n is a, c, g, or t
gttgtaaanctgacttttatatgaagtttggagaaatacagccctccttcagttgaagatcccatgtgtttgcctgaatctcaacgtttttccccatgcccagtctccctgatgttaatgcctaatcctaaaagatcaagtagctgaggcccaggtgtggtggttcacacctgtaatctcagcactttgggaatccgaggcaggtggatcacctgaggtcaggagtttgagtccagcctggccaacatggtgaaaccccatctctactaaaatacaaaacttagctaagcgtggtggtacgtgcctgtaatcccagctacttgggancctgaggcaggaaaatcacttgaatctgggaggtggaggttgcaatgagttgagatcgcactactgcactccagcctgggcaacagactgagactgcctct

SEQ ID NO: 485482 - DNA, 536 bp, Homo sapiens
  misc_feature (23)..(23): n is a, c, g, or t
  misc_feature (26)..(26): n is a, c, g, or t
cagaagctgactcttccctttgncgnccatcaccgaagcgggagcggccaaaatgaagtttaatccctttgtgacttccgaccgaagcaagaatcgcaaaaggcatttcaatgcaccttcccacattcgaaggaagattatgtcttcccctctttccaaagagctgagacagaagtacaacgtgcgatccatgcccatccgaaaggatgatgaagttcaggttgtacgtggacactataaaggtcagcaaattggcaaagtagtccaggtttacaggaagaaatatgttatctacattgaacgggtgcagcgggaaaaggctaatggcacaactgtccacgtaggcattcaccccagcaaggtggttatcactaggctaaaactggacaaagaccgcaaaaagatcctcgaacggaaagccaaatctcgccaagtaggaaaggaaaagggcaaatacaaggaagaaaccattgagaagatgcaggaataaagtaatcttatatacaagctttgattaaaacttgaaacaaaaaaaa

SEQ ID NO: 485483 - DNA, 340 bp, Homo sapiens
gtactatggggtgttcagtgtatgaggacgtccagcgagcaaatggtaatggaaccgtgtgtaggatttcctcacacagagtgcacatacgcggaggggcgggatgacgtctgaaaatggaaaactacagattaagaaggaaaaattccaatcccctccatctcatcaccccagttaaccattgttaacatttttatgtagaacttttctcgcacaatatttgtgaatttaacatgagaactgttaaaatttgtgaggtacattgcattctatgagatatgctggactgcgatattaactattaactgtctgctgctgttggttaggaactttgtcgatt

SEQ ID NO: 485484 - DNA, 1134 bp, Homo sapiens
tctaaataggtggtgcgggatcacaatccccagcagcaaggcggtaatgcgcgacagcgtaacggcagcgtcttcacgcgcacagacatcacttagcagatgcggcatcagatggtcgagcacctgacgtcctcgcggcccgatggatgcgcttatccagactctttgcggaaatcggcaatcagcgttagcaccatgttttgcgatcatcctcgctaagatgcgccagcactggcggtagtgtcaatcttcgctgacgaacgcaatcctgccaacagcatcacgccacagtgattccgacagcgacatcttcctgaggttatcactatacatcgtacgccaatcaattacattaaacacccggcgacacatagatcatatgtgcgagtcagcgccccggatcagattgcggccagacagcaaagtccatcgcaccacgccagccgcgcaccgattaagcatcatcagaaggaagcgtctgggatcagtccgacgaacaacgctatagcagacacggtaaaccagcacagccgcaggcaccagatacgcccaatcgccaacggtccagccatcgcaaccagacaacgcagatgcagctcggacaagggcgctgagcgtcggcagaacacgagcggcgatagcagcgacgcgcacgagtcccgacgcgactgagctggcacacctgaaacgcaccacacgaccaactcacagcgcacatggccgcctggcagcccgccgtcaggatgatagcccgggaccaaaccagggacgaccgcccgtcacacaggggcaatcaaccccgtaaccagtcagcggccgcgaccggaaaacagacgaacatcccagggacgcacggccacaccaacgggggacgcacgaaataagccgccaaacacgaagaaaagaccgccccggaaactacgcacaataaaaaggggactatgcacaacgcagatcagcacccaaacggccacgaaaccgcgacaagctcccaaagccgcaacccagaccacggggcacacgccaatggacacgcacaaccagcaacaaacacagggagggctacacccccacaacgcaagccgccgcacgcacgtcaccagcaccggacgaagcgacaacaccaaagaaccc

SEQ ID NO: 485485 - DNA, 819 bp, Homo sapiens
  misc_feature (23)..(23): n is a, c, g, or t
  misc_feature (26)..(26): n is a, c, g, or t
cagaagctgactcttccctttgncgnccatcaccgaagcgggagcggccaaaatgaagtttaatccctttgtgacttccgaccgaagcaagaatcgcaaaaggcatttcaatgcaccttcccacattcgaaggaagattatgtcttcccctctttccaaagagctgagacagaagtacaacgtgcgatccatgcccatccgaaaggatgatgaagttcaggttgtacgtggacactataaaggtcagcaaattggcaaagtagtccaggtttacaggaagaaatatgttatctacattgaacgggtgcagcgggaaaaggctaatggcacaactgtccacgtaggcattcaccccagcaaggtggttatcactaggctaaaactggacaaagaccgcaaaaagatcctcgaacggaaagccaaatctcgccaagtaggaaaggaaaagggcaaatacaaggaagaaaccattgagaagatgcaggaataaagtaatcttatatacaagctttgattaaaacttgaaacaaaaaaaaaggggaagaaacgacagcctcacttctgtatggactgctgatgtggcctgccatcctgttcagcgggcattgtctttggagcagcaggagactaggatgcctctcactcacatgccagttcctggctggccagctgctcagggctcaggctggggcctcccattgacatcctccccctacactccctctctgagcctccgtcgcccctcctgttgggtaagggtgttgagtgtgacttgtgctgaaaacctggttcatatataataaataatggtgatgaaaa

SEQ ID NO: 485486 - DNA, 894 bp, Homo sapiens
  misc_feature (23)..(23): n is a, c, g, or t
  misc_feature (26)..(26): n is a, c, g, or t
  misc_feature (558)..(558): n is a, c, g, or t
cagaagctgactcttccctttgncgnccatcaccgaagcgggagcggccaaaatgaagtttaatccctttgtgacttccgaccgaagcaagaatcgcaaaaggcatttcaatgcaccttcccacattcgaaggaagattatgtcttcccctctttccaaagagctgagacagaagtacaacgtgcgatccatgcccatccgaaaggatgatgaagttcaggttgtacgtggacactataaaggtcagcaaattggcaaagtagtccaggtttacaggaagaaatatgttatctacattgaacgggtgcagcgggaaaaggctaatggcacaactgtccacgtaggcattcaccccagcaaggtggttatcactaggctaaaactggacaaagaccgcaaaaagatcctcgaacggaaagccaaatctcgccaagtaggaaaggaaaagggcaaatacaaggaagaaaccattgagaagatgcaggaataaagtaatcttatatacaagctttgattaaaacttgaaacaaaaaaaaaaaaaaaaaaaaaaaaaaaaanaaaaacacaaaaaaaaaaaaaacaaacacaaaaacaaacagggggggcacacaaaagataccaccaggggagacaatgacaggacaacagaatataaaaaagggtgccccataatgagcaacactaaagacgaaacaagcagcgcgcaaataaaacaggagaagggagaaaaagccagcaggaaactggagaagaacacaaacaaggagaggacaaacaaggagaaaacacacaagagtacaaacgcaggagaaaacagcccagagaaagggggaaacagggaaattaagcgcaaaaaagacccacgagagttcgcaaatccagggaggcaaaaca

SEQ ID NO: 485487 - DNA, 561 bp, Homo sapiens
  misc_feature (47)..(47): n is a, c, g, or t
  misc_feature (292)..(292): n is a, c, g, or t
  misc_feature (310)..(310): n is a, c, g, or t
  misc_feature (379)..(379): n is a, c, g, or t
  misc_feature (440)..(440): n is a, c, g, or t
  misc_feature (474)..(474): n is a, c, g, or t
  misc_feature (530)..(530): n is a, c, g, or t
aaagccactccaccctactaccagacaaccttagtcttttccatttncccaaataaagtataggcgatagaaatggaaacctggcgcaatagatatagtaccgcaagggaaagatgagaaattataaccaagcatagtatagcatggactagcctcttttccttctgcataatgaattaactagaaataacttcgcaaggagaggcaaggctaagacccccgaaaccagacgagctacctaagaacagctaagagagcacacccgactatgttgcaaagtagtgggaagatntataggtagaggcgacanaccaacccgagcctggtgatagctgggttgtccaagatagaatcttagctcaactcaaaattaggccanagaaccctctaaatcccctcggtaaatttaacttgttaggccaaagaggacaggtctgtgnacactaggaaaaacctcggcggagagagttaaantatctacaccccatggaggcctaaaggaggcaccactcaggagggtccaagtcaanacccctcccctaaaaacccaccttttattta

SEQ ID NO: 485488 - DNA, 608 bp, Homo sapiens
agcgggatcgcttcgggtgctcgactcctgttgcgcatgctcagcgcgctgcccggctggggacccgcgcacctgcagcgcccgctgctcggccctgcatcctgcctgggcatcctgcgcccggccatgacggcgcactcattcgccctcccggtcatcatcttcaccacgttctggggcctcgtcggcatcgccgggccctggttcgtgccgaagggacccaaccgcggagtgatcatcaccatgctggtcgccaccgccgtctgctgttacctcttctggctcatcgccatcctggcgcagctgaaccccctgttcgggccccagctgaagaatgagaccatctggtacgtgcgcttcctgtgggagtgacccgccgcccccgacccaggtgcccagctctcggaatgactgtggctccactgtccctgacaaccccttcgtccggaccctcccattgacatcctccccctacactccctctctgagcctccgtcgcccctcctgttgggtaagggtgttgagtgtgacttgtgctgaaaacctggttcatatataataaataatggtgatgaaaacaaacaacaaaaaacctcctcacagcgcgt

SEQ ID NO: 485489 - DNA, 719 bp, Homo sapiens
tgtaggtttctatattacgtattcccgtgcatatggcgcatacaatgcaacggtcatgcggcttcactgtccgtgagcagactctcgtagatgtcctactggatccagactactctatccccattgtagtctggtgtgttggctggtatagcttctaataggactttctttactgcatgatatgtgacagtgttttcataatgaataattacagttgacatgaagggagttggctactagttgtgaacaaggagaaacatgaatgcctatatggtgacactgggtgaataatcttatttttacagagtgtcgttaccaatgtgtggtcgattcggaagtttgagggaaaattgagtatctgcccgtggataattttacaataagatgaatgcaatgatagcaattctccaataagtcacaagttcaggctattccttatagtgggcccatattgccctggtttaacctcatgttgcacgcgtttcgaaacttggtccacgagtcgtatcagtggtctgtaagacactgtatatccattctgtgacacaatacattgttggtagattacagtcgccaagggagcatgaccaaaaaagacgttgacgacagcgatgcgtttatctcattgtacacggtaatgagtgcacaatttgtgccttcaatcgacctcttttcttcttgggactatctgacaattccacgacttctttgggattcac

SEQ ID NO: 485490 - DNA, 893 bp, Homo sapiens
agcgggatcgcttcgggtgctcgactcctgttgcgcatgctcagcgcgctgcccggctggggacccgcgcacctgcagcgcccgctgctcggccctgcatcctgcctgggcatcctgcgcccggccatgacggcgcactcattcgccctcccggtcatcatcttcaccacgttctggggcctcgtcggcatcgccgggccctggttcgtgccgaagggacccaaccgcggagtgatcatcaccatgctggtcgccaccgccgtctgctgttacctcttctggctcatcgccatcctggcgcagctgaaccccctgttcgggccccagctgaagaatgagaccatctggtacgtgcgcttcctgtgggagtgacccgccgcccccgacccaggtactgtgctgggcgacgggtgtgggtggggaagaggcggaacagacacggctttcccacacccagggcaggcctcggtcatattactcccggatgcggccaaacccagcaccatggcacgggcctgcgttccccacgggtcgaccgacacaggcccagcggcagccaccccacacatccgcccaacgcccatgcgcgtccgcgccatgccagcacctggcgccagcaccccgaacccaaccacgcgtaaacacgtcccagcacgggcataccaggcgcatcatactcaatcccccactgaacaccgaccccaggtgcacgccagcgcagcacccgacacacaccaacctccccgtttccctgccatgcaacctggtcaccgggcccgcccagggcaagcacaaccgggcaaccaaagctcccccacacacccccgcgcacccccacatcacatcacagcagacacacccccaggcacagaacccccaacctgcgcccaaaa

SEQ ID NO: 485491 - DNA, 162 bp, Homo sapiens
gactctgagctgagtgcaccccagtggtctgctgtgatggaataaagcagattccaagtgccaagaactgccatcctcttcgagcacatcagtctcatcatccactatgactggtgccctgcctgggcctatcagggcctgatgcctggggcccggaaatga

SEQ ID NO: 485492 - DNA, 474 bp, Homo sapiens
acgagcaatggggaaaggattccctatttaataaatggtgctgggagaactggctagccatgtgcagaaaattgaaactggaccccttccttacaccttatacaaaaattaactcaagatggattaaagacttaaatgtagaacccaaaacgataaaaaccctagaagaaaatctaggcaatatcattaaggacatagacatgggcaaaaatttcatgatgaaaacatcaaaagcaatggcaacaaaagcagaaactgacaaatgggcttctgcacagcaaaagaaactatcgtcagagtgaacagacaacctacagaatgggagacagtttttgcaatctatccatctgacaaaagtctaatatccagaatctacaaggaatttaaacaaatacaaggaagaaaccattgagaagatgcaggaataaagtaatcttatatacaagctttgattaaaacttgaaacaaaaaaaa

SEQ ID NO: 485493 - DNA, 1750 bp, Homo sapiens
agcgggatcgcttcgggtgctcgactcctgttgcgcatgctcagcgcgctgcccggctggggacccgcgcacctgcagcgcccgctgctcggccctgcatcctgcctgggcatcctgcgcccggccatgacggcgcactcattcgccctcccggtcatcatcttcaccacgttctggggcctcgtcggcatcgccgggccctggttcgtgccgaagggacccaaccgcggagtgatcatcaccatgctggtcgccaccgccgtctgctgttacctcttctggctcatcgccatcctggcgcagctgaaccccctgttcgggccccagctgaagaatgagaccatctggtacgtgcgcttcctgtgggagtgacccgccgcccccgacccaggtgcccagctctcggaatgactgtggctccactgtccctgacaaccccttcgtccggaccctcccccacacaactatgtctggtcaccagctccctcctgctggcacccagagacccggacccgcagggcctgcctggttcctggaagtcttcccagtcttcccagccagcccgggccctggggagccctgggcacagcagcggccgaggggatgtcctgctccaatacccgcactgctctggagtttgccctctttcccaaggagatgctgctggggagctggtatgggtggggtctttccctttacagacggggcagatgccaggactcagcccatcctgaggaggacacgtgtcctcatggagagggtgctccggcccaggcgggggagtcggtgcccagtcagcagctctgccaccatcctgctgggaactgggggggcctctattgggttataggcaaggccttttctctggcatggaattgttaattttctgacacgtctagatgtgaaatttctgaaaatgttgaagcagagaaacattcacacacaaaaagcaacatagtcatgtgggtccagatggcctcagtcctagatgttggcaccctttgctgtgtctcctcagagtatcctgttccgcctcctgccacctggacctccctcagtggatgtcttccctcccccgaccccagcctgtcagtccgagcacagtgcaggtttggctctgacttgggcctttggctgcagtgggggtggatttcagagcctctcatggcagcatctaagtgaccagagctgggatgagagaggggaaggggcaatgtgagtggcgctatgggacgggccagccctgctcctgagccagccccgccctctgccccctggccctgggctctgtgctagggatggtgaagaatgggggcgtgccagcctggcaggagtgggaagcaacacgcaggggtcccggacctctccagccttgccctcacgcttatccgagctcccagtgtggttagcacagagctcacccaccttgcctggctcccagctggggcctgtcctcactggtgctccaggggaagaaacgacagcctcacttctgtatggactgctgatgtggcctgccatcctgttcagcgggcattgtctttggagcagcaggagactaggatgcctctcactcacatgccagttcctggctggccagctgctcagggctcaggctggggcctcccattgacatcctccccctacactccctctctgagcctccgtcgcccctcctgttgggtaagggtgttgagtgtgacttgtgctgaaaacctggttcatatataataaataatggtgatgaaaa

SEQ ID NO: 485494 - DNA, 2612 bp, Homo sapiens
agcgggatcgcttcgggtgctcgactcctgttgcgcatgctcagcgcgctgcccggctggggacccgcgcacctgcagcgcccgctgctcggccctgcatcctgcctgggcatcctgcgcccggccatgacggcgcactcattcgccctcccggtcatcatcttcaccacgttctggggcctcgtcggcatcgccgggccctggttcgtgccgaagggacccaaccgcggagtgatcatcaccatgctggtcgccaccgccgtctgctgttacctcttctggctcatcgccatcctggcgcagctgaaccccctgttcgggccccagctgaagaatgagaccatctggtacgtgcgcttcctgtgggagtgacccgccgcccccgacccaggtgcccagctctcggaatgactgtggctccactgtccctgacaaccccttcgtccggaccctcccccacacaactatgtctggtcaccagctccctcctgctggcacccagagacccggacccgcagggcctgcctggttcctggaagtcttcccagtcttcccagccagcccgggccctggggagccctgggcacagcagcggccgaggggatgtcctgctccaatacccgcactgctctggagtttgccctctttcccaaggagatgctgctggggagctggtatgggtggggtctttccctttacagacggggcagatgccaggactcagcccatcctgaggaggacacgtgtcctcatggagagggtgctccggcccaggcgggggagtcggtgcccagtcagcagctctgccaccatcctgctgggaactgggggggcctctattgggttataggcaaggccttttctctggcatggaattgttaattttctgacacgtctagatgtgaaatttctgaaaatgttgaagcagagaaacattcacacacaaaaagcaacatagtcatgtgggtccagatggcctcagtcctagatgttggcaccctttgctgtgtctcctcagagtatcctgttccgcctcctgccacctggacctccctcagtggatgtcttccctcccccgaccccagcctgtcagtccgagcacagtgcaggtttggctctgacttgggcctttggctgcagtgggggtggatttcagagcctctcatggcagcatctaagtgaccagagctgggatgagagaggggaaggggcaatgtgagtggcgctatgggacgggccagccctgctcctgagccagccccgccctctgccccctggccctgggctctgtgctagggatggtgaagaatgggggcgtgccagcctggcaggagtgggaagcaacacgcaggggtcccggacctctccagccttgccctcacgcttatccgagctcccagtgtggttagcacagagctcacccaccttgcctggctcccagctggggcctgtcctcactggtgctccaggggaagaaacgacagcctcacttctgtatggactgctgatgtggcctgccatcctgttcagcgggcattgtctttggagcagcaggagactaggatgcctctcactcacatgccagttcctggctggccagctgctcagggctcaggctggggcctcccattgacatcctccccctacactccctctctgagcctccgtcgcccctcctgttgggtaagggtgttgagtgtgacttgtgctgaaaacctggttcatatataataaataatggtgatgaaaaaaaaaaaaaaaaaaaaaaaaaaaaaaaacaaaaaaaaagagaggggcgcgcgcgcgccccaaaaaaccccccgcggggggcccaccccccgcccaccccaccttcgggcccaagggggccccacacaaagagggcgagcggcaatatataataacgacacgaagcgcgacggcgggcgcgagcgagacataacaacaacacgggcaggaagaggggaaacaaggcggcacacatgggagaaactctgggggagcaggcaacccaacctccgcgagggaggaggaacaaatatggtggggagaaaacaaaccaacaaggagcagatattataaacagcctccaaagaggaaataatataacaaattttaaagaggtgtttattgttgttggtttatcctttttgcgtgatctaatagcgacggacagagacaaggaaccatacgggcgccacacagggcgggcctctcagtaaagccgggaaacaaactacagtctataacacgagggggggactcgccacacacaaacaccccccgcgccccacccgaccgaaacgacacacagcacacaacaccaagccgagaagcacaacaaggcacagccgacagcacggcggccgaaggaagagagagacgagcagacgaggagcatggggaggaaggaggaacggagcaggcgctgaggccgagacagcgacggcagccgcacgcgagacgggcggaaaggcaagacaagaagcacgacacagctaaccaaagaaagaaaaacagcggacgacaacaaccacagggagagaagcagcaccccaccaacaaacagaccagacagaagaacagaagaaagacacaaaaacgcaacagac

SEQ ID NO: 485495 - DNA, 1637 bp, Homo sapiens
agcgggatcgcttcgggtgctcgactcctgttgcgcatgctcagcgcgctgcccggctggggacccgcgcacctgcagcgcccgctgctcggccctgcatcctgcctgggcatcctgcgcccggccatgacggcgcactcattcgccctcccggtcatcatcttcaccacgttctggggcctcgtcggcatcgccgggccctggttcgtgccgaagggacccaaccgcggagtgatcatcaccatgctggtcgccaccgccgtctgctgttacctcttgtgcccagctctcggaatgactgtggctccactgtccctgacaaccccttcgtccggaccctcccccacacaactatgtctggtcaccagctccctcctgctggcacccagagacccggacccgcagggcctgcctggttcctggaagtcttcccagtcttcccagccagcccgggccctggggagccctgggcacagcagcggccgaggggatgtcctgctccaatacccgcactgctctggagtttgccctctttcccaaggagatgctgctggggagctggtatgggtggggtctttccctttacagacggggcagatgccaggactcagcccatcctgaggaggacacgtgtcctcatggagagggtgctccggcccaggcgggggagtcggtgcccagtcagcagctctgccaccatcctgctgggaactgggggggcctctattgggttataggcaaggccttttctctggcatggaattgttaattttctgacacgtctagatgtgaaatttctgaaaatgttgaagcagagaaacattcacacacaaaaagcaacatagtcatgtgggtccagatggcctcagtcctagatgttggcaccctttgctgtgtctcctcagagtatcctgttccgcctcctgccacctggacctccctcagtggatgtcttccctcccccgaccccagcctgtcagtccgagcacagtgcaggtttggctctgacttgggcctttggctgcagtgggggtggatttcagagcctctcatggcagcatctaagtgaccagagctgggatgagagaggggaaggggcaatgtgagtggcgctatgggacgggccagccctgctcctgagccagccccgccctctgccccctggccctgggctctgtgctagggatggtgaagaatgggggcgtgccagcctggcaggagtgggaagcaacacgcaggggtcccggacctctccagccttgccctcacgcttatccgagctcccagtgtggttagcacagagctcacccaccttgcctggctcccagctggggcctgtcctcactggtgctccaggggaagaaacgacagcctcacttctgtatggactgctgatgtggcctgccatcctgttcagcgggcattgtctttggagcagcaggagactaggatgcctctcactcacatgccagttcctggctggccagctgctcagggctcaggctggggcctcccattgacatcctccccctacactccctctctgagcctccgtcgcccctcctgttgggtaagggtgttgagtgtgacttgtgctgaaaacctggttcatatataataaataatggtgatgaaaa

SEQ ID NO: 485496 - DNA, 1589 bp, Homo sapiens
  misc_feature (212)..(212): n is a, c, g, or t
ggacgcgtgggcaagatcaaggcctcgtttggattagagttagcttatgccaaaggccgtttggacatagtgatcatcaccatgctggtcgccaccgccgtctgctgttacctcttctggctcatcgccatcctggcgcagctgaaccccctgttcgggccccagctgaagaatgagaccatctggtacgtgcgcttcctgtggtgagtganccgcgcgccccgtaccaggtgcccagctctcggaatgactgtggctccactgtccctgacaaccccttcgtccggaccctcccccacacaactatgtctggtcaccagctccctcctgctggcacccagagacccggacccgcagggcctgcctggttcctggaagtcttcccagtcttcccagccagcccgggccctggggagccctgggcacagcagcggccgaggggatgtcctgctccaatacccgcactgctctggagtttgccctctttcccaaggagatgctgctggggagctggtatgggtggggtctttccctttacagacggggcagatgccaggactcagcccatcctgaggaggacacgtgtcctcatggagagggtgctccggcccaggcgggggagtcggtgcccagtcagcagctctgccaccatcctgctgggaactgggggggcctctattgggttataggcaaggccttttctctggcatggaattgttaattttctgacacgtctagatgtgaaatttctgaaaatgttgaagcagagaaacattcacacacaaaaagcaacatagtcatgtgggtccagatggcctcagtcctagatgttggcaccctttgctgtgtctcctcagagtatcctgttccgcctcctgccacctggacctccctcagtggatgtcttccctcccccgaccccagcctgtcagtccgagcacagtgcaggtttggctctgacttgggcctttggctgcagtgggggtggatttcagagcctctcatggcagcatctaagtgaccagagctgggatgagagaggggaaggggcaatgtgagtggcgctatgggacgggccagccctgctcctgagccagccccgccctctgccccctggccctgggctctgtgctagggatggtgaagaatgggggcgtgccagcctggcaggagtgggaagcaacacgcaggggtcccggacctctccagccttgccctcacgcttatccgagctcccagtgtggttagcacagagctcacccaccttgcctggctcccagctggggcctgtcctcactggtgctccaggggaagaaacgacagcctcacttctgtatggactgctgatgtggcctgccatcctgttcagcgggcattgtctttggagcagcaggagactaggatgcctctcactcacatgccagttcctggctggccagctgctcagggctcaggctggggcctcccattgacatcctccccctacactccctctctgagcctccgtcgcccctcctgttgggtaagggtgttgagtgtgacttgtgctgaaaacctggttcatatataataaataatggtgatgaaaa

SEQ ID NO: 485497 - DNA, 903 bp, Homo sapiens
  misc_feature (1)..(1): n is a, c, g, or t
nctgtttctttcttgtgggatgtgtgtgttgttgtctggttcgcatgccggtcccgggtctggggaagcgcggtccccctctcgcgggtgtaccccccccgcgttagttttgtgagccagcccacatattggccggttatctctgcccctctcgtaggacccgtggctcccccgaagttcttttttgtccggagaaccccgcgccgacaaacttctggtttgcggcacccagtattccgagaggtgcgcagttggcgcgcgtccccgggccaaaatatcgcgccgcggttttctgccccccttcagcccccggggatcctcttctggtagaggcgcccggggagaatcatctcccgcccccccaagaaggccggcccattggccccccactcccgggaagatctccgccgggtaaacgcgccgcccaccctgcttcggaggtgttccacagaattgggcgaatccctccccacagagcggggccgcccgcggcctcctccccgctgcgcgtaacaattctgcgtaggaggaacgcccacccggtgggaagaagaagcgcacccactcccggtatttcttcgagcctcacaaagaggggcacacagccggggcgcctctccaggccacccccagtggcccccgaacatgttggagaaaccaacagggggcagtccaacaaccctggtgaaccccatcagacagaaggttgggacaaagaaagatcattcctcccgacgagcccgccttacgtcagctctcccaaccccgggccccccataatcgcccccctcacaaaaggcgcgagataccggcgagacgcggtggcaatgcgggcaacccccctaaagacgtgtgacacaccaccccagagccctttcaaataaaaaaaccttaaacaaaaca

SEQ ID NO: 485498 - DNA, 384 bp, Homo sapiens
cccgataacatgtgcgcgtatcggttggtctgcatgagttcttcatgacagaagctcctcacccaggaagtcctcacgagccagatgtgctcggaagaccaggtattcacctcatagtatctggtccagattggagccttcatccggccactagtgctagcactgccgtgacgccgttctccgcgaaggggtgtctagtcatgacgatcacgcacgcagccgctctcccacacctatctgtccaaaagtccagccacggtggcagcgcagcggtctctgggtggcgatgtacgcggggttcctcgggttgtgatccatgatacgctagcgttgatgtagtctgagtggctgtggctgttctccgccttcagcaggacccgggag

SEQ ID NO: 485499 - DNA, 325 bp, Homo sapiens
  misc_feature (53)..(54): n is a, c, g, or t
  misc_feature (122)..(122): n is a, c, g, or t
aaagggtgggggctgcggcgaggggacctgcggcgaggcggacgtcggagganngcccaggccggggctgcccggcactcctcccccgcccttcacacaaaggggcccagggaccccgcttnctgtcgcgcagcccagtcgctcagacctgagggctccgttccagttaccgctgcccgggcgggtttctgggtacggctcccgcgggggtcgtcggcccccgtccgcacccgaccggacgccggggaggctctgtcacgccaagccatggccacacgctggctcctctgtctctacgctgcccacagcctgctctcgccgcggg

SEQ ID NO: 485500 - DNA, 872 bp, Homo sapiens
ggcgagagaggctagggctctggaggaggcaaatccgggcaggaatgagatccatcagaagcggcagcatgacagtgggcaaaagcagcatgatgctgcggcatatggattactggatgaggtgcatcctgcaagatggacggatctacattggcaacttcaaaggcttgtagaacaagacgacatgaattgtagatacctctgtgactgtgatgagtgtcagacagagatcaagtccaaacgcaactcccaaaccagagctacgaaagggaagagaagcgcagtcctcggtctggtgcgtgctgcgcaggggagaatctggtctcaatgacagtagtagggacctcctcccaaagatactggtattgctcgagtttccagttgctggagactgccgggggacccagggatctggcagggctgctggcagaggaatcccagtctggggttcccatgccccaggctcctgcaggatcttgctgggccagtccgtggggttgtgcgggccatcccaacaggtgatgagcccacaaggaagaggtactgttgcagccgctgcagctgctgctcactagtcgagtattgctcggggcttctgaccccagtacctcacctggctcgtggggggttcctcccccactctgatgggccgaggagcaacccctccaggcatgatgggtccacctcctgttctgagaacttctatgggtccgccattgggggttccctctgtcagaggacgctagggggggtggccctccggcaatggaggggttctttcccttgtgccgttaggggctcacttccctggatttttccttggccgtgtgctttgggcacctgttcgtgctgttcccgtgtgtctcgctgtc

SEQ ID NO: 485501 - DNA, 449 bp, Homo sapiens
agcggcttcccccacccccttccccggctcgggccgccccacgccgcgcaggagagcaaagaaaccccgggcggggcagtggcggccgggctctccgaacgcgcgacccgggagggggcggggcctggcgggagggggcggggggcgcgatggccgcgccaggcaactgaccggggctaaacccgggatcccccctaaaactctgcgaaaagagattactgaccagaggcctcggatgcaagtggtgcaagtcgcagagcgagctcttgaagctatcgaccgggtcttaggatagcatcagacaggtgatgagagagaaagagtacgttgatggaaagagaccagcgagtacaggactcggagcggcagagggaaaataccacattcgacgcggaaacagcagaattaaaggtaggcaactctgacagcgaagctcagaacagccgcac

SEQ ID NO: 485502 - DNA, 497 bp, Homo sapiens
gaacgggtgatgcggtgcattcatgtgctctttgtgcctgtgtactttgtttttgttttgctttttaatgtgtattttgttttataggacctgtatgatttatgctttaaagaggttctgttttgatgtgtttccagtatttgtttgaagatttagagcccctttcagcagtttttgtggtggtggtttggtaatggctgattctctcagcatttgtcagaaaacgactgtatctttccttcatatatgatacttagtttcactggatacaaaattattggctgataattgttttgcttgaggaggcgaaagatagggccccaatccattctagcttgtagggtttctgctgagaaatctgctgtagatctgataggttttcctttataggtaaaccttgtgcttctgtctcacaactgttacggattctttctacctctggaccagcctgttagcccaaatgtccgatgtcaatgacatcgaagggccccgtctcg

SEQ ID NO: 485503 - DNA, 615 bp, Homo sapiens
  misc_feature (7)..(7): n is a, c, g, or t
acaaganagggatatggtaaacacgtggatgacagaggcatccggcagcataactcgaggcataccctgagaaagagttgtagggataaggaggatgatgtgtacagagtctaagctagggaaacagggaatggccaacccagagagagtcacatcatatctgtaaaggacacttattgtgggataaatggaggttgctaagtggagagtgctaagtagatatgttatatagagtacacactctttacaaagagtagcggtcgtgtacagcccagtgacagtggagcacatgtgtatatgagtcctaaataaaccctatgtcacattcactggctctgggtctcatcgtggacaaggcgacatccgtgttggaatcaatagggctcgagcatgacacatgtgcaggattgtttaaaatatatcaaatatatctcaatagaggtgttgaaatttttagagggcgagacgtgtcctggaatggggaaaaacttaatgtgacaaaaatgtaggatagagtggagctctctctctctctctctctctctctctctctctctctctctctctctctctctctctctctctctctctctctctctctctctctctctctct

SEQ ID NO: 485504 - DNA, 631 bp, Homo sapiens
agtaaacacctctgcgttgcagctctccctgtgattactctgagatcagaatccgtcagtatgtcatagctgtgtaccactcccagtctttgtcttccccaaatcttacatctagtgagcatgtgtgctgacttggagaagaggaatatattcattcctcagaatgttcagtccttcttctggcagtgcaacagtccaaagcatattcaggcatgtggctgtctgtcaggcacatgaattgttctgtttgcacctcaacatgggcaacagtctctacatctctccctgatatctgtggagcgctgtgtggaacgcctgctaagcaagcaggcctcatggcaactctggctgctcgtacatgctgtcttttcccaacaattctgtcattgccagcagcagcaagaacaacactttgactgcagatcaacattggagccatctgcaaatctcagctggaccatggcacctacaatgatctaatttcgtccaactaggacagacatttgctcttcaacaatttgaacctttggattcagcttgtagcagtagaagaagctccatttcatcacatgaaagtttccagcatcttggactcgtggtatccatcgtatcattagtagtcagcaagagg

SEQ ID NO: 485505 - DNA, 335 bp, Homo sapiens
atcatcgcttctggtagagtatgtcgcctcgacatataactcgtgcctctattctgccacagaaccggttgtgctctaacatgtgttctataggtagcttgtatggttcgctgggtctaagagttgtctctccttgggatgaagttcctagttaattccttacactcacaggtataagagttagcccatgatagaatgcgcttgatgacaatggttcatctttcacgtgcgtgtctatatgtcttgacacgggctccagtgtcatatagcctagcctatatcagcgtaaacgctgtggctacgattctatacaaggaagctctagtgcatttccg

SEQ ID NO: 485506 - DNA, 174 bp, Homo sapiens
gtgctgaggtactctacaggatccttgagccgaatgtatattatcgccagcggtataacgtttatccgcgcgaattgaagaagtctttatgaacatcccgctgtaaaagaagcggtgtgatccgggtaccggacgcttatcgggggtgaacggtgaaggcggtcattgtgctta

SEQ ID NO: 485507 - DNA, 120 bp, Homo sapiens
acatcgaagtaacgaatgaactgacaaaacattatcatgcaggaggaggagacagcaagagatatagatgtcacagactggaggaggacatgcgactactcagcaagctgcatcacagtg

SEQ ID NO: 485508 - DNA, 408 bp, Homo sapiens
ataccatatggtataggggattgctacccatatttggatggattggtaaatagtattagaggtaatttctgaagatattttagtgtaaagatattgatgtaaaaaaaaattcagcaacctatctatatatggctgtaacaaagaagagtgatttggactactgctacaaagtaggttaaatgatctctacattacttcatgcattaacattctctaaattacttcatatattaacttacatgtaatatatttgtagtatattctaatttaaatatccaacggaaagttggaaatgaatatagtttgtgtttaactgagttgagaaagcatagtatggtaattaaattctttttttaaccaaacattattataaataaaattgctgaattccaagtatttatacttaaa

SEQ ID NO: 485509 - DNA, 320 bp, Homo sapiens
  misc_feature (212)..(212): n is a, c, g, or t
  misc_feature (237)..(238): n is a, c, g, or t
  misc_feature (262)..(262): n is a, c, g, or t
acctcctgttcctcctcaactgtgctcccactagatgggcttgcacaccacacttaccatactctttccctctaccatctctgacctttgtaaatttcagtccctctgaacaacttcagcaaattaattgaacccgaagagggagtcacgggaaccccaacttgaagccagttggtcagaagttctggaggtctggacttacaactggtgtnggggaaacgcccccccccaccccgnnatttggtcataactcttctgcgtngattgttgtgatgtgagagtaaaggaaaaacgctgttacagagttatgataccgcgaa

SEQ ID NO: 485510 - DNA, 132 bp, Homo sapiens
  misc_feature (16)..(16): n is a, c, g, or t
ggcagccaggaagtantctaggtaacgacacatctacaacgttatcgtcacagcccatgcatttgtaataatcttctgcatacgtaatacccatacataatcgcgaggcttggggcaactgactagcttccc

SEQ ID NO: 485511 - DNA, 450 bp, Homo sapiens
tgggaaaaaagcaaaaatttgactttaatttaacttcaacaatgaccctgtgtacccccccaggaaaaaggtaggtggagggagagtggctcaggcttcctgtgtgtccctttaaccagcagagccccagaaacctataaaagcgccttcaccttagccctctataagttggagttgggaaggacgcagggaaatgggaaactcagaaggctcaaaaagttaaagaaggcgtgattggcacagccgtgggagaacaaggcctgtggaaaacagaggagaaggcgcttagaggggcataatgagagaagtccccctataagcgacaggatcatctcggcacgagtagaaccattgccccctgtgagcctcgtgcgacaagagagtaggacgtctcctttgagaagggcagttcaatattgggttgccccccttgcagagaggaaatctcag

SEQ ID NO: 485512 - DNA, 273 bp, Homo sapiens
agcatcctttgcggtgccttcccccttgccatgcggtcacatccccacgtgtcgcggcttcactgagctccatgctgagagcctgagtgcttctgagctcactaagtgcctcaagggcaaggccgacaagcccacctgggtcagtctggctagtgcagtaggtgcagtgagcctgggacataaattagaacgtaaaattgaaaaaggataatacacatatgctttaaggaactattcagatgctttaatgggagtgagacacgggtaacagaa

SEQ ID NO: 485513 - DNA, 118 bp, Homo sapiens
  misc_feature (2)..(2): n is a, c, g, or t
  misc_feature (112)..(112): n is a, c, g, or t
cnactccccccctcttctcctaacggacacgacggtggacgactcactcccctcccctcttctccttacggacacacgacggggggtaccgacgctcgacacttcgtaactnactggt

SEQ ID NO: 485514 - DNA, 396 bp, Homo sapiens
  misc_feature (124)..(124): n is a, c, g, or t
  misc_feature (144)..(144): n is a, c, g, or t
  misc_feature (152)..(152): n is a, c, g, or t
  misc_feature (232)..(232): n is a, c, g, or t
  misc_feature (239)..(239): n is a, c, g, or t
  misc_feature (255)..(255): n is a, c, g, or t
  misc_feature (308)..(308): n is a, c, g, or t
  misc_feature (311)..(311): n is a, c, g, or t
  misc_feature (334)..(334): n is a, c, g, or t
  misc_feature (338)..(338): n is a, c, g, or t
  misc_feature (366)..(366): n is a, c, g, or t
  misc_feature (381)..(381): n is a, c, g, or t
  misc_feature (391)..(391): n is a, c, g, or t
cacgttctgcggcaccctcgctaagaactccaccacctcgtcggtgtgcaggactgttccggtcgggttgttgggggtacacaggaagataagtcgggtgcggtcggtgatcgcggcggacatngcgtcgaggtcgtgatgcanatccttcntcaacggcgccgggacaggggtggccccggcgacctgggtcaggattgggtaggcctcgaaggaccgccacggaaagatnatctttnaccagcgccggcgaangcatgcatgagctggctggctaccttcgcgatccaacccccaccgtcacctgnctnacatttacgccgaagtgaccggngatnctggagcgtacttcctttggcactcatngacgggtaacaggtntgaacccttngcaag

SEQ ID NO: 485515 - DNA, 562 bp, Homo sapiens
  misc_feature (531)..(531): n is a, c, g, or t
  misc_feature (537)..(537): n is a, c, g, or t
tcactccgttacagcaatagcagctcaagaacggttacagaattttctgggatttaaataccctctagaggtttcccattggttacttggtgtacaccctatgtaaatgaagcagaggtccatgatcagtttgattggttgtgggaggggaccaatcagaggctgaagcaaagttacaaagttacaccaccctatacaaacatctgactggttgtgtaaaacgaccaatcagaggctgaagttacaaagttatactcctaggcaaatgaagacttggcctaagaccagtctgattggttgtgggaggggatcaattagcgatactttcaatttttcacctgccatgcagaaaaggggctgggggtggggaggttgcaaagggagtagcctctggtccttttgttacttgagcgtggaaagttggggttttccttttgacttagttctaggaagtcagcctgaattgggcttaggaagccaattccatgcctccagaacctatctcctggttccctccccttcagagatgtncctgtnctcctcaccagagactgtgaatatc

SEQ ID NO: 485516 - DNA, 467 bp, Homo sapiens
  misc_feature (277)..(277): n is a, c, g, or t
  misc_feature (440)..(440): n is a, c, g, or t
agacatcaggacatttctttctttctttctttttttgagatggagtttctctcttgttgcccaggctggagtgcaacggcccaatctcagctcactgcaacctccgcctcccgggttcaagcaattctcctgcctcagcctcctgagtagctgggattacaggcatgtgccaccacacccacctaatttttgtctttttagtagagatggggtttcgccatgttggtcaggctggtcttaaactccagacctcaggtgatccacctgcctccgcctnccaaagtgctgggattacaggcgtgagccattgtgtcctgccaaaatcaggacgtttcgtacaaggatctgagttctgagcctgtcttgagaaaagggaagactgcagacaacaccttgcagcagtggtggccgcgggtggaggggctgccttcccagggtgnttgctggccaagcatttcacccttacc

SEQ ID NO: 485517 - DNA, 178 bp, Homo sapiens
tgactcacttctgactttagttacattaagggggaacatccaaagggtgtttcagttttcattcctttgtttaccaccggctcttgacaattgggcagggaaattttcgggggcttcgaggactgtgcccaggagcagattgcggctcagagcccaggtccacctgctgtgagaaccc

SEQ ID NO: 485518 - DNA, 252 bp, Homo sapiens
cctagactatcccggcgtatcacattatcacagaggagagagtgatgagatgtgaggattctgcctgccatatgctgggtttcaagatgaaggaaggggggcctgaaccaaggggatgcctctagaagctggaaaaggtaaggaaacagattctcacctagacttccagaaagctctgctgttgccttgattttagcctagtgagacccatttcagacttccgacctccagtacgtgaagataatgtgatag

SEQ ID NO: 485519 - DNA, 790 bp, Homo sapiens
  misc_feature (459)..(459): n is a, c, g, or t
cctagatgaaacaggatgtcactatgtggccttgcatggactggcatctgttggttcaggagatcttcctgcctcaaccttccaagtatgcctccgactatgagcccttgctagtacacctagcggttaatgaagcgcgagagaagttcatttgatggacgcgtcctatactaccagcagaatgcatatgatctaggatggcaactgaagatggcgggatccacagtctgcactcctaccacactatgctactctggctctaactatgaggaagcaggggcatttttttttttcttggtgactagattgataagatgacaccgttcgtgggtcctgatactctaacttatacgggactgcaggaaccgatcgctactatctgctgactgtctcattcaattaacagagactggaggtcatcctgtagagcactgacggattttatctgtctgaacctgngcagaccacgtccaaggcattccatatgtgtggatcttcgcgtgtgagcatatcatccgggcacatcaaactaattgctttttttgttctaaaactatttttttaatcatcagatttatgctagctatatgggtattagcgtatctgggccttatggctctaaaagggggtctactgggccggtacccttgagggagggtaattgaagaactgactaactgatggcgtgcctaagacggtcagcttgtggaaagcgaatcaaatcactaaaaggcgtgctttcggttttgcccatgaggccggggtttactctggattaactggggagcga

SEQ ID NO: 485520 - DNA, 316 bp, Homo sapiens
ggcgtcgccagatcgatcctggaagacggcagccgccgtgactggtcagatcctccagcagacctacagtcaagtttgatataaactcgcacaaccatgacgcactgctcaatgaactacgggctgttctactgcttcacgaaggacatggacaaggtctagacattccatacgcctcgtgcaggtgccgctctgtggagggcagctgtggcttctaggtgcccgagtagcatcctgtgacccctccccagtgcctctcctggccctgaaggtgccactccagtgcccaccagccttgtcctaataaaattaagtt

SEQ ID NO: 485521 - DNA, 261 bp, Homo sapiens
tgcgattcaccgcgtgattctgtcagcagacttaccatgctcttcttccttaagtttcacttaaatctgtgtctgatacgtaactcttttcttaacatctattacagggtttctacgggtactggggattgattcattcttcttaatctttttcttgtcctatgtcttcttctgcgatgagtccaatgcctctccctgatggtcactctttacttcatcgggctctttcatatctcagggttcattttgagtgtctactga

SEQ ID NO: 485522 - DNA, 362 bp, Homo sapiens
taacgatcacccaaagatctttgagcatcaccccccatcttaaagatgaggctcagattagttacatatttcacctaaagttccagaacggtggattggtacccgatgataataaactatctactctttcttttggtattactctgtgcctgttagtgatctctaaataacactggtattgtcaatacaagttgaggtctctctgcgtcaataggcagagattattaattctaggtcacgattctggcagtcctagcgtccaaatgtatttttcacccccatcacggattgtgaaaacagcctttgtgattcctcccctctcaccagaaatgaacacataccggtgataaaattgaaggtac

SEQ ID NO: 485523 - DNA, 170 bp, Homo sapiens
caaacaaatggaaaaattttttttgctaatgggttgaaagaatcaacattggctgggcatggtggctcacatctataatcccagcagtttgggaggccgaggcaggcacatcacttgaggtcaggagttcgagaccagcctggccaacatgacgaaaccccgtcactaca

SEQ ID NO: 485524 - DNA, 1004 bp, Homo sapiens
gcgaggagccagcggagcaccgcgggctggggcgcagccacccgccgctcctcgagtcccctcgccccttatcccttcgtgccccccggcagcctccagcgtcggtccccaggcagcatggtgaggtctgctcccggaccctcgccaccatgtacgtgagctacctcctggacaaggacgtgagcatgtaccctagctccgtgcgccactctggcgtgctcaacctggcgccgaagaacttcgtcagccccccgcagtacccggactacggacggttaccacgtggcgtgcgcagctgcagcggcagcgaacttggacagcgcgcagtccccggggccatcctggccggcagcgtatggcgccccactccgggaggactggaatggctacgcgcccggaggcgccgagagcgcagacaacgccgtggctcacggcctcaacggtggctccccggacgcagacatgggctacagcagacccgcagactaccatccgcagcaacaaccgcatcaccacccgcgacagccggacgacgagccttcactgcgcttactgggctggtgaaaacgctcaagcccggacctcctgggaccgcgacacacgatgacgacgagcagatgtctaccgggggacagcggcggaaactgtgcgagtggatgcggaagccggcgcagcagtccctcggacaagcaagtgaaaaccaggacgacaggacaaaatatcgagtggagtacacaggaccaccagacggatggaagctggagaaggagttacactacaggacgataaaatcaccacatccgggagcgaagaagcccggaggtaagccggacaacgacagaggggactaatctgagaaggcaggggtacaacacctgggttcagaaaccggaagaagcacaaggagaagaaacacacacacggcaagacagtggaagaagaaaaagagagacaacacaagagccagcccgcgacacaacgcacccagcacagcagagcccgaa

SEQ ID NO: 485525 - DNA, 633 bp, Homo sapiens
  misc_feature (2)..(2): n is a, c, g, or t
  misc_feature (65)..(65): n is a, c, g, or t
  misc_feature (69)..(69): n is a, c, g, or t
  misc_feature (97)..(97): n is a, c, g, or t
  misc_feature (100)..(100): n is a, c, g, or t
  misc_feature (280)..(280): n is a, c, g, or t
  misc_feature (283)..(283): n is a, c, g, or t
  misc_feature (298)..(298): n is a, c, g, or t
  misc_feature (331)..(331): n is a, c, g, or t
  misc_feature (337)..(337): n is a, c, g, or t
  misc_feature (353)..(354): n is a, c, g, or t
  misc_feature (442)..(443): n is a, c, g, or t
  misc_feature (446)..(447): n is a, c, g, or t
  misc_feature (449)..(450): n is a, c, g, or t
  misc_feature (453)..(453): n is a, c, g, or t
  misc_feature (492)..(492): n is a, c, g, or t
  misc_feature (539)..(539): n is a, c, g, or t
  misc_feature (543)..(543): n is a, c, g, or t
  misc_feature (567)..(567): n is a, c, g, or t
  misc_feature (632)..(632): n is a, c, g, or t
anagaagctgcctcgcggagctggttggccaccagcgtggtctcctgcaggcgggtgatggtgancgcngagaacaggtccctcaagttcaaggtancgngggcgctcaggttacgtccggaatcctctcctacggcaaactggtgctccaagcgcacagcaccatttcggggccccagctggccagcgtgagccggtgcaccgagggcggcaggtccctgcgcaccctgaaaactgcgtgcgcggaggagccccgaaattgtaggcggcgccgccaccnggngccagcaccacctgnggggccaggacctcctgctccgcctggtcacgngtgtcntgcggctgcagcctgnnctgtttccagcagcaccaggtggcgccctcgcacccacgcccccgacccgttctccattagttaaaacaatactccgcttccatcgtnnttnngnngcnttcggtgcaccatgagctccagcgagccatctctcaggntgctgccccctgggagcggtcagtcagcacagtcagctgcatgtgtncatncgtgatgtaaatccgggtgttgantgtgatagtagtttcctgccacgggctccgtctggttcagtttccaggtgggtcgataatccgcnt

SEQ ID NO: 485526 - DNA, 195 bp, Homo sapiens
cctcaccattgctatgcaaagtgattcttgtgtacataaggatttaaataatgcacctatttaagacatgtgacaaatgcgggtctgggacccgctctattatgaagtcttgacgtgggtagaagagagaaaaagaatgaaagtggagaagaagaacataggattggggggggggagggggcgggagggggtggg

SEQ ID NO: 485527 - DNA, 1063 bp, Homo sapiens
catatcttgcgggtgttttctgtttggtcccgcggggccgtggtttcccagtgttcaacccacgggtagaccatcgtagttgcgccctttaggcccctacttttaggggggcaccccttttgtggacataaacgtttgtgttcccatatatatatccccgggcctgggtttccccggttctccgggatttttcccccggggagatgtcctgtggtaccccatccgggttccgggcttgtggcgctcttcacagtggccccgtgggacgtggagtgcccaggcggagttttggatgcccccccctatgtgacgacgggctcctccaagcgagccccgtccgaacgccctggcaatagtgtcccccttggcccacgtgcctatcgtcccacggctcccagctggtcacccacagcccctatcccggccacccacttgagtggaggtcacgagttttttggggaccactcacggacccgaaacgttgagggtacacatgtttccgcagtatcacgcacgcactggaggattcacccttggaagaatcctggagggtggagccctgcgggtccgtcaccactcacgccccaacaagccccctgagcacacttctaaggtgtgtttagccccctcttctaccacaagagctggagacccgtgtcactgttgtgccccacgaggtggcccccgcactgtgtctacctcttttgtgggcacaccacacccccacgctttgggcgtccccacaatcacttccgagggtccctcgagggagaccacgagcacgtggctcgtttggtggactcgtgtccctcgagcttcacgtggccaccgcacgagccccctggcctttgtggaaacctgcggcacgcctcggcctcgccacgcccactcacgctttctcgggctttcggggcacgaggaccgagtgaccctgggaggccctcggggctgggcccctgagctccacaaaaagtgcgttcttgaccccgatgaggccccgatggaggctgttcattccctgccgtgtcggccttgtaaataaagcctgaccccttcgctgata

SEQ ID NO: 485528 - DNA, 346 bp, Homo sapiens
  misc_feature (7)..(7): n is a, c, g, or t
  misc_feature (48)..(48): n is a, c, g, or t
  misc_feature (60)..(60): n is a, c, g, or t
  misc_feature (117)..(117): n is a, c, g, or t
  misc_feature (136)..(136): n is a, c, g, or t
  misc_feature (160)..(160): n is a, c, g, or t
  misc_feature (204)..(204): n is a, c, g, or t
  misc_feature (233)..(233): n is a, c, g, or t
  misc_feature (291)..(291): n is a, c, g, or t
  misc_feature (309)..(309): n is a, c, g, or t
aaccctnagaagccagttggggcagtccaagaagcccaagaaggcggntggcggcgcaantccgaagaagagcgctaagaaaacaccgaagaaagcgaagaaagccgccgcggccantgtaaccaagaaagtgctnagagcccaaagaaggccaaggttncgaagcccaagaaagctgccaaaagtgctgctaaggctgtgaanccaaggccgctaagcccaaggttgtcaancctaaagaaagcggcgcccaaggaagaaattagcgaacgcctacttctaaaacccaanaatgtcttttcagagccnccactgatctcaataaaagagctggttaatttcttta

SEQ ID NO: 485529 - DNA, 236 bp, Homo sapiens
aacataatcagaggagtgtgtggctttgtgcagctattggcgcaccactgcatgtcagcctgggtgacagagtgagatcatgtttcaaaaaggaagaaaaattatacacttgtaggttctctctaattacttccctgacccacacttttcatttgtccaagtgctggagctgtgtcctcaagatttttacaacttctgggaaggacgtccattgcccttgatgactgtgatgcacg

SEQ ID NO: 485530 - DNA, 598 bp, Homo sapiens
tgtgtggtgttatgggatataaactgttagaacgccttcttaaacattcacggagagcgttcttacaagagacaatctaagttaagggacatcgggtccttaatccatttctcaaggaacgagagatttttcctaagtcgaattctttgagacctttgaaagcgttcactaagcacattgcacgtaaaaaaggtttgaaccttgactcgactaaacatccctcggattttaggagcatgctaaaagggaggttctatctcaatagcattttgaagtgatttgtaagtaaaactgtgatccctaaatctaggattggggtcacaatctacctacgtatctttcctagcggggatatcgtaaaattaaggttatacccaacgcaaataaacatccctagcaaagggacatccatttatgtaagacatatcctaaaattcatgaagcatacaaggcattagtaacctaaactacataccttgggatttgtaacatgctacacataaggatcctatcatcatgtgactagtttccaaagttctagcatgcaaaagcaatcaagtaacaagataattaattaatcaaagattacattcaatta

SEQ ID NO: 485531 - DNA, 197 bp, Homo sapiens
aaagcatgctaagatacacagtcaaaatgagagttcgcagctgcaaacaccagactatgcaaaggtgaagcagccaggaagtctggaacgatggctttgtcctaacaggtcactcatcaaacacagataggaatgcatgacagtaacaggtaactggtactcaataaactcccactaccataaggaacttactgcta

SEQ ID NO: 485532 - DNA, 1324 bp, Homo sapiens
gttgtacagtgagatcgactgtgtactaatggccaagagtctggcggaaaagctgtatctatttcatgtacccatgtgctgtccatgcctcgatgacctactgactgacattcctgcacctctcagccaatgatcaatgcccaatgcatgcagaatggtagatgcttgatgatggccatctgacacccttgaaccccaactatttgcctgcatgcaaatgggtgatgcatgatttgctgcttgaactgttgtgactgtgtgtgcctgctgcctgactgatgaccatgcactgtattcctctgaatgcttgattgtgacaatgcatgacgctatcttgctcttacccatgaccaccatgtaacacataccctgttaattgcctgcttgcagctactacatgtgcaatggtagatgctaccaccgtgacgaccttatacaattggacatcactgacacgcactgctgtgcaccaatgctatcataccgtaacccatgtggataacgtgcttgactgccatatgcgacctgtgtgatgacgtgtgatgtggctgtgaccaaactgatgtgacatgtggtgacatactatcagcatgtgattgcatgggcgtgggaaatggacctgacttgctctacactgcatggactacacctgtgtgcttgatggattctccactgtgcacttgtggaggctccacaggacgcccaatgtggcccctgccccatgcctgcccttgttgattgcactgtccccgtaactcggaaggtttcactatgcaagaaaacgcaaaggccaacatgccaatggaatgtagaaggagcccccaattggagagaatcccaaaccctatggtcaaagttttagacctaaaattggggcgcccttggaagtcggtggaaccacatggtatcatgacgatacccttatgcaagcgccaattggaaaggctagaatccaaggataacacccctttgggcactagagttggaccccccccgagattggcgtcaaaacacgactggcggcggcatttggcgaatggcaaaacccaaccatcgggaacgggcatccccaggcttccagatggtttccatgaccccacaaacggttggaaagagtaaactcctatgaattcggacttcggccttggaattgggcccacaccgccaatggaccaacgtgggatctgcgcagcggagatgataaaggatgcacaacaggacattgttcgtgagctcccgccaaagacgaaagcggtgccgctctgtgcctgcgaaatgtacgtcaccccaaaggcataagctgcgcaaacatgcctttgggcca

SEQ ID NO: 485533 - DNA, 1293 bp, Homo sapiens
gaacgagtacctgggtccactatgccctgtccaatgctcaacccacactaagggcacccatcgacctagaagcatagggacatgcgtgtgactgacaacgtgcgagccaactcctatcgtggtggcacggaatcactggcatgagacagctgtcttcgtaggctgactactacgctcaagcgcggcactctctcatacacacctacccgttacctctgctagcgctgacgttgaactctccatcgtgcctgctcgagccgaagcccattgtcgagcggcggcagccaatcttgccgtgttgcgcctgcctcagcgcatcaacgcccctaagccgccctgcccgccttacgcgccacgcccttccctcccctttcctctccgcgctctacctgcctgcgatccgtatcgccgccgctcccctgcctcgctgccacgccctaccgcggtgccgcgatcaccttccgacctgtgccccgttccacgtagcgcgctgcactcgtggccttcgctcgcgccatcccctcctcgcgccccccgtcgcctccctcactcccccacgctccggcggcgccctcacatccccccccgaacgggccctccttctcccatttgccccaacgcgcccccttgcgccccttacccccctcctgcgcgttcgccctccgctccctccgccttccacccttcgccacttgcaccgcgagcctccttctctctttcacccgcctgcctcctaacgccaggcgcacctgctgccgccacccaacccccacgcgccgtctctctttccaccgcccctccctcctccgccgcgcctatctccgcccccgcccgcctgcgcctcccgcaccccctccacccgcccccgcccctcccccccccgccccgtcccctccggtcctacccccccccctcccccgccgcgcctccctgccgagccccctcctccccccccgcaccaccccccaccccccccctccctcacgccccccctccccccccccccccccccctcgcacccccgcccccccctctccaaaaccttttccacccccccaccccccccttcgcccccttcccacccactcctcaccactccaccccccccgcggacccccctcccctcctcttctccgccgcctggccctccccctcccccccctccccccgtccccccccccccccctcgcctcccccactcccccccccccccctcccgccccccctctccccaccgccctattctcccctcccccccccctctctctccccccgcccctccctggcaccccc

SEQ ID NO: 485534 - DNA, 138 bp, Homo sapiens
aagtgtgtccagattagaggcaatttaatgatagggaattggggcaatcaagaagcattatatacacagattacaataaaggttattggacaaattaaggcctccgaattcataagtcaccaaggctaaagaaccaat

SEQ ID NO: 485535 - DNA, 833 bp, Homo sapiens
ttctcccacctgtagtcgactcagagcctcctagctcatggcctccttaggatgcgagagcccgaaggcagtgcacaccgcagggaccgagtgatcctggggcggctcctcgcgtgcttgccccgagctccggccctcgagtgccgggacccctaggtctggcgcgaggaggaggaatgtcgaggtaggaggtaggatgcgtggtcggatgatccatctcgtgtgtgcatggttggatattcagtgattacgtggggcattgcctacgtatggatactagtagactccaactaatcccacttcattgccagtatgccccagacactaagagagcctcgaagcttctgctagaagatgttctgggatgagatcatatctccaccgagttgcgtggttagtataacggagtgcctaaactaggatgagaatatgactcgatttcttgggaaatgctttgcgcctcgcgcagtgagcactaggagagctctataagacctgaattcataagttgtgttgcctagtgtggtggattttggtgctggagataagcaagacaacgccgtcctttgctggaagtctactccttcattcgcagacgccatgactgccactgagaaaatcctcttcctctcttccattattcccgtttgactgctcctcacagttcgagcacttggagggctgctgaagttcctggggtcgcaggaagactcggggttgacctggaagatatattgtcagggtccccacctgggttaagaatttgtggggccctctggtgactggttcgaccttacgggtctccgtttaggtggtcccttggtctggccggc

SEQ ID NO: 485536 - DNA, 314 bp, Homo sapiens
cgcctccacctgtaaaacgtgaatgccgagatgctcagtatgtgggcgatgtgacttcttttgagcagattgcactacccgtcttgaggaatgccgactgcagcagtgtcccagtgcaaagagcgtgcgtcatcgatgagattggtaagatggagctcttcagtcagcttttcattcaagctgttcgtcagacgctgtctaccccagggactataatccttggcacaatcccaggtcctaaagtaaagccacttgctcttgtagaagaaatcagaaacagaaaggatgtgaaggtgtttaatgtcaccaaggag

SEQ ID NO: 485537 - DNA, 246 bp, Homo sapiens
gagacagagtctcgctccgtcgcccaggctggagtgcagtggcgcgatctcggctcactgcaggctccgccccccggggttcacgctgagggtgcctttttctgactttcatcaaagccctgagtgctgacagcagccctggggagaagtgaccgaaagattcccttggggcttgggaatcggggcctgagaggtgaaacctggacctgttgggttctcacaccttggcccttctgtcgtcttctc

SEQ ID NO: 485538 - DNA, 569 bp, Homo sapiens
  misc_feature (377)..(377): n is a, c, g, or t
  misc_feature (461)..(462): n is a, c, g, or t
actggcactgtacggagagagatgcttcaaattgttccacggataagctgcgaacactgttcttggcatgcgcagtgttcaaaatgaagaaggcaagtgtgaggtgacgtaagtgagtaagcttgatggagaggcatccattaacaatcgcaaagggaaacttatcttcttttatgaatggagcgtcaaactaaactggacaggtacttctaagtcaggagtacagtacaaaggacatgtggagatccccaatttgtctgatgaaaacagcgtggatgaagtggagattagtgtgagccttgccaaagatgagcctgacacaaatctcgtggccttaatgaaggaagaaggggtgaaacttctaagagaagcaatgngaatttacatcagcaccctcaaaacagagttcacccagggcatgatcttacctacaatgaatggagagtcagtagacccagtgnngcagccagcactgaaaactgaggagcgcaaggctaaagcctgctcttcaaaaaacccagccagacctgttggagtcaaaatccccacttgtaagatcactcttaagg

SEQ ID NO: 485539 - DNA, 380 bp, Homo sapiens
tagggctcctggcccaataatcatgactataagaatgactccaaaaatcgtaatgatcgcgttcgcgactacagtaatatgcgtgtgtgtcctcggttttcaggccgatcatgccaaataggcgatgcttttggaatcatctcttgaaatggtgaagctgcctttcacagacgcggcgtattctattggtccaccgtaagtttttgcttctaatgagacctacccactccagccccttccctggaggcttgcggaaccaattcatagcataatcaccaaaggtgaatccagacgctttacaggagagtctcagggaccgccctggctgtaccaagcctcccccagactccaccagccgcacctcacatgggcactcaata

SEQ ID NO: 485540 - DNA, 5027 bp, Homo sapiens
gcggccgcacctcgctctccctcgggctgctggttgctgactttggcgccatggtcaataacccacacctgagtgatgtccagtttcagacggacagcggggaggtgctttacgcccacaagttcgtgctttatgcccgatgcccgctcctcatccagtatgtgaacaatgaaggcttctccgctgtagaggacggggttctgacccagcgtgtcctgctgggtgacgtgagcaccgaggccgcccgcacgttcctgcactatctctacactgcggacactggccttcctcctggccttagctctgagctgagctccctggcccacaggtttggcgtgagtgagctcgttcacctgtgcgaacaggtgcctattgccactgactcagagggcaaaccatgggaggagaaggaagcagagaattgcgaaagcagggccgagaatttccaggaactcttgaggtcaatgtgggcagatgaagaggaggaagcggagactttgttgaaatccaaggaccacgaagaagatcaagaaaacgtgaatgaagcagaaatggaagaaatttatgaatttgcagctactcagcgaaagcttctccaggaagaaagggcagcgggtgccggcgaggacgctgactggctggagggtggcagtccggtttctgggcaactcctagcaggtgtccaggtgcagaaacagtgggacaaggtggaggagatggagccgttggagccaggaagagatgaggccgccaccacctgggagaagatgggacagtgcgctctcccgccaccccagggccagcactcaggggcacggggagcagaggcccctgagcaggaggcgccagaggagatgcttggccattccagctgctccagcccttccagggactgccaggcagagagaaaagaaggctctcttccgcactcagatgatgccggggattacgaacagctcttctcatcaactcagggagagatctcagagccgtcccaaataacaagtgagcccgaggaacaaagtggcgctgtcagggaaagggggctggaggtttctcatcgcctggctccctggcaggcatctccaccgcacccgtgccgcttcctattggggcctccccagggcgggagtccccgcgggtctcatcacacaagtgggtcgtccctgtcaacaccccggtcccgtggcggaacttcccaggtgggctccccaaccttgctgtctccagctgtgccatcaaagcagaaaagggacaggagcatcctcacgctgtctaaagagccagggcaccagaaaggcaaagagcgtcggtccgtgctggagtgcagaaataagggggtcctgatgttcccagaaaaatctctgtctattgacctaacccagtcaaatcctgaccattcgagctccagatctcagaaatcttcatccaaactgaacgaagaagatgaggtcatcctcttactggactcggatgaggagctggagctagaacaaaccaaaatgaagtccatttctagtgatcctctggaagaaaagaaagctctagaaattagccctaggtcctgtgagctgttttccatcattgatgttgatgcagatcaggaaccttcccagagcccaccaagaagcgaagctgtgctgcagcaggaggatgagggggtgctgccggagaatcggggctctttgggcaggagaggggctccctggctgttctgtgaccgtgagagcagccccagcgaggccagcaccacagacacctcgtggctggtgcccgccaccccgctggccagcagaagccgtgactgttcttcccagacccaaatcagcagcctcaggagcgggctggccgtgcaggcggtgactcagcacacgcccagggcctcagtaggaaacagggaagggaacgaagtcgcacagaagttttctgtcatcaggccccagacaccaccgccccagacaccgtcctcatgcctcactcccgtctctccaggaacttctgacggcagaaggcaaggccacagaagcccttcccgtccccaccccgggggccacccgcactcctctccgctggctccacatcccatctcaggggaccgcgcccacttcagcaggcggttcctgaaacactcgccgcctgggccaagcttcctgaaccagaccccagcgggtgaagtggtggaagtcggagacagtgacgatgagcaggaggtggcctcccatcaggccaacagaagccccccactggacagtgaccccccaattccaattgacgactgctgctggcacatggagcccctctcgccaattcccattgaccactggaacctggagcggaccggccccctgagcaccagcagccccagccgcaggatgaacgaggccgccgacagccgtgactgtcgctccccgggactcctggacaccacccccatccgaggaagctgcactacccagaggaaattgcaagagaagtcctcgggcgcgggctccctggggaacagcaggccgagctttctgaattcggctctgtgggacgtttgggacggggaagagcagaggcctccagagacccctcctccggcccagatgccaagcgctggtggagctcagaagcccgaagggttagagacacccaaaggtgctaatcggaagaagaacttgccccccaaagtgcccataacgccgatgccacagtattccattatggagacgccggtgctgaagaaggaactggataggtttggagtccgccctctgcctaaacgccagatggttctgaagctgaaggagatattccagtacactcaccagaccctggactcagactccgaggacgagagccagtcctcacagccgctgttgcaggcgcctcactgccagaccctcgcctcccagacctacaagccttcaagggcaggggtccatgcccagcaggaggccaccacaggacctggggcccataggcccaagggacctgctaagaccaagggcccccgacatcaaaggaagcatcatgaaagcatcacacccccaagcaggtcgcccaccaaggaggcacctccaggcctcaatgatgacgcccagatcccagcctctcaagaatccgtggccacctctgtggatggcagtgacagctccttgagctcacagagttcttcctcctgtgagtttggagcggcatttgagtctgcaggtgaagaggagggcgagggggaggtcagtgcctcgcaggcagccgtgcaggcggcggacacagacgaggcgctgaggtgctacatccgctccaagccggccctgtaccagaaggtgctgctgtaccagccctttgagctgcgggagctgcaggcagagctgaggcagaacggcctccgtgtgtcctcgcgcaggctgttggacttcctggacacccactgtatcaccttcaccactgccgccacccgcagggagaagctccagggcaggaggcggcagcctcggggcaagaagaaggtggagcggaactgatggggccgtcccgaccccaccccaacctgccatcagcagcccccacccccgccatttgcagggaggacctgggacacccagcgtgggtcaggcctccacaggcatttctgggtctggggaccacatcagctctgcgctgtgatgatgaccacagcccaatccagggcttcctcctctgggctctgctttctagggtggcatttggagcatgtcacccactggatttacagactccagccccttcctctgtccgtgctcacagtgggtgtcctcgcgcaggctgttggacttcctggacacccactgtatcaccttcaccactgccgccacccgcagggagaagctccagggcaggaggcggcagcctcggggcaagaagaaggtggagcggaactgatggggccgtcccgaccccaccccaacctgccatcagcagcccccacccccgccatttgcagggaggacctgggacacccagcgtgggtcaggcctccacaggcatttctgggtctggggaccacatcagctctgcgctgtgatgatgaccacagcccaatccagggcttcctcctctgggctctgctttctagggtggcatttggagcatgtcacccactggatttacagactccagccccttcctctgtccgtgctcacagtgtgtctccctttttggttttctttttttttttctttttgagacagtcgtgctgtgtcacctaggctggagtgcagtggcacaatctcggctcactgcaacctccgcctcccgggttcaagcaattctcctgcctcagcctcccagatagctgggactacaggcacacgctgccacgcccagctgattttttatattttagtagaaacggggtttcaccatgttgctcaggctggtcacaaactccagagctcaggcaatccgcctgctgcggcctcccaaagtgctgggatcacaggcgccagccactgcgcccggcccagtgtgtctcccttaacccaagagggccctcagctgtcccagggggcagtgggccatcaccagctggccagggcatggcctattctgccacatttgccaccctctgagcccaccagtcctgggcacagctgccctacacgtctgtcctgagatggacgtcaggtccagcctgccccggcagcccgggcccgtcctcctcagcactcaggccaaccccagccaccgccagcctgagaccaggtgtcctgaggctccctgcactgccacagcccagatgcagttctcctgacccagccgtgctacccggacacttgtcattgttaccagcagtctccaaactggacagtgcacaagggcccagaacaactctgatgccaccacaaaacaaacatgttcactagcggattccattctttgggttgaagctgcctccagcctcaggagcagtgtggaggaagatgagggccaggaaagaaggaaaccttggtttctccatccttgtgaatgtcctcgtctgtttcaaatacagtgcagtcagtttt

SEQ ID NO: 485541 - DNA, 163 bp, Homo sapiens
gtgaatttgtcatatgtggcccatattgggcaaattcgccggttagcggtaggctgcgtctctctaaggagaggcggggtggctggaattaagggtgttatgctcatgtttgcttgttgcaggtgcgagatagtagtagggtcgtggtgctggagtttaagtt

SEQ ID NO: 485542 - DNA, 104 bp, Homo sapiens
tggattctggccacgcaaagtactccttgtaccataataatagcggaaagctactatactgaaaaagtactagtgtgccctgctgcgaccctatcagaagatgc

SEQ ID NO: 485543 - DNA, 165 bp, Homo sapiens
aaaactaatagtatctatactacttacagcaagtgcagacacaaactaccaataaagcctatatagtaacccaaagtgtaagaataatatctaagtgtgatagttatactcacactttgatgctattctcacatttgtaatgctagaaacttgtatatccacatc

SEQ ID NO: 485544 - DNA, 482 bp, Homo sapiens
cccggccatgttcagttcatcgagttttgtaatacaagaatttgaatatgacttttataaaaatagtgtaaaaatggtagtacagtttgaacattcctaatccataaacttgaaatccaaaatgctgcataatacaaaacttttttgagcccaacatgatgctacaagtacataattctacacccaactttatgtgatgaatcaaagtcagaatgcaggtgtacaacagtttctccaagagaaaaaagacctgcctagccctccttcagctgccatatatcttttcctcacacagccagatgcacctacgcaagcatgcccacaaaggaaatacaatgccatgtgtatgtgtaagaaatgatgggttatacgtagcatataaattcagagacgggaatgatagtgatgtcaaacaaccacagactgtccacatgagtggctaagatagtgacacctttgctttaggatggtacagtgtatac

SEQ ID NO: 485545 - DNA, 652 bp, Homo sapiens
aagtatatcacttctcaccaagtgggtagagtcagttggctgtttgtcccttgttttttatttattccataattatgtttgtgctttttgttttgtaaacagtaatggaacgtacatttttattttgtttagaagacaactttgattcaatctttcaagaactgttccattcttggtttcttcttagggggataaaaagttaccagttaatttgttttgagatatttaagcattctttgagttatagaattgtgatgcagggatttgtgaatgagacatttcacatgtgaaaaggtgacttcactaagttaccctgcttgagcagaggtaaaagtgtggtatagtgtacactaaagatgtaaggtaatgcttaacctccagttgtggcaggtgcctctttagagtgttcccgctttctattaaaggtctctcaaaatttgttgcagtatatatttagtatagtatatgagtgtaagtgttatagaaagtatatgttataaatatacagtattttgttccagggggtgatcttgaataggtcctggtatttgtgtatatggagagtgtgaaaggaaagaaaggtactttctccctctagaaaatataaatcacccaaaagtcctgtttaaggtaagaaaaagtattgaaacga

SEQ ID NO: 485546 - DNA, 311 bp, Homo sapiens
  misc_feature (24)..(24): n is a, c, g, or t
  misc_feature (57)..(57): n is a, c, g, or t
  misc_feature (169)..(169): n is a, c, g, or t
  misc_feature (181)..(181): n is a, c, g, or t
  misc_feature (210)..(210): n is a, c, g, or t
  misc_feature (238)..(238): n is a, c, g, or t
  misc_feature (260)..(260): n is a, c, g, or t
  misc_feature (289)..(289): n is a, c, g, or t
ggatcacggggtcaggcgttcganaccagcttggccaacatagtgaaatgccatctntactaaagttacaaaaaattaaccgggcgtggtggtgggcgcctgtaatcccagctattcgggaggctgaggcaagagaatcgcttgaacctgggaggcagaggttgcagtnagccgagaccgnaccactgcacttcagcccgggtgacagtncgagactctgtctcaaaacaaaaaacanaaatcaaaaaaaccctagatgncgggtttgataggtgcagcaaaaccaccnttagcacatgttttacctatgt

SEQ ID NO: 485547 - DNA, 891 bp, Homo sapiens
gagagagtggggacgtccggtttcggagcgggagtgttcgtgtgccagcagactaaacagacgagtgaaatatgggtgatgtgagaaaggcaataagataaatatgaagatgtgcccattgccacaaacgttgaaaaggtgaggcaaggctagagagattgggactcaaagtctccatggtctctttgggcggaagagcaggtcaaggcccgatggatagtcttacataggcggcaataagaacaaaaggtagtgatctgtgggagaggatacactgaaggagtagttaggtagaagtcccaagaagtaatgcctggatcaagaatgatctttgtcggattaaagaagaaggaatgaaagggagactatattagcgttagctcaaaaaagctactactgagtaagtaatgtggcccgctgcttactttattccgaaacagaactgtctcatgacgttatgcctgtgtagccagtcctttaaatagatctcataccaccagaattcaggatcagtgaggtgccctgaccagaatattgtgttgggcagccggattacaattaggaagtggcttgtgttcctggcatgtgtcggcggagaacatacgtaacgtcgatcagtacatggatcacggtatacccttttaagattgactaaacttggtagtagtgttcacctgtcgcaccggggggggccgcttacactacgggatgcgtcactgcgccacaaccgggcgcggctttacagcgggcgcggcccgtgttaacacacagaaccggggggtatccttgccaagaagggggaaaaaggcaccctttgggaaacaatacgcaaggggtacgcagggcgtacccccactgacctcactctctgctggttagaactataaccca

SEQ ID NO: 485548 - DNA, 188 bp, Homo sapiens
tttacttctctttttactatacgtccggcttacatttaataaaggtccatagatgcggaatggggagtgacaggaatgaaaggtctcggtctccaccaggccaattgggagtgcccccataaaaagcttatgtcaaattttctcaaaccaacagatttcaaacacccagtaagatgaggtggggggat

SEQ ID NO: 485549 - DNA, 356 bp, Homo sapiens
  misc_feature (22)..(22): n is a, c, g, or t
agacttgggattctaaagccanatttgaccttgacctaggcaagatgtgacaataaaatgaagaagaaggttttgtctttaacttcatactttggtcctaaagaacatgaggtcctgggacaggcagagtcatactgaccatctgtgaacacctggcacttaattcaattccttgagcatagcagatgccccaaattgccatcttattgaataattgaacttcaaaagtttgttggccatcattcgatcaaacataagactttccaaaaacagcattttgaaagacaatactcatttgaacacttgcctttatctttatttgaaataaataacctcattacttagtcacttcagct

SEQ ID NO: 485550 - DNA, 234 bp, Homo sapiens
  misc_feature (60)..(60): n is a, c, g, or t
aggatccgtgaaatgatccagagagtccatatgtcatgaacctgaggcgcaagtacgccntctctattgctacgattatcggcatcattgtcgtcatcgcaagtgtgctcggaggggtacgtcctctcccacggtaaaatctgcgcactgattcagccttttcgaagtgctgattatcggcggtgccgcggtacggggccattttttgagggcgaaacccatggttatatgtac

SEQ ID NO: 485551 - DNA, 259 bp, Homo sapiens
cacgaggtttttattcatgttttagatttgacaaacagcacctcagtgcaagtgggttcatttttttttcagcattcttgcaccttttcccttacatagagacctgtacgctgggaaaattgtacagtgcacttaactgtcctatctgagcaggcttactttatactcagcctctgtatctctgattactgaaaagatacagatatcagaggcagagtcaagtggtatttgaacaccaactggggcagatgctacctta

SEQ ID NO: 485552 - DNA, 684 bp, Homo sapiens
gaccgcaacctcaagaccaccttcttcgaccccgccggaggaggagaccccattctatacgcaacacctattctgattttgcggtcaccctgaagtttatattcttatcgctaccaggcttcggaataatctccgcatattgtaacttacatactccggtaaaaacaagaacccagttcggagtacatacggtatggtctagagctatgatatcaattgggcttcctagggtcttatcgtgtgagcagcaccatagtatttaccagtagcgaatagacgctagacactacgagccatatttcagcctccggtaccataatcatcgctatccccaccgggcgtcaaaggtatttagctgactcgccacactccacggaagcgaatttgaaatgatctgctgcagcgctctgagccctaggattcatctttcctttgcaccgtaggtggcctgacttggcatcgtattagcaaactcatcagtagacatcgtactacacgacacgtactacgtggtagctcacttccactatgtcctatcagtaggagctgtattggccatcataggaggcttcattcactgatttcccctaattctcaggctacaccctagaccaaagctacgccgaagaatccatgttcactatcatattcatcggcgtaaatctaacggtcttcccaacaagc

SEQ ID NO: 485553 - DNA, 331 bp, Homo sapiens
  misc_feature (62)..(62): n is a, c, g, or t
  misc_feature (130)..(130): n is a, c, g, or t
gatctcgccatcaggcactgtagttgaatcttatcactgtgtcatagcagaaattccttcangatcttttaaaattaaaacaacaacaatgacaacaataggcccatgtctagactgtatggcacctatngagaatcagaggaaaggtaccaacctgatgggacgaagatggtccaccattctagattacctttgtttgttaaaagaaaaatcttgacttggatatttttgggcaaagcagttttaatacaacacttagttgaaaaatctcaattagcttattgcagaatagtagcaaaggcaatttaatttacataacttaattttgtcc

SEQ ID NO: 485554 - DNA, 196 bp, Homo sapiens
cctactcgacgaaacacaaatgtctaccgcctgcgacacgtccccatcagtgtcctgagctcgccctgtcacaactgcgcttcaacagttgggcgagtgttcgcggtgagcagtgcccccacctgctcctcagttccagcctgaccccctcccatcctttggcctctgaccctttttccacagtggtgccctaccc

SEQ ID NO: 485555 - DNA, 344 bp, Homo sapiens
  misc_feature (97)..(97): n is a, c, g, or t
  misc_feature (286)..(286): n is a, c, g, or t
  misc_feature (329)..(329): n is a, c, g, or t
ggaggaacccttggcaggcagaacctggaggtgtcagaggctcaactcctccatttaaccagcaggcttccagagtccccggaaaaaccttgcccancttaaacaaagtgcttctagatggagagtggtccctggggaaaaggacctggccatccccttccaatacctgctgcctgtctccctgacccatgatttggcaagttaggcccagtcaaacatggacagttgatccatgaggaaaaaatgctctcccccctaaggccaggaattttaaagcagggctggnttagctcccagggcaaggggttccctaatgcttatcaataaanaatattgagcctgga

SEQ ID NO: 485556 - DNA, 204 bp, Homo sapiens
  misc_feature (40)..(40): n is a, c, g, or t
  misc_feature (43)..(43): n is a, c, g, or t
acgccgacgtcatcgtccacggctaccgcgccggggctgnganaaaactggggtatggcgctgaacagctcgagccctgtcgcctgggttgatcgacgtgtgcctgaacgcctatggtggacaggtccatggcgtggaagacgtggtttcgacagtttggtgcaaatgagttgtggcctggcagaatcaggtatggcctgggaa

SEQ ID NO: 485557 - DNA, 410 bp, Homo sapiens
gcactattgatcagggtcagctaatcgacaatgccgatttatagctggcgcttgatcctacaactgacaggccagagcgacctgggccctggctcactggctgaggaatcacacggagacactgccacagagacagatacatgctaccatgatcagtataactcaaccattagcatgatcatctaccacctggctgacttgacttcagaatatagcgtaagctgtctaactagaacataaggaccactaacatattctgcagaaggagcatcggtacagccttttattgctatccatggggaccaaggctgacagttaggaagaaacactgagaggcccgaaccgctagcttacggccataccattggctcttcatcggcttccacagcctcctacgtacccttagccgg

SEQ ID NO: 485558 - DNA, 169 bp, Homo sapiens
tcatcgagctcggtaccatggtactcccatcatcgccaaggtctgtgagcatctcagagcgagctccagaagttcaagatcaagatcatgggcgagtttggtcagcagacggggtccatgacctaccagtttccctcacggcattatgaggcttgttgcatgagattaa

SEQ ID NO: 485559 - DNA, 153 bp, Homo sapiens
catggtaactaggcctcatagggttgtcatgaaactaattgatatattaaagcgagtttataacagtgctggcacaggggactaaatacatgataactgctatgctactgctactactactagtactactattactactactacaactgctag

SEQ ID NO: 485560 - DNA, 525 bp, Homo sapiens
  misc_feature (200)..(200): n is a, c, g, or t
ttttcacttctgctcctgccccctcccagaagctgagatgtggtagagactcagcattggccatgcagccacattaacatggcctatgggatggcaggacaagatggaagggaactgggatcttgaatgtttctgaacatgaaccacaccatgccctatcactgatctagtccacaccatcgcttccaatactaatgtantaatatccacaccatgccctatcactgatctagtccacaccatcgcttccaatactaatgtaataatatccacaccatgccctatcactgatctaatccacaccatcgcttccaatactaatgtaataatatccacaccatgccctatcactgatctaatccacaccatcgcttccaatactaatgtagtaatatccacaccatgccctatcactgatctagtccacaccatcgcttccaatactaatgtaataatatccacaccatgccctatcactgatctaatccacaccatcgcttccaatactaatgtagtaatatccac

SEQ ID NO: 485561 - DNA, 448 bp, Homo sapiens
tagttgtaggagtggatacatctttaatggtatattttggtttattgtcttatttttgatgtagtattctatcaataatttattaaacctggcatccttgggtgagcatggatttttcaactttggtgttatattgtgtttgcttttaaaaactgcttttgaggccaggtatggtggctcttgccatacccagcactctgggaggccaaggtgggcggattacctcaggtcaggagttcgagaccagcctggtcaacatggcaaaaccatgtctctgctgggagcacaaaattagccaggcatggtggtgcatgcttgtggtcctggccacttgagaggctggggcaggagaatcacctgaacctgggaggcaaaagttgctaggttgctgtgagcgaattctcaccattgccctccagcctgggtgaaaagagcaaactctgtctca

SEQ ID NO: 485562 - DNA, 448 bp, Homo sapiens
  misc_feature (237)..(237): n is a, c, g, or t
actctagaggaccgtctcctggtatcccaccctctcgttgcccagtttctttctttcattttttttctcgagacacagtttcactgtcacccaggctggagtgcagtagtgtgatctcggctcactgctaactacctccacctcctgggtcaagcgattctcacacctcagcctcccgagtggctgggattacaggcacgtgccaccaaactctgggccaattttatacgctttagntaggaaacagggtttcacccatgtttggtcaaagctgggtcccaaactcctgtacctcaagtgatctgctccccttcagcctcccaaagtgctgggattaccggtatgaaccaccacaacctgccaggaatttttagtttttagcttttgcaggagacttcaaggaaaggagacattcctctgtccaggaaacgggtggggataccagggg

SEQ ID NO: 485563 - DNA, 256 bp, Homo sapiens
ggcactttgaagacaacctcgtaggacatcttacatggaagcaataacaaacattactgaaagcaaaacattataacagtaattataagtatcaccacatacttatcaatttcttgatgctatccaaatgacatctacagatataggtaaaagtaggacatctttttctgtttacataaatatatccacttaaaatgtgataatgtggagacaaagcaagatttgattacataaacttttctctgcattggtcttt

SEQ ID NO: 485564 - DNA, 489 bp, Homo sapiens
  misc_feature (200)..(200): n is a, c, g, or t
ttttcacttctgctcctgccccctcccagaagctgagatgtggtagagactcagcattggccatgcagccacattaacatggcctatgggatggcaggacaagatggaagggaactgggatcttgaatgtttctgaacatgaaccacaccatgccctatcactgatctagtccacaccatcgcttccaatactaatgtantaatatccacaccatgccctatcactgatctagtccacaccatcgcttccaatactaatgtaataatatccacaccatgccctatcactgatctaatccacaccatcgcttccaatactaatgtaataatatccacaccatgccctatcactgatcgtccgttcgcatgttaacatgcgaacggactgatcagggaccatttgcagtagtgaactcccaggtgcctttgaggcagcagggttccacctgaatgagcatctctataacatgatcagtccgttcgcatgtt

SEQ ID NO: 485565 - DNA, 360 bp, Homo sapiens
tttataccagagggtctgaggtcctgtcttcacaagtgtattcataaattcttctgcaacacactgtcttaattgaggtggactcttccatggggaaatacttttctgcaaaggcatcaagcttgccacatatctttcctaaaaccaagaaaaaagttaataaaaggagtgtcttcaaaaatatttaaacagacctacttaaaaggaatgggtcttttaagtttttaatcatatgccctttcaatgtttcagcaacaactccatcactccccacaagagatatagctaaatttagactgacttgggaagtcagatttcaaataaaaattcaactaaatcttagatgcgattagggttagt

SEQ ID NO: 485566 - DNA, 770 bp, Homo sapiens
  misc_feature (56)..(56): n is a, c, g, or t
  misc_feature (331)..(331): n is a, c, g, or t
gtcacttgctcctcacaaattctgctacagctacactatgtgtacacatatggcancatactcctcaacctcttccatgctgattagtccactgaatttatcttgacaatttttcctcctaattacatgtacagctacctcattatctacagtatctgcaatacacatttcacatgtttatgtacactgacttccaaaaggttacacttacagtatgttagtttctaaaaaggagataccatgttagcaattctccacacagaatacaaactgagaatggagagctggcactaattactcatctatccacagatatcgtgagacatctcantgtgggaagctgtataatggaactatatacaattctacctgtaatgtgcaaattaacaaaggacatttccatttgttaatttttcacactttcaaatgttacccccccttttaacaaatttaaaacctttccctttatcacccccaaatttctccaaaaacttttaaagattcccaaaggaaaaggggggccaaaactttttaaaatttaaaaacccccaatttaatattgtattttgtcacccccaataggggtccactctcttcaaaaagggccctaagggggcccaatatcccaaacccctttaaaaacctctttaataaccctttttgaaaaaatgtcggacaaattttttcaccatattttttttcaccccctcaagtggtggctttttacaactattaggacagggggggccccccctctcccgctttttttt

SEQ ID NO: 485567 - DNA, 198 bp, Homo sapiens
gtcaacgagtagttcatcctctcccacaccagctggttagcacacggtagatatggacaggacgtaggaattactgcaaggggagtctagttggtctacctataaagttcagataagaatacgtgtccagtttgcattctcttatcactgtgtacacacgcttcccaaagcttttctttaattctgactctgcttccg

SEQ ID NO: 485568 - DNA, 111 bp, Homo sapiens
  misc_feature (103)..(103): n is a, c, g, or t
ggattacttattacagggaattcgacaaccgcacaagttggcagtaggtttccccaccctaattaatctgggaaaaattccctggtttcctagggttgttggntaaaagag

SEQ ID NO: 485569 - DNA, 110 bp, Homo sapiens
cagttaatctgaactcctctttggggcctcttaatacttctatccaagagcaatacaatgaaggtgaaaaccccctccaatccggaactcccataaagtttaacaaagca

SEQ ID NO: 485570 - DNA, 174 bp, Homo sapiens
ggagctgcaaaccgtgactcagacaagccctctctgagcagcttggtttttgggtgggaaccagccatcatccggtgtcctcccctcccttgagtgctggacagcccaggctttaataagtgctggtgttgctggtcaggctaggtcgctaggagggctgaatgcaagccaaac

SEQ ID NO: 485571 - DNA, 366 bp, Homo sapiens
gccaccaacacccctccccccccttttttggttatctccctggcccggcgtcccaccactgactcagagagagggggtggaaggaggaggagaaagaactcgcgggggctctggcgcctgggcagaaggaggcaggaggagagcggggaggcgagagcgcacggcggtggagagcccctcgatcaattttcatgcaagaatcattatcggtaaattggaaagctggctgcctgacagcagatttgtctcccctaatgaaagcgaaagggtaggggcgcagcggcgggcggctgaaggcggcggcggcggcggctccttccgtctctacgcggcatcttccaacagctccatgcttcgcagggcgat

SEQ ID NO: 485572 - DNA, 212 bp, Homo sapiens
gattgctggaatgctgacaaatgactccttcgaatataagcacattcctcgattcaagcaaatgcatggtaacatgagggaaatgagtttcctgagcagagaggtgtgggtgggggatttgatgtcccgcttcgatcagtcgggtttgtgagttgaccacaagcctaggtctcttagagtcattacctggaggtggccatgacaacttcaaa

SEQ ID NO: 485573 - DNA, 81 bp, Homo sapiens
tgccactgagcattaggtcgcaagggcttggcggtacttgtagtctcacgtgttacccatgcttcgtcctccccaccccta

SEQ ID NO: 485574 - DNA, 307 bp, Homo sapiens
ggtcgactgagaatgaagtgttaaaactgctgcttatggctgggtgtggtggctcaggcctgtaattctagcactttggaggctgaggcaggagaattacttgagccaggagtttgagaccaccctggggaacataatacagacccatctctacaaataataataaaaactagctgggtgtggtggtgcgcatctgtggtccagtccaggctcttcaggaagctgaggtgggaggatcacttgagcctgcactgagctttgatggcaccactgcattcctgcctgggtaacactgagaccctgtctc

SEQ ID NO: 485575 - DNA, 922 bp, Homo sapiens
  misc_feature (9)..(9): n is a, c, g, or t
  misc_feature (113)..(113): n is a, c, g, or t
  misc_feature (117)..(117): n is a, c, g, or t
  misc_feature (120)..(120): n is a, c, g, or t
  misc_feature (128)..(129): n is a, c, g, or t
  misc_feature (134)..(134): n is a, c, g, or t
  misc_feature (283)..(283): n is a, c, g, or t
  misc_feature (288)..(288): n is a, c, g, or t
  misc_feature (368)..(368): n is a, c, g, or t
  misc_feature (395)..(395): n is a, c, g, or t
  misc_feature (398)..(398): n is a, c, g, or t
  misc_feature (402)..(402): n is a, c, g, or t
  misc_feature (483)..(483): n is a, c, g, or t
  misc_feature (485)..(485): n is a, c, g, or t
  misc_feature (501)..(501): n is a, c, g, or t
  misc_feature (503)..(503): n is a, c, g, or t
  misc_feature (506)..(506): n is a, c, g, or t
  misc_feature (527)..(527): n is a, c, g, or t
  misc_feature (529)..(529): n is a, c, g, or t
  misc_feature (540)..(540): n is a, c, g, or t
  misc_feature (564)..(565): n is a, c, g, or t
  misc_feature (568)..(568): n is a, c, g, or t
  misc_feature (573)..(573): n is a, c, g, or t
  misc_feature (576)..(576): n is a, c, g, or t
  misc_feature (580)..(580): n is a, c, g, or t
  misc_feature (594)..(594): n is a, c, g, or t
  misc_feature (598)..(598): n is a, c, g, or t
  misc_feature (605)..(605): n is a, c, g, or t
  misc_feature (638)..(638): n is a, c, g, or t
  misc_feature (680)..(680): n is a, c, g, or t
  misc_feature (690)..(690): n is a, c, g, or t
  misc_feature (700)..(700): n is a, c, g, or t
  misc_feature (742)..(742): n is a, c, g, or t
  misc_feature (744)..(744): n is a, c, g, or t
  misc_feature (749)..(749): n is a, c, g, or t
  misc_feature (772)..(772): n is a, c, g, or t
  misc_feature (825)..(825): n is a, c, g, or t
  misc_feature (828)..(828): n is a, c, g, or t
  misc_feature (832)..(832): n is a, c, g, or t
  misc_feature (841)..(841): n is a, c, g, or t
  misc_feature (847)..(847): n is a, c, g, or t
  misc_feature (859)..(859): n is a, c, g, or t
  misc_feature (912)..(912): n is a, c, g, or t
cccatcccnccctttttatatatctaaatcccatttccctagattgtatattgcttttatatcaattattttatttttatgaatcgttcatggataactttctaactttaaantaantantgtttganntcaantaatttcttgacttacatgactttacaacaatctttaataattccccattacaaaagataaggatttaacttacactatcgccactttcctttgtccatctctctccaaatgtctgatagttacatcactttttaatacatctattggnttgantttatagctttgaacaatacactaatcctctagttcttgttccaattaactgaagatcttttcatccccactttgaatanataagtatctctacctttgactccacntcncaanctctaatatcacaatctcattctgccttccatccctattgtcagcattaattactttcaacttcagttctgaataaaaaangnaacctttcacaataantnaanaggctgatatgaacattgaanantaataaatganatccacattattttgggtatttanntanatctnagngggngcgtagtataagcnaggntattttnttccctacacacccaatatcatcatgcaagaanaaaagaaaaggaaatgtaccaatcaagcctcatcttattctncatgaaaaantcaaaatcangcctcaatttattttgctctataattggacctgaattttttnanataangttgatttgtctttcttttttcntgactaaataatcttctcaagcatcccagctcttcaatgatactatctatggnacngaangcacattcntcccanaaagcccgaganagtatgctctcatctgaaattggtctgctggatagctgtcactctagggtganataccctttt

SEQ ID NO: 485576 - DNA, 389 bp, Homo sapiens
aggtctatggtttagtaactgtcattaattttggaaaattattggctgtttttacttcaaatattccttctgcttcttccttttttccactgcagtaatcctattatgtatacgtaacaccttttgtaattatctcatagttcttagatattatggtccattatgaaaatttattttttactttccatgttttatacgcaaatttctctttgcatattgttacactgaaaaaatatgtctattgacatatcttcaagctcactgttacattctctagtggggttcaggctactgaaaagcccacatttgttctttatttctattacagtgttgtgtttttcttttttttccatttctatcactttttaattctttctttgagtttctag

SEQ ID NO: 485577 - DNA, 88 bp, Homo sapiens
atgatgatggattagctggtgcagtacaactaggcttaatagggacatgccagcctgggcaacagagcgagactccatcacaaaaaaa

SEQ ID NO: 485578 - DNA, 432 bp, Homo sapiens
ctttcccactctctctctgcaggtccggctcctctaagggcagaagccagaacttggtccctaaccttctccagtctccctccctgggcatttctctcataaccccatcagaccccccagtaatggcctgacgtgggttctggaaatagaacatgggttcttagaatggctctctgagacttcattgagttgtctgtcctatttctttcctcaacaaaatgtccacatcctcaatctcctgtctcagcaggaaagatgaaaagaacagtgaggcttaggccaggcacggtggctcgcacctgtgatcccagcactttgggaggctgaggtgggcagatcgcctgggaacgggagttcgagaccagtctgaactccctgtctctactaaaaatacaaaagtggccgggcgtggtggcgggcacctgtaaatcc

SEQ ID NO: 485579 - DNA, 1370 bp, Homo sapiens
  misc_feature (327)..(327): n is a, c, g, or t
agcggagtgaccttcgcgcgtggagcgtgcggcgctggggggtccgtgccccaacttcctcgtacgctccggcacgtcccacagtctcctgaccggatccctcctttgcgatatgtcctacgatgtgctccgaattcttgacgacacgaagggggaacgactggtggaggcctgcacccaaccatgacccccggcagagagatgcacggttcgttctggaccgactggtccagactgacctgttctcatggacgtctccaagcttgatgtgctctaatgccattccgcggctgcatggagcgtggctgaggaccgactagcatgctnccgagtgatcctgtacatccggtgcagtgataggggccaatgctagaatttccatgtttcccagaaagcaactccccatagcccgcggcccttgggggaactgtcgtttcctagggatccaaagctccgccaagggtaaccgtccaccgaggaagttgcgcttggccctggaactccgtttacccaagcgtaggcgcatgttcgtgcatgcgccttcgcacagcaccgtatagttcggaaattttgccccattctggtgattgcgtatacgcactatcatggcgtatccgctttcctaagtttgactgtgaagccattctcgcccctaccagggggttttgcctgtggagcacacaaaacttggagatgaggttcccccctagacaggtatgacgaccccttagaaggcaacgggcatccactttccagttgcgccgggataaagaagctcaatgtcgcgccccttaagaccgttggtgcttccaaaagcatgggaggccccccaatctcattcgggggacctctaaggctgtgaagcgatgagcctaagggggcggaattactcccagcaccgaggaaacgttgccttgttccccaacttcctaacaactggcaccgccgggtaattttacgaattccaaagggccttgggattggcgcaacaaatccattttggcaccggctgtggagaagttgaacatacagcaggacacgtgggaacggcggggcaagagagacaaacaagccacacccttagggccaaacaccctttgggagacacaattggaccgcagaccagcaaaggggaggctagacactatagagagagcggacaaaggacaatccccccatatggcggctagacaagggacgtatagggcgaactaggacgaggaaataaacacaagtaggcaccccaaacccagaccgattcacagggaaaatcatcgggacactatgcgattcgacgacgaccaggacagcataagagcagagatggaggacacaggaaaaggaagacccccgcgggcatactcagcaaa

SEQ ID NO: 485580 - DNA, 405 bp, Homo sapiens
acgttgacacttcagcctcctgagtggctgggaatacgggcatgtgccaccacgcccggctgatttttgtatttctagtagagacggggttgcccaggctagtcttgaactcctgagctcaggtgatctgcccgcctcaacctcctgaagtgcgggggttacaggcatgagccaccacgcctggcctataatgatatcttaaaagattgctttcttttttttttttttttttttttttaagagggggtttccctccaccctggggacaaaaaaaatttttttttaaaaaaaaaaaaaaaaaaagggggcccccccccttttttttaaaatcgggttgaaaaaaacggttttggggtttttttttcggtttaaaattgggggaaaaaaaaggggtgtggagggggg

SEQ ID NO: 485581 - DNA, 525 bp, Homo sapiens
caatgagtagcagcttggacccagaaacagtataccatacctcaccaatacgtcataacttaacatgcggttacttcggtttcctcatcaaatcgtgaccaatccaatgctctctagtgtctgatatgccccgtcccctttaagttgcttcacatttgatgcggttgtgctcaactactctgagcgatgacgaagcaaaacgccattggctgtttttttttttttttttataggggaggagctactttgttcctcactttacatgacctgtaatgcttagaattatgaacttgaagaactataaatgtcagggtattaaaatgataaactgatatcagacatgttcatagctgtttggttgggctgggagttcttgggatatatcgttatgattcaccaacgcgatgtgggattatccaatatctttcatattgataaaaaactcaaaaagtggtacgaagcggttggctttttatgtacatttgacagtggaaatggaaataaatttaaactaccaaaaaaaaa

SEQ ID NO: 485582 - DNA, 431 bp, Homo sapiens
cagttataacgaggatatatggataacgaagggaagaatgtaaagagggatagaatgataaacaagggagaacgatagaatgatagcagatatgacaggcagacagtagatatgatatagaggtccatatatatctgtacatagttgtatatctaaatgtatatctatccaactatctagctataataaaggagaaaaagaaaaggagaaaaatgcagagtgagaaagggaaactgcacagccatccctttcaccatgccagaacaccaccaggctaagcatgtatgtggagggagctgaagcccctcctgcagggatgagcacgctgcagatgaagatgtgagcaggaccagctcatcaatcacaatcacgcagggacacactagcacggcaagaggattagcactccagcctgctcaggtcttttctct

SEQ ID NO: 485583 - DNA, 804 bp, Homo sapiens
ggggaaatcggctgtgggagagagggtacgcgtctgaggagggaatgcggagggtatcagacccatcagaaccgccactatgtacggtgggtaacagcagcaagatgctgcatgatatcgattacacggatgaggtgcatcctgcaagacgggcggatcttcattgggaccttcaaggcttgtgcaaaggcacatgaattcgatctctctgtgaagcagtgatgagttcagaaagatcaagaccaaagtaactccaaacaagacagaatagggaagagaagacgacgctcctcggtctggatgctgccctgccgaggggcgaatctggtctcaatgacagtagagggacctcctcccaaagatactggctatatgcctcggaattcacactatgctggagactgccggaggagcaccagaggcatcgagcacgggacatagaatggagaggaatcccagaatgggagtatcccaatgccccaggcatcctgaccaggacttgcgtgggccagaacacgagcgagagtcggcagggcaacatcccaagaggtgcaagacccccacaaggaaagagagaactagaaagccaaggcagcatgccaaacatgctggccacacagaccaagaattagccggcggactcccaaccccagaaaccaaccctgagacagatggggagtcctcacgcccaacacaatgaggcgaagagaggcaccccctccaggcatgagggggcccacacacctggaatgaaactcctatgggacccccaaaggggctccccacagggaaaaagaatcaaag

SEQ ID NO: 485584 - DNA, 329 bp, Homo sapiens
tggggctgacttagaggatcccacacgtaacgcttcatcaaaaccacagatctgactcagcagtagtctgtctggggctgcccacgtggcgaaacagtaattacttgatctgggaacatgcagagacagactgatggacagtcagtgcctcagttctcattcctaatagtgtaaagagatagaggtctcttccttgagagtgtaggggatccagagccctagtgaccctaacagccaaaggtgggttccctcttagaagtccagactcttctagttgcaagtcacagaagcccaaatcaaactagcttgagcaaaagggggatttagta

SEQ ID NO: 485585 - DNA, 312 bp, Homo sapiens
cgctgacggtggttgctgatcgaggctattacaaaggcccgttcgatggccacaagcggccgaggctccggcacagttgggtacaacgtacaaacagcagtcgacgacaaacgccatctgatcattgcccatgaggtgaccaacgttcgtaatgatcgcgggcaactgagcaatatggctaaccaggcacgtgaagaaatcggtgctgaggcgctgacggtggttgctgatcgaggctattacaaaggcccggaaatccttgcttgcgagcaagctggcatcaccacctttgtaccgaaaccactgacatcg

SEQ ID NO: 485586 - DNA, 717 bp, Homo sapiens
  misc_feature (643)..(643): n is a, c, g, or t
atcccctccattgaaattcctcccccttaatcaatagttggcccccccccccccctgttagcccttcttgtaagccaccgggcgccctcttaattacttcaatatcttgtgaaatatctactttgtgtagatgttacaccggacaattttttctctattaacgcctccccaaagagtctataattactttctctccccgcgagtatacccgccccttaactctcccctcctcacacggaaatatgtatatagttatagtatttgagagcgcccacaaatatagggagagtctgtcggaatttgatattgtgttaaaaaaaacaggggttggcacagagaagggagggagcctctacctaggtggatttcacactgcctcacgaggattccccctcgcccttctccccccccgtcgacacatgtgtcggggatttagatgtagatcgctctctctcttgtacttctaaccttttgtatatctcacctcacgaggcgcataaccctggttctaaggagaattttatcaaccaaaattgatcatggggcatccagcagttttatgaagaatattttattcgcaataccccgcgcgggttcctactctttccgaaactattaatatcattattttctcatcttcganataatttctcacttttgcaggacacaatccgccacaatgaacacaccattcttctacacgaccccatcatatcc

SEQ ID NO: 485587 - DNA, 133 bp, Homo sapiens
aggcagagaggggctgaggactgtgggacgagagctagcagacgcacttagttgtttatagctcttcctgttgtaggcggcggttccaccatcaagtacaccaccacctcctcctccagcaggaagagctata

SEQ ID NO: 485588 - DNA, 209 bp, Homo sapiens
tttaaatgaggtggttgtttacttgttataggcatctttaacgttctggattttgggtatgccatttaaaaatacttccagatacacatggagattagtaatactgcagccgtatccttgcagaacacacctgtcagtgtcaggggtttcgaggtttttcgttaaaaaaagaaaaccaaaaagcaaacaaagataggttcctcaggttg

SEQ ID NO: 485589 - DNA, 359 bp, Homo sapiens
aatggcgtgaacctgggaggcggagcttgcattgagccaagatcgcaccactgcactccaacctgggtgacagagcgagactccgtctcaaaaaaaaaataaaaatacaaaataaaaataagagatggattcttatttatctggtcagcatagctcctgtttctgatgtaagatgctatttgttgcaactttgttcttccatcagattatcagaccatgcaagaaattgcttagcaactcacccctatcaaagacagagttacagggaattctacttgggctttgggtagctttgtcttcatgtttatcttctttggctttttaaggcgactgtattaatccatgctcacactgctata

SEQ ID NO: 485590 - DNA, 750 bp, Homo sapiens
cacggtggcttacacctggagcgcgcgggttgggaggccaaggccggtggatcacctgaggtcaggagtttgagacatctggccaacatggtaaaaccctgtctctactaaaatacaaaaaatcagccgggcatggtggcagctggctgtaatcccagctactggggaggttgaggcaggagaatcgcttgaaagcaggaggcacaggatgcagtgagccaagatggcaccatggtacgacagcccaggtgacagtatgagacttcatctcaaaaaatatgtatatgataataaaataaaataaaaataaaacaaaaattagccggtacacaataattatgcatcttatgggatacagagtgatatgtacatacatgtatgcaatgtgtaatgatcaaatcagggtaattggcatattcatcaccttgaacatttatcatttcttgggggttgtgaacacccttcatcctacagtgctacagaacactagaatattttcctccccgctagctataacttggaactgtgaaccaggctctccctaccttctggggcgggatatttaactaacgaaatggctcaagggcatccatggtggcatgatgggcagggttcattctttttaagggtaatatattccaggggggtaaataccaattgcttacacacaaataatttgggtgggtttggggttttgggaggggggctaatctccacccggggggggggaggggacaacttactccttta

SEQ ID NO: 485591 - DNA, 398 bp, Homo sapiens
  misc_feature (64)..(64): n is a, c, g, or t
  misc_feature (242)..(242): n is a, c, g, or t
agcttcatcaacccacaaggagagagatgtgcaggatatgcagtgataaccctgggacactgtngttaagctgagctcattgctttaattcaggccttagaactcagtgaagatccatcacagtcagctaacactggcagctcaggacaagtagaccagccagcaggacacagatcttcctacccggctgattcggagacgagaccaagctgttgctgaggacgacagccctgctctggtcnactccggaggctgaccagtctacacacggctgaagcttgaagaaacaacaagcccggctctagtcacgcactggcagctgaatagtctacgcatggccgaagcttgaggacttgtcaagcaagtaaacgtagttaaaaatcttaaaaaaaaaaaat

SEQ ID NO: 485592 - DNA, 1000 bp, Homo sapiens
cttatgccaataccatttacccgaagataaagtatagagcgatagcaagattgacacctggcgcaatagatatactaccggcgaaggcgaaaggatgaaaggattactaaccaagcagtaactatagtcaatggactaaccccttactgaccttctgccatatatggaagttaactagaaataattttgcaacggagagccatacaggctacaggagcccccgaatagccaggacgagctacgcttaatgaacatgctagaaagagcgcagccgtctatgtagcaaaatagtgggaagattctatggggtagatggcgacgagaccatacctgaagaccctgggtgagtaagcatgggtatgtccgaaagataagaatccttacgattcagacatttagaatttgccctacgagaacccatctataaatcgcccattgttaatactttagactggttaggtccaataggtaggaacgagcgtctgtgtgggacacttaggtagaaatacaccttgttagggagaagagtagacaaaattctagaacagcccgatacgtcaggccctaaatagactagggcatccaagtgtaacgaagagcggttcaatgcatcaacgaggcctacttatcctagaacaaatccgcagaacatagtaacctgaactccgtcagacccaagtaggaccaatctatcaccctatagaagaactaatgttagtataagtaagcatgagaaacattctcctccgtcataggcctgcgtcagattaaaacactgaacgtgacaattaacagcccagtatctaccaatcaagccagcaagtccattattgacccgtcactggtcaagccgaatacaagcgtgggtccataaggacaggtcaaacaccgtgacagggacgcggggaatctaaaaagaaaagaaaggggagacacccaaaaatacccgaagggcccaataagcgaaccagtcgtcaccacggcccaaggggcgcataac

SEQ ID NO: 485593 - DNA, 376 bp, Homo sapiens
tcacccaggctagtctcgaactcctgacctcaggtgatccacccggctacatcttccaaagtgctgggatgacaggtatcagccagcgagcctggcctaatcattggaacattggcatcatgaaaatgtcatcagctttgccaaaagacacaaccacttgactcgattggcgtttgtttaccatattcatgtcaattttatgtatacagttcgaatacccagggagaccactaacatcagttaaccaagtggggtatatacaaccaaagatgaaacccgaaagtacataaaaaggatttaaatccgattttagatgaacctagtgtgtatatctcatctctagactagttcatgtttatccgttaatttatgccca

SEQ ID NO: 485594 - DNA, 163 bp, Homo sapiens
taccagcaaaactgccaggccgggttttttttcaacaccagctgtgattgctgcaactgggcataaacctgacctggtttatattccctaaagttccagttttttttgcttaggaaatgttgcccctacctaaagtcctgcaataaaatcagcagtcaaacca

SEQ ID NO: 485595 - DNA, 1633 bp, Homo sapiens
  misc_feature (90)..(90): n is a, c, g, or t
  misc_feature (245)..(245): n is a, c, g, or t
  misc_feature (259)..(259): n is a, c, g, or t
  misc_feature (282)..(282): n is a, c, g, or t
  misc_feature (342)..(342): n is a, c, g, or t
  misc_feature (380)..(380): n is a, c, g, or t
  misc_feature (444)..(444): n is a, c, g, or t
  misc_feature (513)..(513): n is a, c, g, or t
  misc_feature (535)..(535): n is a, c, g, or t
  misc_feature (631)..(631): n is a, c, g, or t
  misc_feature (644)..(644): n is a, c, g, or t
  misc_feature (660)..(660): n is a, c, g, or t
cactatgtaagattgataaccctgttacactcaattcgtacacatacacctgacacgcgcgatctctacaaaagtctcctgcaattgacntgacatacattcagagcgtcgggtgccttatggggctgccgtgctcgtgtaactccgccacacaatcaccaacctatgcgaacttattgcgctcaagaccacatagcaccgtcactcaactgaaaatctgcctctcagacaacagtcttctcttngactcgagacatcngcgctccaacatgcacttctgangagcgtttggaatagattagtgagtgctcttgagatttgctagtctctagaattgacccntatccagcccgcactatagctcgtgcacgctcatcgtnagaagtatcattatgaagtggatggctcgtcgtgtgcgcataactaacatttccagagacggangggcgcaatactcacatgagcttgtgattgcaagtttgcgtgctttgacgctctaatgagcaaacgcanttgcacagagaaatattctagngctagctctccactccaagtccatatgctatctcgctagaggcggtagtaacgcccacaacacgttctgttgtcgaaatatcgagcttgtcaatgnctaccataacccnacgattggaagggggnccccaaactagtaagtaccaattgttccatagaaggggaggggccacaagctaggcattgagactgtaaactataccatcgtgttgagcctaagttctcgggcaacaagtcctctcaacttattgcaatatgaggggaacgaggaaacctcttaagctttgcgatagtgggacccgtacttcgaaagtgtaggagcatatcgtgccatgtgtaacgaatcccaagtacgctcagctccccttgcaaacacccgtaggtttcgtttgtaacctctatattcaaccgtcacaatgcttctgacgcacgtctcccaatcttatttgccggagcacgcgtaacttatagccaccatacctcaacccataacccttgaattatgctgttgcccatttcgaacacactcggtggcgtattaccacaccacagaaaccccacagcttacgcggagagtcccaagccctttctcggaaatgtacgccagattagaaaatatctcaaggcggtttgcacgaaaaacggcatttgacttcacaccaagcataattgccaaagacgtcaaaggccccctgttcggtggcgtttgaaacggtaatccttctatttcccgtttaatcatttcttgcggcatctataaacgttgggaccagtgttaaaaaccgaacacgtaaaattgtgggtttacacccgaggggatcaccgtttcacggtaaaagtggcgggaaaacgcacacgcaacacaggagatttaataagcgccgtaaaggagacgaaacaccaccatttataaggagaacggccctggtttccccctggacgaaattcatagaacgccgaaaagtgaaatgatcatttttacacctagattgttgtgccattaagtacaccagaagtatcaccggaaaaaccggacatcggcgtacaacaggagacaccacaaaggagcgcgcaccatgattgccccataatgagatgt

SEQ ID NO: 485596 - DNA, 532 bp, Homo sapiens
  misc_feature (532)..(532): n is a, c, g, or t
tgtggtgtggccttagccaggacatttctgatggcagacctacaaaatcagttcagcagatttggagaagtttctgtgatgtgtgagatcatcacactggaaagatgaccaatggaaacccacatgaaagtttattgcatactatcaagcatcatgtgtatgcagaagctggaccttgaaaaaattgtatgtcttgttttaaagtaaaacaagaatggaaatgtgtggaaccattacagaattcaacctatgcaaaatgaaatgctttcttgcacatgattgtgcccaatgatgatgatgaatgcatgcaagaatgctaatgaaatgaatgacatcagacaaacatgtgtaaactgctcaagcgttgattatgaaacacatgaacatgtgatgtgatgttgtggagtttctcaataatcgacaattgcattgttgctcatgtgtgaacaaggagatgttggctcatgtggacagttaatgcaaatttgtgagtattgtaggatgcaaagagttattgtgacatgaatgtacn

SEQ ID NO: 485597 - DNA, 224 bp, Homo sapiens
cctttgtcaacagagagaaaacaaatagaaaaaaaaactgaacaatgagacaacagcaaaagctctaacattcatgtcactggattcccagaaggagaggaaaaagagtgcagtgcccaaaaaaacatctgaagaggccgggcgcggtggctcatgcctgtaatcccagcactttgggaagctgaggcaggaggatcacttgaggtcaggagctcaagaccagc

SEQ ID NO: 485598 - DNA, 209 bp, Homo sapiens
tattatgcacacgacatccttcatgggacgagacaggtcgtgattgcaaaataagtgacaatccaagcagtttactctaactatatggctcacgtctgcaagtgtcagacatgcagctgtagagcagtcacgaagtcaagccatgaatacagggtatggaaaaacattccagtgagctggtcttctacaatcctgcaacatgttggggt

SEQ ID NO: 485599 - DNA, 341 bp, Homo sapiens
ttcgccaagtgtgttgtgtgctgaatgattggggaacacaccccctacagcctcgcacatcatggaaactagcaatgtacttggccagtaatgccatgtatcttgccagacagcaatggcatatgtgcccatcgatggagccatgagatcctccctgatggggaacatgacttgacgcgctgccagtatgtgaacgctaaggtgcttggcttgcttgtctacacggctctgagtgaccaccacatctaccttggaagtgcaccttgcctgacgaccaacatggtaaccccaggacatgctctgcctcaagaagttccctcattacggacattgccatgaag

SEQ ID NO: 485600 - DNA, 585 bp, Homo sapiens
  misc_feature (4)..(4): n is a, c, g, or t
  misc_feature (21)..(21): n is a, c, g, or t
  misc_feature (48)..(48): n is a, c, g, or t
  misc_feature (55)..(55): n is a, c, g, or t
  misc_feature (127)..(127): n is a, c, g, or t
  misc_feature (135)..(135): n is a, c, g, or t
  misc_feature (173)..(173): n is a, c, g, or t
  misc_feature (186)..(186): n is a, c, g, or t
  misc_feature (200)..(200): n is a, c, g, or t
  misc_feature (234)..(234): n is a, c, g, or t
  misc_feature (378)..(378): n is a, c, g, or t
  misc_feature (398)..(398): n is a, c, g, or t
  misc_feature (556)..(556): n is a, c, g, or t
  misc_feature (577)..(577): n is a, c, g, or t
gganccccgagtgattgatgngatatttgcacctagtaagaggggaanctccgcngggtaagcccccgggcccaagggaatgtgaccgtctcctgcttcccctctttgccctgattaagtattgaancccccagngcctgccctgcctcggtcccaacctcctataaattatnaagaacccaatgntttatccccccgtnaaaagaagcttcagaaaaaacattcccaacactnccaaatcccggatgactttgtggccgatgtccgttgatcttcaagaactgtgaaaggtttaatgaaatgatgaaagttgttcaagtttatgcagacacacaagagattaatttgaaggctgattcagaagtagctcaggcaggnaagcagttgcattgtctttnagataaactcacagagatctactcagacaggcctcgcacctttgccagagtttgagcaggagaggatgatggtaggtactgaggctctgatgagctttatcagcccgcagaaaacgccttaagtagatgggagaccagtcatataagtaaatacatgntttaatcaattgtttaaaaanaaaaaacg

SEQ ID NO: 485601 - DNA, 332 bp, Homo sapiens
gggtgggtatgaagaataatgcacacaaatcctaagaccactagataccttgatatatcgagcagcggggatcaaattgggatgcacatcgagaggtcgtaccccttaaccatcgcggcatgagaagaaagaggtctggtcacttactgcaccagagttcgcgtagacctccttccacactccgaatcttcaagcaggatggaaagagaccacagaaactgaagcaagaggaggatgcgccaaggacacgatggctctgatacacaaaagccggaacataggacaaggagggaagagtaaaatgagggagacagacaggaagttgaactatg

SEQ ID NO: 485602 - DNA, 140 bp, Homo sapiens
ctgccttagcctcctgagtagctggaactacaggcagagttgttttttttttagggtggtaggtacgttttttttaacatatctcctacttttaactatgtgtccctcacgtttctccttgaaactctaaataccttcga

SEQ ID NO: 485603 - DNA, 398 bp, Homo sapiens
taatgtaatcgacataacttttcccttaagggtgaactgtgaaagcttcagtccattccttcatgatcttgcacttctgcgatgacttcctgatggggaacgacttctttttggagttcgagatctggactttgatcggctgcttcttgtctcgtgacttagaaccccctcgcgatcttgacctcgacggggattggaaatacctcgatccttttatagaaccagacctagatcttctgagtgaagctgatcttgatctacgaagagagatagatcttgatcgtcgaggagatgctgaccttgaccttcgtcccctgctcctgctgcgtgagcgagagtatcgccttcctctggatcgagaatgtgatctagaccgtgacctattgataatgtgatag

SEQ ID NO: 485604 - DNA, 130 bp, Homo sapiens
ggtggtacgttctgctcctagtaagattacacatcaatgcatcccccttccagttagtacaccctcttaatcactcacgatcatagggaacaagtcatctacagcagcgcatcactggtgctcataacgc

SEQ ID NO: 485605 - DNA, 519 bp, Homo sapiens
  misc_feature (219)..(219): n is a, c, g, or t
cggaccccccaaatgaatcatgtaccgtgtcgctacgccgaaggtgtgcagacattcgcccgtaggtacggctccacgggtgtgttgctgaccagatagcggcccttgaggcgtgcgccgatgcggccggtccaatactcctgggagtcgaaagagaccttggaaatgccatcgtgctgactgtccagatcgatcttctggccgatgacttgggcctgnggttccatctcccaatgctcggacagcctgaacgggtagccggcctcggcggataacgccaaggcgtggcccttggtatccatcttcacccctcggtcggacttgttgtcgccatccaggcgggtacccatggccaccaggtcgacgtaccagccggtcggatcggtgagtgtccagtaagcgccgaagttgtcgccgtcgagtttgacccgcccggagcgatggttctgccagcccattgcaaagcccttcacgtcgccgcgcaggcggctctggccgataaagaggattcatttgggg

SEQ ID NO: 485606 - DNA, 169 bp, Homo sapiens
tattttccacagggtaatacccaaggcactggcatgagtactattggctaaaaaataacaacattctcgtggggtaaaataaaaatacatttaacgataacaggtttcattaaacagaaatggtctcctatttggtaagtgggaaaatgtatacctggtatcaaggtac

SEQ ID NO: 485607 - DNA, 508 bp, Homo sapiens
  misc_feature (17)..(17): n is a, c, g, or t
acctcgtccgtttaganaaacttgttgttgttgttgttgttgtttaatggtaaagctcagtagactccagcaccaggactggcatggagtcaaagcagcagggacggctgggtgaccccagggagcctcacatggcgaagaggatgaggaaggcgaccatcaaacagaagagtcccatggcctcagacagggcaaaccccagaatggcataggagaagagctgctgcttgagagatgggttcctggcatagccaataatcaagctaccaaacactgtgccaatgccagctcctgatccagccacaccaactgtggcggccccagcaccaatgaacttggctgctgtgtcgatgtcccgggaaatgacactggtctggaattccgtcgggccacctggagaggggagctgctgcaggaaggctgcttagatggggcctctggtctgctcaggagggaggcagacacaggcctgattagacccctggtacaggagcgaatcagagctgga

SEQ ID NO: 485608 - DNA, 342 bp, Homo sapiens
aggtgacctagaggatcccacacgtacgcttcttaattggtggtgctttaggctactatgggtgttaatattttactctctctacaaggttttttcctagtgtccacagagctgttcctctttggctaacaggtaaattacaaggggatatagagggttctgtgggcgaatttaaagttgaactaagatactaattttgtataggcagctatcatcagagcacgggtacggtatgtcggctctacctatcaatctttctcacctcattatgttacatagacggggggggctctcttagctgtgctcaggtagctcgtctgtgtgtcgcggggggggaacccc

SEQ ID NO: 485609 - DNA, 358 bp, Homo sapiens
tcgtctggggctgccaacttgccatccaaatcggaggaaaacccggaaatcttaggggccacgtgacccacggccacggccgcttaggcaagcaccggaagcaccccgggcggccgcggtaagtgcgtgggtggctcgtgcattcaccaccggattcaatttcgacaaattaccacccaggctactttggggaaagttgtggtttgaagctttaccatttaaagaggacccagaagctttctgtgcccaaatgtgttcaacctttggacaaattgtggtggcctttgtggctcaggtgaacagacccgggtgtgaattgcgtgcttaaaaacaagacgtggggcttgcctcccattca

SEQ ID NO: 485610 - DNA, 87 bp, Homo sapiens
  misc_feature (29)..(29): n is a, c, g, or t
gcaaatgcagtgccccctgaagagtcatntcctttaaatctcccctgcaaggacagctgctttcatacgcccttctgtcgtcttctc

SEQ ID NO: 485611 - DNA, 100 bp, Homo sapiens
atagctgaatctagaggataccgcggcgtaatggtgatactgatacagaataccaccaggcgtaggtatcggtctagaacaccagcccggaggggcaggt

SEQ ID NO: 485612 - DNA, 250 bp, Homo sapiens
tagctcggaccataaatatgagagctggattacaagcatgcactacacacccagctgatttttgtatttttagtagagacggggtttctccatgttggtcaggttggtcttgaactcccgacctcaggtgatccaccagacctcgtgcctcctaaatgtgctgtggattacagcgtggtcctctctgcatctggccgttccaaatgtgctggtaagatagagagctacaggatgaggagccaaccacact

SEQ ID NO: 485613 - DNA, 290 bp, Homo sapiens
  misc_feature (66)..(66): n is a, c, g, or t
  misc_feature (69)..(69): n is a, c, g, or t
  misc_feature (77)..(77): n is a, c, g, or t
  misc_feature (130)..(130): n is a, c, g, or t
  misc_feature (141)..(141): n is a, c, g, or t
  misc_feature (216)..(216): n is a, c, g, or t
  misc_feature (244)..(244): n is a, c, g, or t
  misc_feature (271)..(271): n is a, c, g, or t
ggcctctaagtgttgaaagggagagtcacacatagctcaaaaaaaaaaaaaaaaaaaaaaaagaantancaagaganctacaattaggagtggagcctgaagatgtgactgatttgctgcaatctcatgntaaattttgancagatgaggaattgcttcttatggatgagcaaagaaagtggtttcttgaaatggaaactactggtgaggattctntgaacgttgttgaaatggcaacaaaagnttttgaatattacataaacttcgttgntaaagcagcagcagggtct

SEQ ID NO: 485614 - DNA, 213 bp, Homo sapiens
acagaagacaacaaaagtatcatttactttaaaaatcaatgaatggacttcatcgaaattcaaaacttcgttttgtgaatggccccgtgctaggggcatgcaaagacaagctatagactgaaagaaaatatttgtaaaccaaacgtatactagaggacttatactctagcaaccacaaaaaactttacacaccctcaaacactcaactactac

SEQ ID NO: 485615 - DNA, 1120 bp, Homo sapiens
  misc_feature (983)..(983): n is a, c, g, or t
agcccgaaaggtgaagcatctggatgggagaagagtgatggcagcagtgatcagagtcagtgcttctggaaccacaggtgtgccgaagggtctcaagaggccctaatggcctcaatgtgccctgcagtgacttcaaggggtcacatagcctttatgggcccgcagtggcatcaaaggactcggttgggctgcttgagtgcccggagagccttgctctccctgagatcaactaaatgcccgtaggggcaaggctcgccgtagagctgccaagcctccagatcatcccaagagcctgaagcaccaccaacgtcgggattgtggcccttatgcaaggtgagggcaaatgattatggtgaagatacctttatggctaaaagaccagacgaagatttcccatcaagcagctcggacatgcttgcaaggcacatcatcaaaggaatacacatgattgtgataccccagaaaaatcaattgaaacgaaggcagagcatattataccttggagaaaggtatataggggatttccacatttgacaaggaaaatgatgataaaggaaattgaacacactatgtaacaattcgttacgtcaagaaaacgttcaggagagcacaaatagatgacaagaggcattaacgtggagaaaacagagtaaggtgaagtacagacaaaaagctgggaggaaagtggaaaccaatgggaaaggcgtataagtataaagaggattcaagtacgatcaaatgaaacttaggacaaacatcccgagagaacacaaggtaggcagcggactttggaacaaagcccataggaagaaaagagatgactagacggagcataagagtcagggagcagacataggcaggacacacccgtggggtggacacttaaaccacttccaatatttaccaagcataacgttatatggagacggcaacacagcatgagacacaacgaacaggacataccacaatcaaccacttggaanctggacagttagaatggatctgagaacaggaagcaggaaacaggttaaaccactgaggagaaacgtaacttgagcgacaccaggaaaagagtacccccacagaactaaagagcacgaatgcacaaccgaccgattgc

SEQ ID NO: 485616 - DNA, 458 bp, Homo sapiens
tgactctagggatccccgtgtgtgtgtgtgttcagtgtggcatgtatggtgtgtgtatatacgtatggtgtgcatgtgatgtatgtggggtatgtgtagtatgtgtgtagcatgtatgtaagtggggtatgtgtatggtgtgtgtgtaggtggtatatgtacatgcatggtgtgtgtatatgtgtatgtgtggtgtgatatggtatgtatgtgtgatgtgtgtggtgtgtggtgtgcataggcagagtatgtgtgtggtgtgtgtgtaggtggtgtgtatgtgtatgtatgtatgtatatatgtatggtgcgtgtctacatgtatctgtgctgtgctgtggtgtggtgtgtagtatgcgtatgtgtggtgcatatgtgtggtgtgtgtgtaggtggtgtatgtgtatgtgcatgtgtggtatgtgtacatgtgtatgtatgcacataatggggggtac

SEQ ID NO: 485617 - DNA, 136 bp, Homo sapiens
taaaatagaagagaacaacagcaaaaagcaaatgacatctccatttctcagtatacaatgggacagaaagatgctctaagaacagttgtaaagcaaaaagatggagcctgggcgacaagagcaagactccatctca

SEQ ID NO: 485618 - DNA, 442 bp, Homo sapiens
cctgtcaggtggtcaaaccagaatgactccattttgagtgagggctaggaaaatgaggctgagacttgctgggctgcattctaaaaaagttaggcaatcctagctcttagatgtttatggttaaggggacaaattaataatgtttactaaacacacccagatttaggagtgtccgggtatcccgatatctggagaataaaggcattcctaattttgctttaaagacagtagtatcaattcttgaaaaatatagtaattaagaaaattcatccttcatcacaaaccctagtagcagaacacatctccccatataatacaagcattgtacctagggtgagtgtgttcctcctcttactttcaggaatgtcctactctgtctatagccacacctgttcttccaacagttcaattccttaataaacttgctttctcttagttaaaa

SEQ ID NO: 485619 - DNA, 964 bp, Homo sapiens
ctcgaatgtcttcgcttgtttggcctgcgcttgcttcaatccgcattggttctgcccagtatacactcgagaagtaacagttatagctagtggtcttgcatgattgcatgaaatgtgtactcacaaattaaacttgttctgagtccattcaaatgtgtaaatagatgtagattgaaagtctccggatttgaagcatacatgtcgaaagtacaccttatcagtggtgaagtacagggttttatagtgtaatatatacagagtaagtgttggtataagtttgacaattgaggtcaaaatggattctgaatgattttgcgatatgggatgaggaaatgctgtgtgatccttaaggagttgagcgaaaactgctgtattatcaaagtgaaaaaagattgcttattacgtctacattgtacagtaaagcttagtgttactaagtatcatgtttgtacagatcatgtaactcatggagatgagagaatatgtgctctgttgctagcaaaggacaaatctcttggaaatgaacactttctgtcttgccttgccgtccaaatgaattaataggcatcgtgggagaagataaaaggcgagatgggccaatccttcaagcagggactaaaagtcgctcttcaaatcattacttaagcagaccaccattctgttaccggatcttagagtatctttcctaaacatgattgtcacgataagtatgttagcgaagttaagtgccaactcctgggatgtggtacttttcaccgtgcatattcaagggacatttcttggctgtcgggtgcaaaaaaacaacaccccgttttaaaaggctccaaagggcggaaaacaaaagacagagcaaaaggggacaagcggacatggcagcaccatgggcaatgcatccaacgcacaactaaagaattatgcaaccagacgcatataaatcaaagtgaaacacacaacaaatagcgac

SEQ ID NO: 485620 - DNA, 125 bp, Homo sapiens
tttgtcacattactatacatatcacaggcaattgggctggctgcataaatgcacacatcgagagtggcttacatacatgaagctgtatttgtctcatataaaagatgttctggcggtagtgaagt

SEQ ID NO: 485621 - DNA, 154 bp, Homo sapiens
acctttctgctgtcatcacgtatcgtacgtgctgagaacaaatattactaaccgcggctaaaagagatttccgcacgttgcattaattagatcgtgtcaaatattcatgttcggtatacatacacgcgaaagttctattgtagaacaattaaca

SEQ ID NO: 485622 - DNA, 186 bp, Homo sapiens
ttctcatttctcagctaatggccttcacattcatagctatcaccacgaaaatccatgattagtaaaattaaagagcgtagttttcaaattctatcattcatttgatctttgttttgtttttgtttttttgtttgagacagagtctcggtctgtcacccaggctggagtgcagtggcgcgatctctg

SEQ ID NO: 485623 - DNA, 457 bp, Homo sapiens
cataaggcacagagagtaatatgtaagttctgagcttacatgctggaatttcactgaaaaggtaagagaagggcggggggtgaaggaaaggagtacattcctttttggccaaaaaggctgaaccgcttctctttgtctttcacttagtccttttcccgcttggcgggactggactcgctggtgatggtgacgacgcttggtggggagggtctgcgcgcggttggatgcttggcgtgcttctgggtgctggcagacacctcgtgtttatcagaggagatggcggaagagatagcctggatccatgtgttcctttcctcatcgtctttggcttggaagaggtactcattgccatcatttagtcttagctagaatacgtgtttcttcttttagtaatcaagggccacttcgcagacagcttcttccaactacacagggacctcactgtggggaagggaat

SEQ ID NO: 485624 - DNA, 335 bp, Homo sapiens
gatgaatcatcgggcacagagtggattaagaggataactgatatcagaggaaataagaagatctttggctacatcgaaggtctacttatgaatcaagtaactcagtgaataatctttaaagcgcaaaggtggtttttagacttgacagacagagccacttaaattcttgtataaaaataccaatttgcctcctccttcctcacttcgttaggttatggtagtgctcagacatctgcagtgttgaggccagtcactgttggaagtcatccaagaagcccattttgaggccattttgagccttactcttaagttctctatgaagaactacattgatt

SEQ ID NO: 485625 - DNA, 284 bp, Homo sapiens
cttcccgaaggtcattaatcaccgtgaccgcggtctctacgaaagactccagctgatcatgttgctctgtgcagcagacaacacagagatcactccagtatttcattctaacttctcagagaagacagatcatccacagcatggagctctgagtgtactacataacatacatgaatacagaacacacatccattaggatggctactgtccaggaaaaaaacagaaaataacaagtgttgtcagggatgtggagaaattagaacccttgtcatattctgtttatt

SEQ ID NO: 485626 - DNA, 178 bp, Homo sapiens
  misc_feature (163)..(163): n is a, c, g, or t
  misc_feature (167)..(167): n is a, c, g, or t
  misc_feature (169)..(169): n is a, c, g, or t
gaatcgatcttgacctggctgccaggaatatccagcttgttaccgactggtaaagaataagaccgctgatcatagagtgaagctccaggaatcagagagtctcatagcaaacctcgaaactgaggatgagatggttacagataaagcctttcaggatggattnaagnangcagagagg

SEQ ID NO: 485627 - DNA, 199 bp, Homo sapiens
  misc_feature (89)..(89): n is a, c, g, or t
  misc_feature (179)..(179): n is a, c, g, or t
ccctacaggacgccgccggtggggcggggtgtaaccgggttggctacgggtactactgtctgggtcgcctacgacggtctggtgacgantacgtgttacgtgtccttaccggacgacgaccggaccgacgaccgtaaccgccgacgggcgttctttgactgtgccaccactgtcttcgncctgacttgagggactcctc

SEQ ID NO: 485628 - DNA, 1035 bp, Homo sapiens
aattttcatgcacgtgtggtgaggtctttgagctctattgagtgttgcacgttgggtactcgaatgttgcaagctgcatgcagctgactcctctgagctgatgtttgatgtgcctgtccccgactccttcctcccccttccctcccccttttttttatgttttcctgttcccctttcccctcccttccctatccccgagactggatcctgatgaggcagctcgaagatttgcatctttcttgaacttctctaatctgaagtttattaacatttactcctgtccccgtcaccactcccacaatccctaatctattaataataactccatcactctagaaagacttcattacttctactacaaaaccgccaaaaattttcaaaacaactgcaaactaatcgcaaaaataccaaataaaactcctttattcaaacctaaatgtaccatagaagtgacaaaacccccacacttagcatacaacactcatcataaaaactagaactatccaatgaaataaaaccaccactagtaactacaactgacaaaaaacactccaaaaaaacaaaatacacaccaaacataaaaaaacaaacaaaaattaaatacaatacttacatacaatagaacaaaacagacatacttaaataaaaaccttatccttcccatggaaaccactaatattcgaaccaaatcctaagatcactatagaaaacaccctcaaaaacagtataaacatctagaatgtcaaaaaccataaaataccatatcaacagtatgaataactaacctgccatcattacgataatacatacatcaccctaaaaatctcccaacaaagtaagcataaactgacaatcatcaacctatgtcctacgaattgacacaacatatgcacaaaacttgattcatccaaacacaaaagcccacaaaactctgcaaaccacataatcaaaaaccccacatacacatcaacaccaatatcacacatcaaacatacaacacaacacatccaactaaccacaagtaaacacatacat

SEQ ID NO: 485629 - DNA, 618 bp, Homo sapiens
tataaaacgggttttttttttggattccctttagccccccccccgggttccctttttttggacaaattttttttgtgccttgccccttttctcctgtcttttttaagtccccctcaagacgcgggggggactcgtggtttcgtggagaaacccaacggggcccgtgagatattcacagtcgtggcgtcctccttccgttgaacccccgaaagatgaggggatggccataggggggggtggggttgttcctcccaaacgccccacgatattgtgtaaggcagcacaagggggggctctatctcatttgacccgctcctttttctcccgtgccccccatgtgtagtgggaccactttggggggggggaggcaatctgggtccccccaagattgggggtcccaccacgagagaaaatttgttaaggaacactaaccacagcaaaacttctccttatcacaattccacagtttcgtgtgtccaaacaaacaaaactaataaatacacaatcaaaaaacactatctgttgtcacgccatctgcctcacaacgaaacgtctttaaaacaaccattagtacgcacgcgccccaaagtatgacatgacaccatgctgcaatagtga

SEQ ID NO: 485630 - DNA, 335 bp, Homo sapiens
tgtccattccagtgcagcaccaggcaagcagcaagttcagccgcagggcgtctttgcatagtagtcagtcaagggtaggcacaggtgcattttcatcggcaatgggcaggtgcattcctcagggggaattgttctgcatcccgttctcgtgccacagcacatcaggcaggtggcagtgctagctcagggctagccaatcacatgcacagggccaagcatgaagtgcacaaggtcaacagcacatcgtgtgcagggtgggcactgtctcactgcagtcagcctcctccagcattccattgccaaccacggatctcgtccagggatcaccagcagct

SEQ ID NO: 485631 - DNA, 356 bp, Homo sapiens
cgcaggcttaactatcaacaatacctttccttaagaaaagagtagccgcgcacggtggctcacgcctgtaatcccagcacttttggaggccgaggcggatggatcacctggggtcagaagtttgagatcagcctggccaacatggtgaaaccccgactctactaaaaatacaaaaattagccaagcatggtggcagacgcctgtactgccagctactcgggaggctgaggcagagaatcgcttgaacccaggaggcaagaggttgcagtgagccgagaccgcaccattgcactctagcctgggcaacaagagcaaaactccgtctcaaaataaatacatacatacatacatgcata

SEQ ID NO: 485632 - DNA, 1076 bp, Homo sapiens
gcaaatgtgcggatgacgccggtgcagcggggggtgccctgtggggccctggtggccctgggatggggaaccgcggtggcttccgcggaggtttcggcagtggcatccggtggcctggggtcgcggccgtggaacgtgggccggggccgaggccgcgggagctcgcggagagcaaggccgaggatacaggagtggatgccctttcacccaagtaggagccgcatatggtcaaggacatgaagaatcaagtccctggaggagatctatctctactacctgcctattaaggaatcagagatcattggatttcttccatgagagagcctctctcaagggattgaggtaatgagagattatgcccaatgtgcaagaagcaatacccgtgaccgaggcagcggcaccaaggtacaaggcatatagatggctaatcgcgggactaccaagtgggccaccgtcaggtctggagatgtcaagtgcatccaacggacggttggacaccgaacataccgtggagccaatacatcctaggcaaagctactccatcgtcacccggtgcgaagaaggctcactggggggaacaacgaatcggcaaggccacaacacttgatacccttgcaaaggtgacaggccgatagaaggtctagtgcatggtaggcatcatccatggacacaggggcacctaggcatcagtactccggacaccttgttcataagaaggcttgctcaatgatgaggtggtaatcgattaaacatgtacacctacagcccagaaggatagacacatgacaacactagaggaaattcagcaaggcaacttatgatagccattatctaagaccctacagatacatgacccccggaacttcggaaaggagactggattcaccgaagtatccctataaggaggtcaagtagaacaactagtaaagaaccaaaacaaaaatatccgaagaagggaaaaagggtaagaaggtggtaaaacatacgggagaaataccaggaaaagataagtgaattaggttgaacaaaaaaagagaaaaagaaagaacagaacgagacatatagaggacaaagag

SEQ ID NO: 485633 - DNA, 175 bp, Homo sapiens
gttatatgctgctcatggtgatccggtaggttatggtcatgccaagctttcacctgaggcagtggcatgatctctgcccccacagaaaaactctgtactgaacatactcttactgcaatgagcaggtgagctgtgtgaactaaatctcttcccacaccctttatccagcactcgg

SEQ ID NO: 485634 - DNA, 536 bp, Homo sapiens
gtccaacatccggggttcaagcaattcctggcctcagtctcccgagtagctggggactacgggcacgggccaccaggaccggcggatttttggtggttttaagtagagacaggatttcaccaggtaagccaggagggtctggatctccggacctggtgatctggtccatctgggcctcccaaagggcggggattacagacatgagccaccgggcccggacggctacctgatctttgcttggcatgttaacaaggaaaccacagaaactcattttatacaaatgaaactctggaaatccatttactccaccttcagttacatggtatggggagttacatttatagggacataaggcggtggtccatttcataaatacacattcataccattggtctggtaccattccgggtagcagaaattaataaaggacctcagggagaccaggggctgggtatgagaatgagagaggatcccaagatattttaggactctgagtagtgaaggaaagagctggggcagggaccgggggcagatga

SEQ ID NO: 485635 - DNA, 1295 bp, Homo sapiens
  misc_feature (313)..(313): n is a, c, g, or t
ggagtgcgccgggcggggcgggtttgcgctttggccggcgctcccaacgctgcctgcgcggcctacagacgagtctccttaatgtcgatgcgtgggtgctcgatggctgggatcctggaagcgcttgtctcgagtccatgggctagtccggcgatcctactgacttagcgttgagcctgcgcctgccacgcagcccctgtgactgggatcctctcggagcaacgtgccggcctggctgcacgatcggagcagcagtggcatcctgctcagccgggctcgcggtggtcgtacctcgtgtctaaacacttcgtancatcatggcagctgtggccagccggtcgttgtcggtcaacgggatgagtagtgactgcggtgcgcctttgtctggggcacgcttttgtggaacaattgcttcgcgttggttagtttgactcgatgccattgttgtgcgagtcccgtagttggaccgaagatggaaaattacccaagggagacactatatctaaataccaaacacttgattgtccgccatatgaaccccgtgggtagagccattttctttggaaccgagggggtgaaacctttgtttggcaaatggctcctgctcgcctttctcgaagttttgcggggaacctaagagctttgcttcttgagccctcgaacagctggggaaatgagcggggtgcgccttttggtgtcttcggaaccggaccagtaggggcagggcgccttcccgccggaagagatggcccaatggcccattgtctcggttcgcggttgtattacccatggcagcaattgcgcgcttttttagccattggggtggccccctcaaaaggtaacggggccaagctgaaaagtttggtccccccccggtatagaaaactccagaggagttgtgtgcctatggctaagggggggaacttgcgcccctttttctcacaagaccgaatttccaacgaacccctgttaccgttgtaatatggggaggacgttgagaagttggtaggggccaaagagggggccggggccgtatttgtcagaaccgccacgctaattggccaatattaagaagggggccttcccaatggaaaaagacgttacccaaggccctttcgccgggggtcgaataagggctccccttccgatggaatcggttttccggggaaaggaccccttggcgggcctctgtattgcaccacctccgcactttaaaccaagaccatttcgacttcgttcaaccaaggaggaaagtggggccccaaagcggcgaatggttgattttcggcttccaa

SEQ ID NO: 485636 - DNA, 218 bp, Homo sapiens
ccccgcccccgcccggggggtggtttgggggccccgcacccccgccaggggaatgtttgcacctccgtttgccaaaggccctgggtaagggactggatgttccccatcaaggtccagtggaagtttttcaaaaggaaaggggcccccgccccaggtttcggggcccagggtttgccaggttaagggcccgttttaccaataaattgagggcccccaga

SEQ ID NO: 485637 - DNA, 135 bp, Homo sapiens
  misc_feature (114)..(114): n is a, c, g, or t
tgttgggattacaggcatgagccactgtgaccagcctattattattttcaagacagggtctcactctgttgcccagcctggagttcaagaccaggactccgtttcaaaaaaaangagaaagtgcaggatgtcgga

SEQ ID NO: 485638 - DNA, 194 bp, Homo sapiens
cgggtttatacaagacattcagttcccaggacaggcaggagacagtagccttccactatctcaactgcaagaggctttcctcttttaataatccagctgagcacagaccctttacgggtgtgggctgggggatggtcaggtcattctcatcccacaaggccatatttcagactgtcacatggggagaaaccttg

SEQ ID NO: 485639 - DNA, 909 bp, Homo sapiens
atgaccaaattttcatttgatgtttctactcatttattttatgcatctaaatattgtacatgtggataatggcatacacgtttgtgtgttcctcttgagtgttgtatagtgcgtgattgttcccgttcttacttcatggctatcggcctcattgtttccccgttcttatttgtcgtgtagcgttgccgaatatatgtgccaagatttatacagtctatgtggttgaattttcgtgaactggccatgtctggcacccaggggtccctaatcatttttatcagtccctctagtcactcagtccccggtaattcagttttattgaactctcgaagtggcgaatgtcaactgttggtgtataagtttaacctttcctataaaatggtgcactgtactttgtgtcttagtctatagttataaccctgggtagactcgttggtcctggcagtgtgagactgtacctatgatagcttgggcgtttatcctcacatgtctccacaccctttcaaagttgacatatggccatcccattggccagaatccatcatgacacacttaagcctgtggcactgggaacagaatagattttgccatttgagacggcatcttcctgtgtcagtcttgtttgtaaggtaggtgtgtgatggtggatagagatgaacgtaggtagggagtgccctcactaagtgcaaaaattacatatatgattattagactattgagtgatattctcacacattgatttgttttataagcaattgcctagataacccccgttttttagcttattgcttggaggtgggggtaggaagttaaggtttattcaatcgtgtcctgggtagggcgaaagttaattctagctatgtgatttttcagacaagtaagtggaaaactgcctgccgctgtttcaag

SEQ ID NO: 485640 - DNA, 1198 bp, Homo sapiens
  misc_feature (358)..(358): n is a, c, g, or t
  misc_feature (702)..(702): n is a, c, g, or t
gagagagagagaagtgaagattctatgctgctagctttgaaagtggagaatggggccatgagtcaaggaactcaggtagctccagaaagctagaaaaagcaagaaaacagatctccccttagatcctctagatggaatgtgttccaccttgattttagctcagtgagacccttttccaactcccaacttccagaactgtaagaaaagaaacttgcattcttttaagccactaaatttgtggtaatttgttacagcagccagaggcagctaatacagaaggtttcatcagagatgaggtgacactggaactgtgttccatcaaaggggacaggtatctaatacagaaactcaggtgttngaaaatattgaaatgtttgacatgccgggaggtgaaggggtggagagatgagaggagacctgccaaagcctgggtcttggagtgccagctctgtgtcaggctgtctggggtcaactccagctttgctaccttctctctgagtgcttgggctctcagcaaatgtcagcgaagattacaactcaattaacagggagtccgtaaaggcttggctcaggaggttatctggcagactggaaaatggattctgtgtttcttggcacctcaagtggtggcctttgtgccatacatgctgcttttttatcaatcctcttaacctcaggtgatgtctctgtgtttcaaaaacnattcaatacagccatagttgtgagtaagaagagaactttgtccttcctggcattccctgggacagcggccctgattcgtggggaagagttctgtcatgtggcacaagcagagcagaggtcacagactcctgcttggcacgtgacagctacattgcacaaccctgataaagctgcaaaacccatgaggcagatgcctgtcatcctactcatagttccctctcccaggcacctggtgccttcatcacatggtctctggttccccaacctcctcacagatctacccatctctcctcaatcccagggctcctgagctttgcttcttgtctcccctcacaatcaaacccaggacaacagaatcctggggagcttacggtggaaaagacactacctttctttcctcccagctgaacatttccaaacttttattcctcagtagccacagcttcaggcacttccctgtcctgtgcctctcagatgggttccagtgaactgaatc

SEQ ID NO: 485641 - DNA, 161 bp, Homo sapiens
gaggatccccacataggactagaggagggccctcccacgttacatagccagagggagccccaaatgcaaccagccgggggttctattcttgcctgcaaaagaacagagggatgaccttggcccaactcgatgggcacagacagacaacctaagactatcac

SEQ ID NO: 485642 - DNA, 613 bp, Homo sapiens
gaggggacatctcctcagaatgccctgcaaaccatgaaataaaaatggaggaggaacaactaacaatcaaacaaaaaaaaaaacgcaagaggaactgtaatatcatccctagcgactaacagtgagcagaggacagtaaagggggagtgcgtaaggagaggctggtttcaacagccgtggtgatgaaagaaggcgactctgcggaaaactaggcaagttgcacattttcaggactgtagccgctgtgccaaatgagctcaggcataccaagcccgatgcaagaccacagtaattgcagaagttcaggagaaggcttatcaccttccctgagagagaaaaacacatttgcagattttggcctgcatcataagagtgagcactccattgctttctttcctggccactactgctacaatccagcactaagctatccatgtccaggtaaggatcgcagatcgagaagcccaaatctgccagtgacaaatgctacgtgtttacctgcataagcttagaggaagcaattttcggaacaacggaacccttcaaactataagtactgacattatcgaacacttgccaggcactttcagcagaagacaaggaacttgaagac

SEQ ID NO: 485643 - DNA, 1434 bp, Homo sapiens
  misc_feature (328)..(328): n is a, c, g, or t
  misc_feature (453)..(453): n is a, c, g, or t
  misc_feature (672)..(672): n is a, c, g, or t
  misc_feature (912)..(912): n is a, c, g, or t
agcggagtcggggtggaggcggcggcagcggcagcggctgcgggcagcgcgcggggcgcagggcgcggggcgatcaccgtcgtgggctctgggaggcgggcagtgtggcacagggctcccatggtgccctgcccctccgtctgcggattgtggaggcctgctgaggctggtgcggccgtgggagtggtgctcaggtgactcgtctgctctacagagagtgatgccgtgactgtctgttttcagtcgagcctgagtcggccgccttcatgtagataccatacccaagtgccttttgggacaacgatacgggatgaatcgaaacgggatnacttggtattgttttgtgaccgctacctgaaatctatgcacctgtgctgagttgcttataccgaaatcgtgttgactctgaaccagttcttgtacctgtgtaccccctaaatgggtagaaccgtnacttgtaatattgtccctgtcctccaggagggcaaagttgggatgttttaccttcgcgctcagacaactcagccaggtggctagatttctagcttgcgtatggacagttgcgggtgaccttgtctagtcagtcatgcttgacgttggttttgggaagagttgtgggtcgaatagttttaaatccatcaatatgctttgtggaacaagctctcaaaggtntgcgtggtcacaagcaaattgaagtttgttgctggttcctatgatatttttcctttcggatctgaactttctaacagttcttgaatttcagtcagagtactcacgaagaaggcgcgaaaaaagcaccactggcgggcggctacttagaaaaaaaccaacttttcgtgatattgcacttgtggccaaagttcgaaaaggtccccgcctcggtggcggggcagttttagtgcgtccaagttnaggcttccgtgggcaaaagtttatgctttgagccaagtcgtgaagaatcaaagagtttgtcgttcgtcgagaaaccaagcgagagtttgcgttgagctccttcgcaggtgagttaacaaacccttccttaaagtagcctaaaggtatgctcaaaaaacctggctggggagggctcttttcgttataaaaaaggacagaaccgatcggggccgagagagaagaaaaccagattttaagttccttcttagttttgattttcttagttagaattggaaaagtcaatttgaagtcgaaaagagttaggggccgtcgaggtgggccgcaaaaacagagtttctggtcgggaaattttattcagagagctggttgggagccacacactgagcgagcgcagttgttagaacgcttgctctctggaggagcggagaagagctctctcatgagtttatgtgtctcctctccgttaccagttagattttttttggcgctttggttgtttggcggtcataagagagactcggg

SEQ ID NO: 485644 - DNA, 216 bp, Homo sapiens
cctggtggtgcatacctatttctaatgatatctgatgcttgattctggccttcagatatacatgcatatgtgcaaacatgcataataccatatacagagtaaatatacacatacatcacaaaagtataactaaagtctcctgctaacccaacacatacatacagcacagcactcacatacaatacacatacaacacacaaaacacacagtcgacgc

SEQ ID NO: 485645 - DNA, 151 bp, Homo sapiens
gacatcactactacagaaactagcaagcattaccaataagatagcgatagaatgaacctgcgcaataatatgtacccagggaaagtgaaaattttaccagcgttatttgcgaggcttacccctatccccgcaaaaggattacgggaatact

SEQ ID NO: 485646 - DNA, 483 bp, Homo sapiens
aatacaacaaagacaaagaaagcaaggttttctacagcatcactggccagggagctgacacaccctctgttggtgtctttattattgaaagagaaacagtgattgttgaaggtgacagagcctctggatagacaacgcattgccacatacactctcttctctcacgctgttgtcaatccacacgggaatgcatttcaggatccaatggagattttgatcacagtaaccgatcatacattactacaagcccgaattcatccaggacgtctttaaggggtctgtcatgaaaagtgctcttccaagaacctctttgatggcggtcacagccctttccctgttgtaaaaattgacacctacaatgccgccatcgcttacaccatcctcagccaagatcctgagctccctgacaaaaatatgttcaccattaacaggaacacaggagtcatcagtgtggtcaccactgggctggaccgagagagtttc

SEQ ID NO: 485647 - DNA, 440 bp, Homo sapiens
  misc_feature (122)..(122): n is a, c, g, or t
  misc_feature (127)..(127): n is a, c, g, or t
ccaagaaaagtaacaggcaagggttaacaagaaaaaaagaagttttcctctgcctagcaagcacacttcaaggacagttataagataatgctgtacgagcagccaaggccaaaggaatgggnttcangccccttccccccccagagcaatgttgaaggaaaaaaaaagagaaaaagataaattactttactgttactcctttcccaggcttcttaaacgtgattatgttttacaaatgtctgtatttagccagttcttgtttttcttttgacgcagctacaaggccacaaattatacactatatgattaactgcttttgttttacttttgtaagtctgcttataaaaaccccactcagtcgttgttcaatgctcagctttttggatgcgaatccactgagccagtgcgtacctaaaataaacaatcctcccgttctccgt

SEQ ID NO: 485648 - DNA, 604 bp, Homo sapiens
atacatgtttctactggtgagtcttttcaaataaaatgttctctatccttaaaaaaattagcacaagtcttacctccttcatgcagcttctctcatttactattactcacatccatttctccctactgtcttttcttctttttttggagatggagtcttgttctgtcccccacactggagtgcaatggcacaatctcagctcactgcaacctccgcctcctggggtcaagcaattctcctccctcaggctcccgagtagctgggattacaggtgcccgccaccgtacccaactaatttttgcatttttagtagagacagggtttcaccatgttggccaggctggtctcgaactcctgacctcaggtgatccacccacctcagactccaaagtgctgggattacaggcgtgagacagcggccgcagccactaatgagcttctactaggcaaattcatggatacttaacattcttaatctcatctgacttctctaaattatgacagtattgactacagaagagttgaaaacttttctgtcaagccaaagaaaaaatgtcattattatatatttcatggacccctgattttttactttttctaatgt

SEQ ID NO: 485649 - DNA, 273 bp, Homo sapiens
  misc_feature (161)..(161): n is a, c, g, or t
cccaagtggaaaaaacatcttaacagtagaaaatgcaatgtaacaggctaggtgcggtggctcactcctgtaatcccagcattttgggaggcccgggtaggtggatcacctgaggttaggagttcgagaccagcctggtctacatggcaaaaccccatgtntactaaaaatacaaaaaattggccagtcgtggtggtgggtgcctgtaatcccagctactcgggtgaccgaggccaagagaattgcttgaacccgggaggcagacgttgcagt

SEQ ID NO: 485650 - DNA, 175 bp, Homo sapiens
tgtcccattgtggtcagtggttacgaatcgactagcaacatgagttgcgggttcaatccctggcttgctcagtgggttcaggatctgacgttgccatgagctgcggtgtaggttgcagactcggctcagatcccgcgttgctgtggctttggcgtaggctgtcagctacagttcc

SEQ ID NO: 485651 - DNA, 850 bp, Homo sapiens
  misc_feature (426)..(426): n is a, c, g, or t
cgagttgtttttgtttttctttaaatttttaattttcgggggcacatagtttattggagaattttttttttttggaaatggcgggggtctctattttgtcccccaaatctaaagggcaggggcttatttcacaggcgccgttcttagcgcacttacaacctttaaacctccgtgggcctcaagcaatttcctccgtgccctcagcctggggagttagcgtgggatacacaagttgcccgccaccacgcctgggctctgccaattacttctctactcagctcgtgctcagtgtatacgtggtcttttctccctcccattacgaggagagtttattctccttctctccaggtggggctcaagtcctccagtgtgcaccttttcgtggtttcacgaggcttgagagtcttgtggggtgctccccacgtntagaaaaaggggtgccccgtggcctcctccacttattcgttgcgacgaggctatccaggtctccaaggctctcatataagacaagtgtttcctctccatatttttatctccagctccagcgtgccccccagggagccgtgcgcgtggggcatttccactgtgccccccgacagccctcgtccttccagcccccaaagggataagaaagcctcgggcgcccctgtaggagagttcccgagggaccaactccccggggaacggggggagagcctggctttgggtggttccacggcccccgggggctaaaagccactatttaatccaagcctttcggaagcctaacccctggggggggttagcccacccccggagaataggcaacccatgaatggtatggggtatggcccccacgggtgggccgccg

SEQ ID NO: 485652 - DNA, 201 bp, Homo sapiens
tcccacttcagcctcctgagtagctgggactacaggcacacatcaccatgatcagctaatttgtttttctttttctttttgagatggagtctcgctctgttgccaggctggagtgagactccgtctcaaaaacaaacaaaacaaaccaaaaaacacttcatctaatactgagaataatactttttttttttttaaaacagg

SEQ ID NO: 485653 - DNA, 132 bp, Homo sapiens
accagcaggaccagcagacccagacttcgccccggtcacctgatggctccagcaggaccagggagcacactacagcaccaggagcaccacgagcaccatctctgccagggttaccaatattcacctctgaga

SEQ ID NO: 485654 - DNA, 551 bp, Homo sapiens
gactagttctagatcgcgagcggccgcccttttttttttttacagttctcaaggaagagcacagaacaatttctacatttcatattgggagtatgaaagtagattctatttggtaatgctgataatacctaaagatgcattgaatgctgtggaagaatgcttttggatgttgattttgacctgtccatgattcagaagaaaaacaaacttttctgggagttttttgttctcctcgaggctcgtgatggtagcagtatgcgcgttaaaggtctttgatccgagttgtggaagcagtgtgtcgtgttcattgtacagagtagggtatcagaaatgttaccatagagatgatgaatactcgcatgcgaagagacgaagagactagtgaagactcgtataaagcgtacgacccggaggagagggccatgtagcaactagctagtcaggagaggaggagatacccttaccgtaggagaaggatatggaagagggataaatatctagaatgagagtggactcgctaagtcctggaaggtgagcgagggagccctaag

SEQ ID NO: 485655 - DNA, 196 bp, Homo sapiens
agatctccagtacaactaaagaaatgagggactcggcagggtgcggtggctcacccctgctaatcccagcactcggggaggccaaggcgggcagatcacaaggtcaggagttcaagaccagcctggccaacatcgtgaaaccccgtctctactaaaaatacaaaaattagctgggtatggttactcggcgtgtgca

SEQ ID NO: 485656 - DNA, 200 bp, Homo sapiens
  misc_feature (145)..(145): n is a, c, g, or t
gagtacatagcacatgctgccggggatgctgttgattcctcacacggctgaggttgtggagctctcaggaaagtgtgtgctgcaattgagcccgggctgctgtagtagctggtaggttcttcaacaagggcagatgtggtgctanggcggtgaagatatattgtgtgtgttgtgctgctattgaaacttctaaaactagg

SEQ ID NO: 485657 - DNA, 87 bp, Homo sapiens
cccccagagctttttattgggggaaaggaatgtaactcggggtggttgtccttcacttcccttctgtcgtcttctcgcccccgtata

SEQ ID NO: 485658 - DNA, 1162 bp, Homo sapiens
aggatgtttacaaagaagagatgaatgaaaatgaagaagttataaatattctcctattctcaggcagaatgagatcctgactgaacaggaggagctcctgtgccatggcatgcagtttcttgcgcctggatagcattgcctcagcacaacacagcaagcagcattagcaacgcgctccagagcgtgagcatttgctgaagattccagagtcgcccagcgagccacgtgcgaagttgagcactgcaggagtactcctcacgcagcagcgcagcagcgcagcagtagagtgcatgcagcgcagtgacgcttgcctagatctattcataggcacaggaccttcaccagcaggcagcagcacacagcacaggcagcttgtgcaacaatcacaatgacaccacatcacattatcgcaccatccacaagccacatttccaattgcatggccagcctgctcgcagtgcccacatacgattcgtgcatgcatggccgaccgattgccatacattgctgtgtcttgactacaccagccattgccaagaccgaagcccccaaaggccctaggcaagcatatgcattagcgcagccaagagcagagcacgcaacagcaggactttgcaagttggcctcgcggagagcgatgttcggccccggtaccaagcgccacaggcacgcatcgaccgaaacatgagccgcacacccttatgaacgacacaaacaccggacacgcttactaacgaacagcaacgccaacaacgggcaacgagcacccaggaacgcccgggccaaatcacgccacacatccagacccaacgacaacgcggactaaatagacacacgggacgacaccagtcaccaattccattagaagcaccagtgacgcattggcgctatgagacccgagtaatcatctggaacgatacacgggatcgacacacagtagtccacaacgaggcaaccccccggtatgccaattccgtttacccttggttaacactccctctggacgctggagctctcacacgtgaccggcgcactctatcactacagcatatcataacaacattatccttcggtcaacaaactagctgatgcataacctcccgttccttccattcacacactccagtccccatcctgtcctaacaccacacgcgctctatga

SEQ ID NO: 485659 - DNA, 500 bp, Homo sapiens
tgcacaaccatctatctggtctagagactagctgaacatgcctcggctcttatcttcagcagagtttgttgagtaagcttggagtcagccggtcaaccacaacttcagagattacaacaaagctatcaggtctcacatttccctatacttcaagaaccagtgaatcagactcagaaggttgtgtagagtacaaaaccaagactgcagggggtgggccagagaatacctgaagaccattttgcagggaatcttaggctacttgcccagacagtcccctggctatgacccctgggaaggtgagctgctacccgcacctggtttttgggagaggtgtacctggttaggctgttaaagctttgttaccagctttgtagagaagagtcctcccaccacaaacgtgggatccgtgcacgttaacgattactaggactatgcagaaaccttggttttttctgttttttttttttttttttttctctttttctttgttttttctcttt

SEQ ID NO: 485660 - DNA, 539 bp, Homo sapiens
ctccaaacacaatctatttcatttgatctgctggcctcggcctcccaaaattagccaggcatggtgacgcacacctgtagtcccagctactcaggaggctgagacaggagaatcgcttgaacccaggaggcagaggttgcagtgagccgagatcaggctactgcactccagcctgggggatggagtgagacgccatctcaaaaaaaaaaaaaaaaaaaaaaaaaaaaaactttgggggcccgcccggggcccccggaaaaggttttacaaacccaatccggtggagggcccgcgcggccccgggtagtggttacgaatggaacccgtgtcgccaaggcgttggtaccgcaagaggaagaatcggtggtaaagaacaaagggcgtaggtttcctcccaagaaaaaaacgccccgggcggacaacgcgagcggttctggaacacaactcccaaaggggagtacaggagggcaatccaggggactcctacaccacgagatgcccaggcgaccccggaatacaaatatagcccgcgcggtgtt

SEQ ID NO: 485661 - DNA, 404 bp, Homo sapiens
tatgtatgtatatatatacatacatacacacacaggggaaaattataatcctgtcattgtgacgacatggatgaacctggaggacataatgttaagtgaaataggccaggcacagaaagataaatactacaggatcttacttatatgtgcaatataaaaaagttgaactcatagtagagaatagaatggtgattaccacgggctagacggggagagggaaagttggggaaatgttagtcaaagcatataaaatttcagacaggaagaataagttcaagagatctgttgtacaacatggtgactatagttaataacgatgtactatatacttgaaaattgctaagagtaggttttaagtgttcttactacaaaaaaaaatgaagtcacacggggttaagtaagca

SEQ ID NO: 485662 - DNA, 461 bp, Homo sapiens
  misc_feature (221)..(221): n is a, c, g, or t
  misc_feature (230)..(231): n is a, c, g, or t
ttcccccggcaatgtggctcttaaaagcgcaagcacttagcgaaatccattgcctgagaaagaacccgtttggcccgctgagatccacaccataagttggggacggaggtgggatccctgccccctgttaacacatgagaagggaccccaccctttttccccagcatggatggccacagctcaacagcctcctttgccaccaggtgttggcagcccatgcntgggggggnngccattttttctccccaccaccctttcaaacattcttgaccagagatcccagccaggccctggaggtttgacagcccctccctcccaaagttggttcctccctgggagggcaatttcaggggtggcccccccccgtgttccccatcctcagttgaagtttgatgaattgaagtggggcctttatgccaactggttccttttgttttcaataaatgttgggtttggtaata

SEQ ID NO: 485663 - DNA, 1457 bp, Homo sapiens
gcacggagccggcgcttttgcagttgcttctgcggaaaggtggtagttaagaatttgtaaaggccagagaactacctacgattctctcagcggtctctcttctcctcaagtttgaaatgctttatctcatcgggttgggcctgggagatgccaaggacatcacagtcaagggcctggaagttgttagacgctgcagtcgagtgtatctggaagcctacacctcagtcctaactgtagggaaggaagccttggaagagttttatggaagaaaattggttgttgctgatagagaagaagtggaacaagaagcagataatattttaaaggatgctgatatcagtgatgttgcattccttgtggttggtgatccatttggggccacaacacacagtgatcttgttctaagagcaacaaagctgggaattccttatagagttattcacaatgcctccataatgaatgctgtaggctgctgtggtttacagttatataagtttggagagacagtttctattatgctgatatcagtgatgttgcattccttgtggttggtgatccatttggacacttggagaccagaaagcttctttgacaaagtgaagaagaacagacaaaatggcatgcacacattatgtttactagacatcaaagtaaaggagcagtctttggaaaatctaatcaagggaaggaagatctatgaacctccacggtatatgagtgtaaaccaagcagcccagcagcttctggagattgttcaaaatcaaagaatacgaggagaagaaccagcagttaccgaggagacactttgtgttggcttagccagggttggagccgacgaccagaaaattgcagcaggcactttaaggcaaatgtgcactgtggacttgggagaaccattgcattccttgatcatcacaggaggcagcatacatccaatggagatggagatgctaagtctgttttccataccagaaaatagctcagaatctcaaagcatcaatggactttgaacatagatatttaccattgtctgatgtaaatttcagccatatatggattgatatggtttggatgtatccccacccaagtctcatcttgaattttaatcctcataattcccaggtgttgtggtaggtaattgaatcatgggggcagtttccctcatgctattctcatgatagtgagctttcatgagatctgatggttttataagtgcctggcatttcccctactggctctcattctcactcttgccgccctgtgaagaggtgccttccaccgtgattgttaagtttcctgaggccttcccagccatgtggaactgtgagtcgaaaattaaacctcttttataattacccagtctcgggtatttcttcatagcagtgtgagaatggattaatacctggatgcatgcatgtttgtgtaacaaacaggtcttttggcttatctagtaagta

SEQ ID NO: 485664 - DNA, 1406 bp, Homo sapiens
gcacggagccggcgcttttgcagttgcttctgcggaaaggtggtagttaagaatttgtaaaggccagagaactacctacgattctctcagcggtctctcttctcctcaagtttgaaatgctttatctcatcgggttgggcctgggagatgccaaggacatcacagtcaagggcctggaagttgttagacgctgcagtcgagtgtatctggaagcctacacctcagtcctaactgtagggaaggaagccttggaagagttttatggaagaaaattggttgttgctgatagagaagaagtggaacaagaagcagataatattttaaaggatgctgatatcagtgatgttgcattccttgtggttggtgatccatttggggccacaacacacagtgatcttgttctaagagcaacaaagctgggaattccttatagagttattcacaatgcctccataatgaatgctgtaggctgctgtggtttacagttatataagtttggagagacagtttctgacacttggagaccagaaagcttctttgacaaagtgaagaagaacagacaaaatggcatgcacacattatgtttactagacatcaaagtaaaggagcagtctttggaaaatctaatcaagggaaggaagatctatgaacctccacggtatatgagtgtaaaccaagcagcccagcagcttctggagattgttcaaaatcaaagaatacgaggagaagaaccagcagttaccgaggagacactttgtgttggcttagccagggttggagccgacgaccagaaaattgcagcaggcactttaaggcaaatgtgcactgtggacttgggagaaccattgcattccttgatcatcacaggaggcagcatacatccaatggagatggagatgctaagtctgttttccataccagaaaatagctcagaatctcaaagcatcaatggactttgaacatagatatttaccattgtctgatgtaaatttcagccatatatggattgatatggtttggatgtatccccacccaagtctcatcttgaattttaatcctcataattcccaggtgttgtggtaggtaattgaatcatgggggcagtttccctcatgctattctcatgatagtgagctttcatgagatctgatggttttataagtgcctggcatttcccctactggctctcattctcactcttgccgccctgtgaagaggtgccttccaccgtgattgttaagtttcctgaggccttcccagccatgtggaactgtgagtcgaaaattaaacctcttttataattacccagtctcgggtatttcttcatagcagtgtgagaatggattaatacctggatgcatgcatgtttgtgtaacaaacaggtcttttggcttatctagtaagta

SEQ ID NO: 485665 - DNA, 1468 bp, Homo sapiens
atatcagaataaattcacacgtctagtgactttagttacatactcgtgtaggtggcgatcgtactaattttctgatccgccatccatagtgatgccgttcatgcacgttcacattcggaaggtcctcacccatgtacacgcaatttgcgctgcatggcgagtctagcgcgaatcaaccatttagctggtgacccgcaaggtgttccatcggacacttcacgtcaggatcggctcacactttgctcactatctgtctgtcatccggtcacatctaagtagtttgcactctaactatccgaaagcatgcactgtgggcttgccaacacgtcgcgccgacctgtactactggcatatatggtgagaattgtggatgaagagttattgctggtatgtctccagctattgatgagggtcaacagtgtgccccattggaaaaactagaacttgtcttggagcgggactggcggaagtcatattcaatgagctatctcagtttgagcctgaggttaccagcaaaaggtggcccaagtgaggagatgactgtgcctctcaataaagtatacaggtttcaaaaaagatcgggagttactatgatgaaataataacggcggcggtggcaccccatgccggggttccgataaatattctaccgagataggactgacgtccaggtgacttaaccagggacacaccttaagtggctcttacacctagcgcgccgtggaacaaagatgtacggccggtataggactgcatcctagcacgggcaactgctacaccagcgaccagttcgggcagcacttctgtcacggcgaccaggacagccagtagacggcacaccaccttgcgacacaaaaagtcaaccacggcagcatacttcacccgtcctactatctttttttccactcccacaccacacaccaacacaactacgcaaatcccaccaacacacacaacaaccaacaacacaacacaacataccagcaaccaatccacaaaaccgacaaccccctcccatcacaattcacaccaactacaccaccacctacctcaaccacaacgctcaccagacgaaagcacacggggaccaggcacagagggccaaagaagagagagcaagagaacgaacaagacaagcagcaagagcgaggaccgagcaagcagccacaaccaaacactagcagcaaacaggaagaggcacagacgacagcgagcaaaacaagcaggacagagaaaaagagagacacagcgaaacagaaagcgaacgcagcacgaagactcagagagaccacagacagacagagggacacacaataagccagcaaacagacagaaggaacacacaagaagagacacaccgacagagagagcagagaagaggagaaggagagaggcgaaacccaggacacgaccagaggggagaaagagagaagagaacaggaaaaaggcaagacagcagagcagacgg

SEQ ID NO: 485666 - DNA, 191 bp, Homo sapiens
gatgagccggtccgatggttgcagggaacttcctctctgtctccttattcgaattgtcatgcctattgcaaatccctgtgcagaattcacatctttactcacattccttaaaattttctacgaccacaaaaggctcttggagtctcagcttggttaaaatcgcccctcttgtagtgacgaacaaacatagg

SEQ ID NO: 485667 - DNA, 210 bp, Homo sapiens
actcatctcgacagttgtgcattggactcacttttaagacgtcgatcttatctttaaccagctattacaatcaaaagtcaacgtagacattatattctctccaagtaccaaaaaaagaataaaattggatgtatttgaaaaaaaaatatttgaatagaattaataaaattcttagggaggaggaagcagagaaggaaaaaaaggagaaac

SEQ ID NO: 485668 - DNA, 586 bp, Homo sapiens
taaacgacggcagtgtaatcgacggcagttgtaacactgagggtcagcagtaaatgctggtcattcgagagtgtgggtcacacgccgagagagcagactgcacacgcgaaggatcagaccggagagtacgaggagagccttccagcgtgtgtgagcgaacaggtgatggcaagatcctgtacaggcagtgcggggatgtgatgagggccctggtccaataaccctaccaaggccgaggtgctcaaggtcctggggaaccccaagcgtgatgagatgaatgtgacggtgctggactttgagcacttactgcccatgctgcatacaggtggccaggaacaaggaccagggcacctatgaggattatgtcgaaggacttcgggtgttggacaaggacggaactggcaccgtcatgggtgctgaaatccggcatgtacttgtcacactgggtgaaaagatgacagaggcagaagtagagatgctggtgccagggcatgaggacagcaatggttgtatcaactatgaagagctcgtccgcatggagatgactggctgatagacttcccagtctccccagagtccgtgcctt

SEQ ID NO: 485669 - DNA, 551 bp, Homo sapiens
gaattaacagaccgtgagataatataatgcctagttatcagcaataagtacaccagttcttattaaattaggagtatgtaattctaaattaattgattctctcatggtacatattatatgcaaggttacaaaaaaaaagtcaagggttaatgattttttagctcaaccaagctaaaagatgtgaacagagaaatggaactcaaagagcaacttgaagatacaaagctctgtgtaacagataatgtctaataatattcgtcaatttaccaatatctgtacttatattaacatgttctatcattttcctaataatttaaaagtcgattcacaaaaatatatatatatacgggtagtgccagaaaatggaatacattactaaatggggtcgagtagatgaatctcccatgaagaagaattccaaataatttatgaactcagccctcaaggatatggagcagaactgcaaacatcgctagatgtgagcagaatagtgactaccttccaagcattacatatggaacgggggaccataatatgtagcggaaaatctg

SEQ ID NO: 485670 - DNA, 902 bp, Homo sapiens
agcggggtcgcgcgccttctagaccgcccttcccctggcggctacgtgccggagggagcggaggcgagcgggagtcgggctccatggagagcggcggacaactgggcagaggcggagctttcactctcgagcaccactgagttccaagtgaccctgcagctatgcgtcaccgtcacctgcccgcagtcagagagcaggccgtcagagcccctgggacctagacacgtgcctcgaaacgcacactcccagaaccagaactagacgctcccagggcagcttccctagcggcccgcagacagtcagcccccatcagtacaccacactatcccccacgtgacagtgggatagggttgagcagcgcccagagagcccccaccaactgtgcagagcatggcccgggaagccacgacaagacacgccaatagcacgcccagagacggccacagatccattgatacttgaataggaaaggatttcccaaatgttccgcccaaactcacagaaccgcacagggaaaccaccttaaccccaaccgcggcgaacacggggccccatctcaagagcgaaaagccgaggtgccgtagtcacatggccccatcgctgcccgatctcccagggacatcccgacgtccacgggcgagggtgaccgtcaagtgtgatgaccttgccgttgagcatggcagagctacgacacagcgcccctggcgtttatacccccgaggaaaccaccagacattgagaaactttagcaatccccctacggacagcaggcacgggcaaaccttggggaccaacccccgaggcaccgcaggcgtacaaccacttgagaccaggatgtgaccattgcacctgagcgaacagggggagcagtctctcacagtggaacggggacaggagcgctg

SEQ ID NO: 485671 - DNA, 929 bp, Homo sapiens
gtttttgagacggagtttgcactgtcacccaggctggagtgcagtggcttggtctcggctcactgcaagctccgcctcctgggttcgcgccattctcttgcctcagcctcctgagtagctgggactacaggtgcccaccattatgcctggctaatttttgtatttttagtagagacggggtttcgccttgttagccaggatggtctcaatctcctgacttcgtgatccgacctcctcggcctcccaaagtgctgggattacaggcgtgaggccaccgcgcccggcatgttattgatatctagcataaatgtggatatagcagtgacgaataggctagggttcttgtccgctttgatgttcttgtccttgcctcatgatcatcatatcatagattccgacaagtgagatgctatgaatacaaaggtgggtgctatgtcaatagccgtatgataggtacgtgaggagaacaaaggttgggatcacgttcatgggaatacgtgcacagtctttgagggacattacggtctcctgaatcgctttattagcagacactgggaggaaactacagcattggacttacgaaacacagaatgtactcgagaagcaccgcgacgtcagacccgggagcgatgcgtcacaatgacatgcgccaggatcacagggaggcacagcttccgcgaacagctagagcaccagcggagcagtagggcctagcaggcgcaacgggaaagcaagagaagtataaccaacgcgggctggacatgacaagggcaggagacccgaaaggcgagaaccagaaagccaccgtcgacacggggcgaagagacataagtaagcggcaatgaaggagacaagatgagcgaacagaaaatagaaagtggagacccacgtgcccggcagagtcaaaacaatgcaggacgagcaaaggg

SEQ ID NO: 485672 - DNA, 379 bp, Homo sapiens
  misc_feature (48)..(48): n is a, c, g, or t
  misc_feature (76)..(76): n is a, c, g, or t
  misc_feature (112)..(112): n is a, c, g, or t
  misc_feature (122)..(122): n is a, c, g, or t
  misc_feature (139)..(139): n is a, c, g, or t
gtgttatacccatacaatggaatattattcagcccataaaaaggaaanccttcctacatactacatcatggatgancctttcagacattaagtaaatcacaaaaggacaatnctatatgaancccactgatgtgaggtncctagactagtgagattcatagagacaaagtagaacaaagattacgttttgtcacagggggcaggagggaatgggaatttattgtttaaggggcacagagattagtgtgggatcatgaaaaagttccggaggtgcatagtggtgactggtacatacaacgaatgtatttaatgcctttaaactgtaacttcaaaatggttaaaatttaaatcttacgtacattttgccacagtaaatttt

SEQ ID NO: 485673 - DNA, 107 bp, Homo sapiens
cagcagaatctgaattataagtgacagacatggaggcagaagaagtaaactctgctagatttcagctgtgctcaggtcataatagttttttgaggtttggaatttac

SEQ ID NO: 485674 - DNA, 822 bp, Homo sapiens
  misc_feature (104)..(104): n is a, c, g, or t
  misc_feature (133)..(133): n is a, c, g, or t
  misc_feature (147)..(147): n is a, c, g, or t
  misc_feature (203)..(203): n is a, c, g, or t
gttgttcctgtctggttaaatagaaacataaatgaattacttatgtgccccagtggcttcataatgctgagagcaaagtcaattattctagcaggttctagaanactttatcatatcatggggttcaatgaanatatcaaatcatanatataataatcaaatctgaaagtgaatctaagtttcaaagacctcaaaagccagtntttaggaagctctttttcagatagagacaagggattatttcgacttcttgtctctgttgtctggcgcagttgtccggaacacagcagatgttccacatgcacagtcgcatcctatgtatgtgtgtttcttttccggcaaggactggaggtcctaagctttgtttatttggtgagccagtgcccaaatgagcaggggaatcttggcacagtcacctacacactcatttcagtgctctggccccttatccaagctagtcaaagtgtggtctatggtttttcattgcaagggatccccgggtgaatcttgtgtctgtcaaaggaggagaagcactgccctcaaaatatagaaaaggtgaactaatttatccaggcagcctggctatttatttatgtatttatttatcttgttgacgggaagattcaaattgacatacacaatcaccctcataaggatttcaggtaaaaaacagacaaagatttagatatcagatgtgttttacaattactgcaccagtctttttctacagaatctagtagtatatttccaatagatctaggtgaaaatttctatctcatgagccttctgtcagtatttttaaaattggatactctattagtg

SEQ ID NO: 485675 - DNA, 1138 bp, Homo sapiens
tgggcttgactcaggatttaaaaactgaaacggtgaaggtgacagcagtcggtgggagcgagcatcccccaaagtttcacaagtgtgtggccgaggcactagtgaatggcacattgggtccggttctctaaatagtcatgccaaatagtgacaactgcatggtgtacaggaagttccctgtgccatcctataagaagcccaccccaggtctactcgtcaaaaggagaagtggcccaggccgtcacaccacaagatccaaacaccaggggcaggaggaaaggcagtggcgtaaacgggtgcctaacagtaagtgttaacgtgacaaagagttataaaaaactacatcaccggcccatataaaaacaagcactagtacgcaagaactaacgggcggcctagcagactgtccggcaacagttgcaatggacgacccatacgacgaggggcccacacaacagaatataacacgccacgaagataatgacaagagacgcacccacacaagagacaactactgccgccacacgacgcctacgaacaaccacggcgcccaacgcagcagggaacacccatcccccacgtctgagcgaccagccgggcaggcgcaagcgcaaagcagacacaacccacagcagaggggccgcaacaaccagaccccaagggaccaacaacagacacagacgcacacttaggaaccaaacaaaacccaccaggacgcgccgacaagctaaacacccacagcaggccaccaccgcacgcccctcgaccaccaaccacaccccaccacacaaaacagcagagggagaggccggcgcagtcaccactcgcgaaggaaagagatcacacacaaacagcagcagacagagggcagggagccgcccaaaaggtagcgatacacgaacgcagcgggccaccaccgccgcgacgctacagaacgatccagggaggccgacacaacaagaggtgaggctggaccgcccgcacgcacaacaagcgaagtgagggaacgtagcagcaacaacgagacacgagaaacacagacaaaacagcgacagacacggaagggacggagccgccgtgcagctaatgcggaagacgcacagtgacgccaggccggaaccgcggcggcgacaccaaa

SEQ ID NO: 485676 - DNA, 439 bp, Homo sapiens
cggggtgatggttcctaccaggtttaggcgtgtcctctgcttttagaaagaggagagaagagcgggaaggactgcgtcttatggctcgagtgccatctcaacctcaacacaacataccaggtagacttctaaggtttttcagcctatctcctgactcctcaatgccactcctgtgcccacccggactctggtcatgctgccctgaacacactcccaggactggatgccttcgccacctgtagcttgcccagacccagcgcctcgagcatacatacacagcattcacgccgtgcttacacgccctcttgtctgagtcccactactcagtcctcattctgcgtttagccatactgcctgcgactacagctttcctctctcttcctccatccccccactctctccccttcactacttcccactcttttcacctctccagccg

SEQ ID NO: 485677 - DNA, 494 bp, Homo sapiens
gcatattctgacatctcaaattacggtgtctccattgactgtaccttcgaccggctgctaagcttatccaagcagattagttaatgcaaaataaacggttacttctatagaacagttttactcttggctaccatctttccaatcactttgcatccagccgcctccgtttgctgtgggaagagtccagctttgcctttcagctttcgctttctctgagctgcactgctctctggggtaatcgttgagggtctggcccgagtctttccactactctgcttcctatacgtggctttctgaggcctatgaagaggatacaccggcccccttctgtatagcaggtttcgtcagtgtctccgaggcaatagactgggaaggccttttgttagtaattctctttttctttcctggagggagggcagctcttcccagcggactttttagggatcttcactttattctctttcaaagacgtcttcatggggggaactttgagg

SEQ ID NO: 485678 - DNA, 238 bp, Homo sapiens
ggggcccccccccccccctttttggggggcccccggcctttttccccggggggggggggggtttgggggggcccctttttttttttgggggggcccccccccccctttcaaaaccccaaaaagggggggcccccccttttttcccccggggggggggggtttttttcccccccccccccttttggggggggggccccccccccccttttccccttaaggggggggtttttttttttta

SEQ ID NO: 485679 - DNA, 252 bp, Homo sapiens
  misc_feature (77)..(77): n is a, c, g, or t
  misc_feature (160)..(160): n is a, c, g, or t
  misc_feature (187)..(187): n is a, c, g, or t
ctcctcctccttcctccttcctcctccgtcctcctcctcttcctcttcctcttcctcctcctcttctccttctcctncttcttttccttcttcttctttctgggacagggtctcattctttctgcccaggttggagtataccggcacgatcatagcccgntgtagactcaaacttctgacctcaagnaatcctcccttcttggcctcccaaagtgctggggattagaggcatgagccactgcacctgggcag

SEQ ID NO: 485680 - DNA, 504 bp, Homo sapiens
  misc_feature (143)..(143): n is a, c, g, or t
ggcacgagcaacatcaaggctgcctgggggaagattggtggccatggtgctgaatatggagctgaagccctggaaaggatgtttgctagcttccccaccaccaagacctacttccctcactttgatgtaagccacggctctgnccaggtcaagggtcacggcaagaaggtcgccgatgctctggccaatgctgcaggccacctcgatgacctgcccggtgccctgtctgctctgagcgacctgcatgcccacaagctgcgtgtggatcccgtcaacttcaagctcctgagccactgcctgctggtgaccttggctagccaccaccctgccgatttcacccccgcggtgcatgcctctctggacaaattccttgcctctgtgagcaccgtgctgacctccaagtaccgttaagctgccttctgcggggcttgccttcttgccatgcccttcttctctcccttgcacctgtacctcttggtctttgaataaagcctgagtaggaag

SEQ ID NO: 485681 - DNA, 304 bp, Homo sapiens
gggtcgactactactactaaattcgcggccgcgtcgacaagaaagaaagaaaaaagaaagatagagaaagaaagagaaagaaagaaaaaaaagacacagaaagaaagaaagagaaaagcccttttaaaaactgttagaattttttaactaatattcaaaaggaaatgcaacttaaattaaaaataagtatttgtataatcagctcttcggcaaaaagggaaaattggctggctaaatcctagacattggctaataattttataaaagagataaatcagaaaaaaatgtcgacgcggccgcaaat

SEQ ID NO: 485682 - DNA, 334 bp, Homo sapiens
  misc_feature (116)..(116): n is a, c, g, or t
  misc_feature (140)..(140): n is a, c, g, or t
  misc_feature (297)..(297): n is a, c, g, or t
agaagctcgtgatcactgaccgtggtgctggcttgtcgaaatcggcattgctagcgctctgttcgtgctgcctgacacgccgtgtcgcgtaagattcctttcttcgagactcgttnctgctcccttccctcgtccttccntccccgacaggtcacataacagctgcatcattgaccgcacagcgccatctctccctgagaataaagccgatagccaccctcctccggctccgagcctgcttctgccacacctcgctctcagttctctccacatttccatagagaccgtgtggttatngttcacccgggccccccgtcttcctccctgtcccccc

SEQ ID NO: 485683 - DNA, 1684 bp, Homo sapiens
  misc_feature (898)..(898): n is a, c, g, or t
  misc_feature (991)..(991): n is a, c, g, or t
  misc_feature (1027)..(1027): n is a, c, g, or t
  misc_feature (1398)..(1398): n is a, c, g, or t
ttagttttgtcttgttcgttttgtgtttttttatgatctgtgttctgtttcgtgtgtcttttgcttgttttcagtaaactaacaatactacaagaaaaagatgacgagaacagcagacacatatcatataagactatgatgtgtaggtattcctactgtcatcacaggctgcttgctggtacttatcagtagattatccgtccgatgcaggtgttgcctacacatgtttgttcgtgtgttgtggatatactccctctggtgtggttcttcctatagtatatttcattcctttgtgacgttgcttgtcaatcctattttctcccctcgaggtgctccagtgtgtggttccccccacttcccccccttgtgtttgttgttcccgcgttggggaaaggtgtttttcgggcgccttttcataacacacgtgggtggagtgtaaaccccgtggtcttgctccttgcccctgttcttccttgtgcctcctgcttggttgtggttagccctcatagaccctgtgcttttctgggcggacaacattttctagggatcccaagatcttcctcccgaggggcaaaaaacacaaagtcctctttcgtgtgagccataagaagcgctgcgccccctgggagaacaccctgtgcgggcgaaagatgtctttttgcggggaggtcttccccagagtcagttgatggccgccctctgtcccccctcctctccagtgcttgatgcacattccttgggggatttcctccattgtgttaatgggtgggataagacagaatggggtcccgccaaaaaactgtcccaaggcaatgttatgagtggtcgcagacacactcccccgcaacagacacggtggcctcccccctgttctcacaagagccgctttagggagganttcctcttttacccacccagtctgttctatgtggagtctgttctttctgtgatttctccgacccctgtcacagaccactcacactgtctctcngtctttagcaggcgctatctcctctatatataggangttacccattggaggttacgacagtagtttggcgattatgtgtgtctacacggtgtggacaggtacggcggaaacacccaagtgggaagaatagacaaaggcgccacaggggggctagtctcgcggcccccaaggaaacactcgtgccctctgtgtggcgagaagaacaacccccgggggcgtccctgtgggcgcaaaatgcagacctccacgcagggtacgccacgaactccggagtccttcctgtagtcggcgacccatccacgcaagactctggatggcccgtccacggtgtggagtcactgggactcacagtctcacaagtgtgtgtcaccgacagagagtgtgaggagatagggtttctttggganatatatgtttgtgcacgtcccgttgtgatatatcgccgggctcccttaaacgcgtcctgtttaccgtgaatggatgtcccgtgaactgacgtgttcgtatagagagggcgtgtgtagaagtatgttaagaagagtccccgtgcttctgtgttctagagcccgtcacttgtagtccacttttggagagaactttctcacttagaatctcatggggtctcctgttgtagtttaggacccgtggtgtcatagagagagtccaaatatgaacccgtctagtgttacgttt

SEQ ID NO: 485684 - DNA, 424 bp, Homo sapiens
ccggagtccgcccgcaaaaagggggacggcgttgttcggggaagaagaccctctgtgaaagaaagagaaagaaaaaagggccccaccagaactccccgcgttctggcgcagcgcggagaggaagagaaaaggtgtatacaccgtgccccacgtagttttcgcggcgccaaattttttctccccgcaaaaatatacacacgaccacgggcgatgtctttcttcgggaaacaacccccgcggggaacaacaaagaaatcatatttttttctcgacgcaaaagtagtgtcccgcgagaaacgcccactctttttttgacacaatgtgtcaactgaaggttttaacccccccccccggtaaaacatttaacccaacatttttttttttttttgttttttttttttggaagggaaaggggggggtttta

SEQ ID NO: 485685 - DNA, 296 bp, Homo sapiens
  misc_feature (78)..(78): n is a, c, g, or t
  misc_feature (102)..(102): n is a, c, g, or t
  misc_feature (259)..(259): n is a, c, g, or t
aaaaacatcatgataacatgcataaacagacaacgccgatgcactcgattagatacaatatctatagaaaactcgttnctgctcccttccctcgtccttccntccccgacaggtcacataacagctgcatcattgaccgcacagcgccatctctccctgagaataaagccgatagccaccctcctccggctccgagcctgcttctgccacacctcgctctcagttctctccacatttccatagagaccgtgtggttatngttcacccgggccccccgtcttcctccctgtcccccc

SEQ ID NO: 485686 - DNA, 820 bp, Homo sapiens
ttcaattggaagattatttggcctctttctgacaatgcccagctgggtcccagccttacagagaagctatgtctggaattagcacacacaagcattcggaatctgactctgagtaacagccagctgtccaccaccagaaatacaactttattgggactaaagtggacaaatctgactaacctcaacctttcctacagacactcacatgtggacgccaaccaccccttcgcctggataacacagcctcactcacatcagctcacacactaccataaaccacgctcagcacccacaataacatcatcccaccccccaccagctccgacccctcaaccccacccccaccacctccaccccaccctctttcactcgccctcacctcatagacgaccgtcccccccatcatccgatgacccccagtaccgatcccgccacaccagccggctgtaaaccaatcaccgtgggcccgcacgcgttctacatccatacataaaggcaagacaacctcccccccccgcccctgcccctaggatcagatcctgaaaccaaacaacttgaccccaatgcacctgcgcccgatgacgtccccccccacttctcttctctgccctcccctgcacccgggtttgaccgtacacaccaggcatgcagcgtgccccacccagtttgaaggtccacacccagcatccggcgacgtacatcgccagcgcccccgccacctatgtccgcgctatgtccaccctgacacaacacatcttttatcgcacgactttacaactcccaccccgcctccgcgccgactaaatagccacctcccccg

SEQ ID NO: 485687 - DNA, 129 bp, Homo sapiens
accagcacgagtggaatcccatagaaatgaggatgtggaacatagcagtaaggcccctgacagcaaggcacggactagatggttaaacaaggaccccgtgattactctttgtgtgtgtccaagacacaa

SEQ ID NO: 485688 - DNA, 150 bp, Homo sapiens
tggactatttggagaagcatccggaagaatttcgatgaggctgccaacgtttttgaattttaactgctgaagagaaccagctacagttgattgtctgcttacacaactgggggcctagctatgtgacttggacatatggtggttctgact

SEQ ID NO: 485689 - DNA, 190 bp, Homo sapiens
  misc_feature (153)..(153): n is a, c, g, or t
tcgcaacgcgactaggattaacatggtaagattaggttttatagaaaggaaatccatttgactgctccaacaattggattttttttttaaagagtaataaactaggagtggactcagttctctccacatttccatagagaccgtgtggttatngttcacccgggccccccgtcttcctccctgtcccccc

SEQ ID NO: 485690 - DNA, 918 bp, Homo sapiens
  misc_feature (11)..(11): n is a, c, g, or t
  misc_feature (123)..(123): n is a, c, g, or t
  misc_feature (143)..(143): n is a, c, g, or t
  misc_feature (165)..(165): n is a, c, g, or t
  misc_feature (175)..(175): n is a, c, g, or t
  misc_feature (203)..(203): n is a, c, g, or t
  misc_feature (205)..(205): n is a, c, g, or t
  misc_feature (223)..(223): n is a, c, g, or t
  misc_feature (237)..(237): n is a, c, g, or t
  misc_feature (240)..(240): n is a, c, g, or t
  misc_feature (242)..(242): n is a, c, g, or t
  misc_feature (248)..(248): n is a, c, g, or t
  misc_feature (250)..(252): n is a, c, g, or t
  misc_feature (254)..(254): n is a, c, g, or t
  misc_feature (261)..(261): n is a, c, g, or t
  misc_feature (270)..(270): n is a, c, g, or t
  misc_feature (279)..(279): n is a, c, g, or t
  misc_feature (298)..(298): n is a, c, g, or t
  misc_feature (306)..(306): n is a, c, g, or t
  misc_feature (316)..(317): n is a, c, g, or t
  misc_feature (332)..(332): n is a, c, g, or t
  misc_feature (337)..(337): n is a, c, g, or t
  misc_feature (357)..(357): n is a, c, g, or t
  misc_feature (366)..(366): n is a, c, g, or t
  misc_feature (368)..(368): n is a, c, g, or t
  misc_feature (374)..(374): n is a, c, g, or t
  misc_feature (376)..(376): n is a, c, g, or t
  misc_feature (390)..(390): n is a, c, g, or t
  misc_feature (394)..(394): n is a, c, g, or t
  misc_feature (404)..(407): n is a, c, g, or t
  misc_feature (413)..(413): n is a, c, g, or t
  misc_feature (417)..(417): n is a, c, g, or t
  misc_feature (425)..(425): n is a, c, g, or t
  misc_feature (430)..(430): n is a, c, g, or t
  misc_feature (440)..(440): n is a, c, g, or t
  misc_feature (458)..(459): n is a, c, g, or t
  misc_feature (462)..(462): n is a, c, g, or t
  misc_feature (471)..(471): n is a, c, g, or t
  misc_feature (498)..(498): n is a, c, g, or t
  misc_feature (504)..(504): n is a, c, g, or t
  misc_feature (514)..(514): n is a, c, g, or t
  misc_feature (539)..(539): n is a, c, g, or t
  misc_feature (546)..(546): n is a, c, g, or t
  misc_feature (551)..(551): n is a, c, g, or t
  misc_feature (571)..(571): n is a, c, g, or t
  misc_feature (583)..(583): n is a, c, g, or t
  misc_feature (596)..(597): n is a, c, g, or t
  misc_feature (678)..(678): n is a, c, g, or t
  misc_feature (747)..(747): n is a, c, g, or t
  misc_feature (788)..(788): n is a, c, g, or t
  misc_feature (903)..(903): n is a, c, g, or t
actttttatcncttcaatgacatgttatttttaaacagcagcggaagtcttaaacacctttacatgcttcgaaatactgttgatgatctgattttcaatactgtattgggtgccattaaaganaccattgttctttgaatcantctctgtgttgctgtgggaaanacggtaaggnagaagcactagaatcatggaggcaaatnantgaaacaatgtgatactnaaataatgctggantcnanaataancnnntnaaatgtngaataaaanatctgaagnatcgctccaatcagtcacngttactangctgcttttnnctgtgcttgcctccntttcntgccgtccttctccctttgnccccttcgncntccctncncccccggcctttcncccntgcccccccnnnngttccntttncgccggtngcggntccttctgtnctttcccagttttttttnncgnggttttctnttcctcttgggttggtatgtgccagtnttgatnctccacatcngcacactttagttcttgtgattgtnctttttngatanacatctcagggacattagtnccaccgactggnttgtgcacatttnngggatggggaaacatcttttcaactttttcagtaggtgttttaacggcgactcctgcgggcttgggagagtcatcagtgtnctcgatttcgcttccctcggtcccgtccgcgtcacttttcactgtgttcttcccgaagctgcccttgtnttgtggtggcggcacaggaagtgggcctggggatgcgtatncccggatgaggtcgtcgtcctcctgctcctcctctgaactaaaaggaggggtcctacacaaatcaacaccgagataggggcgctgttttcgtaacgctttaggatttataatatnaagagatgtgcctct

SEQ ID NO: 485691 - DNA, 414 bp, Homo sapiens
caacagctgacagagctgtaccgtgacatttcccagcaccttcgggatgaatcaggcaacagctactctcctgaagagtacgcgctgcaacaggctgccgatgggaccattttccttgtgccccgggggaccaaaatggaggccacagacttagctggcccaaaggggtggaactgctgatgggatttccttcattcccttttgataaaggtactcccccaccctgagtcccagaaggagctgagttttttagaccaaaaaaggatgcccatggccccaagtgtttggaagttcccaggtgtgttcaaaaaggcttgccctgagggagggctggaatctgttttccctgactcggctccccaggtctttagccccccccttgtttaagctttggtttataaagtgcgctcccga

SEQ ID NO: 485692 - DNA, 717 bp, Homo sapiens
  misc_feature (433)..(433): n is a, c, g, or t
gctgattctagctacgaccttggtctcaaatctccctaataatttcaagtttaaaaagcctctgtctacctagaggacagaaaactaacttttatcaagaacctatggcaacccatatttctaggcttgggataatatcatcaggtcctattttcatcaactgacacctttatgatagctcaggatcactgccttgattgctgcccctgagtcatttgatttctctcctggctatttgtgaaactcccaaggtgcccgcttatactcttagaaaaaaagtcttgtgtttccctctctgacctcctgccatctgccaggcaagaccacaactgctgatgtctcttgggagatcacagctcctctgggtgaaactgtcctatgcccgtggtccccattgctcacaaaattgtagctacagggtttcactgtggtntggcaggatggactcgatctcctgacctcatgatcctccccctttggcctcccaaagtgctgggattacaggcatgagccgctgcacccggctattctttccattctttaagttgaggtatcgaaggccctgtgttagaaatgcaacaaacagtttcttattaatgaaaatcttatcataatctattttttaactcttattttcaagttcaggggtagaaagtgcagtttatgtaggtaaacttgtttcactgaagagttgctgtccgaattgttcatcaccca

SEQ ID NO: 485693 - DNA, 753 bp, Homo sapiens
agcggggggtgaagctgggccgccttcgggggcttgagcttcattgagggtcgtggtccagcgcgtggtactgactggatggcggaagccccacggcggatggtcggacgccccttgctggtgctgggttgcccgcggctgtgtggctgtgcagatcttggcctgtgcggggcctgaccagcattgcctgcgatcatccactgtcggcccgtggtgcctgcgtgcctggtgtggacctcgtgcactttgatcaggcagcttgtggtctctcagtcgcatagagtggctattacaaggagccttgtgaagcgttcaacacgatctatcattgaatcctgatttctgggccttttaatggatgaacgccccaatacctcaactcacctagcaacggcggacggtgcagcataccgacggcgtgctcccccgttggggagcccgtctcgtgcgcggccctgacccgacgagtggttcgagggttgctctgcacctgctggttctttgctggcctgactctcgtctgtcgaacggggttacaccctgtgtcgtgcgctgggcccccacttgtgcaccatgtaacaggaatccttcttgtggcttgacctttgcgtcgtaccttcgttggcttgcttgtgttggatgtcttcatgagatggacctgggacccgtggtccctggaggtctcggtgtggtccatttagcccccttgcggggattccgggctggttttctcccgttcccttccttctctgg

SEQ ID NO: 485694 - DNA, 928 bp, Homo sapiens
gggacatgctgagaactgacggacaactggggacgcagtgacggctgacaactgacggtagaccgacacgacacgaggaccagaacggtggggacggacacgaggacggccggaccgaccacgacacggtgactggtgacggacacgacggactggacgctgacgatgaggcagctgagctcagctacgggcaagcgggcagctgcagatgatgaggatgacgatgatcgataccaagaagcagaagaccgacgaggatgactacgacagcaaaaaaggaacaagttccaaactaaaaaaaaaaaacggccgccgagaacctattcaccctcccattcccgtctcagaaatctacaacgtggatcacccttcgagctagagaggcccgcaccagacccacacgtgggccagatgccaaccgagagatgacacgcgactctcacaacaggccaaaccgcaaaaccatgacgcaattgtgcaacccacggagccaaacaaacaaaaagaaaaccaacacaaattatccacagagcccccctacatattcaatctccttcaacacataccatcttacacacccacgacacaacttaacaccacacgctactactacaacatatcacacaaactctaactactacacacgacacacacaactagcaaccacacactcccaccaccacaacacacgatacacataataaatacataccgagacactcgcccccaacaacccacacagacaaccatatccagaaacacacgataaaacacctaatgtcacccataatattaccataacacaatctccaccatatgactatacaatctatgaccccacgagactcccactatactacactacatccaaaacacggcaaacaacaaaacacacaccccaacgatcacaacaccaacgcaacaacaa

SEQ ID NO: 485695 - DNA, 137 bp, Homo sapiens
ccaagctgattgcctccatagaacgactgtccatgacaagatatctacctctttcctggcaattgaaaatggttaagtattgagagtagttggatggtatgtgaaataaataagagagtgatattggtggtataagt

SEQ ID NO: 485696 - DNA, 159 bp, Homo sapiens
gactagataggtaatgacagagacgtggtttgatgtcaaaatacaggtaccttctacacactgatgacttacagtgagagtagtgacagaattggaaccatctttctttctttttttttggcagggtcttgctctgcactccagcctggcgacagagtg

SEQ ID NO: 485697 - DNA, 741 bp, Homo sapiens
cggaggagtcgtgttgtgcctgaagagcgccagctgtgctcctgggcaccgcgcagtccgcccacgcggctcctggccagagcacccctaggaccccctgccccaagtcgcagcatgaactacctgcggcgccgcctgtcggacagcaactttatgtgcaatctgccaaatgggtacagtgacagacctgcagcgtccgcaagccgggccacaacctggcgcctcgattggaggacatacctgatagcacccgagctacacaatgaccgagaccccggacaaagggccgagacgataggccaagcgaagaaggttgaaaggatgagaagaaacgccgacgcgagggcaaggctaatcgggcgagagcatcaacgcccagaactgagtaccaccagagacatgaagaagcgacccaaaaaagccacctaggcgaagccacaaacagacaagagaggacacatgaacacagcaaagagaaccacccacacggaacggggcagaccgcgaagcaagcaggatacccgctgtggagggagagacacccgagtagacaccaccgagacgtacaccgcacaggaaatagaacccacagcagtccaccgataacgccatacagaaagtaatcccaccgagcacgtaacgcactatggacgaaacagaccatatgagcgaacacacagcgatgaggaccacaatacacagacccgagtatacctcaacaacatggcatggcacataccc

SEQ ID NO: 485698 - DNA, 128 bp, Homo sapiens
acacacagcgccattcaagaacgttgttcaatgcctcttcctaggaacattgctcctacagctaaacaacggctgcagatttggaaaccttggctacagcattgccaaacggtcagctccagtgcctc

SEQ ID NO: 485699 - DNA, 203 bp, Homo sapiens
ggggccccccccccgggggggggccccccccccccccctttgtggggggtttaaaaggggggggcccccttccctccctttcccccccccccgggggggggggggggggggggggcgccccccctccccccccccccctttacacctgttttcccggggggttatacccccccggggggcaaaaaaattttttttttttttta

SEQ ID NO: 485700 - DNA, 225 bp, Homo sapiens
  misc_feature (128)..(128): n is a, c, g, or t
  misc_feature (134)..(134): n is a, c, g, or t
  misc_feature (170)..(170): n is a, c, g, or t
tagtcgactagtgctgtaactgtgatagagttgtcgtgagatctggctgtttgaaagtgtgtggcccttcccctctgtcttcctgctggtccgggcctgtgagaccgagcgtctgttccccgctttgnctccgncatgatggtagacttccagaggtgttcccagaaacngagccagatgtcaccacactcctgaaacagggtggagaatttgtgagccaattca

SEQ ID NO: 485701 - DNA, 174 bp, Homo sapiens
aggcgaagctgttgggaggctggggttgaggcgcatgagcaggagttgtcctgttatagtggagtgctgtaggagccggtcagagggtgagtggggagcaggtgagcgagccaatgagtgcaggagggggcgtcgcgcggcgcagaggagcgccggggcagtgccgtggtggaa

SEQ ID NO: 485702 - DNA, 195 bp, Homo sapiens
agtccaacatgccagtggcccggagctgggtttgtcgcatatcttatgtgacccctgcggagcaccttcgagaaatctcgtctcgacctacgagctgaagctgatcggcgagtctgggctccggaacaaccgtgaggtctggagggtcaaatttaccctggaccaagatccgcaaggacgaccgggaactgctga

SEQ ID NO: 485703 - DNA, 605 bp, Homo sapiens
acgagtacagaggccatcctaaccaggggggccacgtctcaccggtgtatccttcacccatttttctggcacgtcatcctgccggtaaaccaatttaaatgtgtctggttacagtaaaccagctatgacaattaatactaaacaaatggaactagaacccattggaataggtatggaattggttttgccattttccatttgtaataaggatctaggggacccttattaaaaactcgttggaagaccatttcccttaaaaacaaagatgtgaagaatccagagaagatcaaggaccttatggcccagggcgaatttggtaatgcaggagctagaagcttggtactcccttaggaaatacagagctatgaaacaaggctataatccagataccaacaaaattaatggatcattactactttaattaagctatcagtgccagctgtgtatgtataccagatgtggtaaagtaattctaacttaaaaggggaagatatacttgtggtatcaaaatggagcataaggtggctgatactttctccgtatgaccagaagttgaaacctatttagttcagtagggcagcccagggatttttacacaacatgta

SEQ ID NO: 485704 - DNA, 393 bp, Homo sapiens
gccgtagctcatccaactctacaaaaaaaaaaaaaaaaaaaatgcccggtggtggtggtgtattgccttgttgtccccagctgttcaggtaggttgaggcgagaggatcgcttgacccaggaggctgaggctgctgtgagccatgatcatgccactgcactccagcctggacaacagagcaagaccctgtctcaaaaaaaaaaaaattcattaaaaatttatcccaaaatagttccaaagatatttataatttgcctcccaaaaccccgttgtttaacactttgcctgcagaattaggaaaaacaaagggactgtagggtgccgggattgcaaaacccaaacagatttgttccccttggatttttccgaaattatggttggggtttggggccc

SEQ ID NO: 485705 - DNA, 364 bp, Homo sapiens
tgaggagaaagcatgcgatactagtgttattagatgggagatgacttcactgtggactgagcctgaatactatctgtgtagatccgagaagcgtctttcggagtctggatcgggaagctttcctgtaactcattgacatggagtatagctgagttctactaaacatcagattctgctccagtcgtacaggatcatgccccaggaggccaatgtcctacattactgtgtggggaacgttcgtctcagcttcaaagctcgtgtatcttcgagtggcgttgaaccctagtctgatgctgggccactgtttgcataacatgtcctgggaacaactgtgaactgatagctcacagtgtctgttgtgctg

SEQ ID NO: 485706 - DNA, 778 bp, Homo sapiens
tgggagtggggcgtcaatatgaatttaaggattgttttccccagttctgtgaaaaaatgatggtaataataggaatacatcaaatctgtaaatggcttggggcaatatggtcatttaagaccaagtcatatgggttattcagttcataagcatgggatgtattctccgtttggctgtgtgtcatctgcgagtttcttctgtgcttggtagttcttttttacctcctgtggttcaatgtattcctaggtgctgtgtgtgtgcgtgtgtgtgtgtgtagctattataacatgggatggagttcttaatttggttctcagcttgacatgttactgggggtaatagaagagttccacggggtttcggtatactggattcggtactcctgaaacgtttacgtgaactcacttggtcacagtctacgagtcttctggaaggagtctcagggtttcctaggtataccagtcgtgtcctcgcaccacccggttttttttgactttggtcttttgcccaaattgcggactttctttttaacccttcttctcttctggcttgaatttctcggtggcttgggaacgtgcgcccattgctggtgttgccattagaccggtggggggcaggagctgccacattttcgggctttgttcaccccccttagcgggaagtcgtttccccgtttaaccccgcggcactgcaatgtgggggaggggtgtcagcaactctgggcgccaacataggggggggcttcccccacagccatctgttggcgggggctccacac

SEQ ID NO: 485707 - DNA, 186 bp, Homo sapiens
ctggtgtcatgcgtattgcctggtgtacctgcgttgctcacgaacggcttaggtcgatggccctgccctcagtgaggagacaggccatgcctttcacgtgcctgccgctcactgatttcatcctcaagtttccgcacagtgcccaccagaagtctgtccgacacgcctggcagaaggcagccctcc

SEQ ID NO: 485708 - DNA, 121 bp, Homo sapiens
cacgatcccctggagttcgccggataggccgagaaagtgttgtgggaagaacagtttcatttacgccgatcaatatgatagttgaaaatggcattttcggcgctaggtttggtctatggtt

SEQ ID NO: 485709 - DNA, 355 bp, Homo sapiens
cgatgtggtcttgtgcttcccctccctggccatgtgctccccgtgcgcgtgcctgccttttcctcccgcgccacctggtccgacgcgcaacccctgctcagcagtcacagaagcatgtgcccagccaccttggtctttttttgggagtcaggggagtaggagaattgtcttccgagaaaaatacataagctagtttcttgacctgtaaaggtgataatctttcatacttgaccaaaagttcccaaataaacttcccaaaccaattgttcaaaaagcttgtgattttttgtctcccccttcccaccttccatgccatggagcatgcccttgccagtggggcattaggtgtgggtac

SEQ ID NO: 485710 - DNA, 108 bp, Homo sapiens
taacgccacgatgattgcggcggcagcgcagctacgcgggccgcgtggtcgccagccaaaattcgacctcggtgccggcgggcgtgtcgcgccagtggcgagtgagca

SEQ ID NO: 485711 - DNA, 375 bp, Homo sapiens
gaaagaaagaaagaaagaaagaaaatactgatatagtaagtgctcaataaatattttttggataaattaacttgacaaagccaaatatatgaacaaaccacatacacttctaccgccctatacccaaaaagcccaaacaaagacctaaaaaaaaataaaaccgctaagaattctcaatgataacatccataaaaagagcaagaactgagaaagcaaaaccaactagaatagaagcaaaacctgtggatctgataaagacccaaatagaaaacctaacaatgaaaaataaaatcaacagcttacaaaactcaacagatgagctgtggtgctcagacccactgtggagagcataactgacaggccagccgcttgccc

SEQ ID NO: 485712 - DNA, 176 bp, Homo sapiens
  misc_feature (46)..(46): n is a, c, g, or t
ggcatcttcgggcttcgtgattactgcagcctcatccaaatggtcnatgctgcagcaaagcgctacaaatagaaagcctaccccgaaagcacattgcaacaggctgtactataggaaacttcagtgagacaaggatgccatcaaagctataggacatctttactggacaatattgc

SEQ ID NO: 485713 - DNA, 218 bp, Homo sapiens
atgaaagcacaaacgcttcgctgcctgtgctgaaggatggatgattgcatgggcatacggatggctggatggatcgatggattactggcaagatggatggctcaatgtttacatagatggatccccattcccatggcacacctaattaataggtgtacggacatgtggatgaacatcgaatgtggacttcaatatatggacccatgtactatgcacaa

SEQ ID NO: 485714 - DNA, 773 bp, Homo sapiens
agtgggcccgtacatctgctgctctgtgtcagccaatggagttcaagaacggctacatatctcctgtgaaggcacgaagccgatccacacgggagctaagtgccgtgccgggtccccatcgtgtgtgctatgaagatgccgaccatggtgcctcctgagcctcctgatgctgtgccccagctgagcgtgagcctgtgctgggggagggggagatggctgggtgcctgtgcggctgtgcgcttgcctgcactgtgtgcctgcctgtgtggtcgtggtgacccactgacctgtctcggtggacagctggcatcctggagagaaccgatgcctgcggagatgtagtgtgcaaggccttccagcggacggtcgtaccaaccttgaaaccgacacaatgctgtctgcgactcggacggagcaagccctacacagttgaccacggtggttggcacaagaccaggcgggctatcaaaagacggcaaggggacactgcattcgaaggctagccaacggttgccgcctcaccatttgactcgggtggcctgctgccagccaaatgcacgcacatataaaactttggttccaccaacatggattgggccacggacgggcgtttcttaccactgggtcgccggcgaatccagcgttcaagaacacgctacaccggttccaggcagcagagttgggcgacttccaacagcgcggaagacggggcccccctcatcccagaattgctggaggcaacattggtggaaggggcgatcctatcccagccc

SEQ ID NO: 485715 - DNA, 400 bp, Homo sapiens
  misc_feature (51)..(51): n is a, c, g, or t
caaagcacccaacttacacttaggagatttcaacttaacttgaccgctccnaaaaaaaaaaaaaaaaaaaaaaaaaaaatttttgggccgcccgggcccttggaaaaagttttttaagaaccatattcggttggggcgcgccggcgccccaggtagggtaaggttgacacattgcggcaaaaagcgtggtccccaaaggagaaaatccggcgccatgagacaaggtcgctggggttctctccaccaaataaaaaaaacgcgccggggggggaacaccggagggcggtctctggacacaaatcccaagaggggatgtcctgagagggtcatacacggggtttctatcaccggggaggtccaaacgcagacctcggatataaaataacccccggcgcgggca

SEQ ID NO: 485716 - DNA, 1081 bp, Homo sapiens
gggagtgtgggccgaagcagtgcgctgcggccgcggaagtatccccaggaacatccccaagaggagctggaaaaagcctcatccccaggctctgcagtctccacggaggaagaacctgatgctagtgaacgtcgttgcaggggccccctgggcatgggcctggcccagcacccgacatcctttctgggacctcccaggagtcaacgccaggaccctggggaaaggagtccacgagggactgaggcaacaaggcagggtcaggtggcccagtctggtgcccaagccccgaggcagggtcccagatcgctgtgcccactgtcgaaggcacttcctctgggctggagtggctactgtggcttcactacctcgaacggttgccagagcccggctgcccattgaccctgccactgagtgtggccgacgacttacgcctagtgcccccatatcttagacacgtagcagacggctcaggtccaatgcatgcatgccactccacagaacactggggacataaattaggacctggccaaccttcatggtgaggcacgaaggacttcgcagaaggacatgagggtagggcccttggggttcttagcattacttcgcagggtgcccaatatccaggcgatgcaaaatggcagagtacccaatacagacattaggatcgcacgaaaatcgccgacgaacggaacggcgtttccatggggcgagaacgaaagactggcaggactagtcagcaatgacgtgcatgttctttgccaggtcgggtgtgacacaaagcacccatacagcccaggtagcacccggggaaaggggaccccgggcaccccgtttaccatacttgccagcgaccaaccactgggtgggcgacccggagaaacgacattagagggaccgcacagggtgacgagaaccccagtgagcgttagggtatctggcccgcaagaaaaaacgcgagagagttggaagcacggatacggcgctggaaagaggcccacaagggaaaggggaagggaccagcaacgaccgaagaaggcactcactggacaggaccacccaagagacaccaaggggagacacg

SEQ ID NO: 485717 - DNA, 575 bp, Homo sapiens
  misc_feature (446)..(446): n is a, c, g, or t
gcacgagcttcataagaaaagtaccgaactcaatcatgaaactgagtaatttaacgatattaaaccttcaatgtaatgagcttgaaagcctaccggctggatttgttgaactgaaaaatctgcaattgctagacttgtcttcaaacaagttcatgcactacccagaagttattaactactgcaccaatcttttacaaatagacctatcatataataaaatccaaagcttaccacagtccactaagtacctagtaaagcttgcgaagatgaacctttctcataacaaactaaattttataggcgacttatcggaaatgacaaatttgaggacgctgaacctaagatataacagaatatcatcaattaagacaaatgcgtctaacttgcagaacctttttttaacagataatagaatttcgaactttgaagacactttgccgaaactnagagcccttgaaattcaagagaatccaatcacttctatatccttcaaagatttttatccaaaaaacatgacaagtttgacgttgaacaaggcacagttatcgagtattccggagaattactcaccaaac

SEQ ID NO: 485718 - DNA, 282 bp, Homo sapiens
  misc_feature (65)..(65): n is a, c, g, or t
  misc_feature (81)..(81): n is a, c, g, or t
  misc_feature (113)..(113): n is a, c, g, or t
gtaccccccgactagcccgacaggagacaggcaggagggctggggctgcactcctaccctcccancagaacgcaccccacngggagagctggtggtgcagccttcccctcccngtataagacactttgccaaggctctcccctctcgccccatccctgcttgcccgctcccacagcttcctgagggctaattctgggctagtcgggtctgccgggctagtcggggctgtcgggctagtcggggactgtcgggctagtcggggactgtcgggctagtcgggga

SEQ ID NO: 485719 - DNA, 225 bp, Homo sapiens
  misc_feature (17)..(17): n is a, c, g, or t
  misc_feature (20)..(20): n is a, c, g, or t
cctaaagtggaactgcncgnacccgtaggaggagaaaataataatgattctgctagtagtggcgaacgaacgtggatgaggctaaaccgtgtgcatgtgatacctggtaggggttgtgtgtgcggtgttgtgggccccaattggcggtgactaccatcatcgtgctcgtgtgttgttgttaggtgaagtggtttggaattacctgccggagcagttccacttagg

SEQ ID NO: 485720 - DNA, 476 bp, Homo sapiens
gccaaagcaggaggcacagccagtgggtgcactgaggcgcagcacttctgtgacattcctccaatgatgcgcaactccctactcgtgagaaaacgtgagaccaacccaaacggggagacattctgcagagtgaccagcgcttcaaaagtgtcaagtttatgaacgacacacagattgaggggctgcaacagattggaggagacaaagaagacagttcagctaaatgcagtgtgagatcctggaacaaaaggccaggaatggaaaaactcgtgatgttcaaattagggtaatcatttagttaatggtagtgtatcgaagttaaccttctgggtttgatcattgaactatggagccgggcatggttgtcacgcctgtaatcccagcactttgggaggctgaggtgggtggatcacttgagcccaggagtttgtaaccagcctgggtaaaaagacaaaaccccatctctactgaaaata

SEQ ID NO: 485721 - DNA, 95 bp, Homo sapiens
gggtttgactgggtcccgctacaaaccccaagtcaagcttaagttgaaatccttgtaagtctgtgctcttgcctctacctgcaggacaacacata

SEQ ID NO: 485722 - DNA, 697 bp, Homo sapiens
  misc_feature (18)..(18): n is a, c, g, or t
  misc_feature (24)..(24): n is a, c, g, or t
  misc_feature (26)..(26): n is a, c, g, or t
  misc_feature (107)..(107): n is a, c, g, or t
tgcacaccacatacacantcatancncaccacacaccacatacatcacatagcacacactacacaccacacacaccacatcaccaccacaccacacacgcatcacanacacatcatacactacacactacacaatcacataccacaccacacaccacatataccacataccacaccacacacacacacacaaacacacaccagtacattatttatcttctactttacactctaagggagggtttgacttagtctaattcactcaataaaatgaaaacatcctttcctgattcactcactcagtcgcctcatctttgtttgcatccccactgtgagcccatccgtttgcgtttgctgggactgagtgtagacagatatgcgggcagtgtgaggaaggcagggtgtgtctgggaaggttgtgctctagaactcaagatgcaaatcaggcccacctgtagaacttgctttacttattcatttggagatggatgtcatgctggcacccaggctgaagtgcagtggcacaatcatcacccctgcagcctccaaccagcctccagagtagcttagacaactggcgctagctacagtacctaggagtacagaagctaggaccaccaggagcagctatttttcgttatgttgttgttttttgttttacgtagagacaggtcttgttatgttgcagtgacatcctg

SEQ ID NO: 485723 - DNA, 116 bp, Homo sapiens
catgggcaatctgtaagggctgtgggggtggggggaccagcagactgggggcgggttgaatgtcagctgcttgaagagaggtccatggtgctagcactgaggccccgggagaactg

SEQ ID NO: 485724 - DNA, 153 bp, Homo sapiens
cggacgagattaccaataagataggcgatagaatgaacctggcgcatagatatagtacgcagcaaagatgaaaatatatcagctatatagcaggactatcctatactctgcatatgataactagagtacttgcagagagcaagctagacccga

SEQ ID NO: 485725 - DNA, 350 bp, Homo sapiens
atcgtcgacccggcgtcgccacaccatacgataaagcaagacattttataacgataccagagtcactatgtgggagggccgtacataacgcattcgaaatccatgcagtgcacgctatattttgctaagtgttggaaacgcaggtttcctcctttacaaaaatcatagacacggttcactacaattgatttagtcacgaattcctagactgacagaacctaaacaaagcaaatatgcacaagatataaatatatgctgtatatgtcatgtaattcatttaggctataatacattcccgtatttgcgcattttcaataaaatgtctctacatacaactaaaaacaaaaaaa

SEQ ID NO: 485726 - DNA, 127 bp, Homo sapiens
ctctctgcttatttggctttctgtcgagtatcacaccagtaccctgagtgcagttggcatgcccgcggttcatggtccttgggactcacaatggtggctcagaagactgctctccaggtggccccgg

SEQ ID NO: 485727 - DNA, 232 bp, Homo sapiens
cggggtgtcgactctagacggctcccggctcacaacaggcacaggcaacaggtcattcactagatatctacggtagggatctggctttgacttgggtaatgggtctgtcctcaaaagacttttttttttttttttttttttttttttttttttttttttttttttttttttttttttttttttttcaaaacaaggggggggcaactattttaaacaaaagcaacacccacca

SEQ ID NO: 485728 - DNA, 679 bp, Homo sapiens
atctcagctcactgcaaccttcatctcccagagctcaaggcaattctccgtgcctcagcctgcccaagtaggctggaagctacagatgtgtaccacctgcctggctgattttgtgtattctttaatagaggctggagttgccgccatgttgaccatggctgtgtcttgtaactccggacctaaggtgatccagcacatctcagacccccagagaacgctgggattgacaggctatgaactaccatgtccgcgctgatagtgtaatgcttgcagcgcaagttttgaagcatccggtcttgatatggacagtgtacctctaagtgtcgaaatcgtgtgagagttcaagtgttcgctgaatgagcaagagagcccttagggacgtgacgtacaggttgtgggagactggggcagtaacttgggcacgtgagtacagggacatgagggaagggcattcctggggaagggaacaggcatcagcgaaggcgagagtggctcaggcaagaggagtgtgatgtgcgtgtgtgggaacagtgaggccctgccttgagtgtccactagctcgatggcaatcatatggggccgtgtctatgcaggcgacaactctgtttcagtggaaatgccgttgcgggttcacacacgcagggagttgagaccctgctccatgtacaaaagttagcta

SEQ ID NO: 485729 - DNA, 1180 bp, Homo sapiens
caaagctcctacccgagtgtgcatgcaggatcgccccggtccgggaccccaggcgcacaccgcagagtccaaagtgccgcgcctgccggccgcaccttgcctgcctgcgtgcccgggcgccggccccgggttgcccaccctgccctgcctgcccactctgcccagtgtgcgagttgctagccccgcgcgccgggccatgagagccctgttggacaaacctcggtcatttgtcaggcacagcagcggtagacccctgcttctctaagtgggcagcggacagcggcacgcacattttcacctgtcccggcagacaacagcaaccaatctgcttgggagaacccttctcccttctctgagcaccagaaagatgtcgaagtgggtattccacagacgagaatttccgctatctcatctcgtgcttcagggccagggtgaacaatgtacatccaggtggagcctgtgctggactaccttgacctttctgcctgcaaaggtgaaggagcagattcagaggacagtcgccacctccgggaaccatgcaagcagttgaactgctgctgagcacctttggagaccgggagtctgggcaccttggcgttggactcgggaattcgtgggaggccctccgggagaaccgggcaggcctcttggctgccggttacttgaacccttggagctcaccggacttgcccttctcaaacggtttggagaacgggtcatgatgcaatatttccaactgggtgaagccttcctttaaaccaatctggtgggacaagcttctaagttgaagacgtcttggataaagtgcacttggaggagggaacttgttgcacattgtgagcagaacggattgctgctgtggacaacaagggggaatgcatccgggtgtggaggagactcctacaaaggggtgtgtgggcacgcaaaacagtggtttctggcttgtgagtgattggttttaacggaggaaagagaatcgtcttctcgacaattgaagagtcacgatttgttctaaacgacccagaatgtgtgatttttcaagagatgtgcgcgattgcgaggaaggataattatcgatgccaacatctatgatggtggagctggataatgaaacacacatagcagtgtgtttgagcaccaacacactgaatgttttaatagcgcagatgtccgcagatga

SEQ ID NO: 485730 - DNA, 110 bp, Homo sapiens
aacctcggcccgtattctatacgaaagcgttaagctcaacatatttaccaaccttttcttaattaacctcgccacccccttctccccgagcgatgtcgtcattagggttt

SEQ ID NO: 485731 - DNA, 273 bp, Homo sapiens
ctagagtatcccggctatcacataatacagctagggctaaggttttaactatcttaaagcccttcctgatagaccctaatacacacagatctctcaagcttcatgtctttgggagcacgtcatctgtagtgtactttgcttgcctaagctttcaccagatgaatcgctttgggcctggtcagtattaatgtttacatattagcaaaccctccacggattgatggctattaccttgagaatcagaaaagtcaggcaaagaaagacttctatcta

SEQ ID NO: 485732 - DNA, 367 bp, Homo sapiens
  misc_feature (97)..(97): n is a, c, g, or t
  misc_feature (123)..(123): n is a, c, g, or t
  misc_feature (213)..(213): n is a, c, g, or t
  misc_feature (228)..(228): n is a, c, g, or t
  misc_feature (234)..(234): n is a, c, g, or t
  misc_feature (270)..(270): n is a, c, g, or t
  misc_feature (343)..(343): n is a, c, g, or t
ttttgagacaggctcacccaggctggagtgaaacagcgcgatcactgcttactgcttactgcggcctcggcctcccgtgctcgagtgattctcccgncccagcctcccgggtggatgggactncaggcatgtgccaccaagcctggtttttgtgttttttgtagggacggggtttcaccatgtgtcccaggctggtcttgagctcctgagctngggcggtcctcccgnctcggnctcccaaaagtgctgggatgagccaccgggactggncccacttaatggggttttcaagaggttgggagcaaaagaatgaaggggaggaagagagcttcccatctttttncattaaccggattaacttaaaaat

SEQ ID NO: 485733 - DNA, 374 bp, Homo sapiens
  misc_feature (168)..(168): n is a, c, g, or t
  misc_feature (257)..(257): n is a, c, g, or t
  misc_feature (374)..(374): n is a, c, g, or t
acgcccgccaaggtggccaccgtcatcaacaacggctcccccaccatcctgggcaagcgcagctacgagcagcacaacggggtggacggtctggcaaaccacggacagaccaggcacatgggaccaagccggaacctcctgctcaacgggaagttcctaccccaccanaagtgcgccttgataccgggggggactccctgcccccaagttcaagcggacggcggattgaactgggatcgacgaccccgagatgacgntgttctacatgggaccacagagagagaccagagaagatccgacaagactgctcttcatacctcgagaaaccaaaagcgttgctggcccgaccgggccatacaaaagcccattcgccn

SEQ ID NO: 485734 - DNA, 671 bp, Homo sapiens
  misc_feature (164)..(165): n is a, c, g, or t
aaactggtgcattcaagacagcgtcaacttcattcgaagccagtaaccacaaattcttagacagaatgtcaccatttggggctccttggtaccagtggaatgctacaaagttagccttggaaagacagatgcgttcatatgtaaatataagaagtcgcactctnntctggaaactgtagcaggcttgctgccatcagccgggttcaggcccttgtaagttagctgtacagcagaagtttgctgtctctaggattcatatagcacccacagagctccaagtaaccaaattcccccaaagacaggaggtgtggctgatgggtacacatgcttggtaagagtttctgctttatattctaaagtacttaatgtttttgagaacacaaagttatcggaattattttgtttttttttttaaaaaaggggaaaaccgttttaagttttatcttctgtcagaatgtgaaaagttctgcccagtttctgagcaaaaaaactttcccaagttttttcaaaaaattaaaagggttttcaggggttcacttaagtgtatcacaatcaacaccagacgggatattttaacctattcaggaaatttttttttccgcgggaaacaatgttaaaaaacctttatgtgtacttcttttgatattaacttgattttgagcctgtaattt

SEQ ID NO: 485735 - DNA, 376 bp, Homo sapiens
  misc_feature (31)..(31): n is a, c, g, or t
  misc_feature (122)..(122): n is a, c, g, or t
  misc_feature (214)..(214): n is a, c, g, or t
  misc_feature (228)..(228): n is a, c, g, or t
  misc_feature (248)..(248): n is a, c, g, or t
  misc_feature (295)..(295): n is a, c, g, or t
  misc_feature (310)..(310): n is a, c, g, or t
ccccaaatagctcccccaggcccctcggccngccccatccatggttaattcctgtcccaacaaacacacacgggtagattgcctggccctgttgtatgtggtagggaccacagatgacccgnccctggtcactccctccctgcccaacattcagtcctggtatgtgaggccgtgccgtgaagaagaactccctggagctacagggacagggagnccatcattccctgncctgggaatccctggaagancttcctgcaggagtcagcgttcaatcttgaccttaagatgggaaggntgttctttttacgtnccaattcttttgtcttttgatattaaaaagaagtacatgttcattgtagagaatttggaaactgta

SEQ ID NO: 485736 - DNA, 847 bp, Homo sapiens
tttattatttctcctctttactttatgtgttattttaaatttaggtattttgggttagcataaggaacatttgtagcgaactaggatcagtatgccgtaggatttacagaatattttcacatgcttattttcatcatcggcagatatttgatgaatatgaaaatggaacatttttgtgtcatcggtttactaagtttatgatgaaatacaatttggatgtccaaggataacctgattgtaccaattttagaagaggaagtacagaatttagtttctggggaaagtgaagcatgatgggaatcatacgacccatgtactgatcatataactaacattatgccctgtatttatcattttaaacacatcaatcttgtgttcatattatggcttctttgcataatataggtttatgtatgctcggattgcattttaaaaagggaattactcctttaactctttctactatgtttcgctgccatcgtggcactgttgtgttttaacactgatccctcctatcctgtgctcaaggccttgtatataatacgatttcgcattcttggtcactcctaaatcacaataggctcattattttcttagttgtatgtcctttcccgcctttttgtcttttaatgatgcaagatccatcactgtctaatcccctttctgatctcgttgttgttcacttgagcccccatctcctattctttattacccaacgccggaatacgctacttatctttaaattcatcataccattctctttttacttttaacatcttatccgtttcgccgaagctgcataacgttgctatgccaccttagaaaccactcgcacgataactagcgg

SEQ ID NO: 485737 - DNA, 928 bp, Homo sapiens
ctagaacgctatacacagcaagcaacaagaaaccgtcagtgaactgaacgctgttccccaagttgtgcagcatccgacgttgtcgtgacatggtccgcactcagtgtagtggtgccacattacactagattttcgtttagtgggttctgaataagctggcgtggctccctagtgtttcccggagcacacgttcatttaattcgaagtgtatatctacaccacctgcggttgtgaaacagcacaatgtttttggtagccacgtacctggctgctccagggcgcccagcaatcacggggtccaattctgtcccaacagggctagccatgccatgtcaagatgtggctcagtcgcagttgtgccccaaaagggttgtatttgggagtgttggaccctgcctatcacgggccccgaagtcattaagtcatgcgacccgcacgggggttgcggagcccacgtgttagaacaaacaggtaaaattgaaccaccagggtggctaaagcctgcattgtcacacgcaagccccgcatgatctgagcaagtcgctcgcccaaacccgctggttcaatcctcctctctcttgtctgcccaccagggcagaatatttcacagcaagcggcaatgaataattccacacgtagaggcttgaaaaccatcttttcttaaagaacattattcccttgctcttgcagcctcatcatgggtatcgtgttccctggcgaaaattctccctgaggtgccctgcaccaaccggcacatacccaccatttagcgcgtgtatcttccacgaccctgtagattcttgttatgaggacatcacctatatgttgcggcgccgcatcaactcgcatgcgccccgacccgacgccaccgagtcattgagcgagaaacgaccgcaaacttcgtatacatacaccacacaaagcaaac

SEQ ID NO: 485738 - DNA, 292 bp, Homo sapiens
  misc_feature (229)..(229): n is a, c, g, or t
acttcattcgcttcacatacaccaatcatgctctatctcatccgctgtacacatcacacactgctacacatctcactgcctagcatacctacatacaccacgcttccgctgctacctcctacctagcttccttccatcgcctcaccatccctcgccatccacaacatccaacaaccataccacacaccaacaacactacggcggccgggcgggttgtttttgttgtttnctgctagaccagagatcggcggcccgccgcctccttctttaccataccaccgccacggggtgg

SEQ ID NO: 485739 - DNA, 662 bp, Homo sapiens
tatatcgttaaaagctactgtgtcccgcgaccattgacaggggcgttgtctagatctgcccgccacaattgtggcgacgggaaatcctgttcacgcaaagcggcgacacaacatttacaagtaaaccccgttccccaggccgccccccctcctacagtcaggaataaaagcccccttgcacagcaccaacaaacctaacgccgtgtggtgaaacaaaggcagtgcgaccacagagcacaacgcgaggcacaccgcgtgttggccactgccgcccacgggcagagaacctcctctcgcggtccccgaaggaggggttcactcccccccggacagcccacaagagcaggtaccgcgcgtttgtgacaaggttagctaggatggtgtgcactcccacccgccgccgcaatgatatgtggtgaggcatctatttgttcctggtgaaaaccagcagtcatcatgtacgaagacttgccgcctaggacacaaagggtcttatcatagaatagtctttgtgcctcatcactctgacacggggcaccacctttctgtccacttgatttctgtggggagtgattgagtttttaaagatttcactcggcacaaaaaatcagtgttataacccagtggcccacttttggaaaaaaacctctgcaaacattaca

SEQ ID NO: 485740 - DNA, 1239 bp, Homo sapiens
gcagcgcaggttgtccccgtttcccctcccccattcccttctccggttgccttcccgggccccttacactccacagtcccggtcccgacatgtcccagaaaaccaagcaagcacagcagcaaccctgcggaggcagaccggcgcaggcagcaagcaggacacgcaggagcaagcaaggtcatctgcctgagcagagctgaagcaggcaaagctcaacaggccaaatacccaagcctaggcaccacaacgcctggcaggctccgcactatccgtccatgcacagcagactccagcaaagggcaaaaagtcctatagactccaggcagcactcacacccatggccacaagccacagcatgcacagaatacgcagactgcacacagtgcacggcaccagacaaagaaccctggctgcacctggatgcatcaccatccaccaccccaacaggcatctgccccccagagcaaagtccatcagcacggtcacacagacaagacacgacgccgctggcacaaagctcgacctgactgcatgaaccgggcgacctctgaccagacaccatgacgcacgcccacacccatcccagccacccacaccgcggatacctgacgcaagagacttacatgaacacacacacccaccgcaccacaacgcacaaccaaaaggaaatacaagagaaagacgccacccagaacaagaagacacaagacaaacacagacacaacccaaacccacatcacatgcaacagcgaaagctaccaaaaaaccaccatgcaacaaccacaacgcagacactgcacgacaacccaacccaaccaccccaccacccacccaaaccgcacacacacccccgcgcacaaaacatacccacaacgcaagcgacaaacactacaccccagcaaaacaccaggaaacaaagcacaagacgacacgcacaaaacggagaagacagcagacgaccacaagcaccgccacgccccaacacagacggcgtcaagcacacacagcgccaaaacaaacacgaccgcacaaccaaccctatatcgagaccccaacaaagcgaccgccgagcagcacacatgcaccacgacagagacacggaacaagccagccagcccccagagccagcccaaaaccagagccacagcccacctcgcgcacgcccagcccgtagccccaacacgccacacccaaccaacaacacagacgacaccacgctaaccacaacaccacagcaca

SEQ ID NO: 485741 - DNA, 691 bp, Homo sapiens
agcggatatgaaaacagtctttttataccgcctttatcctggtgagttgtggaagtccggggggtctatatgtgtgtatgcctcttctgtattctcgtgcaggagagtagaggctttcttcttagagtgcatacagccgagacccaggtgaacacgctgactgtgaacctgccctagtatccgtgagtctcggatgctgtggcactgaggggatgcagacgaaatacttagcgagaggatccttgctacccaagcgtctacttctcctacctcaacaggggtccagggttgcagtgaactcagttcttgcgcccttgggtgacggacttcatgagatgatactgaatacgctagagctgatggggaggcgttatgactaatataggcccaggcctccttcccttccagtctctgtcctaggagcatacggcaggagcaaatcttagaggtagcagtctgactgctgatttctgcttatgatttgtcaaagccgtcgtggggtcaataagaaaatcggggtgatggagggggagaatgcccaggactgggagcaagtcgtctcatgctcccaggggttttacaaccgaaggatagtatgcgaaggcacaatgctggtcgtaagaacttacacagtccccgagagggatactaagtatatcctggcttggcaagaatgaggctcccatgccag

SEQ ID NO: 485742 - DNA, 942 bp, Homo sapiens
  misc_feature (778)..(778): n is a, c, g, or t
ccctcgtttggcggcggcggcggcttctttgtctcgtagaagagaagcgagacgcccattctgcccccgggcccgcgcggagtgggctgggggaggcgccgggaagtcgacggtgccggtcggctcctgcaggaggccactgtctgcagctctcccgtgaacgatgtccgacgtccgagaccgcacgcccgtgggcggcaactccatcggcctagggtccttcctcgcgggccgcgtgtgccctttcccgcgtggtagcacatgcttgggcgccatagctcctgggtcgccgtcagcctggagctcctgccgcaacgatgcagtagataggtggcacctaggcgcgcaggtgggccagcacctctagcaaggaacaagccactcaataccctcactctcgatggggtggcctagtgcatgggagtgaccgcgtcaggtgtactagaacatgcgaccgagaatggcacaaaggcaccactgggaagtgccagttgctaagtgagcaaaagggcaactgtccgtgtagctgagccacgtctggcataagcaaactcgaaaacttgatacatgggcagatgggcggtagtgacgaggtccatgtgggggcacaatggacttggagagttggcgggcctccactgtgccaaggactcccgatgtggacctcagcctgtcttctcgcaacagcggtataagccacccattcgtgcgcgcgcatgtcgggtagggcctacgtgtgagtgctagtgaccctgctgagtgtaccaaggttcccagnagcgaggtgtgttgccctgcttcgtatacgggagggggccccaatgattggtcgtttccggggtccaagggaacgggtgcgccacggatgcgaactgcgtgacttgatggcctcgcatggtccctgtgcgcgggccatgcgatgaaaccccgtggtgcccgcag

SEQ ID NO: 485743 - DNA, 556 bp, Homo sapiens
  misc_feature (46)..(46): n is a, c, g, or t
  misc_feature (50)..(50): n is a, c, g, or t
  misc_feature (64)..(65): n is a, c, g, or t
  misc_feature (79)..(79): n is a, c, g, or t
  misc_feature (85)..(88): n is a, c, g, or t
  misc_feature (92)..(92): n is a, c, g, or t
  misc_feature (97)..(97): n is a, c, g, or t
  misc_feature (99)..(99): n is a, c, g, or t
  misc_feature (103)..(103): n is a, c, g, or t
  misc_feature (251)..(251): n is a, c, g, or t
cgagacatcagctcacggcaactccgcctcccgggttcaaatgatnctcntgctcagcctcccnngtagctgggattanaggtgnnnnccancacancnggcnaattttgtattttagtagagacgggatttcactatgttggccaggctggtctcgaactccggacctcagaggattcgcccacctcagcctccggaagtgctggggttacaggtgtgagccaccacacctggcctcataatctatgctnttgatgttgcttttgtgtatggaacctgtttggtagaaatactgtataatggtttgctgctgtccatatctttctgactcactgttcggtggcatcacttgaaattggctgtggcgagagtatttacaccatgaggactggcaatgctataaatcagtgctctccactggagaggttcaacatttaccagcacactactgcacagcggtgcacacagatggttttgggatactgcacaatcacacttcacacatggtcacacataggcacagggactcacagaggcagatacaagtgtgcacaac

SEQ ID NO: 485744 - DNA, 160 bp, Homo sapiens
cataaaggggatctacgacctgatccgccacggggacacacaagctactatatgctgtgaattccatcaagaagaaagtcaacgacaagaacccacacatcgccttataagcccatgaaggtcacctcatcatgaactgtctggccactgttctttacca

SEQ ID NO: 485745 - DNA, 107 bp, Homo sapiens
  misc_feature (1)..(1): n is a, c, g, or t
natctgtattgagacagagtctcaatccgacaccctggctgagtgccgtgcacgatctcagctcactgcagcctccacttcccaggtttaagcatttttcgtgcctc

SEQ ID NO: 485746 - DNA, 165 bp, Homo sapiens
acgcgatggtagtgcacctgtgcgatactcgcctggggaacagcttcgcatcggtgacaccgtgcagactgaaggcgactccagcgtcactcttgaattcgccgacgcctcgctgctgcagcagcgcaaggtattccctggctgcgccctggaccagactcagcc

SEQ ID NO: 485747 - DNA, 297 bp, Homo sapiens
cacgaggtgtattgaccgctgtgtttgctccacgtggaaccatccatccccacaagttgacatagtgtctccccctcaacagttgccggaggaacaaacttccgtgtgccctgacacgacataagttgaaccaaacttgcattcaacggttcattaaaaaccatggcaagggccggaatgaaataaactaccctgctggagtcatgggagtcatcaccactgacaacacgggaaataatttccatctgatctacggcaccaatggtcgctttgccgtccatcataatagaccagagg

SEQ ID NO: 485748 - DNA, 169 bp, Homo sapiens
  misc_feature (124)..(124): n is a, c, g, or t
cgatccccaagcagttcatacagactcaaacaaatcaacagggatatactagtggaaaacacaatataaaactaaaatgccattggcttcgtttaaattgggttaaagagcaaaacatgtaacnaggcagaaagtctgtttcaaacaaattaaaaagctatgtgttttt

SEQ ID NO: 485749 - DNA, 579 bp, Homo sapiens
cacattaaggaaggggcaccttaccttctgccctaccaaagggacggcaagcttatgagccaggtgcccggggctggactgctcactgggcttgtctttttcctggatgttcgaaacattattctaggcaaatcccactatgtattgtatgggttggtggctcccatgcagccccaaatgctggttacgtttaataaggagctgcggccattgccagtgtctgtccgtgtgggccaggcagtgaatgtggtgggccaggttggcaacccaaaaattatcacagggttccaaaggcatacaaccccagtgttgttggcccacggggaacgggaaaaattggcccctaaggagttttttcctgttccccccattttggaaggttttgtaatccttgggaagacccccaattatgatttttaagtgccccccaggggttttgaactgcagttgatgttatcagcaggccatgcatcctgctgccaaggggggacacggctgcaaatttttgggggaattgtcgcctcctgtttttttgttattgagtgaaaaaaggttgttcaataaagatttttttcccca

SEQ ID NO: 485750 - DNA, 263 bp, Homo sapiens
acagagtatcagcaagtgagagatctgcctctgtagatcaacatcagtgtgatttatgtgtctgagacacaccccagatagcaggttacgccatgtcaccgagccccattgattacccagagggtcttagtcctggaaagtcaggccaacgagcaacgtttgcataatgttatctcttaagtattaaaagttatattttctcacagtttacacatcatgtttttccaaaatattttataccaaggtggctaggtataccatta

SEQ ID NO: 485751 - DNA, 296 bp, Homo sapiens
caggcgtatcacaaggtcaggagtccaagaccatcatgcgccaagatggtggaaccctgtctctactaaaaatacaaaaattatccaggcatagtggcgggcgcctgtaatcccagctactcaggaggctgaggcaggagaactgcttgaatctgggagggggaggttgcagtgagccaagattgcatgactgcactccagcctgggcaacagcagagcaagactccgtctcaagaaacaaaacaaaacgaaaaattactgaagtcgggtggagctcagacatcggtagttttcca

SEQ ID NO: 485752 - DNA, 105 bp, Homo sapiens
  misc_feature (36)..(36): n is a, c, g, or t
attgcacctgtaagaagccttgttaccaggtttccnaaccagtatttaggcgtgctcaaaattttgaatggtggccaactccggtcacttgaagaaagatttgcg

SEQ ID NO: 485753 - DNA, 504 bp, Homo sapiens
  misc_feature (28)..(28): n is a, c, g, or t
  misc_feature (39)..(39): n is a, c, g, or t
  misc_feature (65)..(65): n is a, c, g, or t
  misc_feature (290)..(290): n is a, c, g, or t
  misc_feature (457)..(457): n is a, c, g, or t
  misc_feature (465)..(465): n is a, c, g, or t
  misc_feature (472)..(472): n is a, c, g, or t
cccatttaggaaatccccattggattgnttcccccatgncctgtccctcaatataataaatattncccttggttgtatgggatacatgcacctaatacccttttggatttaacctacatgataaacacagtcctagatcgtttgggtgggtagttcctcctagaatggagtatttaaaaaatggagactataataaaaatcctaaattttaggagtattacaaaataatgcttaacagtttgggaggctgaggcaggaggataatttgaggcccaggagtttaagactgncctgggcaacatagcaagacactgtctctacaaaatagcaacaacaaccaaaacaaaaattagctggctgtggtggtgcacacctgtagtcgtagctacttgggtggtgcacacctgtagtcgtagctacttgggaggctcatagggaggattgattgagcctaggngatagagnctttgtnactctgaataatgcgttgcactccaagtctgg

SEQ ID NO: 485754 - DNA, 234 bp, Homo sapiens
acgagtgtatgtaaggaaaatatcatatcatacaaattttccctatctggctttggattgaaagcatcctagaactcattacaaaacacctgctccctctctgagaatgatgggtgcatcagtgggcttcatcagcgatggagcgacgagcgtgcccatgtttgaatggaccatgcagccgggggacctttcctgctgcggtatcagtagagacgctcccgggcaaggggccat

SEQ ID NO: 485755 - DNA, 530 bp, Homo sapiens
cccacttttttttcttctttattccccttcaaatgcgaagaccgcccaaaaaaaccaaacaaaaaaccccccccgcaattaagaaggaatacattcacagcgcgaaatggagcccgcttccaaaaaaaacaagaaacagccccccgaggttccgccccctggccaggactaagaaaggaaaactggccccacgcaaagaccttccaccccaaacggtccccagccaaaaatattagggcccccgaaaagccaccaaagcacccggaccttttgccgcggtcacaccgctcaaagctcacccggggaggaccccacaacacccacccgacaaaaccgttgtcccaccccccccccctttagaggcaagcaagaccaccttcatcctagcccacaaaaaaaaacccggaaacccccccaaatcttgccccccaaaaaagggaaccccccccacacccaaaaaacacgccctcgcaataaccaaaacccgccgcccccaaaggcgacccaaccaactccccggaggcggcacc

SEQ ID NO: 485756 - DNA, 132 bp, Homo sapiens
gtaccatggagagagaggccagtatgagcagggcccagatgaatgggaagaacttcagttgtgtgctggagtgtgctgagaggtagggagactgacaagtggctgaggtctgataaggcatggtgatgcgtt

SEQ ID NO: 485757 - DNA, 593 bp, Homo sapiens
ctgtgggtgcggtggaacagtccaactggtggtggttccgccattaacgaacctggccccgttgaaggttccttggtgccctaacctgtaacaccgcttcctgggggacaacccagggtttggaaaggattcaataaaacccagttgggcatcatcgcccctttttggttgaaaaacacctggaaaacccatcgggccccggggggcggagggtgccctgcaattggggttgtttttccccccggcgaaggccctgcaggtgggcatagtggaccaggtggtcccggagaagcaggtgcaaagcattgcgctgtcagcaaaagcccagtggatggccattccagaccatgcttgacagttgaccaaggccataatgggaaaggccccggccacccgcctggtcacccagcgcaatggggacgggcaaaattttgtcagtttcatttccaaaaaaccccatccaaaagtccctgcaaatgtacttaaaaaggctcaaaaaaaaaaaaggctaacgattgggctgccacaggcttacgcccacacgggcccctgtgggtcccagggaggttttaaacaaggtatttttcaactta

SEQ ID NO: 485758 - DNA, 436 bp, Homo sapiens
  misc_feature (16)..(16): n is a, c, g, or t
agtctgaaactgaaancctgtcaaaaacaaaggggggtggggctttaaagaagtgaaggtgaggaggagatcacacaccgtatgtgtttgcctaactggctttaccccaaaagaaaattaaactttctttgatctgtacaagttgatcaaacaaatggggtcattcttgtcatatgcaactaaaacagggtagacaggcccaggggaaaaaggcactcagggcacacagcattgcttcaaaatataattctctacaaacctagttgctaaaactacctgttgtaacctaaaaccagttttatctaacagctattaaaacaacctactgtgactgcaaaactggttttacccaccactgtcacacaccaatcagaacttgccagctcctcaaaactttactagggccaataaactttctttcaaaacaaaaaaaaaa

SEQ ID NO: 485759 - DNA, 195 bp, Homo sapiens
cggcattatcactgtgtgagtggtctcagtcagtctcctccctgtctcactctttccctctatttatttcactctcttgtatggttctaccctgcgacctcggtccccttccaggttcctgtttataagccccataccctctgtcccccatcttgtatgtgaaaacttgtctcaataaaccctttggacgtacat

SEQ ID NO: 485760 - DNA, 821 bp, Homo sapiens
  misc_feature (527)..(527): n is a, c, g, or t
tataaaaaaagggaaccttttttgggggccccgggccccggggcccggggagggggggccccttaaggaaaaaaaaaccttttttggccctttttttgggaaccccgttgtgcgtcggggtgtgacccccaatctttcttctctgggcggcaagttggaaacagccaggagagggttgaagggcacgaacactataccctctgggcggagaaatccatttgtgtgtgcgacagatggtaattcgcgggggccacactgtggcgggagagaaaaagggggtctccaaatagtagtgctcaccctctgcgcagaagggccccaaacacccggggtgtcacgggggtgtgagaactcctctatctcacggtgagaatgtttttggagaataactctcctgtagaaacaagatgctgtcgcgcgcgcccaatcatcctctcaccagggtgtggatgtgcgcccgggggaaatatatacctcccaagaacgcctgtggtgtgcacaaccgaggtgggggagaataccactcncctctctctttgtgtctcgtagaagaaaatgtgggcggccttgtagaaacacttctccctcgagagggggtgtgctcacaagtgggggcctctacgaacacactcctcagagaaggggtgatggagagtagtgttttatggctcccgagagaggagagggggtctctttccaccagaagagaaaacatttcgtcgagtttgtgtgtgggagaacacaacaacattgtgcccacttatctacaattatgttatgtataaaaaccccccgagcccataagtaaactcccccaatag

SEQ ID NO: 485761 - DNA, 1232 bp, Homo sapiens
  misc_feature (1158)..(1158): n is a, c, g, or t
gcaggtgatccacccacctctgcctcccaaagtgctgggattacaggcatgagccaccgcgcctggccagaagaaatctttatcttggtgtgcagtgtctggtgagggacaaatatcatctctcttggatctgaatctggaagaattcgcggcactgaagggatttttttttttcagacagtatccctctgtcgccaggctggagtgcagtgccgcaatctcagctcacggcaccctctgcctcccgggctcaagggatcctcctgcctcagcctctcgagtagctgggactacaggcacgcgtcaccaggcccagctaatttttgtatttttagtagagacagggttttaccacggtggccaggatggtctcaatctcttgacatcatgatccacctgccttggcctcccaaagggctgggattacaggcgtgagccaccacgcccggcctcactgaagggatttttttaatgtcacgtggctctcacaggtgcggtgtgtttgggtgcaagtgaagattacgactgatgcttaaaaacaaatgtaaaattccaggtggttgttgctatggggagcagctttaggacaatctgagtggtttcagttgcaagagtgtgcgtgtacgtccaagtgctacagtcaagattcaactgctggctttgagggcctctttaagaacagtaatgataacctaaggcagtttaacagtatggaatggttaccttttagaagttaagctatgggcatggaagttcaatcagtgcattgaagtttttcctttatctctcctatggttaatggtttctgcagaaaaggaccaattgatttctttctaaaacgttgcttcagggtgtagagacctttataggtcatgtttcaacttacagaaaatttttatagttcaaatataaattaagttcaatgtggaatttgtaatagaatttcaggtgaagtaaaatttccactttccttaggctgtttgcagtgcccagcaggccccatgatatcgagatggaagttctgttaaaggaggagattgatcagggatgggcagaataaggaatatgggcagctcaggctaatgatacaatgattgagatgtagaaagagggtcgggcatgggataacgcctgtagtcccactgccttgggaggccnagacaagagaatcgattgaggtcagaccagcctggtcaacagagtgagacctaacctgtacaataaaaaaaaaa

SEQ ID NO: 485762 - DNA, 340 bp, Homo sapiens
  misc_feature (20)..(20): n is a, c, g, or t
ggaaagctgcctcggggccnaccccttgcaaagggggtgtgtcccacaaacgctgctatgggtggggtggggggctggggtgctgcgtagccagtgtttgactttctattcaagtgggggaaagtgggagaggactgagagtgaggcaagttatccccagcccctgaccgtctgactgtcaatctataatggtttcagtttcaaaagagacatggtagaatcataagtcattaaccctccccatttcaaacatcctagatatatttgggggaccagactaatttggctagagtcacacatgagagatgtgggcactttaaaaaaggaatagcaaaaaggg

SEQ ID NO: 485763 - DNA, 123 bp, Homo sapiens
cagacgctcctggaactccttggccatgtagtagtagcagatggcgtccagtgcagcagttggtcgatctgagagcttgctggttactgtacatgggctgcgacaggtatcgtcgtcctagga

SEQ ID NO: 485764 - DNA, 351 bp, Homo sapiens
aaccgccagcccgaggaaaaaatgaaaaaaacccccccgggagaatgtgtttttcccacccccccgcaaacataattggagagcccttttaaaaaaaataaattacaccccccccctaagtgcttaaaaaaaatcacacgggtgggaattaagagttatcaaacgagagggcagaatgtaaatatccccatggagaaagaagtaaacataacacactccattttggtataaactaagaaaaatcctgccttgagatgctgttaatctggaaccgtaacaaaaaccctgtgctggcagaaacatgtgctgtttctactcaagggttaatggatttagagctatgcaggatgt

SEQ ID NO: 485765 - DNA, 364 bp, Homo sapiens
  misc_feature (74)..(74): n is a, c, g, or t
ctatggacaagaatatttgggtttaaatatggagtgaacatccgctcattatatcctggagctacttaacctcnctgtgctccactatttccatctgtaaagtgaggcaccgacaagacatcaggattaaatgagttaatacctccaaactattcatcagtgactgaccctaaataagcactagctaatagccctagttactcttaaattactctttctattttcaaaactgggtcgacggtaatattcctgacgaatgcaatttgaccaagacgtctgtcccgctaaaaacctccccacttttgtagactgggtaaacagaaaccaattattgcttctctcgagcactatcaaacttattaaa

SEQ ID NO: 485766 - DNA, 310 bp, Homo sapiens
  misc_feature (307)..(307): n is a, c, g, or t
atcaattgaccgttgtgacaatacacctttccccacccttgagaaggtgctttgtaatattctccccacccaccccacgcccgcacccccgcacccttaagaaggtattttgtaatattctctccgccattgagaatgtgctttgtaagatccaccccctgcccacaaaaaattgctcctaactccaccgcctatcccaaacctacaagaactaatgataatcccaccaccctttgctgactctttttgggacttagcccacctgcacccggggggattaaaaagctttattgttcacacaaaaaanaaa

SEQ ID NO: 485767 - DNA, 452 bp, Homo sapiens
tatctgtgacctcccacttcaacaaattgtcatgtaattggaatcatacagtatgtagcctttcagactagctttttccaccattggccatccatttacttaatcctagtatacccctataggaaaaactttattaactacagtacagtgcttttgtacagttcttttttactttattcttacattctccactcatttccaaagttacttaggtcagcaccttatttctccattcctttcagtgaggttcttttcatacatttgtaatatagttattttgttgtattctgtattccatcttgggcttcctgaacctcctaaataacttttttttcaatttgcataccttaagattccctcttttgtgttgtatagttttatagattttgacaaatgaaaatagtgtcgtgtgtccaccattacagtagtatacatagtagtttcactcccta

SEQ ID NO: 485768 - DNA, 312 bp, Homo sapiens
gaattaaaaaaatttttcccgggatttatttaaaattttttaatttgaacccaaaaacagcgggctaattcatttttaaaaatgggttatttgtaatttttcctaaacagaggggcccccaagaatcaggcccttttttaaattttttttaagaagccacaaccaaagcgggggcctaataaagaccccccccagcccttgggttatttaaattatgtaagtaaattgtcctttgtccggcccccggccctttccaaagcctgttttattaaaaaaaaatgtaaaaaatgactaaagttttccttgggccca

SEQ ID NO: 485769 - DNA, 1314 bp, Homo sapiens
atgcgaacagcaatgcaacgcttagacccttacttcactatcttactacaaacaaacttaactcaaaattaattaaatactcctaaatgacaacgtgtgaacaacctactaacacacactactctaccacagaacagcatggactgctcacacttcccactgcacccttactactctaagcaatagctttactataacaacaaccgcaacaagcaaccaaacacggcaataacacactagcataacctgtggacctctccatccaaattaacaaaccacactcttccgtggcttcaacagcaacactcactgaacgctgacgatgaaacaaggaaccttacacgaacgcggcgaaaaaagaatattctgcacacggttcacggccacttccgacttcaccggggtccccggttactttctactacactactatttaacacgaaacctcctcaacaaaccccaaagcacgctcacacaccgaggttaccaaaagtgactcccaagctttaacgcaccccactctggtccggaaacggggaatctctggacagctacggcaaccacatacttcctccccagacacgcaacacttactatatagcaaacacttgcggcccaattaaatcacgaactggaaaccacatgaaccttggcatacaacgcatttccaacctaagctccaattaacgcggcaaccattacacaaagctcccaagagacccccaaccaacctggacgggaaataaatcgaaccctcctccaataagatccccaccctacgccagagtgcgaccctaagttcaacttcgcaaaaacacgcacccacgctaaaccccccagaaccgccaacacacgacgcaggacacggcggtcgaaccccagccaatagagaaacgcaacacctcggcgcaaaccccttccccacataaaccacctcagccctggcctcggcaccaacttggtcaaccaaaaggcgtagccagacccaccattccgcgacagcacaaccaagcttcaggacacgcactccctcgaaacaaccagcgtgccaaccccattaggagccatatcccgccccgataccacacttccccggcagcgccagcaccacaaccaagcgcgcacagcaactcgaacaggaaaacacgcgacaaacaccgcatctgggcacaccgagacaacaccccagggtgccacgaacacggacgcaccaagcagaagacacaccctcggacgaccaacgccaacaacaacggcgcagcccagcgcgcccacacaccccccacaacagcgacaccacgagacaccgaacac

SEQ ID NO: 485770 - DNA, 316 bp, Homo sapiens
gcacagacagcacagcacagcacatcacagacagaacagcacagacagcacagcacagcacagacagcacagtacagcacaggcagcacagcacagcacaggcagcacagcgcagcacagacagcaaagcacagcacagaaagaacagcacagacagcacaacacagcacagcacagacagcacagcacagcacatcacagacagaacagcacagacacacaggacacacacacagacagttaggagcaacaaccacagataaagcacaccacactatttaaattcatcctgtgctccaggaccccaggtcgacgc

SEQ ID NO: 485771 - DNA, 138 bp, Homo sapiens
agagttcaagatcagcctgggcatatagtgataccctatctcttaaaaaaagaagaagtttttaaatttgaaataataataggtactggataatatgcaaatgtcttttctgcgtcttttgagatagagtatcaggtt

SEQ ID NO: 485772 - DNA, 266 bp, Homo sapiens
catgagggggggtgctgtctcctcgatttgacaaaactgggctctctctgaaatgctcactcaactctatcgacacccgcatctacatgactgagaggaatgagtatatggtgacctgcctttacaagggcgcgtgtctagctcatgaggtcctgccagaaatgaataaaacgatctatgtttatacgtctaagtatgagacatggtgttatgtgattatgattaaaggcacccaatttatggctttttctctccaaaacgacgat

SEQ ID NO: 485773 - DNA, 176 bp, Homo sapiens
gctacaactatggactgtgcctttggaagctgaggcaggggtgattgaggatgcactgagctgtgattgtgccaccacactccagcttaaagaacttgcccaccaacataaccaattaatgaaagtcaattcattaaaaggtatagaacctctagttgggagcttgggtacctgtt

SEQ ID NO: 485774 - DNA, 252 bp, Homo sapiens
gctcgacaatatgctgacccaataccctgaactgtacggtgcgatcgtctcccaggtgcccctgctcgacatgcagcgctatcacctcttgttggccggagcgtcgtggatgggggaatacggcaatccggacgagcctgaagagtgggcgtacatccagacgttttcgccgtaccacctgttcgatccggcgaaggctacccaccggtgtttttcctgacctcgacccgcgatgaccgggtgcagtcgacg

SEQ ID NO: 485775 - DNA, 737 bp, Homo sapiens
gcggggagggagttggcgcctagcgcgcaggtccatccccgccctctgcagtggactcggccgcagaatcggggtcccgggctcctggaacttgtcccccccaggccgcggtcgaggaggtcactccagaccggatgaggacccggtgccggggggcggtgtgactggaagccgggggaggcgggaaggaggaggggatcgaggcccaagggacacgaggtgagagtcgcgggatcccgaatatctcgggacagagcagtcttgaccagctccggagcgccaggctcgcactcccgtatgcgagcgaacactagcgtcgactggcgagtagcacaaatagggcggtgtccgttttgatcgcctcccgtgcggcggggaacgccccgagagcccgaactcgcgcaaaatcagaaatgcacatcgcccataataccccaagagattctcgtggcacaccgtgaaattcggtgcaccggatatcgatagttctcctagcaagtgggattggtgaacaaaacggaacacagtgagagatgtcgttcgggaatatgtaacagtggaaggggcaaatcatgtggattaccagcaatgtaggactagagacttacccgtgttgagagaccacttggaatatactttcacgtgtgaggaacgatagtggagagcagaacgtgtccagaggggaataaatgacggattgtggtagaaaacagggaaagaaaagcccttagggacag

SEQ ID NO: 485776 - DNA, 264 bp, Homo sapiens
  misc_feature (150)..(150): n is a, c, g, or t
  misc_feature (213)..(213): n is a, c, g, or t
  misc_feature (251)..(251): n is a, c, g, or t
  misc_feature (257)..(257): n is a, c, g, or t
tttccaaaaaaaaaaaaaaaagaaaaaaaaatcagggatatagttcatatcccccttttttgtttacccccatgtccctgaatatcagcctgtagctaatggacttgggatttttggtttaagtgggcctcctggggatggggtggtacnctgagcttttgagcctcattgtaaagtaaaaaggtactggggcctgtgtggtaagccttgttnaaatgctttggtattcagtattgccttaataaacttcncccccnactgcca

SEQ ID NO: 485777 - DNA, 339 bp, Homo sapiens
gagctctgtacctgtgggtatgcatcaataaggaagggccaggttggggagagccccaagttgagaataagtaagtgaacaattagtgtatgaaccacttgttacgatactacgctagatcataaacacctgtgtgtaaaatgtatttccttacacacgtagcacccttcagcaggaccctataaaactttcctccagcccttgcctctttgcaggtagccccttctctgctgagctgcccactgcaacatattttcacaatttctctaataaatctgcccttctttacctacaactatcttggtaaatggctttaccacctgcaaaactgaccctagg

SEQ ID NO: 485778 - DNA, 801 bp, Homo sapiens
ggccgttctcccagtcttcgcttcgcgatatgccatggcggagccgtcgggggccactcagatcccattccatctcctcgtcgtccttcggagccgagccgtccgggcccgagtgagcggcagggatgcccagagagtcctgaccccgacaccgtgaggagacctaaatcagtcttgcaaggctccatcctggtagcaggtaacaatgagtctagactatttctggagaggatgtgaacgaagactgggtaatagtctttggtgacacaccgactggaatcatgcatgcgttatcccatggactggcttctcaagctgatcaatcacgtgataggattaacatgaagcggtcaatccatggaagtccatatcgtcaatcgtggtcaaccaaatcaacgcataatcagtgaaatcttacctagagggatcgcggatcaatatcgccagaaatcactgatcccctagataacagatcagagtgactgaacaggggtgccaagatggccatgtatgccataaaggtgccagttaccccatggggagaccgattacgcacccaactattaacccatccattgggaaataacgcattcacgagaacacggcctattgtaatccccaatactaccgagattaacacaaaggttgtaccaatttgcacctgttggccccaagaatggggcattgaaccatcaaaaatcgcgatctcataacagagggaaacaccacacttgacacaagaagacaatacacagattataaacacagtacaggatagcaatacagatcatgcccattgga

SEQ ID NO: 485779 - DNA, 757 bp, Homo sapiens
  misc_feature (536)..(536): n is a, c, g, or t
cgaattcaggtaacagattctccgtgtgaaggctgaagaagataagattaccactgctcgatcgtgggaagacaagatcttgactcttagtaggagacggatggatatgagtgcgcgtgtgtgatggaggctcgaggtaggtgaaatagccccgtagaagaaggtggggtcgtgcgaggacggtgggaaacgtcaagcgtagaggatcctgggcaccaatggtgggacgaagggtgtgtcattttggaattctgatgaggaaaatcagaaacggagaggaagatgtcagtaaaactgaaggactgatgaatggacaaattgagaatagcccaagctagaggacacaaacgcataaaggtttctaaaaaaagcaagagtcattgttaagggcatatatcctgattgaaggtggatcgataggggtgaactgggaattgtaagcgcaagcttgtctgtcctaaaagggaccacgagggactgggggtctggtagaagcaacaaggctcaggggtttggaacttgcgttggacctaggntggttcgccaagcttcatccccgccgtaaactacaggtctccaatgtgccaacaacttgcgtttgagaaaatggggtcgaacacggataatgttggtggacctacagtcgggtgggacacgcaaagaccgtaaaggcccgatgccgagatgggacagggtagctatggtacagggaggttgtggaaattgctttgttgctccgcttcttcccgtcccaaaa

SEQ ID NO: 485780 - DNA, 234 bp, Homo sapiens
ttttttttttaccccccccctttggggggagggccccccccggttttttttcccccctttaaaacccccggggctctttcccccccccttttttttcttgggggggggggggggggttttttttccccccgaaaaagtttccccccctggcccctcccccggagttttttttgggccccttaaggggggcccccttcggccgggggccggtttttccggggggccccccccgcc

SEQ ID NO: 485781 - DNA, 895 bp, Homo sapiens
tcagttggagtcagaggatgatactagctattttgacacgcgcgctcagagcgataccaccgcatggactcggaggatgaggaagaagtgagtgaggatggctgccttgagatccgtcagtttctcttcctgctctcctaagggttcaacaaggtgtacagtcagcatggagcgggtctcagctgctcgaggagcgccggataccagccccgaccaatgcgcagccgtgaggtgaggagaaggaggatcattcacatggctctggcagggctcaataggccgagagcggagtctgggtgattggcctcccccttggagatattacaggaatgcggcatgtcgtgatgtctgagttcgtctccagcacagagtagtgactcaaagccctccaatgacagtgcgatgccgtgtgctcaggcctcctggatgcgcctcggttcccggagggccctgaggaggccagcagcaccctcaggaggcaacacactaggagtgggtatatggggtcctgacatgccccatctgaagaggggggtatctgggcctgtcactgaagcactcaggcgagcaacggccaaagctggatgaggaagctgttggccggagacatgtggttccagtccatctatggagagccgaggccgtgggacctcaagtggcctggaggagtcaagtcaatggcaacagtgaactggccgtgcgtaggcccgccacggatgctctcgggggactcaaagaagagcgcatgctcgccgggacagggttcaagtcggcgcaacaagcccctgaacccatccgggaaaccacccggccccggggcggcccggtcccactcacggcacccatccggctccaggggtttgccccggcaggccccacccccgccgcgaagtgc

SEQ ID NO: 485782 - DNA, 100 bp, Homo sapiens
ggagtttgagaccagcctgggaaacaactacttatgaggccttgtctctagaaaaaatacaaaagtcagctgggcctggtggtgagcacctgtggtccca

SEQ ID NO: 485783 - DNA, 224 bp, Homo sapiens
caggtagactaaccaggtattcaacagcctgtgcaaggcagagaagtgagaaattttatgagatagttttgtagactgaacagaaagatatagggtgggacagtggttagagaacaggctggagaggtaggccagaccacatcattaaagagcctatgggctttagtggggaattttgatttctacctgtattgcagtcaggagtttaagttaggtctacctgg

SEQ ID NO: 485784 - DNA, 487 bp, Homo sapiens
ccccccggggaaaaaccccccccccccccaggaacggttttccgcggggggcccccccggggtttttttttggggggtgccccccccttttccctttttctttccccggcctttcccttttttttttccttttttagccggtttacccttttaggggcccagggggttggaccccgtttaaagggtttggttccccccttccccccaaggggtttttgccccggggggccccccctccctttcccctttttttttttttttggttccccggggggggaggaccttcctttttttttaggggggaattgggttggggaaattggggtgggccccccttggattttggggttaacccccgttggccccggggtcccccccgggttttttcccctttttccgggggcccctttttttttttttccaatgggttttttttttggggggccccccttttttttttttcccattaaaaggttttaaaccttta

SEQ ID NO: 485785 - DNA, 430 bp, Homo sapiens
ggacctaagccaggcaggggaaggtagcaggacataaccacaggctggaatcacaggcaggagcaggaagagagcccaggagaacgaggtgacacaacacggctaagctccagactggctggtggaaggaagagctgaagtcgggacccagcaggaaacaaggagcatgaggccacatcgtttagcagagcttctgccaggctcgccaggaggtctccttcccaccttcgaagtcctcagactctccgccatctctcccaggcccaggcgagatccctgagtaggattactagacagactgtcctctcccactgtcttggagtgtcccaaggccagagaggcaggatcctggcagtagaagagagggggaaaatgatgtcccagctctagaacaacagactcagtcttcaataaatatttgttcaatgga

SEQ ID NO: 485786 - DNA, 301 bp, Homo sapiens
gcatgagagtcacttgaactgggaggtggaggttgcagtgagccaagattgcaccactgcactcccgcctgggtgacacagggagactccctctcaaaaaaaaagaaaaaaaaaggaaaaaaaaaaaaaggtggggttggggcccgaaaatttttcctgaaacaaacttgagggagggaaaatttcccccaagcctatctaaagaaagctacacctgctgaaaaatgggaaccaaaggtttttttttcttcaacctttttccaataagggaaacattttttgaacatgacccactaaaaac

SEQ ID NO: 485787 - DNA, 1566 bp, Homo sapiens
taaaggtaggaaaaatcaaatgggatttaatggaaatggtttttaaataaccctcattttttctttattctcactcaggtatgtggggaaaattaggtgtgaaagagttaattaaaagagatagtagctccgtggagaagaagaagaaaagtgagaggtggtgaagagggaattcaagaaaacaccattttctccactcccgagaactcgtgccaactaacaccgagagctgcgtgggagaagagggcatttattgtgtgtgctcgcgtggcgccactcgagcgtgtgtgtagaagagtggaggtgtgggcgtggaaaaatctatagtgtgtgtggtgctgtggagagtctcacatatataacgcggctctctatacacacatctcttgtgagtgtgtgtctcatatatattctatatcccatatatgcgcgggagccccaatgtggctataaacgcgtgtataacattatatgcgtggaacacaatatatatatacgcgcagggataatcactctcacaaacacgtgtgacgacaaaagcggggaggacaacatatcataccaccaccactgtgaaggagtatcatcacgctgtggggaggagacaccactctctgctattataggggagaagacgagacaacaaaaggaggagaataacaaaaataatacacctttagaggtgtgctgatgcggctgtggcgattttataacaaaagaaaagatgttgcgccctattatcacgattgtgtggtaatcaaccaggtggggtctaataataatattatcaccaacaccacccataattaatatcttgatacggacaaattattaccacatcatttagcagcaaccagcaacaaaaccaacaagaatgctggtgggtggtagtaatgcatacccaatcattaaattattaaatacttcccgcaagccatcttggttctcatcccaaagcaagacaaaaaccaattatattttttctatcccccctactggttggttggtttccttcccccacaacggttgtgatgaaaagagaacaacacgcatcattcatagagtttggttgactaacgaaagcagacccgaacagattggctggctcggcagacaaacaaatgatagtgtgtgtggtattctaccgccccacaaacattgattacaatgcacggtgtagttataaacacaaccaccgacagaccgaatgtcaaacaaactaatatatccgttacccagtagagcgggcacattatattctagtcctcccgaccgaaaggccaaatattattaatcggtgcttacatcattaagtgatgggggggcaaagaaccaagacatcattaatctagtgatggggggggggaaaatatattatacaaagatacgccaggtagaggcaaaaacacatgaattagataatctataaatagtatagaaggaccgttaacaacaagcaaagcacagccaacaaagaaggatgtggtggtgatgggacaagacatatccaccggttgaggaaagacaaaccacttaagttgtgaggagatgcttacagagtgctat

SEQ ID NO: 485788 - DNA, 597 bp, Homo sapiens
  misc_feature (15)..(15): n is a, c, g, or t
ggcggtcggcccccncggggcggttcagtgacaaacaaagtttttcaggatgagtacttgctgcaggtcgcacagttatgactggattggaacttcatccggggtggggggggcttcagagaactttcattcaacttatatagattccatatgaaatgggaatgcaagaaggcatacatatttctggttgattcaatttcctgataattcccaattacgataaaaggagtggggtggtaaggactcacatgtttgagagggggggggggatataatatatgagcctgggatgaaaattgataataaaagagtgttgatgaagcgtaaattaaagaatatgtttctggcgttcttttcctaaaaaaaaaggagccggtcccagaccaggcttggtaaggagggcctattccgatgggttttatgattgggacaggggcaaggccctgtgaacggggggaaggtggaaccgctgtgggggttctgcttttccagggacaaagccacatgcctgaatgaggggcgtggcggtgtagccccgggcgctgtcaccactggggggtcggggaagaagaaaaagagggcgccggggcgggccag

SEQ ID NO: 485789 - DNA, 656 bp, Homo sapiens
caacagcaactggaagaacatagaaatttcagacatctggctgggcgctgtggctcacgcctgtaatcccagcactttgggaggccaaggcaggcggatcacctgaggtcaaggcgttcgagaccagcctggccaacatggttggaaaccctgtctttactaaaatacaacaaaaaaaaaaaaaaaaaaaaaaaaaaaacactttttcggcgccgcgctctcggcccctcggggaaaaacgtttttaaaaacccttcggtggggggggcgcgcggggccccatagtggtcgtggagacctctggggccaatggggctcccatggagaaaccccggggccatggacaataggggtgggggagttccccaccaaagagaaaaaacgcgcccggggggaccccaggacggcgtctcttggaccaaaccccagaagggagagctcgagagaggctccaagacccgggcgatccttcatacagcacggagagtccaaagcgaacagctgcgaaattacaaaaatacacggcccggacacggggggcgtagcaaagacaccgaagtagcagcagaacagcaacaacgaccaacagcacggcaacaccatagagacgaacagcaacaacacagtacagagcatccgagcgcgacacaggaggc

SEQ ID NO: 485790 - DNA, 928 bp, Homo sapiens
  misc_feature (570)..(570): n is a, c, g, or t
  misc_feature (603)..(603): n is a, c, g, or t
  misc_feature (791)..(791): n is a, c, g, or t
  misc_feature (796)..(796): n is a, c, g, or t
  misc_feature (803)..(803): n is a, c, g, or t
  misc_feature (808)..(808): n is a, c, g, or t
  misc_feature (810)..(811): n is a, c, g, or t
caggtgcgggctgaacaagtggcattggactcatcttcactgttcccacagtcattgtccccgtcgcagagccagcggttggggatgcaccggttgttctcgcacttgaatcggtccgaggggcaggtgtgctgatggcagagggctggggcctcatcactgttgtccaggcaatcgttgtctccgtcacacttccagcgctcctggatgcagcggctgttggcacaggcaaactcgcctggctggcactggggtggaggcacgtaggatgggttcgccaagcaagtgacgccgtctgcgtccaacacctggtcctcagcacaggcgcactggcggctcccaggggtggccaagcacaggctgctgcagccgccattgttcacccggcatttgttggtgccaacttgctgctgctgggcatcatacattcggatctcaaagatggggggccgctcactgcgcagaagggtcacagtggggggtgcgcctcctacaccccgttcccagcggtagacactgccactccgatactcagtccagaagaggtagttgccatggtgacacaggccnaaggcgtggttcagctcaggaccttcatacacnatcttccggtctgtgccattgagcagtatcgtctcgatgcggtcgtagaaggcatccacccagtagaggcgcccagccgggatgtccaggcttagcccattgggccaaagcactgtcttggaggtgacaaagatgtctcggtgtgagccatccatccacgccctctccagccgccagccaactgtccntgggntcctccncccancnntccatccatccacccatccacccatccacccatccatccatccatccacccatccatccatccatccgtccatccatccactcatcatccgtccatcatccacccccaaccgatcag

SEQ ID NO: 485791 - DNA, 453 bp, Homo sapiens
ggacagatggacttcaaatgctgtttgtattccagagactagtttggaccgaattctaatttttcttgactacaagtcttcaaaataatgttttcatttttttcttcttttttccatttttttccaatttggagtcactgaaaactaagctgtgctttcataaagccctgcaaactgattctagccaacttcagaagaaaaataacagcaacctatttacatacataagccactttcatacctgcctaccgatgtatggacttcagagtaatgtggcttatagcaattttccaggattgttcttttgtttgttgttgttctcccttcctccccctattttgtctttatgggacatgacacttcacaaccttctaaaaatgagttttcctaataactcaggacctactcgtctagaaataaaccatcctagccatgaaggattagataaaaaaa

SEQ ID NO: 485792 - DNA, 606 bp, Homo sapiens
  misc_feature (212)..(212): n is a, c, g, or t
agctgggtcactgtacccctttgtggtatctgtatctgggcacacattatggagctccataatgtgtgcccagtacatccacccattgagtggatccaccacaatagccctggggtgtgtcattttgccctcgattaaagtcttgcgggtctgagcagctttctccagcctggccacgctgattgtctttttgggcccatcgtccgtccagnacagattgtctcccatccagtccacggccacaccctccacattgtggatgccgtccttcaggatggtctcccgctcagtgccatcaatcttctggcggccaatgaggtagctggtggtgtcggcaaagtagatgaagccggtctcagcgtggaagtccagggctcgggggttcatgaggttttcatggggatcatgtgctcatccgggaccttggcccccatatccatgccccggatgatgcctggccggcccttgccatacacgaggaacagctcatgctccggcttcttgcatgacttcccgtcactgcccaggctgaagccggaacggcagcggcaggtccgcgccttgtggctgttggccagcaggcagatgtcaaccgcatcacccgtt

SEQ ID NO: 485793 - DNA, 1349 bp, Homo sapiens
  misc_feature (570)..(570): n is a, c, g, or t
  misc_feature (603)..(603): n is a, c, g, or t
  misc_feature (791)..(791): n is a, c, g, or t
  misc_feature (796)..(796): n is a, c, g, or t
  misc_feature (803)..(803): n is a, c, g, or t
  misc_feature (808)..(808): n is a, c, g, or t
  misc_feature (810)..(811): n is a, c, g, or t
  misc_feature (955)..(955): n is a, c, g, or t
caggtgcgggctgaacaagtggcattggactcatcttcactgttcccacagtcattgtccccgtcgcagagccagcggttggggatgcaccggttgttctcgcacttgaatcggtccgaggggcaggtgtgctgatggcagagggctggggcctcatcactgttgtccaggcaatcgttgtctccgtcacacttccagcgctcctggatgcagcggctgttggcacaggcaaactcgcctggctggcactggggtggaggcacgtaggatgggttcgccaagcaagtgacgccgtctgcgtccaacacctggtcctcagcacaggcgcactggcggctcccaggggtggccaagcacaggctgctgcagccgccattgttcacccggcatttgttggtgccaacttgctgctgctgggcatcatacattcggatctcaaagatggggggccgctcactgcgcagaagggtcacagtggggggtgcgcctcctacaccccgttcccagcggtagacactgccactccgatactcagtccagaagaggtagttgccatggtgacacaggccnaaggcgtggttcagctcaggaccttcatacacnatcttccggtctgtgccattgagcagtatcgtctcgatgcggtcgtagaaggcatccacccagtagaggcgcccagccgggatgtccaggcttagcccattgggccaaagcactgtcttggaggtgacaaagatgtctcggtgtgagccatccatccacgccctctccagccgccagccaactgtccntgggntcctccncccancnntccagtacatccacccattgagtggatccaccacaatagccctggggtgtgtcattttgccctcgattaaagtcttgcgggtctgagcagctttctccagcctggccacgctgattgtctttttgggcccatcgtccgtccagnacagattgtctcccatccagtccacggccacaccctccacattgtggatgccgtccttcaggatggtctcccgctcagtgccatcaatcttctggcggccaatgaggtagctggtggtgtcggcaaagtagatgaagccggtctcagcgtggaagtccagggctcgggggttcatgaggttttcatggggatcatgtgctcatccgggaccttggcccccatatccatgccccggatgatgcctggccggcccttgccatacacgaggaacagctcatgctccggcttcttgcatgacttcccgtcactgcccaggctgaagccggaacggcagcggcaggtccgcgccttgtggctgttggccagcaggcagatgtcaaccgcatcacccgtt

SEQ ID NO: 485794 - DNA, 372 bp, Homo sapiens
atagcgacaccgtacaccacaaaagcatgttcaagttttttttttgacatggaatttcactcttgttgcccaggctggagtgcaatgccacgatctcggctcacggcaacctctgcctcctgggttcaagtgatgctcctgcctcagcctcccaaatagctgggattacaggcatgcaccaccatgcccagcttatttttgtatttttagtagagacgaggtttcgccatgttggtcaggctggtcttgaactcctgaggcctcaagtgatctgcctgcctgggcctcccaaagtgctggaattacaggcatgagccaccatgcccagccatcacttgaatgattattaacaccggggaatgaaatgttttt

SEQ ID NO: 485795 - DNA, 667 bp, Homo sapiens
  misc_feature (9)..(9): n is a, c, g, or t
  misc_feature (61)..(61): n is a, c, g, or t
  misc_feature (83)..(83): n is a, c, g, or t
  misc_feature (85)..(86): n is a, c, g, or t
  misc_feature (115)..(116): n is a, c, g, or t
  misc_feature (132)..(132): n is a, c, g, or t
  misc_feature (138)..(138): n is a, c, g, or t
  misc_feature (152)..(152): n is a, c, g, or t
  misc_feature (154)..(155): n is a, c, g, or t
  misc_feature (158)..(158): n is a, c, g, or t
  misc_feature (160)..(162): n is a, c, g, or t
  misc_feature (164)..(165): n is a, c, g, or t
  misc_feature (167)..(167): n is a, c, g, or t
  misc_feature (172)..(173): n is a, c, g, or t
  misc_feature (178)..(178): n is a, c, g, or t
  misc_feature (188)..(188): n is a, c, g, or t
  misc_feature (192)..(192): n is a, c, g, or t
  misc_feature (194)..(194): n is a, c, g, or t
  misc_feature (201)..(201): n is a, c, g, or t
  misc_feature (204)..(204): n is a, c, g, or t
  misc_feature (214)..(214): n is a, c, g, or t
  misc_feature (236)..(237): n is a, c, g, or t
  misc_feature (259)..(259): n is a, c, g, or t
  misc_feature (268)..(268): n is a, c, g, or t
  misc_feature (270)..(270): n is a, c, g, or t
  misc_feature (307)..(307): n is a, c, g, or t
  misc_feature (311)..(311): n is a, c, g, or t
  misc_feature (339)..(339): n is a, c, g, or t
  misc_feature (341)..(341): n is a, c, g, or t
  misc_feature (613)..(613): n is a, c, g, or t
gacacccanattcacactttggctccttcagacaacttgatctttgggactagaatttgtncagagtcaaacaccacatagangnncgtgggggccacacacaacactccttttnngggagagggacaaganacctangtgtcatggtcaangnngtntnnngnngntaaannaaaangttaatttgntttntnctccagnggntctatttttnttttccaaatttgtttcaaggnntgtttttttcatgtggggccgntttaaacanangttgcctcattagagcagcctttcagtcctgcaagtntctntaatccatggtatgtacatgtaggtttntncaggcagggaacacacatgacagagaactactttggtggtactggacgggtggtgtttcttcactggattttggtgactgcttcatggatggaggtggccacgtaatctagatttttggtggttaagccactcacgttgattcgaccacttggcagcaggtagatgtgcttttcattgaccagatactcaacctgcttggggttcacccagtgaagctgaacatgccaatttgatcagtgatgtggttccaggtcccaggggttttgagggnttctagtcgtgccctgagttcagatctcatggtcagaatccggtcagctattgt

SEQ ID NO: 485796 - DNA, 162 bp, Homo sapiens
ttggggctccattcaggtctacatgaagaaagggtggttttcttttttttggtttccccaggagcaattctataaactagaaagaataggcttttcaataaatgatggcggggtcagtgtggatatccgatatagacaaaaattaaatggagatctctaatt

SEQ ID NO: 485797 - DNA, 591 bp, Homo sapiens
tctagttatgtgccctataatgatgttacagtcattgacagacctcatatatggcagtggtccataagattagcaatactgtttttgtactgtacctgtcttctatgtccaggatatgcaagtacattaccaattgtgtctgcagtgtcctcacgagtattcactacgaatcaatagtgcctgtacagcgtgttgtagccatagcgagcgaataggcgcatagtcttaggtgtaatagtagatcataccatcttaggtttgtgtaagtcacactcctgtgcatagtacaatctttaaaatctcctattatgagtgcatgcatttctcaagaatggtatcgccctttgctaagcaatgcatgactgcaatcctaattctcacatgttttggggaagaaatttgtaagtttctgaaaaaagtttaggaatagttcctaccaaatatacatgtataaagtttattaaaagtcataatgacccaggaatagctaatgacacagaagtagatcaaaatagaacacaatagagaacttcaaaataaaacaggtgtgagaatagtgtgtgtgaaaaagctgggttcaaataaggtggt

SEQ ID NO: 485798 - DNA, 1030 bp, Homo sapiens
taagcagtcgggcctggccgctatcgacatgtccccatggcccggaggaacgggtcgagcccaggagaagcgcacatcgttcgtcccagccccggaggctccttgtgggcaacgatcgtgagccaacgggttcctgaggccccgtcctggccaggcagggtttccccgcgcgtttccgaggagccctgcctggcctgtgtgctgctggacaaaacaggtcgtagcaccgaatcgcgcactgttatataagatagtttgtacatgtaacaggatttgagatctaatgatctatgaacacaaatcatgtaattaccgatttgataacaaaaaaaatatggtatttgcacgtagagagatcaccaaatacacagaaaggaagaatatggaacatgaaagattggacaaagacaactcataaaaacaataagatgtgatcctaaaattaatacacaatgtagagaatgtatacaatggaatcagtggttcaaaaaatcatacatataattaagaaatatgtaacattagaatttaaacaattagacaatcacatagtaaaaacatcatttcaaaacaagataataaaaaataagacatcgagatgaaaatagcaaagagtcaaaacattggaacaatgagaaaagattacaaaaaaattgataagaacctataaactacaaaaacaagaaagagatacaatgaaagaaaatacaaaaattaggaaacaatatcatcaaaaagaataaagataaactaaatgtaaagtaatataaaaaaaaaatgattaaaaatatgaataaaacaaaaaaaaaaataaaagaaacaaaacaaaaaagaaacaataaaaaatgcagaagaaaaaaaagaaaacagatacaaaaggcaaaaaaacaaaataaaaacaaacaaagaaattagaaaacaatagacaccatataaaaaaaaaaagaagaaacagaaagaaaaaacaaaagacaaatgagaaaaaaaaaactaaaacagataagaaaacaaaagatgaaataaaacagaa

SEQ ID NO: 485799 - DNA, 1516 bp, Homo sapiens
gaaggactcctacgtgggcgacgagggcggcagaacaagcgtggcatccgtgaccctgaaagtaccccagttgatcatggcatcggcaccaagttgggaacgatcagtggagaagatctggaccacgcggcacctttctataacgagcgtgccgcagtgggcccggatgggagcaccacaaggtagctagcatgagcggaagcgcaccctcgtgaaaccaactaaggccaacagagaagaagatgacatcagcagttatgtttcgagaccttatgggacatcgcactgggacatgatagcagtggcacggatccaaggcgccgtgcttgtcccctctaacgcacctcctggtggacgctaaccccacggttgccacactgttggtccaatgggacatccctgtggaaggaaagggggtgtctattgccacaaaaagtggggtgtggcacacatcttatagcaaagaggatatagcagccaatatcccacgaacagacgggcagaatcgtgtagacagtctggtgagaacacacgatgggatgaatgtgccgcagggaagaacctcgatgaagcgcagaacatcaaccgtacgagtgaaaatgaagtccgatcaacgtagaagtcgaatggacttaccatgggtaactaccacaaccaaacaggggcacgatgccggagacaaatcgggtgcggcgaaccagtctaacggcacgacacagctgatgacataacagttcgccccatgggaccgtttcagaagccacgagaaggactgaggcaaaccgacccggacattccccataccttccttttcgtacctggggaaggaaaagaaaggctaaacagaaggacctggctacgccgaattggggacccacgatggttcaatacaactacacatttggggagcacactcggaacagcagaggtatacacagggaatggtactcacggagaggggcagacatggttataaccacaatggcaccttttcaaccttttaccctttgtggggttacactgggaacattcgtttagtccggaggatattcaccaacgaaagaaacgcagcgccgttatcacgagcttccccaagtcaattgcacagggtggcatgagacagtggggcaacaagtgcgcgggcaaaaaggacaccattggaaaccggacgcaaaccaacagagattgacttagtccacgaggggactgggggcaaacacagagccaagatggataaattacccggggtggaccactatggacccggaagcagagggaaaatggcaagcaaaaccggaaagaaactcaacaccgagccgcattgtgcagaccaccaaaacgacccaatgtgaagagacacccacaggaatcaatttacggaagcacccgacaggaagacggcaaggataaccaacagggaggagggacaccagggggcgaattccaaataccgtaggggcacatacacgatggacacacacacattccacaacagagacacggatcggaagtcaac

SEQ ID NO: 485800 - DNA, 146 bp, Homo sapiens
atagacccttttactatctctaatcaactccaaggaccccatgtttcacacaatgcaataaaacagagagtatgcctgactgctgagagcatgagtattattttgcaatgctgatgaggaaaaatattgcagcacactgctagcta

SEQ ID NO: 485801 - DNA, 539 bp, Homo sapiens
  misc_feature (81)..(82): n is a, c, g, or t
  misc_feature (180)..(180): n is a, c, g, or t
tcggagtgtccttcgatgatgagatggggacggaacgaaaaagtgaccagcaagtgcaggtgtacgtacgtagggatgttnnaatggatatccaagcgggcattgtgtagatgtggcatcagaagctccactgcccggggtccttttgtatagatcactttgtatatatcggataaacanccaaatcctatgacctgctgaggggctattataacacattgtatggcagatactcaggccagaaaggttggtatcaaaatttctggcgtggtggctcatgcctgtaatcccagcactttgggagactgagccagaagatcacctgaggtcaggagttcgagaccagattgaccaacatggtgaaaccccgtctctactaaaaatacaaaaattagctgggcgcggtggcaggctcctgtaatcccagctactcaggaggctgaggcaggagaattgcttgaacatgggaggcagaggttgtagtgagccgaggtcgcaccatcgcactccagcctgggaaacagagtgagactctgtct

SEQ ID NO: 485802 - DNA, 1008 bp, Homo sapiens
  misc_feature (433)..(433): n is a, c, g, or t
gacattgcagcaattcagtgagatctttagagatccattttctaattctacttctcttgactatttctgaccacgatctgtagtgttactttactctactgatagtcttgataacgaccgtcaacaggtccatccaatgcaggcgatgagaatccaactttcttccgaatgctccatttactgttgtatcattttgcatcttccacactcgctaggaattctatgaacttgttgtgttcttgtctcttggtctgtttttgaagacagggtctccactctgtcacccatggctgcgagatgctagtggcgccgtctccacgtctcactgacagtccttacccactcccagagtattcaagctacagtatctcgctcaccgtctagccctcccatgtacgttaccctcgggcgactcatcaggatgtttgctatncgatccactaccacaggtgtaagttttctatacttattctagtgtattatatagggtcagcatgatgggttttctataccaatttcgaaccacggtctggtgtcgaatagtccttgacctcaagtgatccagcctgccgttggcctccctaagtgcttgacgtattacagctagtagagcctatgcacactctgggcgcatggaagtcactgaatggttctctaatgatacaccctaataatctaactcagatgcattttcctaccaaggatttttccaatgtatatttctgccctaggatcccatcaggaggtatcacttgtctaatggccagcctacagtccttcaaacagtgtttctttctgcaacattaccttacgactctgtaaacgatccacagactttaactcctttggattaggcgtgcgcgaagatacggtggttccctttttacaaagggcctttgaaacgttacgcgctttcaccctccttcacgtagggggttttcatcacgaagttcgtttggagctgtctacgagcctatcggtacgcggacccggcactagatcttggaa

SEQ ID NO: 485803 - DNA, 121 bp, Homo sapiens
cataaaatactactcctaccaccatctcagaaagtatttggtggaagaagacacctcgtctcctggcagtcccgtcagcttccggtagaagagctcggccacatcccggccgccactgtcc

SEQ ID NO: 485804 - DNA, 747 bp, Homo sapiens
  misc_feature (15)..(15): n is a, c, g, or t
  misc_feature (26)..(26): n is a, c, g, or t
  misc_feature (46)..(46): n is a, c, g, or t
  misc_feature (180)..(181): n is a, c, g, or t
  misc_feature (232)..(232): n is a, c, g, or t
  misc_feature (305)..(305): n is a, c, g, or t
  misc_feature (345)..(345): n is a, c, g, or t
  misc_feature (358)..(358): n is a, c, g, or t
  misc_feature (391)..(391): n is a, c, g, or t
  misc_feature (422)..(422): n is a, c, g, or t
gggggcggctgaganagcgcccaggncctcggagcaaggcgttggnagatctgaagacagcatgtacacagccattccccagagtggctctccattcccaggctcagtgcaggatccaggcctgcatgtgtggcgggtggagaagctgaagccggtgcctgtggcgcaagagaaccaggnngtcttcttctcgggggactcctacctagtgctgcacaatggcccagaagangtttcccatctgcacctgtggataggccagcagtcatcccggatgagcaggggctgtgcctgctggctgtgcncctcaacacgtgctgggagagcggctgtgcagcaccgcangtgagggcatganttgacctctcatgactattcccacgggcctcantaccagaagtggtgtgatcacattcacaganctccacaggagcccactgcatcaagaaaactctacctaggtgaagggggaagaagaagatccgtggccaccgagctgggcacgtgaacgtgggacagtcttcaagacctggggactgcttcatcgtggacctgggccagaacatcttcgccatggtgtggtggaaaagtccaccatcctggaacgcaactagaggcgagggaactggcccgggtcatccgggacagtgagcgacaggtcaaggcccaggtggacgatgtccctgatggggaaggagcctggtgagatgatccagggtcctgggccccaaggcctgctctgacagg

SEQ ID NO: 485805 - DNA, 1008 bp, Homo sapiens
gtccttttatatttaatcgattgaaacaatcatagttggctgggcgcggtagctcacacctgtaatcccagcaatttaggaggacgaggcaggcggatcacttgaagtcaggagtttgagaccagcctggccaatgtggcaaaacaccgtctctactaaaaatacaaaaattagctggacgtggtagtgcatgcctgtaattccagctacttgaaaggctgacgcatgcgaatggcctgaaccgaggaggcaggaagcagaggttgcagtgagctgagatcatcgcaccgctgcactcctgcctgggtgacacaatgagactgtctcaaaaaaaaaaaaaaaaaaaaaaaaaattcaaaagggcggggggcccccaaaggtgtgatgcatcaagaatgctggaaaaaagatacaaactacacaaccccccctttcggggcacagcagggttagaccttgaatctatgtgggccccttgaaaaaccaaaacacataaagcggtgtattgacccttccattgtagcagtggttggccacgcacaaatttgcttcaggctacactaggacactaataaggcgcacaccggggattgtggaccaatccaaaggaagtgtggaaaccggccataaagggtgagaaacacaggtaaaagagtgcaccactccatacaaggggagcaagaaaaccgcccggaacgttcagtgaggacaacagggcgtgaccaacagtggtgtgtaacaccccggctactacataagaggctgaacaagaggtaaccaaggcaggtgagcaaagggacgatgaaacgacgggacacaggagcgatagaggcaggaaaaaactgaaaccgagaagcgacgtctagcagacgcgagaaactcaacacaggagacaacgggagcaagaatagaacagggaacaaaagaaaacaaaatatggtagcacgagaacacagggagttctacgaagaatgcccgaaggataagacataaaaaccaggagccgca

SEQ ID NO: 485806 - DNA, 130 bp, Homo sapiens
cacgccatatcacaaggggggttgcatgtggcattggagggttagtctcagagtccaggactgggaggaaggtacttgatgggatggtcttgattctggaacttgagagcggaggtgttagaaaggggag

SEQ ID NO: 485807 - DNA, 631 bp, Homo sapiens
  misc_feature (15)..(15): n is a, c, g, or t
  misc_feature (216)..(216): n is a, c, g, or t
cgaaacaaaatcggncccgaaataggaatataaacaataaaaacagtactacatgcgatgaggacgaacgcggtgaacgaaccttaagcggcgccttgggtaacctcgccctctttcaccctccaacgggggacggtgtgaaagtgctagggcctagtgcgggccatgcgtcaacgggggaaattggataaaccacgaaaacggaaatggggaggncattggacacggcaaaccgcgggcgatggggacttggggggaaggacgcgggggcataatgggcgcgaattgccggaaatacccggggtaatgatggtgaccgcatatgaatggggaactgggtaagcgggcccggaaaataaattatgcatagaagtgtgcacgggacgcgcctaatggctaaaatgactaaatggcgggtagacacgggcgatgccacggccggcatagaacggcggtggtggggactatagatgttaaaatcggaataactgcgtgcaaatgacgcgaacatgaaaacgccgggaaataatgggttaaatgggtattacaacggggcgcggaaatcgttatgatacgccgcttaccgtaactcttacgggcggggtacatgtaacacaaaaacggtaactgt

SEQ ID NO: 485808 - DNA, 260 bp, Homo sapiens
  misc_feature (10)..(10): n is a, c, g, or t
  misc_feature (167)..(167): n is a, c, g, or t
  misc_feature (218)..(218): n is a, c, g, or t
  misc_feature (234)..(234): n is a, c, g, or t
gccccccgantacgtgtgggcgcccgcgaagcccccagaggaaacttcggaccacgctgacctgtaggtccgggggcgcggcggagctgggacctacctgcctgagtcctggagacagaatgaagcgctcagcatcccggggaatacttctcttgctgagagccggnactcggtccccgggccagcagggatggggttggggaggttctcccaacccnactttcttccttcccnagctccactaaattccctcctgcctt

SEQ ID NO: 485809 - DNA, 1415 bp, Homo sapiens
agcggttgtgtgaccagtctgggcagcatagtaagacctcgatctttacaaaaaaaaaaaaaaaaaaataatcccaaaataggccggggtgcgcgcgggtaacccgtgagggaccatgctactctgaggtaagcaacccgggcagggaaacgcaacctcgtgcaaccgagaaaactatcgagagggagacccaaaatgagaagagcatcagactgaatgacaccgcgcaaaggacaatggtggaacataataccccacatgtcgtcagaaaggggagtgacagggcacgtcacaaccgaggacgcaacggcacaaggacaaccgaatacctgcgccgcggaaaaggtatggccacaaacatgcccgagcacggcgctacagtgacacaccagcgacaacacgggccgagaccccggctgtgacgcgcccgcagcccatcacagagacccacccccccacaagaacgcccgtgaaccaagactaccacgcaacacaacgacgccacgatccagggacaagcagagaactccatcacgcgcgcagaaccgcacacacagacccgcgcatgcaaacaacccggcgaccggcccaaccgaccaaaacacagacagactgaccgggcgcccaaccaacagagcgccgcgagagccacccgccaagccacagtcgcgaagacaacacgcaccccaacccgcccgccaaccccactacaccgtcacaccacacccgcaacgtccgcgttcgcagccacgcgtccacaggtcaaccgcaggccaacacagcaaaaggacccacccacgatgcgcagcacggcgacgcgccacgtcaactataaacacaccctgcggtcgccgtaaacagcacaccaccggccattcatcaaatacgcgccaggcaggcacagatgaataacatagagaccgaggagacgcctcgaccacaaaacgctgccccacaacgaatcaatcacaacacacgcaacaccgtcacgcctgccgcgcagcaagcagtcaacacacccggtaggccacgccgcacagacaactcccaactcaacagtgcgcgcggcaaccaacacaacaactgcaagcaagcacatatgacacaccacatagcacggcggacagacacaacctaccaagacccacggccgcaacatacacttggcccaaaacaccgcaccccccaacgcctcgggacgagaaagcaccacgagccgagcgtccccccatccgcgcaggagcgcaatctacgcggcacaccaccgcccactcgatccctccaccaactaagaccgcaccaacagcggcactgcacataatactcgcccatagcaacacgaccacgtgctacgacagaaccgcaaactgctcaccgagagcgacccccaaccgccgcccccccgaccacaccgc

SEQ ID NO: 485810 - DNA, 318 bp, Homo sapiens
tggaggcagaggttgcagcgagtcgatttcgtgccactgtactccatcctgggtgacagagtgacgactctcacaaaaaagacacaattcgacatattggatgggtttacaacttcgtgggacgtcaaccagtaccgatggggtctctgtaggctcgcatcaaggtgtccgcatagctggttccttcgggaggctctcagggagaaattttcctcgctttctccagctttaagaggctgccacatccttggtgcacggcctcttccgtccatcttccaaggcaaccaatagccggtcaagtcttcctctatgaacccg

SEQ ID NO: 485811 - DNA, 696 bp, Homo sapiens
  misc_feature (519)..(519): n is a, c, g, or t
gaggcaggaggattgcttgaggttgggaattggagaccagcctgggcaacataatgatgcagaaatacaaaaagttagccaggcatggtggcgcgcacgtatagtcccagctactcgggaacctgaggtgggaggattgcttgagcccaggacttggaagctgcagtgagctacgattgcaccatggcactccagcctgggcaacagagtgagaccctaaaaaacaatataggccaggttcgatggctcatgcctataatcccagcactttgggaggccgaggtggatggatcacttgaggtcaggagttcaagagctgcctgcccaacacggtgaaaccccatctctactcaaaatacaaaaaaattagctggacgtggtggcagacacctataaccccagctacttgggaggctcaggcactagaatcgcttgaacccagaaggcaaaggttgcagtgagccaagatcgcgccactggactccaggctgggtgacagagcgagactccatctcatangagggacacatggggatgaggatacggtgttagcaatgcagggagggcagtaagagcaagatggccgttagaagtggccctgggcttgcttgggaagaagcttgacatttgggtcttgacaggtggcccttgacccagggatcaggaccttaatcctaaaggggactcaaacttaat

SEQ ID NO: 485812 - DNA, 169 bp, Homo sapiens
gtgtagtgagatcggtggggtggctaggtagaggaggaccagaagagatttatgatctctcggaaggctatgagctgcggctggccccatcataatcttttttagtttagcagaagtcaggaaacgaatacggggacacttggcatccagagacacttggcatccagag

SEQ ID NO: 485813 - DNA, 309 bp, Homo sapiens
ccaacctagggtcagttttgcatgtgtaaagccatttaccaagatagttgtaggtaagaagggcagatttattagagaaattgtgaaaatatgttgcagtgggcagctcagcagagaaggggctacctgcaaagaggcaagggctggaggaaagttttatagggtcctgctgaagggtgctacgtgtggaatgaggtcattgtgcccgcaggttgtttgtgattagctgtctctaacaattgttcatacaataattgttcattattgttctcaacttggggctctccccaacctggggacccttcctta

SEQ ID NO: 485814 - DNA, 256 bp, Homo sapiens
gcatggccataaaattttaaatgaaaatttgtacaagcagaaagttttattgaagtccagtttttgattctccctctgcccccttcattgctgttaggatggatgttaatgtctgaagggccatcttcagtcaggatgctggtgagcctgtgacatctggtcactccaagctctgctcgaaggcatttaaatttaataaaaagcatactcccatgggcctcaaaaaacacctctgggactgagacctcaccagctt

SEQ ID NO: 485815 - DNA, 268 bp, Homo sapiens
agcggatcccgtatcagaaaaattattatggtcttttacttggtacttagagtcagtaaatatcccttaacgtctacataatgggtctcctgccgtaacaagaaagtagtgctcgctaagtttaagccatttttgaatgtcagatattgttaatgaaattgcgcataggaatcatagttaagatatgtcataccatggatattgcaaaatgggtaattttgtggcagatagtcacttttatgaaaacacggtcaacttgtctggagta

SEQ ID NO: 485816 - DNA, 238 bp, Homo sapiens
ggccggctgaggcagatccctgctctgctgctgactggctgtagtctgaggcaggtccctcagtctgagttgttttttcacctgtgagacaggatgatgatgtggtggtgacttttttttttttggagacagatttccccctctgtcgcccaggctgttgtgcagtggtgtgatctcggctcattgccacctctgcctccgtgattacaagcggttctgtggcctcgtgcgagggaac

SEQ ID NO: 485817 - DNA, 811 bp, Homo sapiens
agtcctgtcctttctctctccccggacagcatgagacttcaccacatcgctccaccttctccaccaactaccggtccctgggctctgtccaggcgcccagctacaggcgcccggacggtcagcagcgcggacagcgtctatgcaggcgctgggggctctggttcccggatctccgtgtcccgctccaccagcattcaggggcggcatggggtccgggggcctggaacaccgggatagccgggggtctggcaggaatgggcaggcatccagcacacgcagcacaggcagcacatgccacacagcctgacacgcaccgcctggcctcttcacctggcaccgcagtgaggagcctggagcacgagcaaccggcaggctggagcagcccaaatccgggcagcacttggcagcaagcacagggaccccaaggtcagcagcactggagcccattcacttccaagcatccatcagaggcacctgcagggctccacatcttcgccaaatcactgtgggacaatgcccgcatcagttctgcaagattgcacaatgcccacgtcttgctgcatgcatgaccttcagcagtcacagtcatgcaggacagcagctggcccatgcgccaggtctgatgcgagcaacgacatccatgggctccgccacaggtcatcggatgacaccaatcatcccccgcatggcagctgccgcacagcgcatcgcaggctctccaggaccgagctgctcttcatgaagaaccaaccacgaccggcacgtaacaggcctcaaagcccagaatggccaacctgggtgaccgggacgg

SEQ ID NO: 485818 - DNA, 212 bp, Homo sapiens
agtgtggacctggtggaagttgaggctgcctggtatttgattatatattatgtacaaactttttcattcttaacttaaaaatgcttttcaaaaaaaattaaaatttggtaaatgggattttaattaaaccttggaacaacgaatttggatgttccagaggttggacttgtattaggtaataaagctggacctgggactcgtgaaaaaaaaaa

SEQ ID NO: 485819 - DNA, 944 bp, Homo sapiens
gaacaagagactagtgacgttaagacactcaggaacactttcgaaaaccagaaacatcctgaatccatatcaaggtaagtatagaaaagaggcatatggaagccggaaacacctacagagactacatacaggtctacgctccatttaaaaccaaagaacacataccaactacgagaatcgggcaagatacaagcaaacattagagacgatggcaaacccagacggacctagccaagcaccaacaagcaggacataaacccaagaataactactagaaaagctaaaaagacactagataaaaagcacaggaagagtagggccataagaacaccataatacaatactggtacgacccaacaaggacagaggaaagacaatacagacggataccatggcaagaaaaaggaatgaatggaccaccatagagcaccacaaaagaacccaccggagaggaaagcactgtggcgagaacagctgacacaagggaatggaatagagcaagcgaaagaacaaggacaatccgacacacacacaaagacagaaacaaaagaaaggccccacgacaacaaaagcaccaagtgacacacacagcagcaagagtggagccaacacacatgaccaacagaggaacacgacagccagggagcatgaatatcaaaaagtgaaatggaagaaagaaggcagacaaacagcacagtcataaaaagacacagacaacgaaaccaccacagatgacccaagcacatgagagaaacgtgaccatgctaagcataggacgacacaccgaagaatacccaaacaacacagaccgagtacagtaagaagcaacaaacagtagaagcgagaacacgcaaaagaaaagaaagcccataagaaatgcccagacacgcgagacataaccatacaaagtgaaaacagcaaacgatcagacaacccacaagaaa

SEQ ID NO: 485820 - DNA, 410 bp, Homo sapiens
tgtatcacatcaatgtgttgctataggtttagtagtcagtaagcatataaatgtcggaaggatgacccaaaggggcttatcatcctctcttccattaagtcatcttcatcatctagcctgcaacatagctccataacatcactgtacccgtgtgatagaacaccacgcgacactagatccagagcgggaacagtatgcacaagatgaaaagtacgaaggtcccaaatctcaggtataaatgatcacctccagtccatttggatggacaaacaccactgatgttcaactattgaacttgtcaaactatgtggatggcctgtgcagagcggacatcccagaggacgccatacatttaagacaagaatcatctgtaaggattaaaggtggaccagtacctcttgtaagttgtt

SEQ ID NO: 485821 - DNA, 773 bp, Homo sapiens
tttttcctcattaaactttttaaatggggtctcaaaatcctggtgacaaattttgggtcaagtggttcccattaaaaagtactgattttaaaaacctaataatcttaaaattggccacacgcaaaaaagaaaaccaaaggggtccacaaaacattctcttttccttctgaaggttttacgatgctattggttaatcattaaccagtcttttactactaaatcttaaatgggccaatggaaacaaacagttctgagaccgtttcttccaccatctgattaagagtggggtggcaggtattagggataatatcatttagccttctgagtctttctggggcagacctgggtgaccttgccagctccagcagcctttcttggtccactggttttggatacacacccacccgaaactggtctggtctcatatcaccagaacaggcaaagcagacccaaagggtgggatagtctggaagaagctctcaacacacatggggcttgccagggaaccatatcaacaatgggcaggcatcaccagacttcaagagaatttaggggccatccttccagttttttaccaaaagggcgatcaatcttttccttcagctcagcaaatttgcttgcaatgtgagccgggtggcactccaatacggggcatagccgggctaaattgggcctggatggtccaggataatcacctgagcagtgagccagctgcttccattgggggtcattttgctggcacagaacgttgccccgagaactcttgcgacctt

SEQ ID NO: 485822 - DNA, 260 bp, Homo sapiens
atttttgaaggggccctttgttttgttttgatcctggtcccacagggtagtgcccctcctttccaggggtttttagtagcttacccgtttagcccttttgaatatgggttttggggtcagcctggtagctaaagggcccttgcatgttaactttttgagccccagcttccatgttttccccacaggggttccctttcccctcccccctagggttgtttagaggagcttagattaagcaaattaagtgcttgggcccgcca

SEQ ID NO: 485823 - DNA, 300 bp, Homo sapiens
gaaatcccggagtgagagtctctgtccactgacatgcaagactgtacatatccatctcttctctgagctcctgtaccataagtatgagtgacgattggaccttgagcacgtgacgctccgcctgtcacctggaagtgcgcggggctccgtgccgtcgcgcctcgtcggggccctggtactgaagcagcgtccgcgatgtccaagtggccgaggggcagcgtactgcggactcttgaaatagtaaaggtagcacggcgcgcgtcaaacacgaaccagcggctgcggtagccacgcagggcc

SEQ ID NO: 485824 - DNA, 355 bp, Homo sapiens
ctcaccaagccatccctctttgcctctccccatccctcgctggcctgctcctgctccccttctccacatacttaccattaggcctatttaggtagaatctatagataccgtttgtccaatagaggttgtaaaaggaccgcagtgcctagtataatacgactattactgtggaccacgtttgtataacgaaatgcttggcgtacgcgctaaatctttgttggccccctcgaaggtgataacttctaagaaagcggactggcccaccttatataaaatataaaggaaagaaaaataatatattttttaagatttataaatatttttaaaagaaaacaaaaaaaccacaaaaaaataa

SEQ ID NO: 485825 - DNA, 819 bp, Homo sapiens
agcggcttccctcactccccagccgggcgggagcatttattccccagattaattcccctttatgggggggggcgggatgtgtgtgtgtgtgtgtgtgtgtgtgtgtagtgtgggggggaagtgtcctctgaaatagtcaaatcattattagagctctttgtgcctctttgtcgtgtcggcgttgtgataaaatattccttttgagaggtgggaaaacgtggaaacaccacagtaggactgcgcgccgacagtcatacgccacagcgtacgaacaacaaaacgacaacggaagaaaaaaagacgcgacgagggagcagggacgaggaaaagacaggcaagaggagagataaaaaagagcggcgcggagacgaccctgatggcgcaagaagaaagagcaacggaacacggggcatacagaccaatacagccaccagccaacacgctcgatacaaacgagctgtgaggcaggagcgccaccagcagacagacgagaagactgcggagatcccagcgcgcacgagagaacagcgagacgaccaacacaggacgcgaagaagcaatcagcaagagtggggacgcgccaaggggagaaacgcaaagagcgggaagccgcgcagcggaacaaagagaggcaagacatggagacgcagccagaggagcgacagctcgacccggaaccacacgcgaggagccgagacgggcgacggaccaactggcaagaggcaagcgcgacaggaggcacgcacaagcgacagcaggacgagaaccacggaagagcggagaggaggacaaatgggagagcgcacgagaggagaacac

SEQ ID NO: 485826 - DNA, 570 bp, Homo sapiens
  misc_feature (336)..(336): n is a, c, g, or t
cttgaccaccttgcatttctgtaggagtgcttctcctgctactaccagggtttccccagagtttgcaggcacctccttctggtgttctatgggaaaatatggtttcttcctcggggaagttgtggcccccaaggatatttgcacccggggcggtggcaatatttcgagcgccttcccaaccccatcccctgctttatattctaggtgtgctcatactctagccgccttttttccccctgtggaacccccctgcaactcttcattaacccaccccttctggaaattttcttttgctacaggtataatttgtcttacaaataaaaacttgctaatctntccctcacctactatttaagcctcatcgatagattcttcccccgcacttctccaccctcttgtaaaaaaggttggtgaccaccccttgtacccaccgggagacattttttttatcttgatggtattgaagaaatatttttatagcagaacacacccagaggcacacgcgacatttttttctgtggtaaaatacaacaaagtgtcttttctttctggtcactacaaaaacaaaca

SEQ ID NO: 485827 - DNA, 252 bp, Homo sapiens
gttaacacagattttgttgtagtggtcaaaaatgatttaaaagattacttgttcaatgataagaaaacgactgtttcgcattatatttatctggctgattttgagtttcgattgactgatagttttaaaggcatttattttgaaaaaaattatattcccttttcatctgttaaaagctattgttctcaacatgaacttgaatattcaaatctcaaaaaagatgacctcaataaaatattaacttttaatagt

SEQ ID NO: 485828 - DNA, 649 bp, Homo sapiens
  misc_feature (517)..(517): n is a, c, g, or t
  misc_feature (610)..(610): n is a, c, g, or t
tatttgtagctattggaaataagattattttcttggtttattttctagattgtttgctcttggcatacagaaatgctgctgatttttatatgctgactttgcatcctgcaattttactaaacctcagttctaacagttttctggtagagtccttaggtttttctaaatttaagatactattgtctgcaaacaagggtaatctaaatttttccttccaatttggatgccttttcttttcttctcctgtttaattgctctggctaggacttccagtaccacgttgaagaaaggtggtgaaagtgggcttccttgccttcttccagatcttacaggaaaggcttttagattcccccctcatgatactagctgtgggtttatctgtctgtggcttttattgtgttgaggcatgttccttctacatccagttgagtttttatcatgaagggatgctgaattttactgaatacttttttggcatctatagaaatggacatatggttatgtccttcattctttngatgtgatgtatcgcatttacagatctgaatatgtttttaaggtggttctcacattgctataaagaaatacctgaaactgggcaatttatatnaaaaaaaaaattcattggctcactaattctgccaggctg

SEQ ID NO: 485829 - DNA, 372 bp, Homo sapiens
  misc_feature (96)..(96): n is a, c, g, or t
ccgggttcggtccacaggcagccgttctgcagcgtcgcgtcctccagggcgaaccagaaggtcgtcaccgtgatggggtcgctctcgaagaagctnggcgtcctggtgccagcgcacctcgccgccgatgccgggctgcttgaagatgaacatggactgccagacctgcggcttctcgaggcccaggctggccgccacgccgcgcaaggcctcgcccttggagaaggcgctgaagaccgggtcgaggtcatgcatggcatggccaatcttgttgatggcgagttccttgggcacgcgcagcttgccctgttcatcgaaggcctcctcctcgaagaagcagcgcacctggtcgccgctgtcgaggaagtggtc

SEQ ID NO: 485830 - DNA, 419 bp, Homo sapiens
  misc_feature (28)..(28): n is a, c, g, or t
  misc_feature (43)..(43): n is a, c, g, or t
  misc_feature (179)..(179): n is a, c, g, or t
  misc_feature (299)..(299): n is a, c, g, or t
  misc_feature (301)..(301): n is a, c, g, or t
  misc_feature (306)..(306): n is a, c, g, or t
  misc_feature (309)..(309): n is a, c, g, or t
  misc_feature (311)..(311): n is a, c, g, or t
  misc_feature (315)..(315): n is a, c, g, or t
  misc_feature (320)..(320): n is a, c, g, or t
  misc_feature (325)..(325): n is a, c, g, or t
  misc_feature (331)..(331): n is a, c, g, or t
  misc_feature (335)..(335): n is a, c, g, or t
  misc_feature (343)..(343): n is a, c, g, or t
  misc_feature (351)..(351): n is a, c, g, or t
  misc_feature (353)..(353): n is a, c, g, or t
  misc_feature (398)..(398): n is a, c, g, or t
gaaggtttgcccgcttacctttccccanctgttccttctgggnacctatgtttttagaagcgtcttggtcactggggattccctaaggttttcagcaatggggctgacctcttcggggtcacagaggaggcacccctgaagctcttccaggccgtgcataaggctgtgctgaccatcgncgagaaagggggtgaagctggtggggccctgtttttagaggccatacccctgtctatcccccccgaggtcaagttcaccaaaccctttgtttttttaatgattggcccaaataccaagtntnccctnttnangggnaaagnggtgnattccncccnaaaataantgcctctngntcctcaacccctcccctccatccctggccccctccctggatgacnttaaagaagggttgagctgga

SEQ ID NO: 485831 - DNA, 200 bp, Homo sapiens
  misc_feature (80)..(80): n is a, c, g, or t
  misc_feature (82)..(82): n is a, c, g, or t
  misc_feature (87)..(87): n is a, c, g, or t
  misc_feature (90)..(90): n is a, c, g, or t
  misc_feature (92)..(92): n is a, c, g, or t
  misc_feature (96)..(96): n is a, c, g, or t
  misc_feature (101)..(101): n is a, c, g, or t
  misc_feature (106)..(106): n is a, c, g, or t
  misc_feature (112)..(112): n is a, c, g, or t
  misc_feature (116)..(116): n is a, c, g, or t
  misc_feature (124)..(124): n is a, c, g, or t
  misc_feature (132)..(132): n is a, c, g, or t
  misc_feature (134)..(134): n is a, c, g, or t
  misc_feature (179)..(179): n is a, c, g, or t
aaaaagcccccccacatgctccatccggattaattattttttttttcggcaaaaaaaggtactgaacatatttccaagtntnccctnttnangggnaaagnggtgnattccncccnaaaataantgcctctngntcctcaacccctcccctccatccctggccccctccctggatgacnttaaagaagggttgagctgga

SEQ ID NO: 485832 - DNA, 431 bp, Homo sapiens
  misc_feature (74)..(74): n is a, c, g, or t
gaactctggaggcgggagtttgccagtgagctgagattgcaccattgcattccagcctgggtgacaaagtgagngactccacctcaaaaaaaaaaaaagggattccaaattccagcaaataaaaaactaataaagaatggaaggaaggacaaagtagacaaaaaaaataactaaacaatttcttgaaatgaaaaggatagtcattaaaatttttttaattcaatgaatgtaaggattatccacaggttttaaaaaccaccggtcaaaggttactgggaaacgagatctgcgcaccatttcagagttggcagctacagatcacctttgcctagtagagatcacccgaaccaagccacggacagactgacatcatgagcttcctgataggatgcagtgggaaggacacatcatcatctgtgcagtccttctgc

SEQ ID NO: 485833 - DNA, 343 bp, Homo sapiens
gagtgcaccggatgtcacttatgtcatttctagattgtgcatattcagatcttctctactaatctagtaaatctagctagcagtatatcaatcttttttttatcctttccaagaacaaacttctcatttagtatatcctttgtatagttgttatgggtctcaatttcatttaattctgttctgattttagttatttctttttttttctgctagctctaggtttagttattgttactatgtatatctttatttgttattttagggtgcgatttcaggtggtgaatttacaaatgtatcttgctatgatgtaaactttcggtgctagaaattttctttcttaagg

SEQ ID NO: 485834 - DNA, 194 bp, Homo sapiens
ttgtatctaaggatcctctttgggacggcggcacggactttgtcttcctctgggcataggtttctccagaggaccaggagaacaagggtattgatagcaacctgcacgtgccgaagacggggacgccaaagctgcggtacaggaggccggcgaccggtggtcccagagttcggagcagtggttgtacagaggcg

SEQ ID NO: 485835 - DNA, 901 bp, Homo sapiens
  misc_feature (335)..(335): n is a, c, g, or t
ctagccaggacaaactgaaattgctttcttctgtgacgaagattataggaactacaaagctaatcccatttcatcctggtgaagcatgggggagggcttcctttttgcatacctgtattaagctctttattccactgctgagtttttgaaattgacaaacaaatcttaaaaaattaatcccaggctatactctttgagctaaaatctggttatttctttctcttcaggtctttctttccttggggggggctttttctttgttgttgtaaaataatatattatgagaaaaacatttgatctttttaaaggggaataaattgttattaaaaattaanaacggagagggggacgcgagggggtgaggtagtctaccgcgtgtgatctcagtcagcgcccccaggtaggaagaaaccggggccccttgcgcctcaaggggggaatttttgcctctctcccttaaggggggggtacgagaagagagcgcgctaatacattgttcgacgcgacgccggggtggagcgaccgcttatacctctctcaagggggggtagcgggtccccaaggagaggggatatccccgggaaataacgggggcgcgggccgctatatggcgctgaccctgaaaagggcggtagggggcggttgccacaggccccgtcccccgtgacgtcccaaaacaaaaatctggacgtagggggggcaacgcacgcgggctcaagaaaccaagagggtcccgcggaaatgccagagagcccccgttgaacgagtgagcaggggaatctaacagttttttttaaggagagctcgctttctcaaagcacgtggttgttatgcggccggggcgaagccgaggggggagaacaaacccgtccagcggcgcgggccttaagcgagagctaga

SEQ ID NO: 485836 - DNA, 966 bp, Homo sapiens
tcgcggtggtggcggtgcaagagagctgaaggaggcgcgagggcgcggaggttccaggccgagcagttaggccgcgagcgactgcggcgccgagccgggcgcatcgagtccccggcaccatgttgggaagaggaaccacgcgggtggagatctccgcgccgtccaacttcgagcaccgcgtgcaccacggggcttcgaccagcaggagcagaagtcacggggctgccccgccgagtggcgagaagccgtgatcgaggagtcggctcgccggcccaagcccctcggtcggaccccgcctgcaataagcctccatccagcgcgggggcccccaaagaaccatcgtgcggggcgaagcaaaaggttgccgaaagcatgggggccctcaaccgcttgctgcttggaccgatgtttgagaaacattgtcggtgagaccgctaccaactccctgcggagagaacagcccgcagcggcgccggccgtgcccgcagggaaactgggatgccagaggagcccggccaccaaggggccagaggggggcccagggaaggcaggcaagccgagggcggctacgacggccacaaggagggggtgggggcaagtggttgacaggcggacggggcggggccagagagaagagcccaggtcctcgagggaagggtcaggggggccccacggagtcccgcgggaaaaaggcccccactcggggacgatgtgggaacccccgactgtgggtccgggcagtgggggaaaacggcgctgggcggccttaaaacccaacgaggtgtgaagacaccccctccccgggtccgagggaccaagagggggcccaggccaaaggggggcgagcaccaggaccacctggccccgagaggggacgccgctgtgtcaacacacgggcgcgaaagagcagacgaaggagcaacaagagcagacacatgaggacagaagacagacgatcctctgtca

SEQ ID NO: 485837 - DNA, 344 bp, Homo sapiens
  misc_feature (314)..(314): n is a, c, g, or t
atgccactcctcacagggctgtccacaggcgaaaagtcagtgctttttccgtccggcaatggtaccacgtgtttttccagatgtctgccacaggtatctcttcacctctttctccctgctactgcacgatcggtccacagtctgtgcctgctccttcataatatcatagtgctgttgcaggcacaaacgcataaacctgctcgagactgtggtgagagaagctgattcaggattgaattgctttcccgaggtctgcagagatgctcgacatgtgctgtccagccatgacgcgcagacggccatcctgtttcccncttcgccacagtccgtactaggcccggggc

SEQ ID NO: 485838 - DNA, 696 bp, Homo sapiens
  misc_feature (448)..(448): n is a, c, g, or t
  misc_feature (579)..(579): n is a, c, g, or t
  misc_feature (581)..(582): n is a, c, g, or t
  misc_feature (585)..(585): n is a, c, g, or t
  misc_feature (596)..(596): n is a, c, g, or t
  misc_feature (606)..(606): n is a, c, g, or t
  misc_feature (615)..(616): n is a, c, g, or t
  misc_feature (619)..(619): n is a, c, g, or t
  misc_feature (649)..(649): n is a, c, g, or t
  misc_feature (656)..(656): n is a, c, g, or t
ggccggctggggccctgggtacgctgtagaccagaccgcgacaggccagaacacgggcggcggcttcgggccgggagacccgcgcagccctcggggcatctcagtgcctcactccccaccccctcccccgggtcgggggaggcggcgcgtccggcggagggttgaggggagcggggcaggcctggagcgccatgagcagcccggatgcgggatacgccagtgacgaccagagccagacccagagcgcgctgcccgcggtgatggccgggctgggcccctgcccctgggccgagtcgctgagccccatcggggacatgaaggtgaagggcgaggcgccggcgaacagcggagcaccggccggggccgcgggccgagccaagggcgagtcccgtatccggcggccgatgaacgctttcatggtgtgggctaaggacgagcgcaagcggtnggcgcagcagaatccagacctgcacaacgccgagttgagcaagatgctgggccaagtcgtggaaggcgctgacgctgggcggagaaagcgggcccttcgtggaggaggcagagcggttgcgcgtgcagcantnntgngggaccacccnaattacaagntaccggccnnggngggcgcaagcaggtgaagcgggttgaagcnggttggnaggggcggatttccttggcacgggcttggttgagcccgag

SEQ ID NO: 485839 - DNA, 192 bp, Homo sapiens
catacaacttgtcaagaaaatgacaattcccacctctacagcgtggtgcatgctgcttctgaaacatgctccttgttcttctccattagtagcgcacctgcacgctccttgaagactcacctcaaaacgccagactgaccagaccaaccccgacagtgcaaattaattgctgcgcccagagcagtatgagca

SEQ ID NO: 485840 - DNA, 134 bp, Homo sapiens
actgggtactatgagacttcagttccaggtggaaacggattggacgggctgactcttagattatactttcaccaggcgtgaaaagttcttcactatcactactatttgtgccttttcccttctttatttggttt

SEQ ID NO: 485841 - DNA, 378 bp, Homo sapiens
  misc_feature (154)..(154): n is a, c, g, or t
  misc_feature (229)..(229): n is a, c, g, or t
  misc_feature (278)..(278): n is a, c, g, or t
  misc_feature (351)..(351): n is a, c, g, or t
  misc_feature (361)..(361): n is a, c, g, or t
taactacatttgtaaccaattacttttttaactttttgccagttctgcttctgtaaaaattgcttcagctaaaatcccccctcgcctatttagaccacagtatagaaacaaaactagccccttcctcaggggccgagagaatttttagcgttantggcctctcggtcgccagctaataaaggactctttaatttgtctcaaagtgtggcgtttctctgtaactcgcttngtcacaacactgtaggtcatcatcaatgactattcggcagctccacagncacccacagcggtggctttcaccccagccctgggttccaagtgctcctatggacagccgaggcaatcggtttnccaaatgctnggcttacgtttcacagt

SEQ ID NO: 485842 - DNA, 103 bp, Homo sapiens
  misc_feature (52)..(52): n is a, c, g, or t
ttggagcatgaggaggaaatgaggagagatgaagtacggacgatgagactcntgaacaaatgagttgctcgacgaggaagaagacattgaccctttttatgcg

SEQ ID NO: 485843 - DNA, 137 bp, Homo sapiens
aaaaaaaaaaaaaaaaaggtgggggttttgggggaaaccccttctttttgggtttggggggggaaaaaaaaggggaaatttcctggtttcttttttggggggttttttttttccaaaaaaggggcccctttccccta

SEQ ID NO: 485844 - DNA, 1128 bp, Homo sapiens
  misc_feature (435)..(435): n is a, c, g, or t
gtatatttgaagtaactgtcaggctattatatcttaaaagttgtggaacatgtaccatgtacgtgtcattactagtatttcaatgcttcagtgctatgatgcatccaggtcatgttcaattctagtaatagaagaagtgatgttgattcatgttgtagagggctcgttgcattatagaacttttatcatatcttatatgcactacaatttgggatacatgatatagactataattctaatttctgaattcacccgtgttaagttaccattggtcagggatatttgccttgaactacgcgctaatcttcgatctagaagcaacgaacttctttggggtatgacagcggtggggtgcggcggcagtgagggggctaggaacagagcagtctctaatattaatgagtatgaaaatacattcaatcgcttttgatttanataaatactaagaaacgccaattggatgttgcgcatatggggggccgggtgtattggatcatgggcataatactgatttacgtcacgtactcttgtggtcattttaaaagggggttcataggaatagtttcgcttatcaagagagggtttcagtgcgagacacatcgagataccatcttcatatccaaggaaacattgtaccataactgtacaggtctacctattctccgtatctacgagtcaggacaactttcattaagggagtaataagcagtcaatagattacgcctcaattggattcttgggcattgagtattctctgaactctttccattttttcacaaaatctgcgccatacccaggtttaaagttacgcctgggggtcacaagcacggccatgtaggttactgttcaccaggttgtctgcaggtaccttagcatcgtgtgactcctgcaattattcaatacccctgtatcggacacaccaaagtccctttgtgcttacaaggcctcgaatatttgggggctagggatgggaccactaagttccggcaagcatctcacttttagaggctttcccgtcttcgtcgccatttatcggaggaacagccggaattggtgtcgaaaaacacgttgaaccgagatcgctgggttacaggattctccacagtggcatctcacctgtgggcacct

SEQ ID NO: 485845 - DNA, 301 bp, Homo sapiens
aaaacaagaaatttattaaatatacaaaacaggaatacagttcaattactgagtctaaaaaatttcatttttacatgaccaagacattttttacaactgtttacaaaagactcccacctgtgcataacctttggaccatgtgcgctatctttcatatctgcaagagaaacctaaagtgttaatatttgactgttaagtattgacatcttttagcgtggggtgtgaaatgcacaagtacccctgaatggctcaaagggatgggataatgctaaaaacactaacttgcgataaagtgcagttt

SEQ ID NO: 485846 - DNA, 451 bp, Homo sapiens
  misc_feature (262)..(262): n is a, c, g, or t
  misc_feature (299)..(299): n is a, c, g, or t
  misc_feature (302)..(302): n is a, c, g, or t
tcgggctttagcttccacagattcaaggaccaggagttgagaggaagcagcctcctgtccaggacccagttccgggcctgcccaaccctaggaatagatgctgtgatttcttctttgagcctctgcaactcctcaagcctgacttagagcatcctcaagtcacaagagagaaacaaaggacggaaagacgcaaaggacgcttgctggctttctcttttaaacgcctggctgaccacatccccgactctgggctgagccaggnccgaggctggccccagcgctgccggagcgggaggcanganttacgccttgcatcttgcctgatgacagacctcagacaatttctggggcagaggaaaagagcataataagcttaatttcagcattgtaaaggttattattataatcatttccctctgaagaattgtaaataattcatttgcaaaactct

SEQ ID NO: 485847 - DNA, 302 bp, Homo sapiens
actcctaaaataatttaataaatgattaacattgaatacagaatatgctgtgcacttacatttattcttatatgataaccatgtgcgtgctattctaatcaaagaaactagataaacaagtataatacagttggataaaaagatatatatatggaatctttctaataaatgcataaaagttataccaaaaaagtcataaataattaactttagaagagggttttgttatatacaaaaacaatgaaagagaaattttacttctcattttattattggcttttctgttttatttttggaaacat

SEQ ID NO: 485848 - DNA, 932 bp, Homo sapiens
cacgcgtcgcgaggaccaggctgccgtggctgctggatgcggaccttcgtgggcgccgggctgagtggggtgcatccgtttgctggacgtctacaatgcagcgcctggagcttggctttgggccggtggctgccacccgaggctctggctgtgggctgagtgctgtgggaccaaccaccgtgctctgcccgatagcccatgccatgtgcggggtgtccccatgccatgaacctggaggctggaatgtgttccatttgctcatgatgctcctgctcctggtcgcgtcggaccaacctgtgccgaatgagaagagcccctgccagcccaacccctgccatggggcggcgccctgccgtgtgctgcccgagggtggtgctcagtgcgagtgccccctggggcgtgagggcaccttctgccagacagcctcggggcaggacggctctgggcccttcctggctgacttcaacggcttctcccacctggagctgagaggcctgcacacctttgcacgggacctgggggagaagatggcgctggaggtcgtgttcctggcacgaggccccagcggcctcctgctctacaacgggcagaagacggacggcaagggggacttcgtgtcgctggccactgcggtgacctgcggctggagtttccgctacgacctgggccagggggcagcggtcatcaggagcagggacgccagtcaccctgggagcctggaccaggctctcactggaggcgaaacggcgcatggtgcctgcgtgttggccgagggccccgtgtgtgggggagtcccggttccgcacaccgtcctaaacctgaagggagccgtctacgtagggggcgctccgaccctcgcagctggccgtgctgttgccgtgtctctgggttcgacggtgccaaccatggtggacgtcgtccttggaggtacc

SEQ ID NO: 485849 - DNA, 162 bp, Homo sapiens
tgctcggtaccgattacgctcctagacggtgggtaaaagtagctgaaaaacatgtgcagggcctggcacagtggctcatgtctgtaatcccagcactttgggagtgccaaggctggtggatcacctgagtgtcagtgagttctgagaccagcctgtcttggg

SEQ ID NO: 485850 - DNA, 1054 bp, Homo sapiens
gcaaaatcttccttattctgaaaagatgacagttttgttagtctacaatggccctcatatgctggaaccaaacacatggaatttaaaggctttccaaaggcggcggcgccgtattacattcactcaacccttcattaatcaacacagtcacacagcagcagggcacacttgcggcaatttttattgtccaacaattcatcgtttcatcacagtcataggctccaactgcacatcaccacaggcagcattcactcagaacacgcacacacagcagttatttttggcacaacctgcttttacaatcacaaatcagcgttgcatcacatggcaaccctataatgaccattatccaaaatagacagctgggtagtacaagttaacgtcattctatcagatacttaggttgacacttggacgttcattgagacacctctgaccactgagtcattcagttctcatgttaaaatggtacttaactattacaaatcaaaggtacagtggaagaagggttaatcacaagaagttacttatatggtagccctgagcttagaattgcagagtaacttataaataaacattaatagagcactaaagatgactctagaagcctaagtcgctaagattatctacacaagtgttatatataagtatttaaaaaattgatatgaaaatgtctaagtgtatagtaagtaagttgatgaacagatcatagatcatgagatatacatactgacaaaaaggattaccatatcatctcccagaacagacacacgcacaatcaaatgacgaccaagaacaagacaagtaaaacgcaaagcattgaatgcatagtacaacaacaaagagacactatacacagggaggaaaacacacaagcacacaagagaggcatacaacaaacaagccacagcacacaccacggcaacagcacacagacctgcacaaagacatggcacacaacaccacaggcacacaaccaaaacccaaaccacaacagaattgcaacagcagaacacaaacaaaaagacgacaaaacagcgaagaacagcacact

SEQ ID NO: 485851 - DNA, 238 bp, Homo sapiens
agttgatggagaacctgtgaagatgtgataaactgacacttgctctatagagcgaggtactcacaaggcgagttggggaatatgcatagctcgagacagagctgagctttcgcggaatagctctagcgcgcccgctctatatggtgagttgtgacccacatagagtccacgggcaaggtgaatgggatacattgttcgaatggcaaggtcccagtgtcgcggacttgcgattcggtcg

SEQ ID NO: 485852 - DNA, 1017 bp, Homo sapiens
agcggctgtgtgagccgtagccttaccaagggaagtggttgtgtgatcgccatcttacggaacagatgttctgcgtactctgtggcgcactcgtggcagcgggcgaaccctcttcagacatcgccgagcatctgtcatgtctggttgcagctgagtagagtacctctgtgggatcctccgactagtagttcaccctaggggccctctacaggtgcacagccgccgacggaccgtcgacaacgctgtgcagctcggcctgcacgtgggaagcagttacaggttgatgagattgtggcctccggcgcaaggtacttaatgcactgatgtgcggactgttggtggggtcttaagcttgtggtcatgactacacacttgctgtggttcccctgagatcttaggtgaaatgccgtatgcaggtggacccgcgcaataacgctacaatggcagtatgttaacggagttcatcaagttactcattcaaacggagggactgagtgttcagtgcgtttgtgcgcgtacaaggtgatagggctcctgacttctctcgttggcttacctcgcagtgctagggtgacatcatgcaaggtatctggctatggtatgaagctccttctaataagatctgtgtactaagcaagtatgcttggcagagggatgacactaccttatgcgtctggcgcacatcactatatgatgagctgcgctctgcgcagtggctgaattctttcgctgacattgccctggctcctatgcgaagcgtgtaaggttcgaattcaatacccagtccaggttactgccaaccacttttgagggatgtggcctcccacagatgtatagggcacgaagggcgtagagagcatgtctacaaggggggtttgctcctctctggaatgacgagaaaataccaataaacgcctgtatgaacttcggcatgcttttgaacgtacctgtttgaaggcactggtaaaagttagcaggattcgtaagccgcggcatggaatgttcaaggcatagcac

SEQ ID NO: 485853 - DNA, 902 bp, Homo sapiens
  misc_feature (11)..(11): n is a, c, g, or t
  misc_feature (24)..(24): n is a, c, g, or t
  misc_feature (45)..(45): n is a, c, g, or t
  misc_feature (54)..(55): n is a, c, g, or t
  misc_feature (81)..(81): n is a, c, g, or t
  misc_feature (137)..(137): n is a, c, g, or t
  misc_feature (169)..(171): n is a, c, g, or t
  misc_feature (189)..(189): n is a, c, g, or t
  misc_feature (301)..(301): n is a, c, g, or t
  misc_feature (522)..(522): n is a, c, g, or t
  misc_feature (555)..(555): n is a, c, g, or t
  misc_feature (611)..(611): n is a, c, g, or t
  misc_feature (729)..(729): n is a, c, g, or t
  misc_feature (806)..(806): n is a, c, g, or t
  misc_feature (852)..(852): n is a, c, g, or t
tatgtttgttnatatttaagtatnaggatgtagagagggaaaggnaagagaggnnagtcaaacgttagtatgtaaaaggangaaatattaagaaaatgagaacgaataaataaaaagagcagagaaggaggagaaanaagaagaagggagacagtaaaaaaagaaaagnnnaaaggagaagaagaaganacagacggagagaaacggaaaaaagaaaacatcagccccactctatcagaactcaacacgaatcatcaccaagtggacaaataaagacaacccacttcggctcctgccaggnttctcgccctttacctctgcaccacccgctcctccaggttccgctggttccccctgtcccctgctcccctctatccctcgcctcacgcgcttccctctctctctccacacgctcccgctccccctatcgtcatcctctcgccccgccccctttctccatctccttttcccttcgccctctacttgacccaactcaccatctactcaaccactatacaatcnagttcctactctcttcttgcttttcttacttcntcggacgagctctcgccgttatgtccgttagtgtagcgtgcgattggtgtcttatncccttgtacgtaactatatcaatcattccctcatctacctccctccccccccctcccccccctcctccccagacccccacgtccttccatgtttatgacacatcttttttacattgcnaacaactaatcccgcccctcccagccaccccctccccgccctctaccgcccacccagactcgccagccagtgagccnaccgacccggtcgtcttgcccgtgccgtgcctccttgtacccaccncaccacctccccgcgcctccctgtcccacctctttcttcttcatctaatt

SEQ ID NO: 485854 - DNA, 296 bp, Homo sapiens
aggatgtgatgcatgtaggctgagatcttgccattgccttggggacagaggaagactctgtctcaaaaacaaaaatcaaacctcttaccacttaaggtgaagcatacccatcacatatttaggccaggaacagaggggtaaaaaagtcctacagccactgatggcccccaggtccctgcccactagaccacaggacagtatggttgtccaccccatcaattaccccgactcagatactcaatatattccacctgctcatcatttgtcattgcactccaagggagttcatctaaatt

SEQ ID NO: 485855 - DNA, 377 bp, Homo sapiens
  misc_feature (22)..(22): n is a, c, g, or t
  misc_feature (45)..(45): n is a, c, g, or t
  misc_feature (118)..(118): n is a, c, g, or t
  misc_feature (121)..(121): n is a, c, g, or t
cttcatagtatcactggtctgngtatttcagtgtgtttttgtagnggctggtaatagtttctcctttccatatttagtgcttccatatttaggagctcttgcaaagcaggcttgaggnggngatgaattccctcagcatttgcttgtctgaaaaagaccttatttctcctttgcttatgaagcctagtttggccagatatgaaattctgggttggaaattattttctttaagaatgttaaatattggcccccaatctcttctggcttgtagggtttccactgagagtttcagttagtctgatgggcgtttctttgtagatgacctgtatgcccctttttaatcttcacattagtactgacaatgggtggcttccagg

SEQ ID NO: 485856 - DNA, 905 bp, Homo sapiens
gagaggacgactgcagacttcggttgaggaaacgggtatttcatgtctcacggacgtaggttcgtgcagtccacagcttttctgttggtatgcagtaattaataattggagctggaaaggcagatcgtgtacattacacgagatggacggtcagaagaaccttgtggcaaggacaaggttgttagaacttcctgatactggcatgtagacatttaatgcaaccactggtcgtgtgctgttatggtgccagactctattgcctgctgctttcattgtacagtattcaggcattgtgagcgtctcagtctacatcgtccttggccctggtctcggtgaccatcagctttaggatatacaagggtgtgatccttagagctatccgagaaatcagatgagggtccgacccattcagggcatatcttggaatcgtgaagttgttatagtcgtagaggagttggttcagaagtacgagtcaattctgttcttggtcatgtgaaactgacgataaaggaagtcaggcgccccattcttagtagattgatggaggtggattctctgaagtttgcagtgttgatgtgggtatttacctatgttggtgctggtttaatggttttgagtcatgatgtgggctctcatttaaattctgcaagggtccgtgttatttattgaaccggagttatggcctgatagatcgattatctaggactttgcaccttagatgttacagatggtgtggtaaaatccaagctaaattcctggttgagaggtaaggtgattgtaaagccaatagtgagggggagcatttcaggggaatcctaggacaacggggaggggaggaaaaaaacttgtggaaaggtaaagctgagaaaatggcgcgctgtggggaaaacaggggcggggataaa

SEQ ID NO: 485857 - DNA, 1072 bp, Homo sapiens
  misc_feature (1072)..(1072): n is a, c, g, or t
gcacaaatgaaagaagctggggatggcagctaccactgctactgtactggcgaccgctctatagccaaggaaggcttcgagaagattagcaacaggtgctaatccaggaggaaatcaggagaggtgtgatgttagctgttggaatgctgtaattgctgaacttaaaaagcagtctaaacctgtgcaccacccctgaacgagattgcacagcgttgctacaatatctgctaaacggaagacaaacgacattgtgctaaatatcaatctctgcatgcatagtgagaccacatgttggaacgaaagggtgtcatcaccgctaaaggatggcagaacaccccctgccactgcctcgaattcacgacagtgattgatcggcactgaagtttgactcgacagagtacttttaactccaatacaccttcctcactaccctcaagaaggtcagcaagcatgatccattcctgggaatcacatatgtccctgattgacctgaacccagcaagcagcatataggaatcaaggcacaaactgaaccagactgcacagaaaatgcgccaccgcagcaccggaagacctaaggacagagagatagaaaaagtatgcgcaccggacgacaacactgtccaacccaaccacgacacacggagctaggtataaggtccgagacacaaggggcgaggcaacctagaagaccacaagggcgaggagaaacaacaaagacgacacagccatacaagatgaactacgcacacggaggagcgaacacacacaggaaagaaggaagcgacacagcaataagtaaaaaacaaaagggaaaaagcgaacaaagaagagaagcgaaacagaccagaagaaagaacaggaacaaaagaacaagacaaaggagcgcgaacaaaagagaagaaaagacagaaaagaggagcacagaagagacagagaaaaaaagagaagtacaagaagaagagaaacaagggaaagaaaaaaaacgaggaaacaaggacacagcacaaagacctacgaacgacgacaacacaacacgaagcaagaaaacaaacaaagaaaaaccataagn

SEQ ID NO: 485858 - DNA, 258 bp, Homo sapiens
accgttgactattctctccacaacttccagacctggaagcactatacctattattcgtgcgcatgagctggagtcctaggcacagatctaagcctccttatattcgagccgagctgggacagacaggcaaccttctaggtaacgaccacatctacaacgttactcgtacacaagccatgcaataggggatacaacaactttttttttaataaccaaacataactcgcgaagaaaatgggaaaacagactaagacccca

SEQ ID NO: 485859 - DNA, 238 bp, Homo sapiens
ctgcggtctgctctcgcggctccctgacgctggctggtttgccccagcgggctgctggacgcagcggcagtcggctgggccacccactccatctcaggtccctgctggcagggccagcagctgcctgcgcactgcccccgccactggtgcctgcctccccacggcccatcttcgcagggtcacgcgctcgcattcgtcctcctggtcctcgctgtttcccaccccccatgaaacacaa

SEQ ID NO: 485860 - DNA, 785 bp, Homo sapiens
aggcttgaattctcttctgtcagtagctaccgaacaatcacagaaggaaatataaaactgtgtattcgaaggccactgactctgtgacttccgttgtctggccttcatgaagccaggcggtcaaatgggacacacagaaactcgaatcattgagtccttcctccttgggccgtagaggccccggagaacattggtatcccacactaacgaggaaaaattcatgcaggttgctgtagttgatctgggtggtacttatgcaacggggttcccgttccgtgacacattccatctgaaactcgattcgacataatgtgttgactatatctgtcatgctattttgtgccttcgaatgagtagtataattgaaagacaaaaaattcacaaacatgatgagaattgacaatcacagatacacacgataagaaatcaaaggtggtgtgagctctccctgaatcattcaccctatctcaggaggacgggatgctaagcagctgcaccttgttggtggttaaaagtgggcgacgcactaagcgtccggctgcatgtttccaggccaggccatgaacactcctgttgtccacatagagctgacgtgagaaatatctttcagcccaggagagaggggtcctgatcttgaggccgtttcctgggtctcagacaactcagaaggtagtggggatcccagagaggtggtggaatacgaccggccctccttacttgaggcgatcaatgctgtaatggtggagagttgggcgacgacggagcagttgtcaagaaattgaagg

SEQ ID NO: 485861 - DNA, 175 bp, Homo sapiens
tgtgcacactggctcgactcccagctcaagcaagccttctacctcagtgtcctaagtagcggattacaggcatgtgccaccacacccagctcttttttaattttttttgcagagacagagtcttgctatgttgtctagtctggtctcgaactcctgggctcaagtgatctggctg

SEQ ID NO: 485862 - DNA, 119 bp, Homo sapiens
gcttgttgtagaacgaagtagttgaaggaccagaggctaccatcctccccgaagggatctgagtccaagtctgggttatagctggagatgttagagttcgagccagggctgatctcgct

SEQ ID NO: 485863 - DNA, 929 bp, Homo sapiens
tggagaggagtctcgctctggtcgcccaggcttgagtggcagtgggcgcgatctcggtttcattggcaagctcggtctcctggggttcatggccattctcctgcttcagcctcccgagtagtcccaggagtagctggggactacaggggtgcccaccaccacacccagcttaatcttttgtggtattttatagtagaacagtggggttctcaccagtgttatactccaggagtggtttggactctccgtgacctcggtgaatccgcccgcctgggcctcccaaaagtgtgcggggaatatatagggcggtaagccacgcgccgcgggcaaatttcgggtatttttcagatagaaagtggggtacacaccggtgttgggccaggaaggggtcctcaactcgtgaaccctgggtgaactcgtgcccaccctcggcccttccccacaagtgtggcatagcgaaatataccgtggggcgtgtgaagccccacgcaactctcctatagccgctatacagtggcactaacttcttctacagatatatctaccacagaggcttagacattgtgggtcagtgcacacacatgcgcctctgaggggcggtcctctataaatgataaccctataacctttttatacacgcaaacgtgtacgcacaccacgtgcgctgtgggcgcctctctaaagcgggcagttttccagcccgtacgtgggaccatcttccacaggcactgtggaaacccacaactttccacaaaaagtggtgggccgtgggtgcaaattctccccgggccagtaacatagctcccacctagccactcgcggccacctcccctgtgccgtgggacgaaaactacgggggaacaatgagggggaaacaatccgggggaacaccgccgcagaggccaccaccgtcccacccttgactgacc

SEQ ID NO: 485864 - DNA, 430 bp, Homo sapiens
caggaattcggcacgagtctactctcatggagttgagtgtctagtgagaagaacaaacattagaataagtaaatggaaactcccatgccttgttcatctcatgtgatatttattgcagtcacccaccctttggtttgaaacctcttttcttaataatgtgttgcaagacattcccatgagggtacttgagttagagcaaagttgagatcgctctgagttgtacacatttctctatgttccagccgtctctccaccccttcccacaacagactgttgccacagacggttgcatcagggcaataccagtgggaattgctgaaggaaccgaggcattgggacctcagtttggaagacctgtactgtctcacctctgtatctccttgtcttttcatggatgtgtattaaataaaggagtgttagatgctgaaaa

SEQ ID NO: 485865 - DNA, 814 bp, Homo sapiens
  misc_feature (8)..(8): n is a, c, g, or t
  misc_feature (155)..(156): n is a, c, g, or t
  misc_feature (169)..(169): n is a, c, g, or t
  misc_feature (193)..(193): n is a, c, g, or t
  misc_feature (223)..(223): n is a, c, g, or t
  misc_feature (256)..(257): n is a, c, g, or t
  misc_feature (296)..(296): n is a, c, g, or t
  misc_feature (301)..(301): n is a, c, g, or t
  misc_feature (360)..(360): n is a, c, g, or t
  misc_feature (380)..(380): n is a, c, g, or t
  misc_feature (383)..(383): n is a, c, g, or t
  misc_feature (404)..(404): n is a, c, g, or t
  misc_feature (427)..(427): n is a, c, g, or t
  misc_feature (491)..(491): n is a, c, g, or t
  misc_feature (493)..(493): n is a, c, g, or t
  misc_feature (504)..(504): n is a, c, g, or t
  misc_feature (523)..(523): n is a, c, g, or t
  misc_feature (532)..(532): n is a, c, g, or t
  misc_feature (540)..(540): n is a, c, g, or t
  misc_feature (564)..(564): n is a, c, g, or t
  misc_feature (612)..(612): n is a, c, g, or t
  misc_feature (620)..(620): n is a, c, g, or t
  misc_feature (665)..(665): n is a, c, g, or t
  misc_feature (687)..(688): n is a, c, g, or t
  misc_feature (737)..(737): n is a, c, g, or t
  misc_feature (810)..(810): n is a, c, g, or t
ttttctcnggtggtgttctctggttcccggcgcgttccttgctcccggctcttggcgggtggttggtgggcgcttggttttagcagctgggtgccaggtgcctgcttctcactggggaatgtgttcaggggggatgtcaacactggccgggaaanncatcgggctttcncctcactcatggcctccataaggngggcgctgtttgtgactgctgtcgtcaggnaattgaacctgttgcctttctctctgcccaggnnccggggggctgggttctcagagaatgttcaaccccccanggccnccaccaagatggggcgcagggactcactggccgccttgtcttccttagtcttttctgtnactgccaagtccctgccgtngcnccgccgtcccccctcctcccngccctgcccgcctcgccgctctngctcctgctctttgtttcggcagctctggggctcatttgctccactgaggacgttagctgtgtntnggggctctttntgatcattctcgccgtccncacgtgggntctttttntgctttttgctgatggcacgatanttgctcctcttggccagagaactgaaggcatcagtaatctttcctgcngccttgtnggtcaccagcttgctcactttactctccacggctgtgagggtgtncccgggggcctgctccgttagnncccagctcttcgcagattggagaaggttagcaggtgctcagggccatanctctgcagatactgtgttttcagagatcggtaatccttggggatcagaccattctcagtgatagacaaaggcnctga

SEQ ID NO: 485866 - DNA, 916 bp, Homo sapiens
aagcttgtaaaatgtactatccaaattagaagcggattggaaatgcaaactaacgtgcagcttggatatctaagtgcacgttagttgcatttccaaatccaagtgggtgagcttagccactcttacccatgctctttccctggaatccctggagacctgtcgcaagatgatttccatataccagcatagaaagatcagaactcaagagcaaactctgagactggcacaatccaagaagatttcctggctctggcttttagtaatttgggactccaactgccactgtactggactgtaatttataaatccagtagctacgcagggtggaggctgggctgaggattaccataatgaaatgtactaaatcttcatttaggtatgcaatgtgaagtgaaggcatctgctttctttacagtatcagagtccaagaacaggatgtcaccatagataaaagcctcatacaaaggcagaactacactccaaatttaatgtgtttaaatggtggggcaccagcagaaaatacttctagctcagctttactcttcttccacactaggctgggcccagcaatacaggagaggatgaagggaggagctccaggaggcgagggaagagccctagcaggaggcatcacaacactcactgagagttgcccttcttaacaaatgtatagatgactagccagtggtcccttccttctcttatctctctactgtcagaacagatatgaggcaggtgcggtgctcacatctggtatccacacttggaggtggaaggtgaatgcagagccaggagtaagacgccgggcacaaagaaccaatttaaaataaaaatgagaacatacctcaaacactataggagaacagaaacaaaaagcactcactgtatcagcaacaaacacagattttagtaaaaa

SEQ ID NO: 485867 - DNA, 305 bp, Homo sapiens
attagacttcaaggctgacatctggtcctgtgggatcacagccatcgagctgtcaatgtgtgagcctcaaactctggactccaccccatgcgcggtctgttccgtgattcccatgaacagacctaccacactgtagggcagcaacagcaatgccttcaaggagttcgtggagggctgcctcaataaagaccccccgattccgggccacgggcaaaggagctcctgaagcacaagttcatcacacgctaaaccaagaagacctccttcctcacgggaggctcatcgactgcttggattacaaggga

SEQ ID NO: 485868 - DNA, 488 bp, Homo sapiens
ttttttttgagatggcgtctcactctgttgcccagtctggagtgcagtggtgtggtctcagctcgctgcaacctccacctccctggttcaagcgattctcctgcctcagcctcctgagtagctgtgactacaggcaccatgccaccacgctgggctaatttgtgtattttttattagagacggggtttcacaatattggccgggctggtctcgaactcctgaccttgtgatccacccgccttggcctcccaaagtgctgggattacaggcgtgacacccgtggcccagccgaactttcctttccatttggatcacaagtttaccaacatcactgcctttagatcccattgtcaattttggcttttgttgcaattgcttttggcatttttgtcatgaagtctttgcccaccctgcctatgtcctgaatgttgttgcctaggttttcttctagggtttttacggtttggggttttacatttaagtcttta

SEQ ID NO: 485869 - DNA, 574 bp, Homo sapiens
ccacgcgtcggtgacatgtgcctgtagtcccagctactcgggaggctgaggcaggagaatcgcttgaacccaggaggtggaggttgcagtgagccaagatgtaccaccacactccaggttgggtgacagaatgggattctgtttcccccaccaaaaaaataaatgaaaagaaaatcaaggccaggcgcggtggctcacctgtaatcccagcactttgggaggccgagtcgggcagatcacgaggtcaggagatcaagaccatcctggctaacacggtgaaaccccgtctctactaaaaattacaaaaaattagctgggcgtggtggcaggcacctgtagtcccagctgctcgagagggtgaggcaggagactggcatgaacctgggagtcggaggttacagtgagccgagattgtgccacgtgcactccagcctgggcaacagagcgagactctgtctcaaaaaagaaaagaaaatcaaaagctcattgcggccgggtgtggtggctcacgcctgcaatcgcagcatttgggaggccgaggcgggcagatcacctgaggtcaggagttctagac

SEQ ID NO: 485870 - DNA, 422 bp, Homo sapiens
  misc_feature (20)..(20): n is a, c, g, or t
  misc_feature (54)..(54): n is a, c, g, or t
  misc_feature (94)..(94): n is a, c, g, or t
  misc_feature (320)..(320): n is a, c, g, or t
  misc_feature (361)..(361): n is a, c, g, or t
  misc_feature (386)..(386): n is a, c, g, or t
  misc_feature (404)..(404): n is a, c, g, or t
  misc_feature (412)..(412): n is a, c, g, or t
  misc_feature (416)..(416): n is a, c, g, or t
aagcctcgggattttttagnggccagttaacctttgccccgatgcctccccccnactgaaataaagcccccttcccttcctacaaccttggtgncctcagaggttttgtcctgcagccttgtccctgcctacagaagaaatttcctaagcagcaatgcattcaagagatgacttgggtgctgttaaaagcattcagttttaaatgggaaacacagcacaaaagtttggaaaatttgcagactgatggtgcaagagaaaagaaaaaaaacattttctgaggagaaattcaagctggctgcagacatttgcataagtaacgnggagccaaatgttaatccccaacacaatggggaaaatgtcnccagggcatgtcagacctttgcganaacccctctcaacacagncctggaantctnggaaga

SEQ ID NO: 485871 - DNA, 327 bp, Homo sapiens
  misc_feature (87)..(87): n is a, c, g, or t
  misc_feature (225)..(225): n is a, c, g, or t
  misc_feature (303)..(303): n is a, c, g, or t
gcgatctccgctcactgcaagctccgcctgccgggttcacgccattctcctgcgtcggcctcccgagtagctgggaatacaggcgtntgccaccactaatttttttgtattttttagtagagatggggtttcaccgtgttggccaggatggtctcgatctcatgacctcgtgatccgcccgccttggcctcggaaagtgctgggattacaggcgtgagccaccgngcccggcttaaacattttctaatgaagacactgccttaaagctggcacaggatttgagctggacttctgtctccttgntggtcgaactgcgatacgctttcg

SEQ ID NO: 485872 - DNA, 156 bp, Homo sapiens
atgccggtgatctgagaccccaagcgtgatatagactcatttaaatgtctcaggtaatgtatatgttgattagcttgatttagccatttcacaatgtatacatatttcaagaacatcagtgttgtatacaataaatacataacaattttgtgtcca

SEQ ID NO: 485873 - DNA, 1113 bp, Homo sapiens
  misc_feature (220)..(220): n is a, c, g, or t
  misc_feature (714)..(714): n is a, c, g, or t
taaacagttttcaaaagttcttaaaggcaagagtgaatttctggtggatttaacgggtcccagctttataggttcttataagaacactaacgaggactacatagaggctttttcagcattacgggtgtcgtctccggtgccagagtgttggcaagatcaccattagcaaagtggaaattcactttgtgaaagcccattagaactttacagggtgagtgcnaagcaatcttaagaagaagaaggttaactccaccactatagaaggcataaggtggcttatcagtttctcatttttcctaatgtgttataacaatcgtggtgtttttattaccaggtggttgggcaagttaagtgggggtgttagcctgtgagaaggtggttaagagggtggtttgtggggagggaacttcgtgtgtaaagtggtttgggcgtgtaaacacaagggtttccaacttccggcgtgaaagtgttgctcgaaaagcatgtggtgctggctaacagtttcaacaactccggggcggggctcattcatgggccttacttatactctcccatgtgaagccaggttagcgttgcaagggtggtattggaaaaagccgtgtattgccgtgtcaattctctggggtgtcattctcctgtcccgcctccccgatactccttccccagtatccttccccttatattcgcacggctaaacctcttattgggtcagantggtgatccttggaagataaattgggaataagtgagtattggaagtgggagcccagaataagaaattggattgggtcttacgtgaacagcatggaattagcatgtagctttacaataaacacagctaatttagagacaaaacaaaaaggtggcggtgatgacaaatcgccagaagggggccaggtcacgcctacccgcggctgctggtgcaacaggggcgacataatggcagggtcgtataataaagcgacagcgcacgaaaaaaaggagcagtcggaaaccaggcaaccggactttagtacagcagccctgtgggtggaaaaggcgagaccacagaaagaagaccgaggcaaaaagacatggacaacgacactcgacgtgcgaataacagccgaacac

SEQ ID NO: 485874 - DNA, 571 bp, Homo sapiens
aggtattcacaaacttccttgaccggttggtgggtcatacagaaaagacgacgttacagggtactttcccgtcccatttacctgcaaaaagtcagggcaaagacgttccccaggcccaacaccagaattaaagcgggggggccgccccgcaggtgttccattcgcaaagggcaaaaaatccaccagcggtgcggaagcgccttaaccaggaagcctatcgcccaaaagcgtccgttttttgcagacagcgaacccgccaggggcggccgggaccccagagccccgggagcccccttgaggaggagcggcagaccagcgttttaaaccgcagccggggtgcccccgcggccgagcgccgaccttatcctgaaaccctgcagggagagcaccaagcggaagctggcgttttccgtttgagggtggggggcagtccccagctagcgtttcggcccttgccgccccgtgcctttaaatacgttttttatagagcctgggtttggaagccgggggcagccccgaccccttttcaggcgggtccccccaccctcaataaatgttgcttggggtggga

SEQ ID NO: 485875 - DNA, 654 bp, Homo sapiens
  misc_feature (293)..(293): n is a, c, g, or t
  misc_feature (373)..(374): n is a, c, g, or t
  misc_feature (376)..(376): n is a, c, g, or t
cggggggagctggctaaacagtttaggcagacgctaggtgctggagagaattgcgtattctcggagagggaggtctactgtacagaagggagtgtttccgagacggttaatatgaaacctagagggggacgggtggatttgtgtgggatgggggtttttcaaaaaggctttattagtggtgtaaaaacaccgaaatgttgggtttgtgtagaacgcaaaagtttctctcctttcttggaaaatgagagtttgccgcccggaatcgacatctagtagacttcctcttgaggatntggggggcgttgcaattaagcttgggaaagcccataggccgggataggctgaaggggggcgtacttaagccggttttggnnanagggttgtgggttccttggggcgccgttgataggctactcccaaatccattgccggtaggggcccaggacgttttctctcttcttaagtttagaccgtacaggaggtcttgcaaaaatgcaaaagaagtgcactgggttctgtgattcgtcatccccagatcctttgatgtctatggaggagtcctccttgttctcaagatcagatgtttcaatgtaccttgtattgggccattgcactccagcctgggcgcagagcaagactccatctcaaaaaaaa

SEQ ID NO: 485876 - DNA, 744 bp, Homo sapiens
  misc_feature (16)..(16): n is a, c, g, or t
  misc_feature (65)..(65): n is a, c, g, or t
  misc_feature (78)..(78): n is a, c, g, or t
  misc_feature (104)..(105): n is a, c, g, or t
  misc_feature (124)..(124): n is a, c, g, or t
  misc_feature (176)..(176): n is a, c, g, or t
  misc_feature (204)..(204): n is a, c, g, or t
  misc_feature (236)..(237): n is a, c, g, or t
  misc_feature (244)..(244): n is a, c, g, or t
  misc_feature (250)..(250): n is a, c, g, or t
  misc_feature (274)..(274): n is a, c, g, or t
  misc_feature (292)..(292): n is a, c, g, or t
  misc_feature (321)..(321): n is a, c, g, or t
  misc_feature (323)..(323): n is a, c, g, or t
  misc_feature (350)..(350): n is a, c, g, or t
  misc_feature (354)..(354): n is a, c, g, or t
  misc_feature (372)..(372): n is a, c, g, or t
  misc_feature (377)..(377): n is a, c, g, or t
  misc_feature (381)..(381): n is a, c, g, or t
  misc_feature (394)..(394): n is a, c, g, or t
  misc_feature (403)..(403): n is a, c, g, or t
  misc_feature (408)..(408): n is a, c, g, or t
  misc_feature (418)..(419): n is a, c, g, or t
  misc_feature (424)..(424): n is a, c, g, or t
  misc_feature (427)..(427): n is a, c, g, or t
  misc_feature (436)..(436): n is a, c, g, or t
  misc_feature (442)..(442): n is a, c, g, or t
  misc_feature (460)..(460): n is a, c, g, or t
  misc_feature (465)..(465): n is a, c, g, or t
  misc_feature (470)..(470): n is a, c, g, or t
  misc_feature (472)..(472): n is a, c, g, or t
  misc_feature (492)..(492): n is a, c, g, or t
  misc_feature (502)..(502): n is a, c, g, or t
  misc_feature (511)..(512): n is a, c, g, or t
  misc_feature (525)..(525): n is a, c, g, or t
  misc_feature (544)..(544): n is a, c, g, or t
  misc_feature (551)..(552): n is a, c, g, or t
  misc_feature (587)..(587): n is a, c, g, or t
  misc_feature (592)..(592): n is a, c, g, or t
  misc_feature (596)..(596): n is a, c, g, or t
  misc_feature (603)..(603): n is a, c, g, or t
  misc_feature (612)..(612): n is a, c, g, or t
  misc_feature (614)..(614): n is a, c, g, or t
  misc_feature (710)..(710): n is a, c, g, or t
tcagttcaggggatgngttctaatactattaataaatggtcaatatggcccaccccctgccaggnttccccctatgcntatttttgggggggtgtacgggtggnngggttagcgggtttttggngtccttgggggcgagggggggcaggggtgtctgggggttgtgcccggcaggnggggcctgggttgcggtgtgcctggggngggggtggatgtggccccctggggccccgggnntcttggngttgcngtcttgtttgcgtttttgtggggnggggcgctttctgttggntttgtgggctgggttgtggcctgcgggtntnggtgttggccggggcttcctggctggntggngtggcgcgttggtggggnggtgngggnggggcttgggggnttggggccnttttnggggggtttnntcgcnttngggtttggngctgtngccttcggggggccggtncgggngctcntnggtctgggggtcccgggctncgttctggcnaactgggcnnttgacccttttgngctggctgggtgggctgcnggggttnngggctgtggttgtgctctactttgggtccttaccnctgcntttngtttgcnctttcttgntnggggggttgtcaaaaacagtcttatcttctagcctaggtcgtttatttgggaatgtatcttcagacccactcacatcctgggatggcatcacagangctgattccgttacttttgaagaatttctttggg

SEQ ID NO: 485877 - DNA, 320 bp, Homo sapiens
  misc_feature (280)..(280): n is a, c, g, or t
ggtgaccaccaggtcttcgaagatgcgaaggtccttgtagacccgacgatgccgacgtgcgcggcgttggcgacggccaccgtgtcgctggggtgccactcgacgcgatacccacccgacttgtacgggttcgggtttccgagggcgttccacccgttgtaggcgacgagcgtgaacgaaaacgtgtcggacggcttgtacacgccccgcacgccggagacgtaatacggcgtcccgtcggcgacgagcgcgtgggtgtagttccagttgctggtggtgngcgcgctctcgtttccgaagtgactgggcatgagccccgc

SEQ ID NO: 485878 - DNA, 210 bp, Homo sapiens
ggcggtttattaacatcaggtccttcacgcgggtggtgagctggtcgatgaacaggatgggcaggtaattgacggttttccccagctggattatcttcatgttacggatgcacatcgggaggcagggaggacccgtcaaaggaaaagttgtccgccatcacgttcagcgcccagcggcggtcgccaagtgtgacactgcttcatccaggg

SEQ ID NO: 485879 - DNA, 332 bp, Homo sapiens
ttttttttttttgtatttttagtagagacggggtttcacatgttggtcaggctggtcttgaactcctgacctcaggtgatccccctgccttggcctcccaaagcgctgggattataggctaagccactgcacccggttaagaatactttttttcaaggtattctaaactctccttaaaatgatcctaatccacttccctattaacgcacattttagttgcttctcagtgattgatcagtactcaaaaaaaggtcttaatgaatgaatattcatcattatctcagatactggctcaatgattaaccctgtagtaatttaattgatttattcag

SEQ ID NO: 485880 - DNA, 158 bp, Homo sapiens
aaaaataaaaagttttttttttataattcagtcggcttttggattttcatatatttaactttgcaaaaagatttcctttggacatgttccaggcttgattggggtaaatctttttataaatacataaataaaagaaaaatatgcctttttcttttcta

SEQ ID NO: 485881 - DNA, 277 bp, Homo sapiens
  misc_feature (195)..(195): n is a, c, g, or t
aggtgcagtgtacgatctcagctcactgtgacctctgcctcttaggttcaagcgatactcctgcctcatgctcccgagtagctgggactacaggtgcccgccaccacgcccggctaatttttctgcatttttagcagagacggggtttcaccgtgttagccaggatggtctcaatctcctgaccttgcaatctgnctgcctcggtctcccaaagtgctgggactacaggcgtgagccaaagcgcctggtccatagtactttttaaaaattaattatg

SEQ ID NO: 485882 - DNA, 449 bp, Homo sapiens
tccgtattcccggcgaggagaatggcaaagattactacgtattgtagccggtggaggtgattgcaacgtgacatatgcatgccggcgacttcatctgatgcatgccgaggtctcgggcaacctgtatggcatgtgcaaggtgtctgtatgcatgtgcgtgcaggcgatgaaccgcatctgtgtgctaggacttggacctgcagggttgtgcggaacatcaaggccaccgatctgcggccccatctacatctctgtgcagccgccttcactgcacgtgctggagcagcggctgcgggcagcgcaaacactgaaaccgaggaagagcctggtgaagcggctggctgcttgccccaggccgacatggagagcagcaaggagcccggcctgtatgatgtggtcatcattaaacgacagcctgggaccaggccctacgcatgagcttgaaggga

SEQ ID NO: 485883 - DNA, 838 bp, Homo sapiens
acaagcgagcgccaagtcggacgtgacgctggacggacgccggccgcgtggacatcggcgcggccataatattgtcttcagcgcatcgtggacatctcgcgagttcagcatgtacgtcgtgggctctcatggacgcactactgacgctccacggagcttcgtaccacgctcccatgcgccgctgtgcgcggccaccggcacccaagcgcgatgcactgggtgcgagggactgtactcgaggagacggcacttactactcgatggcgcggagcggcagtcccccacgatgctgaggacgcacgagcaatcattgacccctgacaggtactccgatgtagccacagcgaatcatgggtacacctgaggacgcagaatgagtagaaaaaactgcgtaggcagccagaagcctctcgtaccaacttgagcgtgggagtgatgggcctcgcacggagtgcagcacgcaccgatggcgttgtctccgtagccagagggcccacgctctgaagagcccaaacggcgcgaacgcgccgcacgaacgattgcaccctctacggactcgagtgtctatgaaggaacgtatctaatgagcgccacgtgcaatggtactgttagcctaatctcatgggctggtcgtcatactccgcgtgttacggcactcttgggcctgctacccgttggcactctgtggatgcgattgcgtgtgactggggtctaaccgcactacctgtgctgcattctacggaggggtatgggcctcccgcatgccagtcctgcgtctggatctgacctggcgggatcctgacatgacttaactccggtgaatgatcctccacccgag

SEQ ID NO: 485884 - DNA, 260 bp, Homo sapiens
cccctttttttttttgtccctcctccccggggcggggcttggatttttttgggccccccccaggggcccctttggttttggggttgggccccgggccctttgcaggggggggtggtttccccccgccttcccccccccccctccttttttttgttccctttttttttaaattgggttaagtttttttttgcagtttcttttttttccccctttttcctttttttccttccccttttaaaaaataaaaatgccccggggga

SEQ ID NO: 485885 - DNA, 404 bp, Homo sapiens
  misc_feature (404)..(404): n is a, c, g, or t
gtctcgagtatttctcttctttttctgtctaacacatgttattccaattgagtggaatgtcgagatgcacacactatataggcacatggtctgaaccaagccaccagacaagaacaacacctatgcgaggtatggatcggcatagctacgtgtgatccacatagtccattcgtcgattgtgcctctcaaacgctgagaattgctgtagttgaaaccactggtgtagcgggcaagtagaacggttgttgtgaccgactagttcataacctagctggacacgttataatctgatcctgaagtcggaccatcagctatatgacaatggttatatggtgggctaaacaagaaccagatagatactaaggtttatatgaacacactcagccacgcccttactaggtgcn

SEQ ID NO: 485886 - DNA, 387 bp, Homo sapiens
catcgtgtgtatgcacgactgaagccgtcctccctgcagtgtgcccagagcccatcgtgtgtatgcaccacgatgaagccgtcctccctgtagtgttcccagagcccatcgtgtgtatgcacgactgaagccgtcctccctgtagtgttcccagagcccatcgtgtgtatgcacgactgaagccgtcctccctgtagtgttcccagagcccatcgtgtgtatgcaccacgatgaagccgtcctccctgtagtgttcccagagcccatcgtgtgtatgcacgactgaagccgtcctccctgtaaagtgtgcccagagcccatcgtgtgtatgcacgactgaagccatcctccctgtagagtgtgcccagagcccatcgtgtgtatgca

SEQ ID NO: 485887 - DNA, 352 bp, Homo sapiens
ggacgggcatatgttcccatcgcacaagtgaaagatgtgtgcgtggtaacagatcagatttctgtgtttgtgactatgttccagaggaacgatcgaaattcatgcgacgaaacctttctcagagatctccccattatgtttgatgttctgattcatgatcctagccacttactcaattattctaccattaactacaagtggagcttaggagataatactggtctgtttgctttcaccaatcatactgagaatcacacgtatgtgctcaatggaaccttgagacttcctcactgtggctagagcaccaggaccttgtccgccaccgtcaccaccacccagaccttcgatcctg

SEQ ID NO: 485888 - DNA, 170 bp, Homo sapiens
gttcacttttgggatagctggaactcatgtattcggcaactatgcagagtcaaatggcagaccagtgggaatggcacctcaagcctagaacctgagaggccatacaagtccccctcaatactgtctacacagcaaagtcaccaccctggacagttctacagaataacacg

SEQ ID NO: 485889 - DNA, 1723 bp, Homo sapiens
  misc_feature (416)..(416): n is a, c, g, or t
catacgtacgatgaattagagaactagtgccaaggctctgtaggcaccttggtgtccgaattatccgaacaatacgacacccggttgcatttactgcatgatccactagtagtcatcaatggcgtactacagtcagaaagccccgcagcaagtcattgccgcgtagtgaatgatgtcttgacgtataaatagttgaggcagagacttgcagaatgtgctgcttcagtagtgacggagtgatggagtagatgtgacctggacgtcatgctgcttgtcaagcgtatctcgttgagatgacatgatacactgcgaagaatgtctcactttacttgggtgaacgaggtaccgtcaaggttcactcagaaagacgactggattcgatgagaatgatgtagggaaccttctatgcacagganatgtttcacggaaagaaattgtgaatttgacatgaaccgtggtgcatactaacacgaggtatacccatcagtacatttcgccgcacttgcccggaatctccaagaaggaggacgcgcatatgcaaagggcgacacaaacagacaacacggaagggcaattggggccactatccgacaagaaatgtttcccctttaagaaaggacaagggacaacgcccaactcgaaacacgacaattgtatgggaaccacatgcaaatgggtcaggcacggcatgaaaagcacacacactgagggacggtgcacggaacacggctgacaggcacagggaaaagccaccgatctgcgtatacacttcacaaagggccgagccataaggtacttgcaggtgtacgttcacgtcgagcgtggagcccatacttgcagacagggccgtggggggagggccatggcgcgaacacagcggggggctccacgcgagagggccgcgaaagatgcacggaacgtggagggaaaaagggcggaggaagaaggggcccgaaaaggaggactaggtgataggcccccataggttggcacacacccgttgggtaaggaagtacaaacagctcggagtatggccattgagcgcggctggttggcatttccaaaagggaaaaggtcttcggaaaaattggacacgaacttcacactgaaccacgagcggtccactccggggagtcggggccaaaacgaacaacagtgggtggacacgttgggaagtcctagtgtcgcacttgggcacaccaaccgcaatgttgcactgcttttggcatagagaaaacggtgcgctgagggagggtcacaagacagaatatcggagcccgcaggtggtaacaaaggaacacgacaccctgaggggtggacaggaccaaggtgtgccgcggtacattaggagaagacacgtgtcgaatacacaggtgtgtaacatgataattccacaattgagacacgtgtttgaagacgctaatggatactttgtaggacaaaccgcccacacattcgtggggccaaatcgaccaaacagaattgcgtaagatcatcaaataacggaagtcatggtgctgtcgcaacaagatgatcacactaaaagtcggtgacctctccaggtgaaaccagtcggaaggagagatcaaccaccgcttatgatgggcaacaaaacgaccgaagaacgatatgccgaagctggagaagggatgataatcaagagagtgagagagacaaggtcatgtgagaaaccggaagaaaagtagagtcgagcagagagaac

SEQ ID NO: 485890 - DNA, 751 bp, Homo sapiens
  misc_feature (607)..(607): n is a, c, g, or t
  misc_feature (688)..(688): n is a, c, g, or t
gaaaaaaccttatatttccccacaaaaaccctgccagataatgtattcagaaggtccgccatcaaagtccccccaaaaagttcctttttatacttagaattcccattaaaaaaaaatttgggttccctttcctttccaagccttccaaaaataaaaaatttttggatttttccaaagggcaaaagtttggtccttgaaaccccccaaacccgtggaaagaatccaaaaaaacccaaaagatttccccttccaggatttgaagctttaaatttgttaagatggccccccctcccccaggttgaacccgaaattgaatcggttttggccaaaaagggtttttttgattttggcccttcaataaatcccccaacaaaacccaaaggctttctttttcaaaaataaaaaaaccctcctaaaattcataggaattctaaaggaccttgaatgctaaaaccgctttaaaaaaagaacaaagtggaggccacatcccttcctgatttgaaacctggttcaaagctaaagcgtggtatggcaaatcagccatccagcccaccagaataaacagcccagaaataatcccttgcatatatggtaaatgcctatgacnaatggtgccacagtcatgcaatggggaaaggacagtcttttcaacaaatggtgcttgggaaaattggacattcacattcanaaagatgaagttggacccttacccaacaccatatacaaaatttaacttaaaactggataaaag

SEQ ID NO: 485891 - DNA, 107 bp, Homo sapiens
  misc_feature (84)..(84): n is a, c, g, or t
  misc_feature (99)..(99): n is a, c, g, or t
tcggcagagcaagaaggtgatgtttctggccaagaaagcgaaggacaaggacgtggagtgtaagagcagtgcattgaggggatnagcgggctgatctgnactggagg

SEQ ID NO: 485892 - DNA, 1573 bp, Homo sapiens
  misc_feature (416)..(416): n is a, c, g, or t
actgtgagtgaagatcccatcccacggaggaacgggcaagtccctgggaaagatgccggagtctaagtggaacgtttgaacacagtaccgtcactcgacgatgaatcggctgctgtggtgaatgacgctactgggacgccagtgggatgcgagtgcaccgcatgagtgacgtacgaagaacggaccactgacacggcagctactgtatctatgacttcgtaactaacgcgtgtgatggggcactggcctgtagctgcactggcctaacgactgctcgtggagccgttcaatgcacgggggtacgatgataggcacatgtcgtggcaatagcacttgcatgggtggggacgtaggaaggcatgagagaaatacggaggtgtaggattgaggtgcaggtacgggagagggtaccagangaggaggctgtgttgagagagtatgggggtccgaggagtcccacaccgaggcgtccatggagactaaaaccctctgtggtgggagcacgtgatctattcgatggacgggagaatattcgcacagagagcgaatacacagaccaaacccatgggctccgaggcagaggcccctgataacgattatgacgcaagagagagggagggccactcgacatggggtgctcggggggagatcaacctcaagtctaaggctagcatgtgataggaaaaaggattcggtgtggaggtgcccatagggtattctacggttatgggaattgaacgtggcaatagtgtatatacaacggcaatattggcgtccgcaattgaggaggcgcgtgtcgagttggtctaatggaaccgatagaattgacaccgggtgcagagacgttgtggggggagccaaagagcggacgtgggtcatatggacagtggttcgggggcaattgttcaataagtgccgaaaaaggaagttgtacaggcaccgtttagggaattttggccgttggggtagaaggtgtggagaagaacccattggtacaagttctggtggagaggttaaatgaaatagaacggaaaataatgtgcacccagtggagcttataacccaaaagagtcaattagggtaaatcgcggggtgggagacttgtggatgttgacacaatagggtttttggagacaaggcgtggttaaataacaccgtttcgtgtatgtttagcacacgctaggaaaaggggcacaaaaattggattgggtgggagagtttcgcgccaaaggaagagttggggcaccaagaaagcggtaagggcatttgagggaaaaggagttgggtgtaaaaacaaagtttcctttaatgtaccgggggacgctgggcatccacagtttgttaaagaacaaacacgcggggaacatatgtgagagagggcgcgagtatctttacacccaaaatgattaggaaacgaaatcaatgatgttatatgaagccggcgcactagtgtgatgatcacaattgggagggcagcatattgtgtgaagagatatggtgggatattaactggggaatataaaaagatccacgtgtatcatatgggtcacataaacgagagggagtgataatg

SEQ ID NO: 485893 - DNA, 472 bp, Homo sapiens
aagcgcaggggctgagtgagtatttatcttttcatacttgacagtcgtaagggcggttttattcatgccagttaggaggcatgttatcatatggcctagtttctgtctgtctgcagaagccacctgataatcccaactggggacagtactgggaatagcgagggttgtgactgggttatgggcagcatcttgtccgtggagggtgtctgcttgggcctgatccagatatgttccctgttctccagggtgagggaggaggagaggatgacagaaatgtcatgccaggtaaggtcataagattgagtgatatacagaaattccttgtggaaggatgtggggtctgtggaaaaggagtcaagtctcttgtcaatctgagagccatcagctacagagaaaggaacatgaactcagactatgccttcagtctccataacatcccccaatggggggactttaaagggcctctgggcct

SEQ ID NO: 485894 - DNA, 220 bp, Homo sapiens
tggctcggccgactgggatatgggagctacaatttaagatgagattgagatttgggtggggacacagccaaagcacatcaaaattatttttaaaaagtaaaaataggccgggcacggcagctcaagcctgtatcccggcgactttgggaggccgaggtgggcggatcacgaggtcaggagatcgagaccatcctggccaacatggtgaatccccggtcga

SEQ ID NO: 485895 - DNA, 303 bp, Homo sapiens
gctcatacctgtaattccagcattttgggagggtgaggtgggagaattgcttgagcccaggagttttgagaccagcctaggcaacatggggaaacctcgcctctacaaaaaatacaaaaattagccgggtgtggtggtgcgtacctatagtcccagctacgggggaggctgaggtgggaagatcacctgagcctgtggtgacggcagaggtcagggcttgcagtgagctgtgattgtgccactgtgccccagcctgggtgagtgagaccctgtcttcgggggaaaaaaaaaaaagagtttgta

SEQ ID NO: 485896 - DNA, 428 bp, Homo sapiens
attgagcccctggagccctctttggtcactatgcagatccggagtgcgtcccagtgtacacatctctctcagccgcagaaattaagacagtctttcagccagctcgcatggactctgtccaaggacagcggaacatgctccacattctgcatgttcttaaaaccaacctggttgtcaagcatgggctgttagatatggcatcttgctgagcctccaggctatgtaaggagtctctctggtcaagaccctactggatcaaagtctgtatacagcctccctttccttcttcatcaagtccaccgatgatgttgtaaacatattatggataagaagcgccttgaatacgggattgtcaacggcattgcagcaattgcccccgtagtcatggccttattattggagtgcttatacatctttagtcttgcttc

SEQ ID NO: 485897 - DNA, 247 bp, Homo sapiens
cacgaggactacccctaaatgccaaaatgggaaaggaaaacactcatatcacgattgtcatcattggtcacgtaaattcgggcacgtccaccaccactggcgatctgatctataaatgcggtggcatcgacaatacaatcattgacaaatttgacaaggaagctgttgagatgggaaagggctccttcaagtatgcctgggtcttggctaaactgaaagctgaccgtgaatgtggtatcaccattga

SEQ ID NO: 485898 - DNA, 815 bp, Homo sapiens
cggaaaagaggttctgagtgtacatcttcgatgtgcgttgtaaatgtcataggtgtgcgcgatctgttcctgtgaaggtcactggtgcttgcacacagaccgtgcagatacctgtaagacaggggcggttaagtagctgtggccttggtggtctcagagccccacacctgaggactgtgagctgtgagcagttctctgagcattttcactgaggctggttccaactggttaatgggtatggattgtgtgcacagagacatttgggggacagggctaaacagttttctttactgctggaattttcagaacctaaatcagtgatgtacacatgagtctccatgaagactgcagagcgaggggtgttatgctagtgtatttcctcacagagccctctttgtgtcaagaggcacatagtgggactagtgtctgtgaagcacatgttaggaacacagtttctcatcctttctgctaagcagctgtctgacttctcaagcacttctctgagtttccactggtgggtggaggggagttgtacatattaaacagttcttccctggccaggtacggtggttcacatttgtaatcccagcgctttgggaggccaaggcaggtggatcacttaaggtcaggagtttgagaccagcctggccaacatggtgaaacctggtctctattgaacaatacaaaaaatagccgggtgtggtggcaaggtgcctgtaatcccagctactcggaggctgaggcaggagaattgttgaacctgggaagtggaggttgcatgggtcgaagattgccattgactccagcctggtgac

SEQ ID NO: 485899 - DNA, 943 bp, Homo sapiens
  misc_feature (599)..(599): n is a, c, g, or t
agcgggtgcacgacgccgagacaagagctcgggacccgcctaggtcgatccatgataccagtcccaggtaactatccagctcatgcatcctaccctgtgcagcctcctgggaatcaaggtataccctcagacgcgttgcaatctgcctcaggcttcagccgtactccgactgccatcatgcctactcaaagctctatcgtcctgagctctggtgcacccatagtgggcatgccacatgtcgcgcaccattgatcagtcagtagtttcctcgcgagcctctctgtttcttcccttggcccaggtctgtgtctgtgtggcgccttctactgttccacggtccccatggcttcacttagtccatgtcaggtacccactctatctcgacctgtgtctccacatgtagctgtgtgtgaaggagatgggtatcaatgctatgtgtgacgcatgaatatcgagtagccgtgggtgtctacgtgacttggcgatacattcgcgtgcctcacaaccttctcattggaataaggtcactcttcaccaatcatgtctgcgtctagccttatgactagttctatgcctaggtgggagtccagaccgttccntgcggtaaatcttcatggcgagaacgcggggaagcgttcttgcatgcgagtggtctcaccgatgagtaggtctacaaccagtctaggttgaaggaacccaacgggccagccttctgctgccggggaagagactattcgacatagccttctactcagctatcgtcacgaatgtagactgactttagttcccatattgaacctgaaagtttgccagtctgaagacacattgtaagtcggcggtgtcttctctgggtgacccacaatcttttcaaggcgacgtctaacagagagtttcaactaacgtgcaacccatgtagatggatagacagtcacctcccctaaaa

SEQ ID NO: 485900 - DNA, 559 bp, Homo sapiens
tgcaaccaaaaggagggacaaaattctcccagggttaacccaaaaaccatgggcagcataatggcaggtcctttgtttcaaacccagttccaaagtcccaggaaaaaaacaaaaagttccccttccaaaggggtgggccccccccccccattttttaggtcaaaaatttggtttaggttttaaaaaccaaaaaaaaaccccctttcccttcccggggggtggaaaccccagccagtggaaaaattttttgaaaccccagcccatggaacccgggtgggaccccggctttaacattattggaggccaaaaacaatgtttttttcaaggaactgttttaaaaaatttggcccagggggttttcacctgttaaaaatccccccccctggccccaaggacgctggggacggtttattaaaaatttgagggttttgtgaaattccccaagggtttaattggaccccatgggatccttccaattttttggaaaaaaaaaaattacttttttttcccaggattcccaacccggccaaaaaaaaaaaattgggacccaaccctggtt

SEQ ID NO: 485901 - DNA, 142 bp, Homo sapiens
ttatactgcgagaaggagcagagcaacagggataacaaacatcctgctagcatgtgaagacgcggctggagcaggagatagccacctaccgccgcctgcttggagggagaggatgcccacctagactacagtacaagaaaga

SEQ ID NO: 485902 - DNA, 117 bp, Homo sapiens
  misc_feature (2)..(2): n is a, c, g, or t
tntcaagggatctcccgtgtagctggaactaccagcatacaccaacactgccagctccagtgaggttcttataacaacacaaaagcacagaatgctacagcacactgtggagaaggg

SEQ ID NO: 485903 - DNA, 402 bp, Homo sapiens
  misc_feature (316)..(316): n is a, c, g, or t
  misc_feature (367)..(367): n is a, c, g, or t
ggcacgagccaaaacattgctacatgacacatggccgtatttttaaccattgcacttggttttcttattttctataagtcttaagtcttactcttagtcctaccacatgttacaatttttttattattcacttgtgcaatcttcataaatctgtatttgtggtatttttgcacagtctaattttgcatctgattgtaggaacactaattatagggcctacctccttgccatttttcaatctttaaaattcttttattcagtggaagactcaaattgaggacttctgcaaagtgctgaatattagttcactttttcntttccccttggaacctaattgacgattgatttgcccttctctgattaaccnaatacaagttatacagtctaatatagcctattaaa

SEQ ID NO: 485904 - DNA, 189 bp, Homo sapiens
  misc_feature (17)..(18): n is a, c, g, or t
  misc_feature (41)..(41): n is a, c, g, or t
  misc_feature (46)..(46): n is a, c, g, or t
ggtgtacggttctcccnnttcaaatataatttattatcttncactnttgcccatgttggaatagtaaggattgattgtatggattgaattgtgtccctctaaagttcatatattgaagttgtaacctcccagtacctcagaatatgactttatttggagagagggtctttacaaaggtaatcaagttta

SEQ ID NO: 485905 - DNA, 110 bp, Homo sapiens
attgtgactgcatccactatagtgctgaagtcgtcacagtacatattggaatgaagtccctatgagagcatttcctggcatgttctataactcaaagtgaggctggcagg

SEQ ID NO: 485906 - DNA, 525 bp, Homo sapiens
cgcggtggctcacgcctgtaatcccagctctcagggaggctaagaggcgggaggatagcttgagcccaggagttcgagacctgcctgggcaatatagcgagaccccgttctccagaaaaaggaaaaaaaaaaacaaaagacaaaaaaaaaaaaaaaaaaaaaaaaaaaaaaggtgggggggggccggggcccgggaaaaggtttaaaaaccacttcgcgggggggcgcgcgggggcccaagtgggggacagtggaacactgggcgccaaagcggggtcccaagagagaacccgggggcacaagaaaaaggggcggggttcctccccaaatataaaaagcgcgcgcggggggggagaaacggggaggggtttggaggaaaactctcaaagagggagaggtcaagggagggcgcaaaaagaggggggcacttaaccaaagaggggggggccacaaggcgggagccccgagaataccaaatttaagccccgggcgcgggggggggcaagagcaaaaacgagaaaaaag

SEQ ID NO: 485907 - DNA, 196 bp, Homo sapiens
aacgggtgatgcggttgcggtgagccgagattgcaccactgcactccagcctgggcgactgagtggagcggaactctgtctcaaaaaaaaaaaagggggttttttaagacctccgccttccgttggggtaggggtttgttatgggggcctaaggacacctttgcttttttaaatatggccgggaaggccaaaagat

SEQ ID NO: 485908 - DNA, 231 bp, Homo sapiens
ttttttatgcttttaggagatggggcatctcactatgttgcccaggctggtcttgaactcctgggctcaagcaatcgtctcagcctcccaaagtgctgggattacaggtgtgagccaccatgcctggcctggtctgtaactttggcttcataaccttctaaatcatgggaccaacttgaatcaacactgcatactctttcaaaaagggatgaattactcattttgtcgacg

SEQ ID NO: 485909 - DNA, 342 bp, Homo sapiens
caatggagaaagccaggtactacataaaaatacatgagcccaatgtgcccagccatcatgtgtcttatataatttttgagacagagagatccttggaacctggatctattcacaagaggggccatgacccactatcgcagcagaacttcatgggcacgtctgaagggtcgtggagcccagcccatttctgtatgcttgggctgagttccagaaagggctcttgggccttgaggacacaatggcctctgatacagggcaggacactctccatgatgtgccttgcttgcttttcttttgctttctcccctcaagctttggggcataatgtctctgctagggagg

SEQ ID NO: 485910 - DNA, 99 bp, Homo sapiens
gcggccgcctactactactactactgctcgaattcaagcttctaacgatgtacggggacatgaccaaaaaccaaaagtgcattcaaccttaccaaaaaa

SEQ ID NO: 485911 - DNA, 155 bp, Homo sapiens
atcccaaatctctcattgcggtccccactttcaccctcaggtcgtatgcggtattagctaatctttcgactagttatccccactacagggcacgttccgatgtattactcacccgttctgcactcgccatcaatctagcaagctagatcatgctg

SEQ ID NO: 485912 - DNA, 472 bp, Homo sapiens
gcttcattccgtagcacgaaggcgtcaatcattaatctcgggtgattagtcctcaggcatctccctgctctgagctgaggggtgtggtagtgttgaaagttgcagtgctctgatcacgtggttggttcgactggtaactggtccctctctggcaagagccacctcatcagtatcaactcaggaatgctggaaatcattttatgaataaaaaataaagcccctctcaaaaaaaaaaagcttcattccgtagcacgaaggcgtcaatcattaatctcgggtgattagtcctcaggcatctccctgctctgagctgaggggtgtggtagtgttgaaagttgcagtgctctgatcacgtggttggttcgactggtaactggtccctctctggcaagagccacctcatcagtatcaactcaggaatgctggaaatcattttatgaataaaaaataaagcccctctcaaaaaaaaaaa

SEQ ID NO: 485913 - DNA, 394 bp, Homo sapiens
ttacgaaaagcaggccatttaaccagtggggtcttctctgattgctggttttctgtctgcttcacggacaccgttagtgtttcctttcttccaagcaaaggagggctctgagggcaattcctgggctggtgctctggaagaaagctctagttatagggatagagtgaaagttactcagagatgttagaatatagagtagagaaagattagaaagtgaagaatgcaaaggtaagcttggaatcaagtaaaacaatctcaacacgtccatttgatggctaagataatgaaactggaaccaaggcaacagaccaggaacctgggccctagctggagaggtttttgagagcattcctgcacactttgccttggaggaagttaccttaatgctacaagt

SEQ ID NO: 485914 - DNA, 160 bp, Homo sapiens
  misc_feature (91)..(91): n is a, c, g, or t
gttggcaagaacaagcgccgttacgaaaggcggcaaaaagggagccaagaagcaaaggtgggtcagtccagttggtgtaagcaagcggttnctagttagtgtcaaagacacagttgtagtcgtcaagtagtaagccacgtaggtgccaagcatcgttggt

SEQ ID NO: 485915 - DNA, 425 bp, Homo sapiens
gttttggtgctctgcccccaagagattcctgaataatactgtgaatttggatgtgagccccacgatgtgaatttattataaaagttcctctagttgattcctgatacacataaaaagttgaaaaaattggcccatgtgtggtgtctcacgcctgtaatcccagcactttgggagtccaagatggacagatcactggagcctaggagttccagaccagtctaggcaacatggtgaaaccccatctatctttataaaaaatataaaagttagccaagtgtggtggtgcacacctgtagtctcagctacttgggaggctgaaatgtgagggtcacttgagcccaagagatcgaggctgcagtgagccatgatcacaccactgcactccagcctgggtgacagagcaaaaccctgtttaaaaaaaaaaa

SEQ ID NO: 485916 - DNA, 114 bp, Homo sapiens
gccgtgtagcgggtaagggcgatcagtgtggggaggaatgggagtgggttctgtatgttcaaactgtcatttatatctctttaccgtatgttagatctagcgagtaatgtgatt

SEQ ID NO: 485917 - DNA, 397 bp, Homo sapiens
  misc_feature (149)..(149): n is a, c, g, or t
tatcgccaacaccaagacagctcaccaacattcattcactatggtttcttcagaaaggtttgtctgaaggttaaaaatgctttctatttctatgtcagtgacagctttttttttttttttttttttttttttttttttttttttttttngggggaaaaaattttttttttcccccccgggggggggggggggggggttttttgttttttttaaagttttttccccgggttaaaaaattttttttttttcccccccccggggggggggggtttcccggccccccccccccccccggttttttttttttttttttgggggggggggggtttcccctttggggggcgggtttttttaacccccgggggaaaaggaaccccccttcccccccccccaaaag

SEQ ID NO: 485918 - DNA, 603 bp, Homo sapiens
  misc_feature (598)..(598): n is a, c, g, or t
caacacttataatttatcttaatttattcttttccccattctactcatctttcccataaatttaacacctttttttccactaattcatcccttctattttatactctccaacctgttcttgctgctcttgtctgcctttgcatctgctcttgttcctcctattttgctgacctgaatgcatttccctgtttgtgtattccatcatcctctgtgtgaattaatttgtgttcttgtcatctgtgacaataattgactttaattgtatccctttattccttcatttccttccattacccccactcccttattttcttcaacattttcttcatttacactatcctgtaataacattacttaatcatataattgcctttaccataatcattaacctatacaatcacttttgcattttcttacttgccaactattgtattctctactgaccatacatataaatattgatttttctatcaaataccttaaataatcctttattcatcttgctgatttaaccatcttatatactataatatgcctttgtgtgctccatttcaatcttgtttgtccttgttattttttatataacatttctttcatntattc

SEQ ID NO: 485919 - DNA, 1334 bp, Homo sapiens
gaatggctctggtagtgccttcctctgtgccagcgagacctccatgcatgggaatgcccttcactctgtagtgtgctcgagccccaatcgagtgatacatgtgtggtgtggtggtgctggtgctggactacgcagcgtagactgctgtaggatttcaaacttactgttttttgattcctgtacattttacatgtcgcacagcaacgcagtctcacagcaatggcaggctagctccattcacagccatgacactgttctaactagtgatagacagctcttcagctgttggttattctctcttctatcgcgtctgcgtcttcactgtgcccacacaattcatacgtatacccgacacacatcctgaccccgatactacgccatccgcctatactctaatacacccagaattgactgctcatgcatatgctacatttgctatacttctacttccctaaacttggttgctgccaaacgattcaaccaatcctcaccacacacgaaaacgcgacacaacgccacttgcgagcgctcacacgccaagctcatgactgtcaccccaagacagacgacccacgtctccattgaaacggaggagcacacgcgacatgcgcaggccactgcagcatcctagcacgtaacgacacccaacacgcaaggaggcaccccaaccgaccacaccaatgccacccaaggcccccggccacgcaccactgccccccacgaccacatcccaccgtcctaccatcgaaaccttgacacagcactccacaaacggggccgaagcaccacaccgatgaccccaatttgactcgcccccacgaccattaatgggccacacacagtacatgcatcgaccaccacacgtaaccgtacgctatctccacctatctttggacgacactggaacaatcagaacacgggcacatgagtcggcaatacaatacacatccacccctcgcgtgagcaactagaacatactgtacaaactataagccgcgaacggtggaaatgactgcgtgtacactggacacaatacgatgattacgctcccgcttctatctcaacataccatgacatttgctaccttgcccccttccactacgccaacgtcacccttctgtcaccctggtccacagccagcaaacaatcgcctctacaaccgcgggaaccacaacctcattgacaccaaacccagccctctcaccataagggctacactacatccaggttcatgcatgcacaacaatgggtccatcctagtgcctcatgctattccagttggctgccaggtgtctaccttgcacatctagcgagcacggctacacggacacaaa

SEQ ID NO: 485920 - DNA, 832 bp, Homo sapiens
tgagcggagtgggaacggtgcccagcgccggacgaggcccagccagtctggggtctggcctggcctgcccctccagcctactggagccggcagcctggagccggagccggagccggagccggagccttatgccgagagctctgaggacgtctacctggcccagtcatcgcggtccggcgatgtgggccccgcttccctgtggcgcgttgccgcccagtgccggggagcgtcgctctacgcgcgagggtcttgaggctgcgggctgcccccgggggcagaggtgggaaggccatggcgcttgacggcccggaaacccttcttgactgggaaccgttccgaggacgtgggcccagtacattggccaccggataggtcctgcaggaatagcatgcaagactggtatcatccgaaggatcgaggccaaagacattttaaaccttgaaaggaattcttaacctacattggctacgacacacattcaataccattcttggggcacaaaaggcccccgtcccaaaacacaagtaagcgtgggcacaccattgtagcaggaagagaaagcttcgtcggttggccaccagtgcgacacccgggagaacccaagagcgcaacgaggacgaggaaaaccatgtttcacacactgtagaaggcacttgacaatggggggccccaaacgcgtgaagttcacaacagaccacgggagagagttgcgagtatagaaggcattggggcacccacgcgttcatagcccaggcgatcccacgaattaagggtagagcccctagggcatacgcagtgggaaccctccatacatagaagagcttggtaaata

SEQ ID NO: 485921 - DNA, 222 bp, Homo sapiens
  misc_feature (163)..(163): n is a, c, g, or t
ttcatagaggatcccccgggcgccacagcttctcagggatggaaacatgcccgcattgggctagctcttagacatttgaagagcccttgcccagcgcttcatggaaccttccatcgacaagggcacaggggctgatctgggactataagcgcagcgtccattnaatgagcctaggcctgccgatttccactagttgagggcgtggttcctcatggctggcgt

SEQ ID NO: 485922 - DNA, 151 bp, Homo sapiens
gacattggttaatcagtaattaaggcaaatatactgaatcatcagaagtaaaacaccattcagctactaattcacaggcagagatccaaggtcattcctcatactaaaactgtatcaaagcaaaaggatgcataaaatattaccgcagttc

SEQ ID NO: 485923 - DNA, 143 bp, Homo sapiens
ctttctcgttgccatatgaacaccctagcccctcctcccttgaattactggccctgatggagcatggacttatgctaacttgcaacagaatcacctaatggggccaggtattccctatggccttactccattgcctcacaggc

SEQ ID NO: 485924 - DNA, 533 bp, Homo sapiens
  misc_feature (107)..(107): n is a, c, g, or t
gtagctgacttgcaggagccccagggctcctctgaaagaagaattccaaccacagcaaccacagtgcccctgagtgaaataaacagaaatttcggcgtgcaccgggntacggagaccagaacccctggaggagaatggagaaggccagaaccacaactaagggacgatgtcagcagggagaagagctgggaatggggctcgcagttcgcccacggaggatatccagaaaccgagtcgggtaggcggtggggctggttgaatatccaccctcgggtatggacaggtgtgaggagtgtctaaggagctcgggggtgacagcccagctctactaaaaaaaatacaaaaattagccgggcgtggtgacacaagctgtcccctgacacagagaggcagaggcaccctctgcaggataacaagcaccctgtgcgctgctgggctttgcttgtttctctaccctgagtgaagcctggagacccttcctcaccggtgcctctgcagtgcctgggaggaataaagcctggagacccctcgtg

SEQ ID NO: 485925 - DNA, 873 bp, Homo sapiens
gcgtgaccactacccctagagagccactatgggtgaaggagataaggactcatatcacacattgtcgacatcgtgacacatacattcggagccagtgcaccactactgggccatcggatctataagtgcgatggaatcgacaaacgaaccatggactaatttgagaacgaggctgctcgatatgggaagagggcgtccttgtcagacgttatgcactgcagtcgtctggataaagcgtgaaaagctgaacggtgaacgtgcgtatcaccaagttgatatctcctagtgtacatactttagaagacacagtgaacgtacttatgttgacgtatcattagtatgcccccagggagcacatgagacgtttatcaatagaacatgattaccgggacaacttcaggctgactgtgctgtcctgatgtgtggcatgcgtggtgttggtgagatctgaaggctggtatctccaagagagtgggcagaccccgagagcaatgcccttctggcttacacactggtgtgtgagacaactaaattgtcgcgtgttagcgaatgtggattccactgaagccacccatacagccagaagagatatgaggaaagttgttagcggacagtccagccctctacatttaggaaatgtttggttgacaacctccgacagcgatgtagccattgtgtgccaatttcttggttggaatggtgacaaacatgctggagccacagtgcttacatggcttggttccaggggatggcaaagtcccccgtaaggatggccagtggcaggggaaccacgcctgttggagggtcttggaatggattctaacacaatcgttcaatgacaaagcttttgctggctctccaggtttttccaag

SEQ ID NO: 485926 - DNA, 210 bp, Homo sapiens
tatcttcccaggctcacacatgtgggaaatgaattgccatcgttagtacagctgccgtggtttatgatatttggatctggcagcccgatacagaggtagataccatgtgtagagagaaactggcagagaactaggagagttgaagggtaccccacccgtccttgatttctacatgaggaaatggaggctgtgagtgctggaactgagcgg

SEQ ID NO: 485927 - DNA, 655 bp, Homo sapiens
  misc_feature (164)..(164): n is a, c, g, or t
gctacaaagatgccatggagcagtgccacaggttacagagtgcgtctccctctgttgctgagcgcagtggtgcgccgtgcctttcttggactcacagaccggagtagcccagagcagttgttgacatctggatggataagcgatcaccgtgggtccaggattgngctccggtaaagctgtacttcctaccctgtcccgtgagtcttggtggaaaaagctgtgagatgcccatcgcacgactgatggatcacatgacgtttccgttccacagtcatatgtaatgcctagcacagcaggaccaggacctctgtatacgtagacggaggggcgcatgactcttcttcgagtggatcgcgtcgatgttaagttattacgagagacctcatgatgttggcagacgagcattgtatctcgcgcacattgtgggagcacacgtcgaagggggattgctcgctcggcggaaattctctccctggaaggtattggcagtggggattgggaagcaaagggcacttgggggaaccgtaccggtttttgcccgtggctttggaaagccaaaatccaggtacggtagtccgccgttatagagcccgtggatacccgttatggagatacctaggaatgcaacttttcccgtgaggacttgaactcgcct

SEQ ID NO: 485928 - DNA, 139 bp, Homo sapiens
ccgcggtatagaggatcccccttccccagtggttatagtggcctcatcacagccctccagtagatatcaaaggagacaacgccattcttgacgagatcactcccaagcgtattggagattgtcccaatacttatgacct

SEQ ID NO: 485929 - DNA, 314 bp, Homo sapiens
agctcggtacctggcactgcggttatagcacgacttaggtagctctcagctgacatcaccagtcagtcccctatgtcctctaactcagatcccctttatggtctccccatactaatccatcctggtcacatcctccccttccagtcagaagagttaacgtgccaagcatcttccttcatattgaagagctttaacggataactattacacattgggagagtactctgtgacggtagctcaaggactcttgccgtacattaagccagtcagttgcaatgtgcaagacaggctgcttgccgggccgccctcggaac
